(19) United States
(12) Patent Application Publication
(10) Pub. No.: US 2024/0093182 A1
(43) Pub. Date: Mar. 21, 2024

(54) EUKARYOTIC DNA REPLICATION ORIGINS, AND VECTOR CONTAINING THE SAME

(71) Applicants: CENTRE NATIONAL DE LA RECHERCHE SCIENTIFIQUE, Paris (FR); UNIVERSITÉ DE MONTPELLIER, Montpellier (FR)

(72) Inventors: Marcel MECHALI, Montferrier-sur-Lez (FR); Ildem AKERMAN, Birmingham (GB); Nadège GABORIT, Valflaunes (FR)

(73) Assignees: CENTRE NATIONAL DE LA RECHERCHE SCIENTIFIQUE, Paris (FR); UNIVERSITÉ DE MONTPELLIER, Montpellier (FR)

(21) Appl. No.: 18/041,902

(22) PCT Filed: Sep. 6, 2021
(86) PCT No.: PCT/EP2021/074523

§ 371 Date: Feb. 16, 2023

(30) Foreign Application Priority Data
Sep. 7, 2020 (EP) 20305987.8

(51) Int. Cl. C12N 15/10; C12N 15/85

(52) U.S. Cl. CPC C12N 15/1093; C12N 15/85; C12N 2820/85

(57) ABSTRACT

A method for isolating a mammalian genomic DNA replication origin, the method including: isolating the genomic DNA molecules; identifying 500 bp windows within the DNA molecules; isolating from the genomic DNA molecules the fragments that have a size from 500 pb up 6000 pb; selecting a DNA replication origin that is able, when contained in the DNA of an Eukaryotic cell, to produce nascent DNA, and to initiate DNA replication; and isolating the origin.

[0001] The invention relates to eukaryotic DNA replication origins and vector containing the same.

[0002] During each cell division, a human cell will replicate approximately two meters of DNA within the S-phase time constraints. To achieve this, DNA replication initiates from thousands of regions that are called DNA replication origins and are spread across the genome. The positioning of DNA replication initiation sites (IS) in the genome (origin specification) is poorly understood in metazoans. In prokaryotes and viruses, usually a single, sequence-specific origin exists, while in the eukaryote Saccharomyces cerevisiae, DNA replication initiates from AT-rich consensus sequences that are bound by the yeast origin recognition complex (ORC). By contrast, in fruit fly and mouse cells, the presence of a G-rich DNA sequence element, (Origin G-rich Repeated Element, OGRE), around 300 bp upstream of the IS has been reported in more than 60% of origins. CA/GT-rich motifs and poly-A/T tracks have also been detected at IS in mouse cells. OGRE elements may contain CpG islands (CpGi) and potential G-quadruplex (G4) elements, in a nucleosome-free region. However, only a fraction of all putative G4 elements in the genome host a nearby origin, and CpGi are present only in a fraction of origins. This indicates that other features contribute to replication origin selection or activation.

[0003] So there is a need to better understand how a replication origin works, and how to identify them.

[0004] Some information is known in the mouse regarding the mammalian replication origins.

[0005] For instance, international application WO2011023827 discloses sequence of replication origin core, and in particular the OGRE sequences. But this document fails to disclose the sequence of fully functional replication origins or origins in the human genome.

[0006] So one aim of the invention is obviate this drawback.

[0007] Another aim of the invention is to provide a method for identifying and isolating the functional DNA sequences that can self-replicate, in an appropriated context.

[0008] A further aim of the invention is to provide a DNA vector that can replicate in a host mammalian cell as the chromosome does, since these vectors contain a functional mammalian replication origin.

[0009] Thus, the invention relates to a method for isolating a mammalian genomic DNA replication origin, the method comprising:
[0010] a—isolating the genomic DNA molecules from a somatic cell of a mammal;
[0011] b—dividing the genomic DNA molecules into 500 bp windows every 100 pb along said genomic DNA molecules,
[0012] c—identifying a first 500 bp windows such that:
   [0013] the first 500 bp window has at least 172 G nucleotides,
   [0014] the first 500 bp window has no more than 105 A or T nucleotides,
   [0015] a second 500 bp window immediately adjacent to the first 500 bp window at the 3′-end of the window has a G content lower than the 172 and higher than 125;
   [0016] wherein the variation of the G content between the first and the second 500 bp window is ranging from 8% to 40%;
   [0017] the G content in a large window consisting of 8 consecutive 500 bp-windows constituted by a third 500 bp windows adjacent to a fourth 500 bp windows, itself adjacent to a fifth 500 bp windows, itself adjacent to the first 500 bp windows, itself adjacent to the second 500 bp windows, itself adjacent to a sixth 500 bp windows, itself adjacent to a seventh 500 bp windows, itself adjacent to a eighth 500 bp windows, is higher than 960;
[0018] d—isolating from the genomic DNA molecules the fragments that have a size from 500 bp up 6000 bp corresponding to putative mammalian genomic DNA replication origin, wherein the putative mammalian genomic DNA replication origin consists at its 5′end of the first 500 bp window,
[0019] e—selecting from said putative mammalian genomic DNA replication origin a fragment that is able, when contained in the DNA of a Eukaryotic cell, to produce nascent DNA, and to initiate DNA replication; and
[0020] f—Isolating said fragment, wherein said fragment is a mammalian genomic DNA replication origin.

[0021] The invention is based on the observation made by the inventors that the core DNA replication origins can be identified and isolated by implementing the above-mentioned described method.

[0022] This method allows to identify the mammalian replication origins that are fully active and present in all the mammal genomes.

[0023] The method according to the invention is carried out in two steps: a step of identifying the core origin sequence, and a step selecting the sequence that match with experimental data.

[0024] Step a).

[0025] In step A, the genomic DNA of a mammalian cell is extracted according to one method well known in art, such as phenol/chloroform method, sequenced and bioinformatically assembled.

[0026] Otherwise, the sequence of the genome as published in database can be used in order to carry out step a. For instance, for mouse and human genomes and others the complete sequence of the genome is available on University of California, Santa Cruz (UCSC) genome browser (available at https://genome.ucsc.edu):

[0027] The skilled person could adapt the extraction of DNA for that purpose.

[0028] Step b) and c)

[0029] These two steps correspond to the identification step.

[0030] Step b) is carried out after having obtained the sequence of the DNA molecules contained in the mammal cells. For that purpose, any sequencing technique can be used in order to obtain the complete sequence of the DNA molecules, i.e. the complete sequences of the DNA of each chromosome contained in a mammal cell. This will be followed by assembly of the DNA sequences to obtain the full sequence of a genome.

[0031] After having obtained the sequence, the sequences are divided into 500 bp windows every 100 bp along the molecules (also known as the sliding windows method). This is done both for the Watson and the Crick strand.

[0032] For instance, in a 1000 bp molecule, six 500 pb windows can be obtained: from position 1 to position 500, from position 100 to position 600, from position 200 to position 700, from position 300 to position 800, from position 400 to position 900 and from position 500 to position 1000. In the full human genome, many 500 bp can be therefore generated.

[0033] This step can be easily carried out by a computer program, for instance bedtools suite.

[0034] Step c is formally the step of selection of the sequences of interest. The inventors identify that the replication origins in mammal contain a 500 bp region that meet the following criteria:
[0035] a 500 bp window of interest has at least 172 G nucleotides, and no more than 105 A or T nucleotides,
[0036] when considering a determined 500 bp window, the immediately adjacent 500 bp window that starts at the 3′-end of the 500 pb the determined window has a G content lower than the 172 and higher than 125; wherein the variation of the G content between a determined 500 bp window and its adjacent window is ranging from 8% to 40%. Here this means that if the 500 bp window contains 172 bp, then the G content of the adjacent region varies from 125 to 158 (in fact from 105 to 158, but since the G content shall be higher than 125, the range is 125 to 158); and
[0037] in a large window consisting of 8 consecutive 500 bp-windows constituted by a third 500 bp windows adjacent to a fourth 500 bp windows, itself adjacent to a fifth 500 bp windows, itself adjacent to the first 500 bp windows, itself adjacent to the second 500 bp windows, itself adjacent to a sixth 500 bp windows, itself adjacent to a seventh 500 bp windows, itself adjacent to a eighth 500 bp windows, the average G content along the 8 consecutive windows is higher than 960.

[0038] As mentioned in the example, the inventors identified that the replication origins in mammals, despite they do not share a stricto sensu consensus sequence, are characterized in that in 5′ of the initiation site of the transcription a 500 pb G-rich region is present, and in 3′ of the initiation site, the region is not a G-rich region. This is clearly illustrated in FIG. 72, left panel.

[0039] Here again, this step can be carried out by a computer program.

[0040] After having identified, along the genome of a mammal cell, all the 500 bp windows that meet the above criteria, step d) is carried out.

[0041] Step d)

[0042] In step d), when the 500 bp windows of interest have been identified, fragments of the genome that have a size from 500 pb to 6000 bp are selected. These fragments correspond to the molecules of DNA that may contain a replication origin. They are called “putative replication origins”.

[0043] By “from 500 pb to 6000 bp”, it is meant in the invention molecules having a size of 500 bp, 510 bp, 520 bp, 530 bp, 540 bp, 550 bp, 560 bp, 570 bp, 580 bp, 590 bp, 600 bp, 610 bp, 620 bp, 630 bp, 640 bp, 650 bp, 660 bp, 670 bp, 680 bp, 690 bp, 700 bp, 710 bp, 720 bp, 730 bp, 740 bp, 750 bp, 760 bp, 770 bp, 780 bp, 790 bp, 800 bp, 810 bp, 820 bp, 830 bp, 840 bp, 850 bp, 860 bp, 870 bp, 880 bp, 890 bp, 900 bp, 910 bp, 920 bp, 930 bp, 940 bp, 950 bp, 960 bp, 970 bp, 980 bp, 990 bp, 1000 bp, 1010 bp, 1020 bp, 1030 bp, 1040 bp, 1050 bp, 1060 bp, 1070 bp, 1080 bp, 1090 bp, 1100 bp, 1110 bp, 1120 bp, 1130 bp, 1140 bp, 1150 bp, 1160 bp, 1170 bp, 1180 bp, 1190 bp, 1200 bp, 1210 bp, 1220 bp, 1230 bp, 1240 bp, 1250 bp, 1260 bp, 1270 bp, 1280 bp, 1290 bp, 1300 bp, 1310 bp, 1320 bp, 1330 bp, 1340 bp, 1350 bp, 1360 bp, 1370 bp, 1380 bp, 1390 bp, 1400 bp, 1410 bp, 1420 bp, 1430 bp, 1440 bp, 1450 bp, 1460 bp, 1470 bp, 1480 bp, 1490 bp, 1500 bp, 1510 bp, 1520 bp, 1530 bp, 1540 bp, 1550 bp, 1560 bp, 1570 bp, 1580 bp, 1590 bp, 1600 bp, 1610 bp, 1620 bp, 1630 bp, 1640 bp, 1650 bp, 1660 bp, 1670 bp, 1680 bp, 1690 bp, 1700 bp, 1710 bp, 1720 bp, 1730 bp, 1740 bp, 1750 bp, 1760 bp, 1770 bp, 1780 bp, 1790 bp, 1800 bp, 1810 bp, 1820 bp, 1830 bp, 1840 bp, 1850 bp, 1860 bp, 1870 bp, 1880 bp, 1890 bp, 1900 bp, 1910 bp, 1920 bp, 1930 bp, 1940 bp, 1950 bp, 1960 bp, 1970 bp, 1980 bp, 1990 bp, 2000 bp, 2010 bp, 2020 bp, 2030 bp, 2040 bp, 2050 bp, 2060 bp, 2070 bp, 2080 bp, 2090 bp, 2100 bp, 2110 bp, 2120 bp, 2130 bp, 2140 bp, 2150 bp, 2160 bp, 2170 bp, 2180 bp, 2190 bp, 2200 bp, 2210 bp, 2220 bp, 2230 bp, 2240 bp, 2250 bp, 2260 bp, 2270 bp, 2280 bp, 2290 bp, 2300 bp, 2310 bp, 2320 bp, 2330 bp, 2340 bp, 2350 bp, 2360 bp, 2370 bp, 2380 bp, 2390 bp, 2400 bp, 2410 bp, 2420 bp, 2430 bp, 2440 bp, 2450 bp, 2460 bp, 2470 bp, 2480 bp, 2490 bp, 2500 bp, 2510 bp, 2520 bp, 2530 bp, 2540 bp, 2550 bp, 2560 bp, 2570 bp, 2580 bp, 2590 bp, 2600 bp, 2610 bp, 2620 bp, 2630 bp, 2640 bp, 2650 bp, 2660 bp, 2670 bp, 2680 bp, 2690 bp, 2700 bp, 2710 bp, 2720 bp, 2730 bp, 2740 bp, 2750 bp, 2760 bp, 2770 bp, 2780 bp, 2790 bp, 2800 bp, 2810 bp, 2820 bp, 2830 bp, 2840 bp, 2850 bp, 2860 bp, 2870 bp, 2880 bp, 2890 bp, 2900 bp, 2910 bp, 2920 bp, 2930 bp, 2940 bp, 2950 bp, 2960 bp, 2970 bp, 2980 bp, 2990 bp, 3000 bp, 3010 bp, 3020 bp, 3030 bp, 3040 bp, 3050 bp, 3060 bp, 3070 bp, 3080 bp, 3090 bp, 3100 bp, 3110 bp, 3120 bp, 3130 bp, 3140 bp, 3150 bp, 3160 bp, 3170 bp, 3180 bp, 3190 bp, 3200 bp, 3210 bp, 3220 bp, 3230 bp, 3240 bp, 3250 bp, 3260 bp, 3270 bp, 3280 bp, 3290 bp, 3300 bp, 3310 bp, 3320 bp, 3330 bp, 3340 bp, 3350 bp, 3360 bp, 3370 bp, 3380 bp, 3390 bp, 3400 bp, 3410 bp, 3420 bp, 3430 bp, 3440 bp, 3450 bp, 3460 bp, 3470 bp, 3480 bp, 3490 bp, 3500 bp, 3510 bp, 3520 bp, 3530 bp, 3540 bp, 3550 bp, 3560 bp, 3570 bp, 3580 bp, 3590 bp, 3600 bp, 3610 bp, 3620 bp, 3630 bp, 3640 bp, 3650 bp, 3660 bp, 3670 bp, 3680 bp, 3690 bp, 3700 bp, 3710 bp, 3720 bp, 3730 bp, 3740 bp, 3750 bp, 3760 bp, 3770 bp, 3780 bp, 3790 bp, 3800 bp, 3810 bp, 3820 bp, 3830 bp, 3840 bp, 3850 bp, 3860 bp, 3870 bp, 3880 bp, 3890 bp, 3900 bp, 3910 bp, 3920 bp, 3930 bp, 3940 bp, 3950 bp, 3960 bp, 3970 bp, 3980 bp, 3990 bp, 4000 bp, 4010 bp, 4020 bp, 4030 bp, 4040 bp, 4050 bp, 4060 bp, 4070 bp, 4080 bp, 4090 bp, 4100 bp, 4110 bp, 4120 bp, 4130 bp, 4140 bp, 4150 bp, 4160 bp, 4170 bp, 4180 bp, 4190 bp, 4200 bp, 4210 bp, 4220 bp, 4230 bp, 4240 bp, 4250 bp, 4260 bp, 4270 bp, 4280 bp, 4290 bp, 4300 bp, 4310 bp, 4320 bp, 4330 bp, 4340 bp, 4350 bp, 4360 bp, 4370 bp, 4380 bp, 4390 bp, 4400 bp, 4410 bp, 4420 bp, 4430 bp, 4440 bp, 4450 bp, 4460 bp, 4470 bp, 4480 bp, 4490 bp, 4500 bp, 4510 bp, 4520 bp, 4530 bp, 4540 bp, 4550 bp, 4560 bp, 4570 bp, 4580 bp, 4590 bp, 4600 bp, 4610 bp, 4620 bp, 4630 bp, 4640 bp, 4650 bp, 4660 bp, 4670 bp, 4680 bp, 4690 bp, 4700 bp, 4710 bp, 4720 bp, 4730 bp, 4740 bp, 4750 bp, 4760 bp, 4770 bp, 4780 bp, 4790 bp, 4800 bp, 4810 bp, 4820 bp, 4830 bp, 4840 bp, 4850 bp, 4860 bp, 4870 bp, 4880 bp, 4890 bp, 4900 bp, 4910 bp, 4920 bp, 4930 bp, 4940 bp, 4950 bp, 4960 bp, 4970 bp, 4980 bp, 4990 bp, 5000 bp, 5010 bp, 5020 bp, 5030 bp, 5040 bp, 5050 bp, 5060 bp, 5070 bp, 5080 bp, 5090 bp, 5100 bp, 5110 bp, 5120 bp, 5130 bp, 5140 bp, 5150 bp, 5160 bp, 5170 bp, 5180 bp, 5190 bp, 5200 bp, 5210 bp, 5220 bp, 5230 bp, 5240 bp, 5250 bp, 5260 bp, 5270 bp, 5280 bp, 5290 bp, 5300 bp, 5310 bp, 5320 bp, 5330 bp, 5340 bp, 5350 bp, 5360 bp, 5370 bp, 5380 bp, 5390 bp, 5400 bp, 5410 bp, 5420 bp, 5430 bp, 5440 bp, 5450 bp, 5460 bp, 5470 bp, 5480 bp, 5490 bp, 5500 bp, 5510 bp, 5520 bp, 5530 bp, 5540 bp, 5550 bp, 5560 bp, 5570 bp, 5580 bp, 5590 bp, 5600 bp, 5610 bp, 5620 bp, 5630 bp, 5640 bp, 5650 bp, 5660 bp, 5670 bp, 5680 bp, 5690 bp, 5700 bp, 5710 bp, 5720 bp, 5730 bp, 5740 bp, 5750 bp, 5760 bp, 5770 bp, 5780 bp, 5790 bp, 5800 bp, 5810 bp, 5820 bp, 5830 bp, 5840 bp, 5850 bp, 5860 bp, 5870 bp, 5880 bp, 5890 bp, 5900 bp, 5910 bp, 5920 bp, 5930 bp, 5940 bp, 5950 bp, 5960 bp, 5970 bp, 5980 bp, 5990 bp or 6000 bp.

[0044] Step e)

[0045] From the molecules selected in step d), only are retained the molecules that produce nascent DNA, and initiate DNA replication. For this purpose, the regions of the genome that produce nascent DNA (i.e. the small molecules that are synthesized when the origin loop is opened) is identified through experimental procedures detailed below:

[0046] Identification of Nascent DNA is well known in the art, and it can be carried out by using the SNS-seq protocol as described in the example below (see Nascent strand isolation (SNS-seq)).

[0047] If a fragment isolated at step d is overlapping (at least 1 bp) with the nascent DNA that is experimentally identified, then the fragment contains, or corresponds to, a replication origin according to the invention.

[0048] Therefore, fragments that share all the above-mentioned criteria are true and accurate replication origin of mammal cells, and if these fragments are inserted in the genome of a mammal cell, or if they are placed in presence of all the proteins necessary for initiating DNA replication, then a replication will occur from these fragments.

[0049] Step f)

[0050] This step is a step of isolating the fragment of interest, for instance for cloning purpose or for further studies.

[0051] in the invention, mammals refer in particular to rodent and human, more preferably mice and humans.

[0052] According to the invention, step d) and step e) can be inverted. Therefore the method comprises the steps of:
[0053] a—isolating the genomic DNA molecules from a somatic cell of a mammal;
[0054] b—dividing the genomic DNA molecules into 500 bp windows every 100 pb along said genomic DNA molecules,
[0055] c—identifying a first 500 bp windows such that:
   [0056] the first 500 bp window has at least 172 G nucleotides,
   [0057] the first 500 bp window has no more than 105 A or T nucleotides,
   [0058] a second 500 bp window immediately adjacent to the first 500 bp window at the the 3′-end of the window has a G content lower than the 172 and higher than 125;
   [0059] wherein the variation of the G content between the first and the second 500 bp window is ranging from 8% to 40%;
   [0060] the G content in a large window consisting of 8 consecutive 500 bp-windows constituted by a third 500 bp windows adjacent to a fourth 500 bp windows, itself adjacent to a fifth 500 bp windows, itself adjacent to the first 500 bp windows, itself adjacent to the second 500 bp windows, itself adjacent to a sixth 500 bp windows, itself adjacent to a seventh 500 bp windows, itself adjacent to a eighth 500 bp windows, is higher than 960;
[0061] d—identifying in the whole genome of the somatic cell of a mammal the DNA molecules that are able to produce nascent DNAs, and to initiate DNA replication, said molecules having a size ranging from 500 bp up to 6000 bp and being putative mammalian genomic DNA replication origin;
[0062] e—selecting from said putative mammalian genomic DNA replication origins the DNA molecules that consist at their 5′end of the first 500 bp window and which are mammalian genomic DNA replication origin; and
[0063] f—Isolating mammalian genomic DNA replication origins.

[0064] Advantageously, the invention relates to the method mentioned above, wherein said putative mammalian genomic DNA replication origin have size varying from 500 bp to 4000 bp.

[0065] By “from 500 pb to 4000 bp”, it is meant in the invention molecules having a size of 550 bp, 560 bp, 570 bp, 580 bp, 590 bp, 600 bp, 610 bp, 620 bp, 630 bp, 640 bp, 650 bp, 660 bp, 670 bp, 680 bp, 690 bp, 700 bp, 710 bp, 720 bp, 730 bp, 740 bp, 750 bp, 760 bp, 770 bp, 780 bp, 790 bp, 800 bp, 810 bp, 820 bp, 830 bp, 840 bp, 850 bp, 860 bp, 870 bp, 880 bp, 890 bp, 900 bp, 910 bp, 920 bp, 930 bp, 940 bp, 950 bp, 960 bp, 970 bp, 980 bp, 990 bp, 1000 bp, 1010 bp, 1020 bp, 1030 bp, 1040 bp, 1050 bp, 1060 bp, 1070 bp, 1080 bp, 1090 bp, 1100 bp, 1110 bp, 1120 bp, 1130 bp, 1140 bp, 1150 bp, 1160 bp, 1170 bp, 1180 bp, 1190 bp, 1200 bp, 1210 bp, 1220 bp, 1230 bp, 1240 bp, 1250 bp, 1260 bp, 1270 bp, 1280 bp, 1290 bp, 1300 bp, 1310 bp, 1320 bp, 1330 bp, 1340 bp, 1350 bp, 1360 bp, 1370 bp, 1380 bp, 1390 bp, 1400 bp, 1410 bp, 1420 bp, 1430 bp, 1440 bp, 1450 bp, 1460 bp, 1470 bp, 1480 bp, 1490 bp, 1500 bp, 1510 bp, 1520 bp, 1530 bp, 1540 bp, 1550 bp, 1560 bp, 1570 bp, 1580 bp, 1590 bp, 1600 bp, 1610 bp, 1620 bp, 1630 bp, 1640 bp, 1650 bp, 1660 bp, 1670 bp, 1680 bp, 1690 bp, 1700 bp, 1710 bp, 1720 bp, 1730 bp, 1740 bp, 1750 bp, 1760 bp, 1770 bp, 1780 bp, 1790 bp, 1800 bp, 1810 bp, 1820 bp, 1830 bp, 1840 bp, 1850 bp, 1860 bp, 1870 bp, 1880 bp, 1890 bp, 1900 bp, 1910 bp, 1920 bp, 1930 bp, 1940 bp, 1950 bp, 1960 bp, 1970 bp, 1980 bp, 1990 bp, 2000 bp, 2010 bp, 2020 bp, 2030 bp, 2040 bp, 2050 bp, 2060 bp, 2070 bp, 2080 bp, 2090 bp, 2100 bp, 2110 bp, 2120 bp, 2130 bp, 2140 bp, 2150 bp, 2160 bp, 2170 bp, 2180 bp, 2190 bp, 2200 bp, 2210 bp, 2220 bp, 2230 bp, 2240 bp, 2250 bp, 2260 bp, 2270 bp, 2280 bp, 2290 bp, 2300 bp, 2310 bp, 2320 bp, 2330 bp, 2340 bp, 2350 bp, 2360 bp, 2370 bp, 2380 bp, 2390 bp, 2400 bp, 2410 bp, 2420 bp, 2430 bp, 2440 bp, 2450 bp, 2460 bp, 2470 bp, 2480 bp, 2490 bp, 2500 bp, 2510 bp, 2520 bp, 2530 bp, 2540 bp, 2550 bp, 2560 bp, 2570 bp, 2580 bp, 2590 bp, 2600 bp, 2610 bp, 2620 bp, 2630 bp, 2640 bp, 2650 bp, 2660 bp, 2670 bp, 2680 bp, 2690 bp, 2700 bp, 2710 bp, 2720 bp, 2730 bp, 2740 bp, 2750 bp, 2760 bp, 2770 bp, 2780 bp, 2790 bp, 2800 bp, 2810 bp, 2820 bp, 2830 bp, 2840 bp, 2850 bp, 2860 bp, 2870 bp, 2880 bp, 2890 bp, 2900 bp, 2910 bp, 2920 bp, 2930 bp, 2940 bp, 2950 bp, 2960 bp, 2970 bp, 2980 bp, 2990 bp, 3000 bp, 3010 bp, 3020 bp, 3030 bp, 3040 bp, 3050 bp, 3060 bp, 3070 bp, 3080 bp, 3090 bp, 3100 bp, 3110 bp, 3120 bp, 3130 bp, 3140 bp, 3150 bp, 3160 bp, 3170 bp, 3180 bp, 3190 bp, 3200 bp, 3210 bp, 3220 bp, 3230 bp, 3240 bp, 3250 bp, 3260 bp, 3270 bp, 3280 bp, 3290 bp, 3300 bp, 3310 bp, 3320 bp, 3330 bp, 3340 bp, 3350 bp, 3360 bp, 3370 bp, 3380 bp, 3390 bp, 3400 bp, 3410 bp, 3420 bp, 3430 bp, 3440 bp, 3450 bp, 3460 bp, 3470 bp, 3480 bp, 3490 bp, 3500 bp, 3510 bp, 3520 bp, 3530 bp, 3540 bp, 3550 bp, 3560 bp, 3570 bp, 3580 bp, 3590 bp, 3600 bp, 3610 bp, 3620 bp, 3630 bp, 3640 bp, 3650 bp, 3660 bp, 3670 bp, 3680 bp, 3690 bp, 3700 bp, 3710 bp, 3720 bp, 3730 bp, 3740 bp, 3750 bp, 3760 bp, 3770 bp, 3780 bp, 3790 bp, 3800 bp, 3810 bp, 3820 bp, 3830 bp, 3840 bp, 3850 bp, 3860 bp, 3870 bp, 3880 bp, 3890 bp, 3900 bp, 3910 bp, 3920 bp, 3930 bp, 3940 bp, 3950 bp, 3960 bp, 3970 bp, 3980 bp, 3990 bp, 4000 bp.

[0066] Advantageously, the invention relates to the method mentioned above, wherein the 500 bp window of a fragment interacts with ORC1 or ORC2 replication initiation factors.

[0067] The first step in the initiation of eukaryotic DNA replication is the assembly of a six-subunit origin recognition complex (ORC) at specific sites distributed throughout the genome at the replication origin.

[0068] Whereas the DNA sequence that specifically interact with ORC proteins is not known, it is possible to determine if a DNA molecule interact with ORC proteins, in particular ORC1 or ORC2, or both, by many techniques well known in the art, such as Chromatin IP (ChIP experiments or ChIP-seq) or DNA footprinting, Electrophoretic Mobility Shift Assay . . . .

[0069] More advantageously, the invention relates to the method mentioned above, wherein sequence immediately adjacent to the 500 pb window contains:
[0070] either multiple tandemly G4 structures, wherein said tandemly G4 structures are present up to 12 times, or
[0071] G-rich Repeated Element, or OGRE, or
[0072] both.

[0073] Advantageously, the replication origins according to the invention may contain G4 structures that are tandemly repeated up to 12 times.

[0074] G-quadruplex secondary structures (G4) are formed in nucleic acids by sequences that are rich in guanine. These structures are helical in shape and contain guanine tetrads that can form from one, two or four strands. The unimolecular forms often occur naturally near the ends of the chromosomes, better known as the telomeric regions, and in transcriptional regulatory regions of multiple genes. Four guanine bases can associate through Hoogsteen hydrogen bonding to form a square planar structure called a guanine tetrad (G-tetrad or G-quartet), and two or more guanine tetrads (from G-tracts, continuous runs of guanine) can stack on top of each other to form a G-quadruplex.

[0075] The position and bonding to form G-quadruplexes is not random and serve very unusual functional purposes and are located closed to replication origins.
[0076] the replication origins according to the invention may alternatively, or additionally contain G-rich Repeated Element, or OGRE, as defined in the international application WO2011023827.

[0077] More advantageously, the invention relates to the method mentioned above, wherein the fragment contains a 716 pb (average size) core initiation origin sequence, the core initiation origin sequence being complementary to nascent DNA fragments sequence.

[0078] This sequence of about 716 pb (which corresponds to an average size) core initiation origin sequence is the region where the DNA polymerase synthesizes the first RNA-primed nascent strands after the opening of the double strand helix.

[0079] More advantageously, the invention relates to the method mentioned above, wherein the fragment also contains binding sites for polycomb proteins or open chromatin such as driven by histone acetylation marks, or both.

[0080] DNA methylation, histone modifications, and chromatin configuration are crucially important in the regulation of gene expression. Histone acetylation marks may include H3 and H4 acetylation. Among these epigenetic mechanisms, Polycomb (Pc) proteins play roles in gene silencing through different mechanisms. These proteins act in complexes and govern the histone methylation profiles of a large number of genes that regulate various cellular pathways. They are also associated with replication origin sites.

[0081] For instance, histone 3 K27 acetylation is a histone mark commonly associated with enhancer function and to mark active enhancers.

[0082] The invention also relates to a mammalian genomic DNA replication origin liable to be obtained, or directly obtained by the method as defined above.

[0083] Advantageously, the invention relates to the mammalian genomic DNA replication origin as defined above, the mammalian genomic DNA replication origin comprising one of the sequences as set forth in SEQ ID NO: 1 and SEQ ID NO: 3 to SEQ ID NO: 43,177 and in SEQ ID NO: 43,220 to 43,288.

[0084] All these sequences correspond to DNA core origins of mammals. These sequences are novel. The DNA molecule as set forth in the above-mentioned sequences are isolated from their natural context and purified.

[0085] It is obviously understood in the invention that “SEQ ID NO: 1 to SEQ ID NO: 43,177 and in SEQ ID NO: 43,220 to 43,288” means that all the 43246 sequences are disclosed, in particular in the attached sequence listing.

[0086] Advantageously, the invention relates to the mammalian genomic DNA replication origin as defined above, the mammalian genomic DNA replication origin consisting of one of the sequences as set forth in SEQ ID NO: 1 to SEQ ID NO: 43,177 and in SEQ ID NO: 43,220 to 43,288.

[0087] By “SEQ ID NO: 1 to SEQ ID NO: 43177 and in SEQ ID NO: 43,220 to 43,288.” it is meant in the invention all the sequences from SEQ ID NO:1 to SEQ ID NO:43177 and in SEQ ID NO: 43,220 to 43,288 as disclosed in the sequence listing annexed to this description.

[0088] These sequences correspond to core origins of mammal DNA molecules, i.e. sequences from which initiation of DNA replication is possible. When inserted in the genome of a [hypothetical] mammalian cell devoid of replication origin, these sequences can promote a new genomic replication origin, i.e. opening of the double strand, neosynthesis of complementary DNA . . . . They can also promote autonomous DNA replication when inserted in a plasmid.

[0089] The invention also relates to a vector comprising:
[0090] a mammalian genomic DNA replication origin as defined above,
[0091] at least a sequence coding for a protein allowing the resistance or sensitivity to a compound specific to eukaryotic cells, and
[0092] a region independent to the mammalian genomic DNA replication origin allowing to insert a gene of interest and its expression.

[0093] The vector according to the invention contains at least a mammalian replication origin capable of replication in a variety of host mammal cells. This replication is due to the presence of the core origin as defined above.

[0094] This vector contains also a region independent to the replication origin were a gene can be inserted, in particular a gene of interest for instance for therapeutic purpose. The region independent to the mammalian genomic DNA replication origin is in particular a cloning site that allows insertion of a nucleic acid sequence of interest, such as a gene of interest or a sequence allowing an epigenetic modification. Advantageously, the cloning site(s) comprise at least one restriction site, i.e., a site where the vector may be selectively cleaved by a particular enzyme. Such sites are known to those skilled in the art. The restriction site may be a unique restriction site, i.e., a restriction site not found elsewhere in the vector or nucleic acid sequence of interest. The cloning site of the vector may comprise a plurality of unique restriction sites to permit insertion of a wide variety of nucleic acid sequences. Illustrative examples of restriction sites include, but are not limited to, the following: HindIII site, BamHI site, Asp718I site, Kpn I site, Bst I site, EcoRI site, EcoRV site, PstI site, Eco32I site, XhoI site, Sfr274I site, XbaI site, FauNDI site, NdeI site, and PmeI site.

[0095] In other words, the invention does not encompass vectors were a genomic DNA fragment containing a mammalian replication origin has been cloned into the vector in the cloning site.

[0096] The vector also contains a gene, placed under the control of the appropriated means allowing its transcription and the expression of the corresponding protein, the gene coding for a protein that confers either resistance or sensibility to a drug that specifically target eukaryotic cells. This corresponds to a marker gene.

[0097] The vector may also possibly contain an inducible transcription promoter able to promote transcription close or through the replication origin.

[0098] Marker genes conferring resistance to a drug are well known in the and can be for instance: Zeomycin resistance gene, Neomycin resistance gene, Bleomycin resistance gene, Puromycin resistance gene . . . . Genes conferring sensibility are traditionally those encoding enzymes lacking in the recipient cell, such as HPRT, thymidine kinase, dihydrofolate reductase and APRT. More recently, other genes, such as XGPT, metallothioneine and methotrexate-resistant DHFR, have been employed, as they confer new characteristics on the recipient. This list is not limitative, and the skilled person would easily use the appropriated selection marker gene according to the experiments he would carry out (resistance gene for isolating specific clone, sensitivity gene for killing transfected/transformed cells).

[0099] Advantageously, the above mentioned vector is the vector as set forth in SEQ ID NO: 43,389, in which is inserted one of the sequences as set forth in SEQ ID NO: 1 to SEQ ID NO: 43,177 and in SEQ ID NO: 43,220 to 43,288.

[0100] Advantageously, the invention relates to the vector as defined above, the vector further comprising:
[0101] a prokaryotic replication origin; or
[0102] a sequence coding for a protein allowing the resistant to an antibiotic, or both.

[0103] Advantageously, the vector as defined above may also contain a prokaryotic replication origin, in order to allow DNA replication in bacterial cells. It is also relevant to have a gene for the selection of the bacterial transformed cells, by using a gene coding for a protein allowing the resistance to an antibiotic, such as ampicillin, kanamycin, . . . .

[0104] In one advantageous embodiment, the vector described above is such that it comprises:
[0105] one of the mammalian genomic DNA replication origins comprising or consisting in one of the sequences as set forth in SEQ ID NO:1 to SEQ ID NO: 43177 and in SEQ ID NO: 43,220 to 43,288,
[0106] at least a sequence coding for a protein allowing the resistance or sensitivity to a compound specific to eukaryotic cells,
[0107] possibly an inducible transcription promoter able to promote transcription close or through the replication origin. and
[0108] a region independent to the mammalian genomic DNA replication origin allowing to insert a gene of interest and its expression.

[0109] The invention also relates to a vector comprising or consisting in a sequence acid sequence as set forth in SEQ ID NO: 43,290 to 43,358.

[0110] The invention relates also to a mammalian cell comprising a vector as defined above.

[0111] The mammal cells according to the invention contains a vector as defined above, i.e. a vector containing a mammalian replication origin. It is not necessary that this vector be inserted into the genome of the mammal host cell, since this vector contains a replication origin similar to the genomic DNA replication origin will replicate autonomously.

[0112] This vector will therefore be replicated as the genomic DNA does.

[0113] The invention also relates to a mammal, in particular a non-human mammal, comprising of cells as defined above.

[0114] The above animal, which preferably a non-human animal, such as a mouse, a rat, a monkey, a dog, a cat . . . contains at least one mammalian cell as defined above.

[0115] Advantageously, one or more organs of said animal may be colonized by the above-mentioned cells, i.e. some or all the cells of the organ contain a vector as defined above.

[0116] The invention also relates to the use of a vector as defined above, for expressing, preferably in vitro or ex vivo, in a mammalian cell, a gene of interest, the sequence of which being inserted in the vector in the region independent to the mammalian genomic DNA replication origin.

[0117] In this particular use, the gene of interest is placed under the control of a promoter, that allow its expression, and the expression of the corresponding protein.

[0118] By “the region independent to the mammalian genomic DNA replication origin”, it is meant in the invention that the gene of interest, is not cloned within the sequence of the origin, nor in the same multi cloning site. It could be therefore advantageous, in the above described vector, that an additional multicloning site be inserted in the vector, for the purpose of the cloning of the gene of interest.

[0119] The above vector can contain 2 or more mammalian genomic DNA replication origins, identical or different. Increasing the number of copy of mammalian genomic DNA replication origin will increase the replicative properties of the vector in mammal cells, as illustrated in the Examples.

[0120] The invention also relates to a computer program product implemented on an appropriated support comprising instructions to execute the steps b- to c- of the method as defined above.

[0121] The invention relates to software or a computer program product designed to implement the above-mentioned method and/or comprising portions/means/instructions of program code for executing said method when said program is executed on a computer. Advantageously, said program is provided on a data-recording support that can be read by a computer. Such a support is not limited to a portable recording support such as a CD-ROM but can also form part of a device comprising an internal memory of a computer (for example RAMs and/or ROMs), or of a device with external memory such as hard disks or USB sticks, or a proximity or remote server.

[0122] The computer program is adapted to carry out the step b and c of the above described method.

[0123] The invention will be better understood in the light of the following figure and the following example.

### LEGEND TO THE FIGURES

[0124] FIG. 1 shows Experimental workflow. SNS-seq was performed on three untransformed (hESC H9, patient derived hematopoietic cells (HC), and patient derived Human Mammary Epithelial Cells (HMEC), and 3 immortalized cell types (total n=19). Immortalized cells were obtained through a reduction of TP53 mRNA levels (ImM-1, p53^{KD}) or further expression of oncogenes RAS (ImM-2, +RAS) or WNT (ImM-3, +WNT) in HMEC cells.

[0125] FIG. 2: UCSC genome browser snapshots of the human replication origin (MYC origin) captured by SNS-seq. Representative SNS-seq read-profiles, published positions of ORC2- (red) and MCM7-bound (blue) regions and the GENCODE genes (v25) are shown. The position of origins defined in this study is shown on top; red: high-activity origins (core origins), light pink: low-activity origins (stochastic origins).

[0126] FIG. 3 represents a boxplot showing the average origin activity (normalized SNS-seq counts across all samples, in Log2) per each quantile (x-axis represents Q1-Q10 origins). Line within the boxplot represents median, whereas the bounds of the box define the first and third quartiles. Bottom and top of whiskers represent minimum and maximum numbers respectively for each boxplot.

[0127] FIG. 4: Q1 and Q2 origins host the overwhelming majority of initiation events in untransformed cell types. Pie chart representing the percentage of DNA replication initiation events (normalized SNS-seq counts) that originate from Q1, Q2 or Q3-10 origins in the indicated untransformed cell types.

[0128] FIG. 5 represents a Density plots showing the distribution of the distances to nearest origin (x-axis, in Kb) for core origins (left panel) and stochastic origins (right panel). In gray are control density plots that show the distribution of the distances between core/stochastic origins to the nearest randomized genomic region of the same size and number as origins. Both frequency plots were significantly different from randomized distributions (p≤2.2E-16, Chi-square Goodness-of-Fit test in R with observed and expected values for frequency).

[0129] FIG. 6 represents Pearson's correlation coefficient (r) of origin activities between cell types.

[0130] FIG. 7 represents Euler diagrams showing the fraction of core and stochastic origins shared by the untransformed cell types.

[0131] FIG. 8 represents Bar plots show the percentage of core origins that were identified as origin regions by another SNS-seq study (black), and the expected amount of overlap with control regions (white, dotted line). Control regions in this figure are regions of equal size to core origins that are located in randomized coordinates of the human genome. P-value obtained by Chi-square Goodness-of-Fit test.

[0132] FIG. 9 represents Bar plots representing the percentage of regions identified by INI-seq (in black) that overlap origins identified in this study. Dotted bar represents the expected amount of overlap with control regions. P-value obtained by Chi-square Goodness-of-Fit test.

[0133] FIG. 10 is the same figure as FIG. 9 for OK-seq regions.

[0134] FIG. 11 represents the percentage of core origins that overlap with pre-RC components ORC2 (within ±2 Kb; in red) and MCM7 (direct overlap, in blue). Dotted bars represent the expected amount of overlap with control regions. P-values obtained by Chi-square Goodness-of-Fit test.

[0135] FIG. 12 is the same figure as FIG. 11 for core origins found in clusters.

[0136] FIG. 13 represents Bar plots show the percentage of ORC1-(13,000) and ORC2-bound (55,000) sites that host DNA replication initiation within 2 Kb. Dotted bars represent overlap with control regions. P-values obtained by Chi-square Goodness-of-Fit test.

[0137] FIG. 14 is a schematic summary of origin activity in a single cell type.

[0138] FIG. 15 is a schematic summary of origin activity in the different cell types.

[0139] FIG. 16 represents Bar plots showing the percentage of all, hESC, hESC-specific, and Q1 human origins with homology to mouse (light green). Also indicated are regions in the human genome with a homologous region in the mouse (light green). Regions that are also origins in mouse are dark green. On the right, are bar plots showing the percentage of the corresponding shuffled genomic regions.

[0140] FIG. 17 represents cumulative Phastcon20 way scores plotted for human DNA replication initiation sites, similar-sized control regions (dotted), Refseq exons, promoters (defined as 500 bp upstream of TSS regions) and introns.

[0141] FIG. 18 represents a graph showing the percentage of origins in each quantile that overlap with G4 defined by G4Hunter (in silico) or mismatches (in vitro G4). Dotted lines (CTL) represent overlap with control regions.

[0142] FIG. 19 represents the base content of the regions flanking human DNA replication origins and control genomic regions. Frequency plots are centred at the origin summits. The base frequency represents the proportion of each base (0 to 1). The human genome is composed of 30% A, T and 20% G, C as indicated by genomic average. Origins are oriented with the highest G-content upstream.

[0143] FIG. 20 represents a Density plot representing the frequency of the distance measured between the initiation site summit (dotted line) and the centre/summit of the nearest ORC1 (red), ORC2 (dark red) and MCM7 (blue) bound regions. Origins are oriented with the highest G-content upstream.

[0144] FIG. 21 is the same figure as FIG. 20, but for stochastic origins.

[0145] FIG. 22 is a Schematic representation of a core origin. The vertical line represents the IS summit. The nearest ORC1, ORC2 and MCM7 peak centers are presented, as well as their average distance from the core IS summit. The average size of the ORC1, ORC2 and MCM7 binding sites is indicated on the left.

[0146] FIG. 23 represents a bar plot showing the percentage of origins that can be predicted based on the genome-scanning (GS) algorithm. Dotted bars represent the expected amount of overlap with control regions. The pie chart shows the percentage of false positive results (grey). P-values obtained by Chi-square Goodness-of-Fit test using observed and expected values for overlap.

[0147] FIG. 24 represents the Percentage of origins in each quantile predictable by the GS algorithm as in FIG. 23.

[0148] FIG. 25 represents the Percentage of Mus musculus origins predicted by the GS algorithm as in FIG. 23.

[0149] FIG. 26 represents Bar plots representing the percentage of core origins that can be predicted using a combination of GS algorithm and two different machine learning algorithms (single vector machine (SVM) and logistic regression (LR) with greedy feature selection). P-values obtained by Chi-square Goodness-of-Fit test using observed and expected values for overlap.

[0150] FIG. 27 is schema showing the properties of the regions predicted to be origins. G-richness in the immediate (0.5 Kb) and distal (2 Kb) upstream region to the initiation site are predictive parameters.

[0151] FIG. 28 represents a plot representing the percentage of DNA replication origins in each quantile that overlap a promoter region (±2 Kb of TSS) of a GENCODE gene (in red). Overlaps with control regions (paler color) which are randomly shuffled genomic regions of equal size and number as the origins are also shown. P-values obtained by Chi-square Goodness-of-Fit test using observed and expected values for overlap.

[0152] FIG. 29: As in FIG. 28 for overlaps with intergenic regions (>2 Kb upstream of a GENCODE gene, TSS are excluded).

[0153] FIG. 30: As in FIG. 28 for overlaps with gene body (genic region 2 Kb downstream of the TSS excluded).

[0154] FIG. 31 represents Bar plot representing percentage of CpG-containing gene promoters that host a DNA replication origin within +/−2 Kb of their TSS. Promoters with different transcriptional activity levels in hematopoietic cells are shown (silent=0, low=0-15, medium=15-60, high=>60 RPKM). In this figure, a promoter is considered CpG-containing (CpG(+)) if a CpG island is present within +/−2 Kb of the TSS (Gencode v25).

[0155] FIG. 32 represents Bar plot showing the average number of origins localized within 2 Kb of the TSS of genes with different transcriptional output levels (silent=0, low=0-15, medium=15-60, high=>60 RPKM) in hematopoietic cells.

[0156] FIG. 33 represents Boxplots showing the average activity of origins localized within 2 Kb of the TSS of genes with different transcriptional output levels as in (d) in hematopoietic cells. p-values were obtained using the Wilcoxon test in R.

[0157] FIG. 34 represents Dot plot shows the correlation of transcriptional output of CpGi(+) promoters in hematopoietic progenitors (y-axis; RPKMs, Log2) and the activity of core origins located within ±2 Kb of the TSS of these genes in hematopoietic progenitors (x-axis; normalized SNS-seq counts, Log2). Top and bottom 5% outliers were removed. The Pearson's correlation coefficient (r) and p-value for correlation is indicated on the top, and trendline is shown.

[0158] FIG. 35: As in FIG. 31 for CpGi(−) promoter regions.

[0159] FIG. 36: As in FIG. 32 for CpGi(−) promoter regions.

[0160] FIG. 37: As in FIG. 33 for CpGi(−) promoter regions.

[0161] FIG. 38: As in FIG. 34 for CpGi(−) promoter regions.

[0162] FIG. 39 represents a Schematic summary of findings. CpGi(+) promoters (black) tend to host DNA replication origins, irrespectively of their transcriptional status, while CpGi(−) promoters (grey) tend to host origins when they are transcriptionally active.

[0163] FIG. 40 represents a Euler diagrams showing the percentage of shared core and stochastic origins identified in untransformed (white) and immortalized (grey) cell lines.

[0164] FIG. 41: In immortalized cells stochastic origins are markedly increased. Bar plots showing the percentage of core and stochastic origins identified in each cell type.

[0165] FIG. 42 represents a Line plot showing the percentage of origins (Q1 to Q10) identified in immortalized and untransformed cells.

[0166] FIG. 43 represents the Percentage of origins in each quantile (untransformed Q1-10 in blue, immortalized Q1-Q10 in pink) that overlap with promoter regions (within +/−2 kb of the TSS). The expected chance overlap is shown with dotted lines (paler colors). P-values obtained by Chi-square Goodness-of-Fit test. P-value indicated in blue represent statistical analysis of overlaps in untransformed cells, while pink indicates immortalized cells.

[0167] FIG. 44: As in FIG. 43 for overlaps with gene body (excluding the TSS+2 kb region) of GENCODE (v25) genes.

[0168] FIG. 45: As in FIG. 43 for overlaps with regions enriched for heterochromatin-associated H3K9me3 histone mark (in hESC, left panel) and with regions defined as heterochromatin by HMM in hESC and K265 cells (right panel).

[0169] FIG. 46 represents Plot shows the core origin (red) density across topologically associating domains (TADs). Average origin density per bin (100 bins) across all TADs was plotted (y-axis, in origins/Mb). Core origin density is higher at the TAD borders, creating a “smiley” trend-line. p-values were obtained using the non-parametric Wilcoxon test in R.

[0170] FIG. 47: Same as in FIG. 46 but for stochastic origins.

[0171] FIG. 48 represents a Bar plot showing the sum of normalised mean SNS-seq signal (y-axis, total initiation) across 19 samples coming from both core and stochastic origins at TAD borders and TAD centers. The total amount of SNS-seq signal is 1.53 fold higher at TAD borders.

[0172] FIG. 49 represents the density of core origins active in HMEC (blue) and ImM-1 cells (orange) across TADs as in FIG. 46.

[0173] FIG. 50: Same as in FIG. 49 but for stochastic origins active in HMEC and ImM-1 cells.

[0174] FIG. 51: As in FIG. 48 for HMEC (parental) and immortalised ImM-1 cell types.

[0175] FIG. 52 represents a Summary of the experimental SNS-seq procedure with the appropriate controls.

[0176] FIG. 53 represents the origin activity heatmap of all the identified human origins in six different cell lines. Origins were sorted according to their average activity based on the number of normalized SNS-seq reads. Human origins were then divided in ten equal-size quantiles (Q1-Q10) that included 32,074 origins/each.

[0177] FIG. 54: Mappability is similar for origins across different quantiles. Percentage of origins in each quantile with at least 50% of the origin overlapping fully mappable regions (UCSC-Umap, mappability score of 1).

[0178] FIG. 55: Broad and diffuse initiation outside the mapped origin regions is not substantial. Analysis of total diffuse initiation in early and late replicating domains of the human genome reveals that only two cell types have some initiation signal outside origin regions. In hESC cells. 9.6% of all DNA replication initiation comes from early (but not late) replicating domains outside the identified origin regions. Im ImM-1 cell type, 14.7% of all initiation comes from late-replicating (but not early replicating) domains, outside the origin regions.

[0179] FIG. 56: Most core origins are clustered in the genome. Pie chart showing the percentage of core origins found (i) clustered (i.e., less than 7 kb from each other), (ii) loosely clustered (more than 7 kb, but less than 15 kb from each other), and (iii) isolated (more than 15 kb to the nearest core origin). Right panel depicts a schematic of the different clusters defined.

[0180] FIG. 57: A similar number of regions in the mouse genome also host the bulk of DNA replication initiation events. Pie chart showing the percentage of normalized SNS-seq tags that include the most active 64,148 origins (same number as in human cells) and the remaining lower activity origins.

[0181] FIG. 58 represents a Euler diagrams showing the fraction of origins shared by three immortalized cell lines.

[0182] FIG. 59 represents Black dots show the percentage of origins in each quantile that overlap origins detected in a previous SNS-seq study. Grey dots represent the expected chance overlaps of randomly shuffled, control genomic regions of equal size and number as our origins. P-values obtained by Chi-square Goodness-of-Fit test using observed and expected values for overlap.

[0183] FIG. 60: As in FIG. 59 for regions identified by INI-seq. Red dots depict the percentage of early-firing origins identified by INI-seq, which is an in vitro method that identifies earliest firing origins.

[0184] FIG. 61: As in FIG. 59 for OK-seq regions.

[0185] FIG. 62: Tightly clustered core origins are more likely to be identified by the alternative origin mapping method OK-seq. Bar plot showing the percentage of tightly clustered core origins (in black) that overlap with DNA replication initiation zones identified by OK-seq. Dotted bars represent the expected chance overlap of randomly shuffled, control genomic regions of equal size and number to OK-seq regions. P-values obtained by Chi-square Goodness-of-Fit test using observed and expected values for overlap.

[0186] FIG. 63: Core origins overlap with the pre-RC components ORC1 and ORC2 binding sites. Graph shows the percentage of origins in each quantile that overlap with regions bound by ORC1 or ORC2 (red) or ORC2 (blue) within ±2 kb. Paler coloured dots represent the expected chance overlap of randomly shuffled, control genomic regions of equal size and number as our origins.

[0187] FIG. 64: ORC2 binding sites that occupy larger genomic regions are more likely to be associated with DNA replication origins. Pie chart represents the percentage of ORC2-bound sites in the genome that intersect a core or a stochastic origin (within ±2 Kb). Left panel represents ORC2-bound regions longer than 1 Kb, and the right panel represents ORC2-bound regions longer than 2 Kb. p-values were obtained using the Chi-square of Goodness-of-Fit test in R with observed and expected overlap values.

[0188] FIG. 65: Same as in FIG. 64 for ORC1-bound regions.

[0189] FIG. 66: Core origins (Q1 and Q2) have conserved sequences upstream of the initiation site. Graph represents averaged Phastcon20scores of human origins (Q1-Q10), centered on the origin summit with flanking regions on each side. Origins are oriented to have the G-rich regions upstream.

[0190] FIG. 67: As depicted in FIG. 66 for origins that are associated or not associated with a TSS within +/−2 Kb.

[0191] FIG. 68 represents Bar plot representing the percentage of core and stochastic origins that overlap a putative G4 structure (in black) as defined by any one of the two methods used to define G4 structures (mismatch scoring or G4Hunter). Dotted lines represent expected overlaps with control regions, which are randomized regions of the genome of equal size and number to our origin regions. P-values represent Chi-square Goodness-of-Fit test using observed and expected values for overlap. (*) Please note that stochastic origins Q3-7 significantly overlap G4 regions (maximum p=0.0002) while Q8-10 do not.

[0192] FIG. 69: Motif enrichment analysis (using HOMER) for the regions covering 400 bp upstream of oriented core origins summits. Analysis in this figure represents enrichment over randomized genomic regions.

[0193] FIG. 70: Left panel represents motif enrichment over randomized genomic regions that contain the same C and G frequency as core origins. Right panel represents motif enrichment over randomized genomic regions that contain the same frequency of the dinucleotide “CG”.

[0194] FIG. 71 is a schematic diagram of the algorithm used to predict origins based on a DNA hyper-motif.

[0195] FIG. 72: Base content of the regions flanking mouse DNA replication (core and stochastic) origins and control genomic regions. Frequency plots are centred at the origin summits (highest point of the peak in a read pile-up). The base frequency represents the proportion of each base in sliding windows of 100 bp, on a scale from 0 to 1. Origins are oriented to have the side with the highest G-content upstream (see Methods for details).

[0196] FIG. 73: False positive rates (in gray) for three different machine learning algorithm methods. LR represents logistic regression with greedy feature selection, SVM represents univariate feature selection and single vector machine and uLR represents logistic regression with univariate feature selection.

[0197] FIG. 74: Different machine learning methods predict virtually the same core origins. Eulerr diagram (drawn to size) showing the overlap of core origins predicted by each machine learning method.

[0198] FIG. 75: The importance of each of the 22 features used for each machine learning algorithm. Top panel represents the weights assigned to each feature by the LR algorithm. Bottom panel represents the weights assigned to each feature by the SVM algorithm. The detailed explanation of each feature (x-axis) can be found in Table 2. Y-axis is of arbitrary units representing the importance assigned to each variable by each algorithm.

[0199] FIG. 76 represents a Bar plot representing percentage of all Gencode (v25) gene promoters that host a DNA replication origin within +/−2 Kb of their TSS. Promoters with different transcriptional activity levels in hematopoietic cells are shown (silent=0, low=0-15, medium=15-60, high=>60 RPKM).

[0200] FIG. 77 represents a Bar plot showing the average number of origins localized within the promoter region (+/−2 Kb of the TSS) of genes with different transcriptional output levels (silent=0, low=0-15, medium=15-60, high=>60 RPKM) in hematopoietic cells.

[0201] FIG. 78 represents Boxplots showing the average activity of origins localized in the promoter region (+/−2 Kb of the TSS) of genes with different transcriptional output levels as in (d) in hematopoietic cells. p-values were obtained using the Wilcoxon test in R. Line within the boxplot represents median, whereas the bounds of the box define the first and third quartiles. Bottom and top of whiskers represent minimum and maximum numbers respectively for each boxplot.

[0202] FIG. 79 is a Schematic summary of the hematopoietic cell (HC) differentiation protocol. HC (CD34+) were isolated from three independent human cord blood donors and expanded in three independent cultures for 6-7 days. Then, erythropoietin (+EPO) was added to the culture medium (Day 0) for 6 days, and cells were harvested at day 0, day 3 and day 6 for SNS-seq and RNA-seq analysis.

[0203] FIG. 80: Origins with increased activity after erythrocyte differentiation (day 6) are in genomic regions that host genes related to erythrocyte differentiation. The genomic coordinates of origins that were significantly upregulated upon EPO addition (day 0 vs day 6) were analysed with GREAT. GREAT analysis was performed on genomic coordinates of the origins that were significantly upregulated upon EPO treatment (day 0 vs day 6). Origin regions were associated with genes using the single-gene (SG) rule of GREAT. Only one category came up as statistically significant at Binomial p-value p<0.05, which was plotted here.

[0204] FIG. 81: Silent genes are less likely to contain a CpG island (CpGi) near their promoter region. Bar plots represent the fraction of GENCODE (v25) genes with different transcriptional activity levels in hematopoietic cells (defined as in FIG. 76) that contain (CpG(+), in black) or not (CpG(−), in white) a CpGi within their TSS region (±2 Kb)

[0205] FIG. 82 represents boxplots showing the average activity of origins localized within the promoter region (+/−2 Kb of the TSS) of genes with different transcriptional outputs (silent=0, low=0-15, medium=15-60, high=>60 RPKM). A G-rich TSS was defined as a TSS that contains a G-rich (>37% per 500 bp) stretch of DNA within ±2 Kb); p-values for significance in this figure are obtained using Wilcoxon test in R. Line within the boxplot represents median, whereas the bounds of the box define the first and third quartiles. Bottom and top of whiskers represent minimum and maximum numbers respectively for each boxplot.

[0206] FIG. 83 represents Pie charts representing the percentage of DNA replication initiation events (as assessed by normalized SNS-seq counts) at known origins that originate from Q1, Q2 (core origins) or Q3-10 (stochastic origins) in all cell types used in the invention.

[0207] FIG. 84: Origin G-rich sequence-specificity is lost upon immortalization. In immortalized cells, origins that are down-regulated (black bars) in comparison to the parental cell line (HMEC) tend to overlap with CpGi (left panel) or G4 (right panel) elements. In contrast, origins upregulated upon immortalization (in white bars) have less than expected overlaps with CpGi or G4 elements. For reference, the dotted line shows the percentage of all origins that overlap with a CpGi (left panels) or G4 (right panels) are shown.

[0208] FIG. 85: Same as in FIG. 84, but for core origins that are up- or down-regulated upon immortalization. For reference, the dotted line shows the percentage of core origins that overlap with a CpGi (left panels) or G4 (right panels) are shown.

[0209] FIG. 86: Mouse core (left panel) and stochastic (right panel) origin density across topologically associating domains (TADs) of mouse embryonic stem cells 6. Origin density along TAD domains (blue) or equal-size control regions (grey) was computed as follows. TADs were divided into 100 equal bins (slices) and the origin density in each bin was calculated as number of origins per Mb. The p-value was calculated using the non-parametric Wilcoxon test in R.

[0210] FIG. 87: Core origin density across TADs (determined in hESC H1) that are active in hESC H9 (left panel), HC (middle panel) or HMEC (right panel). Origin density along TADs was computed as in FIG. 86.

[0211] FIG. 88: Core origins coincide with putative regulatory elements. Plot shows the overlap of origins (Q1-Q10) with human genome regions that have putative regulatory functions (as defined by ReMap, >10 peaks).

[0212] FIG. 89: Principle of the DpnI test.

[0213] FIG. 90: pEPi-Del vector as a receptor vector for replication origins. The original vector is the pEPi vector. The pEPi-Del recipient vector was subcloned from pEPi by deleting the SV40 origin of replication.

[0214] FIG. 91: The pEPi-Del receptor vector was subcloned from pEPi by deleting the SV40 origin of replication. 293T (expressing T antigen) and 293 (without T antigen) cells were transfected with pEPi (SV40 origin) or pEPi-Del (lacking origin). At the end of the DpnI assay (FIG. 89), the number of colonies able to grow on Agar supplemented with kanamycin is estimated. Partial photos are shown.

[0215] FIG. 92: histograms showing the number of colonies in the experiment performed in 293T (left) or 293 (right).

[0216] FIG. 93: Controls to check the specificity of DpnI digestion. Presentation of the result of bacteria transformed with DpnI-digested plasmids prepared in either Dam (−) or Dam (+) bacteria.

[0217] FIG. 94: Histogram showing the percentage of replicated plasmids for each condition compared to the DpnI digestion specificity control.

[0218] FIG. 95: Evolution of the cloning strategy of the origins of interest.

[0219] FIG. 96: Reduction of the S/MAR sequence and replacement of the eGFP reporter gene by a gene allowing antibiotic selection of transfected cells.

[0220] FIG. 97: The reduction of the S/MAR sequence by MAR5 allows to maintain a good transfection efficiency after 2 days (left) and 5 days (right).

[0221] FIG. 98: The reduction of the S/MAR sequence by MAR5 preserves the replicative potential of the vector.

[0222] FIG. 99: Substitution of the eGFP reporter gene by the puromycin resistance gene.

[0223] FIG. 100: Substitution of the eGFP reporter gene with the puromycin resistance gene allows assessment of replication up to at least 13 days.

[0224] FIG. 101: Properties of sequences containing the origins of replication to be inserted into the pPuroDel-MAR5-MCS receptor vector.

[0225] FIG. 102: pPuroDel-MAR5-MCS and pPuroDel-MAR5-λORI-MCS.

[0226] FIG. 103: Application of the rapid replication assay based on DpnI digestion of non-replicated plasmids to assess the replication capacity of plasmids contained in the vectORI library (per pool of 5 plasmids).

[0227] FIG. 104: graph showing the results of the replication capacity of the plasmids (6 days after transfection), for pools A-F.

[0228] FIG. 105: Migration profile on agarose gel of isolated clones, undigested, digested with NotI/SacI or BamHI/SacI.

[0229] FIG. 106: Migration profile on agarose gel of clone 15_2, undigested or digested with two enzymes.

[0230] FIG. 107: Migration profile on agarose gel of double (DBL) plasmids or single plasmids.

[0231] FIG. 108: schematic representation of single and double plasmids.

[0232] FIG. 109: histogram showing the ratio of replication between double and single plasmids.

### EXAMPLES

### Example 1—Characterization of Human Origin

[0233] DNA replication initiates from multiple genomic locations called replication origins. In metazoa, DNA sequence elements involved in origin specification remain elusive. The inventors examined pluripotent, primary, differentiating, and immortalized human cells, and demonstrate that a class of origins, termed core origins, is shared by different cell types and host ˜80% of all DNA replication initiation events in any cell population. The inventors detect a shared G-rich DNA sequence signature that coincides with most core origins in both human and mouse genomes. Transcription and G-rich elements can independently associate with replication origin activity. Computational algorithms show that core origins can be predicted, based solely on DNA sequence patterns but not on consensus motifs. Inventors results demonstrate that, despite an attributed stochasticity, core origins are chosen from a limited pool of genomic regions. Immortalization through oncogenic gene expression, but not normal cellular differentiation results in increased stochastic firing from heterochromatin and decreased origin density at TAD borders.

[0234] Methods

[0235] Cell and Tissue Culture

[0236] H9 hESC cells (WA-09; Wicell) were obtained from ES Cell International (ESI, Singapore) and were maintained according to supplier's instructions, as described60. Briefly, undifferentiated hESC were grown on mitomycin C-treated (10 g/ml, Sigma) mouse embryonic fibroblasts (used at the cell density of 4-6×10⁴ cells/cm²) and in medium constituted by 80% Knock-Out DMEM, 20% Knock-Out Serum Replacement, 1% non-essential amino acids, 1 mM L-glutamine, 0.1 mM p-mercaptoethanol. At passaging, 8 ng/ml human bFGF (Millipore or Eurobio) was added to the medium. Peripheral blood mononuclear cells (referred to as hematopoietic cells, HC) were isolated from the umbilical cord blood of three independent human donors from the Clinique Saint Roch of Montpellier using the Ficoll density gradient method. HC were then purified by magnetic beads coupled with an anti-CD34 antibody, resulting in 0.5 to 1×10⁶ CD34+ cells, plated in culture and expanded ex vivo with supplemented Stem Span medium (IMDM+insulin, transferrin, BSA, 5% FCS+IL-3+IL6+SCF) for 6-7 days. Cell differentiation towards the erythropoietic lineage was induced by addition of erythropoietin (EPO, 3 units/mL). At different time points after EPO addition (day 0, 3 and 6), an aliquot of 50×10⁶ cells was collected and pelleted for molecular biology experiments (SNS-Seq, RNA-seq, RT-qPCRs for verification), while the remaining cells were left in culture. To verify erythropoietic differentiation, cells were phenotyped by flow cytometry analysis using antibodies against the hematopoietic/erythroid markers CD36, CD11b, GlyA, CD71, CD49d, CD34, CD98, IL3R, CD13 (Beckman Coulter). Differentiation into the erythrocyte linage upon EPO incubation was also confirmed by RT-qPCR analysis of RNA from cells at day 0, 3 and 6 using primers specific for linage markers.

[0237] HMEC cells were isolated and ImM1-3 cells were generated as previously described (available at https://www.biorxiv.org/content/early/2018/06/11/344465). Briefly, HMEC cells were initially immortalized using a stably transfected shRNA against TP53 (ImM-1). ImM-1 subclones were then generated by stable transfection of plasmids to over-express human RAS (ImM-2) or WNT (ImM-3).

[0238] Mouse ESC were cultured as previously described, and SNS-seq was carried2 on mESC (n=4) and neuronal progenitor cells (n=4). A total of 248,682 origins were identified and divided into 10 equal size quantiles as in human.

[0239] Ethical Permissions

[0240] All experiments, including those involving hESC and hematopoietic cells adhere to the guidelines established by the French Bioethics Laws, and the “Agence Frangaise de biomedicine”. CD34+ cells were isolated from umbilical cord blood obtained following delivery of deidentified full-term infants after written informed consent from the mothers. Use of these deidentified samples was determined to be exempt from ethical review by the University Hospital of Montpellier Institutional Review Board in accordance with the guidelines issued by the Office of Human Research Protections.

[0241] Nascent Strand Isolation (SNS-Seq) and Analysis

[0242] This method is the most precise procedure to map replication origins, although differences in SNS-seq and bioinformatics analysis methodologies, often using no or unsuitable controls, have affected the false-positive rate (FPR) in origin identification, resulting in varying properties attributed to metazoan origins. Here, the inventors are providing the inventors' SNS-seq protocol and an analysis pipeline. Briefly, cells were lysed with DNAzol, and then nascent strands were separated from genomic DNA based on sucrose gradient size fractionation. Fractions corresponding to 0.5-2 kb were pooled, incubated with T4 polynucleotide kinase (NEB) for 5′ end phosphorylation, and digested by overnight incubation with 140 units of A-exonuclease (Aexn). A second round of overnight digestion with 100 units of Aexn was performed. Aexn digests contaminating broken genomic DNA, but not RNA-primed nascent strands22. As experimental background control, high molecular weight genomic DNA for each cell type was heat-fragmented to the same size as nascent strands, incubated with RNase A/XRN-1 to remove the RNA primer in any contaminating nascent strand, and then treated with the same amounts of Aexn as the samples.

[0243] The inventors should stress that the conditions ours and most laboratories use for the SNS-Seq are strictly different from the report claiming a possible bias of the lambda exonuclease digestion. First, in classical SNS-Seq protocols, nascent RNA-primed at replication origins are purified by melting DNA followed by the separation of the nascent strands from the bulk parental DNA by sucrose gradient centrifugation. Only then, the purified nascent strands are digested with exhaustive lambda exonuclease digestion (more than 2 000 u/μg DNA). This is not the case in Foulk et al.62 in which bulk DNA is simply enriched in replication intermediates by using BND cellulose, which fractionates whole DNA that is partly single stranded. Lambda exonuclease is then used, resulting in an enzyme to DNA ratio 1000 to 3000 fold less than the ratio the inventors' laboratory employs. The inventors also repeatedly reported that all the inventors' control samples (Nascent strands from mitotic DNA, or G0 DNA, or high molecular weight DNA give very low enrichment values).

[0244] The quality of origin enrichment in each sample was first tested by qPCR using primers against known human replication origins. Primers used to detect origin activity for various origins are given in Table 4. Single stranded nascent strands were first purified using the CyScrib GFX Purification Kit (Illustra, 279606-02), then converted into double stranded DNA by random priming using DNA polymerase I (Klenow fragment) and the ArrayCGH Kit (Bioprime, 45-0048). cDNA libraries were prepared using the TrueSeq Chip Library Preparation Kit (Illumina). In parallel, heat-denatured genomic DNA input controls were also purified, random-primed and libraries prepared in the same manner. All samples were sequenced at the Montpellier GenomiX (MGX) facility using an Illumina HiSeq 2500 apparatus. bcl2fastq version 2.17 from Illumina was used to produce the fastq files. Illumina reads (50 bp, single-end) from each SNS-seq replicate were trimmed and aligned to hg38 using Bowtie2 (v2.2.6). Peaks were called using two peak calling programs: MACS264 (v2.2.1) and SICER65 (v1.1 modified to contain hg38 and mm10). Peaks were first called using MACS2 (default parameters plus—bw 500-p 1 e-5-s 60-m 10 30—gsize 2.7e9), followed by peak calling by SICER [parameters: redundancy threshold=1, window size (bp)=200, fragment size=150 effective genome fraction=0.85, gap size (bp)=600, FDR=le-3]. MACS2 peaks that intersect SICER peaks from each sample were merged using bedtools intersect to generate a comprehensive list of all human DNA initiation sites (IS) (Table 1). Blacklisted regions as defined by the ENCODE project (hg38, ENCSR636HFF) were subtracted from the final human DNA replication origin list. Mouse SNS-seq samples were processed as human SNS-seq and were also divided into quantiles (mQ1-mQ10) with each quantile containing 25,168 regions. Principal component and analysis and sample distances suggest that for cell types obtained from a single donor (i.e. HMEC), the overlap of origins is stronger amongst the replicates, than it is with other cell types. For donor-derived cell type (hematopoietic cells), the inventors observed that the SNS-seq samples are more similar within the same donor than with treatment status (i.e. treatment with EPO). This is in contrast with the RNA-seq data, where samples cluster according to their treatment (EPO) and not their origin (donor).

[0245] SNS-Seq Optimization and Quality Controls

[0246] Different experimental and bioinformatics methodologies have been used to obtain and analyse SNS-seq data. SNS-seq relies on the Aexn ability to specifically digest genomic DNA, while leaving the newly synthesized, RNA-primed nascent DNA intact. The inventors' analysis suggests that peak calling to define origin locations using 19 human SNS-seq samples in the absence of a background or experimental genomic DNA background identified approximately 200,000 and 150,000 peaks per sample respectively (mean number of peaks). This number is reduced by about half when an appropriate experimental background (heat-fragmented genomic DNA treated with RNAse and Aexn) is used, suggesting that the use of appropriate backgrounds is crucial to reduce false positives in peak-calling. When the inventors examined the nature of the background signal (RNAse+Aexn), the inventors observed only a minimal bias for G-rich regions (G4, G-rich, CG-rich) compared with randomized genomic regions (˜5 reads every 250 bp compared to ˜2 reads per 250 bp), a value insufficient to skew peak calling or the downstream analysis. This confirms that under the inventors' experimental conditions (in particular the inventors' λexn digestion conditions), putative G4, G- and GC-rich sequences are digested almost as efficiently as randomized DNA sequences, and that the background generated by regions resistant to digestion can be accounted for by using a suitable experimental background sample.

[0247] Summits and Orientation of Origins

[0248] Summits of origins were defined by calculating the highest number of SNS-seq reads in bins of 50 bp from 25 bp sliding windows, using bam files from all samples with a custom-made script (see code availability). Middle point of the bin with highest number of reads was considered the summit of the IS.

[0249] Origins were assigned a plus or a minus strand based on the G-content of the regions flanking the IS summit, such that the G-rich flanking region was oriented upstream (left) of the IS summit. To do this, the inventors calculated the number of G bases within 500 bp of each IS and assigned a (+) or a (−) strand to each origin to ensure that the 500 bp with the most number of G bases was oriented upstream of the IS.

[0250] Quantification, Classification, and Differential Activity of DNA Replication Origins

[0251] The bioinformatics on this project was supported by the high power computing cluster of University of Birmingham (CastLes and BlueBear). Quantification of the SNS-seq signal at DNA replication origins was done using the R-package DiffBind (v3.9, dba.sCore: TMM_minus_background), using all human/mouse origin coordinates. The TMM_minus command subtracted the background signal from the signal, before normalizing all 19 samples using a TMM based algorithm. “Normalized SNS-seq signal” in the manuscript refers to these values obtained after subtraction of background and TMM normalization. After the TMM normalization, the average normalized SNS-seq counts was calculated across the 19 samples for each origin and origins were ranked based on this value. Then, each origin was assigned to a quantile (Q1-Q10) that represents the origin position in the ranked list based on the average activity. For example, all origins in the top 10th percentile of activity were assigned to Q1, and all origins that ranked between the 10th and 20th percentile were in Q2, and so forth. Core origins were all Q1 and Q2 origins, while stochastic origins were in all the other quantiles (Q3 to Q10). Super origins were defined as having >50 normalized SNS-seq counts. Super origins were not included in the present analysis, but they are listed in Table 1, for readers interested in origins that are ultra-ubiquitous in the genome, such as the MYC and LaminB2 origins.

[0252] To determine the percentage of SNS-seq signal that falls in Core origins in each cell type, the total normalized (background-subtracted and normalized)SNS-seq signal and the fraction that belongs to Q1, Q2 and stochastic origins (Q3-Q10) were calculated.

[0253] Differential origin activity was calculated using the R libraries Diffbind (v3.9, TMM_minus) and DeSeq2 consecutively (see code availability for code).

[0254] Total initiation from early and late replicating domains

[0255] The early and late replicating domains were defined based on early and late replication domains common to H9 and CD34+ hematopoietic progenitors (Table 3). The origin coordinates (+/−2 kb) were removed (masked) from the domains. The SNS-seq signal was then quantified in these domains in both sample and background samples and normalised by RPKM. The signal was then calculated as: Total SNS-seq signal in sample over early replicating domains minus the Total SNS-seq signal in background over early replicating domains. The same was performed for late replicating domains. The average of 3 replicates was calculated for each cell type. For most cell types, the signal from non-origin replication domains did not exceed the background (i.e. was negative).

[0256] For hESC and IMM-1, where the inventors find that the initiation signal from early or late (respectively) replication domains exceeds the background, the inventors calculated the percentage of initiation from non-origin regions and origin regions and presented it in FIG. 55.

[0257] Clustering of Core Origins

[0258] Clustering of core origins was done using bedtools suite (v.2.25, command:bedtools cluster) with a maximal distance of 7 kb to the nearest core origin. Please note that bedtools does not perform categorical clustering. FIG. 62 shows a diagram for clustering. This means that 70% of core origins were found in clusters with at least 2 or more core origins that are at a maximal distance of 7 kb from another core origin. Isolated core origins, which make up 15% of core origins, are found more than 15 kb away from another core origin. The inventors also defined “loosely clustered” core origins, which were less than 15 kb but more than 7 kb to nearest core origin.

[0259] Comparison with OK-seq data: In order to define tightly clustered core origins, the inventors screened core origin clusters for those that contained 6 or more core origins. This produced 1039 clusters with an average size of 27,287 bp that contained 13,519 core origins. As OK-seq did not map X- and Y-chromosomes, the inventors also removed clusters mapping to these chromosomes for this comparison. The size of tight core origin clusters is comparable to the average initiation zone defined by OK-seq, which is −34 kb in size.

[0260] Distance Between IS and Pre-RC Components

[0261] Peak coordinates were downloaded from relevant sources (ORC124, ORC225 and MCM726) and mapped to hg38 version of the human genome. For ORC2 peaks, the inventors were provided with peak summits, while for ORC1 and MCM7 peaks peak centre was calculated as the peak summit. For overlaps with ORC1 and ORC2, peaks were extended +/−2 kb. In order to map the density of distance between Pre-RC components and IS summit, the inventors calculated the distance between the IS summit and the ORC2 summit or ORC1/MCM7 peak centre for all Pre-RC components within a distance of 10 kb of the IS. The inventors then plotted the density of these distances in R. As a control, this procedure was repeated with randomized genomic coordinates for pre-RC components, which did not show any enrichment upstream or downstream of IS.

[0262] Data Analysis and Plotting

[0263] Heatmaps, boxplots, and other plots were generated using ggplot2 (v3.1.0) and pheatmap (v1.0.12) in R. Pie charts were generated in Excel (v16.16.23) using data obtained in R. Both Pearson's and Spearman's correlation matrices were calculated in R using (command cor( ). Principal component analysis (PCA) and Euler diagrams were generated in R (command pca, library eulerr). Comparison between genomic coordinates (quantiles, alternative origin mapping methods, histone/Pre-RC binding sites) (intersectBed with a minimum overlap of 1 bp) as well as generation of randomized genomic coordinates were computed using the bedtools suite (bedtools shuffle-chrom, -noOverlapping, when possible). For computation of overlaps between ORC1 and ORC2 binding sites and origins, a maximum distance of 2 kb was taken as positive overlap. SNS-seq read density plots and heatmaps were generated using deeptools (plotProfile, plotHeatmap). When required, genome coordinates of different genome assemblies were converted using UCSC LiftOver (UCSC Toolkit). A full list of the genomic regions downloaded from external sources can be found in Table 3.

[0264] ReMap and Putative Enhancers

[0265] Origins were mapped onto the ReMap atlas55 (http://remap.cisreg.eu). ReMap results from an integrative analysis of transcriptional regulator ChIP-seq experiments from both Public and Encode datasets. The ReMap catalogue includes 80 million peaks from 485 transcription factors, transcription coactivators and chromatin-remodelling factors. Overlaps were assessed with bedtools (v.2.25), counting only regions with a minimum of 10 ChIP-seq peak overlap.

[0266] RNA-Seq and Analysis

[0267] RNA-seq profiling was performed on all HC samples in order to determine whether origin positions (SNS-Seq) are adapted with transcription programs (RNA-seq). To do so, ≥2 μg RNA was extracted and purified from an aliquot of 200 000 cells using TRIzol reagent (Sigma-Aldrich), followed by RNA purification using the RNEasy MiniKit (Qiagen 74104). RNA quality and quantity were analyzed using a Fragment Analyzer (Advanced Analytical). cDNA libraries were prepared by the Montpellier GenomiX facility using the TrueSeq Chip Library Preparation Kit (Illumina). After quality control (using FastQC v0.11.5), the TopHat software (version 2.1.1) was used for splice junction mapping through Bowtie2 (version 2.2.8) for mapping reads. Reads count on genes was performed using HTSeq-count (version 0.6.1p1). Gene annotations were downloaded from GENCODE, release 25 (GRCh38.p7, 23 Sep. 2016). Data were normalized by the relative log expression implemented in edgeR (version 3.8.6), and pairwise comparative statistical analysis to identify differential genes was performed using DeSeq2 (version 1.18.0 in R 3.2) (results were confirmed with edgeR version 3.8.6) using a generalized linear model.

[0268] Definition of G-Rich Regions (G4, CpGi, G-Rich)

[0269] Two methods were used to define G4 elements in the human genome based on (i) identification of mismatches induced by K+ and pyridostatin (PDS) treatment28 (in vitro G4) (ii) predictions by G4Hunter29 (in silico G4). Both datasets were generated in hg19, therefore the inventors have converted the inventors' origin coordinates to hg19 in order to examine overlaps.

[0270] CpG islands that were >300 bp in size were downloaded from UCSC (hg38). G-rich regions were defined as having a G density >37% within a 500 bp window in sliding windows of 100 bp (hg38) using bedtools commands bedtools makewindows, nuc and count. G-rich region list was used for the analysis in FIG. 79.

[0271] Analysis of base composition and motif discovery in genomic regions

[0272] Base composition was analysed using HOMER66, with 100 bp as window size taking the IS summit as the peak centre. The density data were visualized with Microsoft Excel. HOMER (v4.11.1) was used to search for motif enrichment in between the core origin summits and the 400 bp upstream regions (in oriented origins, this corresponds to the G-rich region). The inventors have used the following parameters; perl findMotifsGenome.pl hg38-size given-len 4,6,8,10,12-mask-norevopp [none, -noweight or -CpG].

[0273] Evolutionary Conservation Analysis

[0274] Refseq exons, introns and promoter regions (defined as −500 to 0 bp upstream of transcription start sites) and Phastcon scores (Phastcon20way) were downloaded from UCSC table browser (last update December 2017). Mean cumulative phastcon scores of each set of regions were calculated using R and bedtools suite (bedtools coverage). Human origin coordinates were converted to mouse coordinates either using LiftOver (UCSC toolkit) or BLAST. Very similar results were obtained with BLAST and LiftOver, the inventors presented the results from LiftOver.

[0275] Prediction of DNA Replication Origins in the Human and Mouse Genomes

[0276] The human and mouse genomes were divided into paired 500 bp windows (Watson and Crick strands separately) with a sliding window size of 100 bp using bedtools (makewindows) suite (˜30 Million windows for human genome). The number of each nucleotide (A,C,G,T) in each paired window was then calculated (bedtools nuc). Paired (consecutive) 500 bp windows were evaluated to fit a DNA sequence pattern (a hyper-motif) with minimum 28% G in the first window and minimum 25% G in the consecutive second window—and a requirement that G content drop by 8-40%, with a max A/T content 0.21 between the first and second window). This let us to identify 1,041,594 window pairs. The window pairs that were retained were then merged using bedtools merge to identify non-overlapping putative origin regions (228,442 regions with average size of 1.7 Kb).

[0277] Prediction of DNA Replication Origins in the Human and Mouse Genomes

[0278] Genome Scan Algorithm

[0279] The human and mouse genomes were divided into paired 500 bp windows (Watson and Crick strands separately) with a sliding window size of 100 bp using bedtools (makewindows) suite (˜30 Million windows for human genome, hg38). The number of each nucleotide (A,C,G,T) in each paired window was then calculated (bedtools nuc). Paired (consecutive) 500 bp windows were evaluated to fit a DNA sequence pattern (a hyper-motif) with minimum 28% G in the first window and minimum 25% G in the consecutive second window—and a requirement that G content drop by 8-40%, with a max A/T content 0.21 between the first and second window). The same algorithm was run for the reverse compliment strand (i.e. Crick strand, 28% C in second window, min 25% C in second window) on the same 30 M window pairs, bringing the number of window-pairs examined to 60 million.

[0280] This let us to identify 1,041,594 window pairs. The window pairs that were retained were then merged using “bedtools merge” to identify non-overlapping putative origin regions (228,442 regions with average size of 1.7 Kb). This set of regions was used to define predictability of origins in FIGS. 23 and 24. For the mouse genome, the same algorithm was run with exactly the same parameters, which retains 689, 285 window pairs out of the (27×2 million possible pairs from mm10). Similarly, these regions were merged (bedtools merge) to generate 230,052 non-overlapping regions and intersected with mouse origins using bedtools (bedtools intersect -wa -u) to generate FIG. 25.

[0281] Machine Learning and Hyper-Motif Analysis

[0282] Predicted variable for the inventors' algorithm is the membership to the “origins” class defined by intersection of the non-overlapping coordinates with an origin (maximising the predictive power on core origins in particular).

[0283] 30 million pairs of 500 bp windows were randomly split into two equally sized datasets. One of the datasets was reserved for the final validation at the end of the model development (test set). The other set was used for training and internal validation of the prediction model. Next, the training set was randomly split into 10 non-intersecting subsets and 10-fold internal cross-validation was performed (i.e. used 9 of these subsets for internal training and the remaining one for internal validation of the models, this was repeated 10 times, each time with a different validation subset). Initially, the Genome Scan algorithm was run on each one of those 10 internal training datasets. On the set of 1,041,594 regions generated by the GS algorithm (window pairs, see above), the inventors constructed a set of 22 parameters/predictors (see Tables 2) using domain knowledge. Then, machine learning procedures were applied to the output of the Genome Scan, thereby constructing a hierarchical classifier. This procedure was repeated 100 times for two different machine learning algorithms (i) logistic regression with greedy incremental feature and (ii) support vector machines with lasso regularisation. Greedy feature selection was performed by means of a modified version of statistical R-package CARRoT (Predicting Categorical and Continuous Outcomes Using One in Ten Rule, R CRAN package, 2018, Alina Bazarova and Marko Raseta, v1.0). The software was modified in such a way that would allow to incorporate merging of the output into non-intersecting genome regions by means of bedtools and then assessing the predictive power of the model given these regions. The support vector machine prediction was performed using R-package sparseSVM67 and additional scripting described above.

[0284] The inventors chose the models aiming at maximising their balanced (average class-wise) accuracy defined as 0.5*[TP/(TP+FN)+TN/(TN+FP)], where TP, TN, FP, FN stand for True Positives, True Negatives, False Positives, False Negatives. Due to the absence of the synthetically constructed negative instances of the origins these quantities were computed in terms of the overall length of the regions corresponding to true positive, true negative, false positive and false negative hits of 500 bp window pairs. The inventors kept on adding features to the greedy feature selection until improvement in predictive power was lower than 10\hat{ }-3. When working with SVM the inventors chose penalising parameters which led to the highest cross-validated predictive power as defined above. At the end of the procedure the inventors obtained 100 predictive models for each method which exhibited the highest predictive power for a given 10-fold cross-validation partition. For logistic regression, the best model emerged with the highest frequency of the predictors constituted by the features: UP_C_fraction, UP_G_fraction, Down_T_fraction, G_content_2 kb, rampG, AAA, GG, TTT (Tables 2). Once the training was complete, the chosen models based on 10-fold cross-validation were fitted with the whole original training set of 15 million pairs of 500 bp windows. The resulting trained models were then tested on the final hold-out test set (isolated from the training one in the very beginning and never touched throughout the model construction phase). Please note that each algorithm reported non-duplicate window pairs (i.e. if a window pair is retained with both forward and reverse scanning procedure by the genome scan algorithm, this window pair is reported once as positive by either machine learning algorithm).

[0285] In order to generate the predictions genome-wide, the trained model was run on the entire set of regions from GS resulting in 333,986 window pairs for LR and 279,195 window pairs for SVM called as positives by each algorithm. These window pairs were merged using bedtools (bedtools merge) to generate non-overlapping windows of 67,297 (LR) and 57,339 (SVM) regions. Please note that due to the sliding window pattern the inventors used to scan the genome, each window overlays 9 other windows, thus the same genomic regions are reported numerous times. The inventors remove the repeating regions by merging them, using bedtools merge, thus obtaining non-overlapping regions of the genome. These non-overlapping regions were used to generate the final predicted regions (i.e. FIG. 26 for core origins) or total false positive rate (regions not intersecting an origin, FIG. 73, normalised to average fragment length).

[0286] Calculation of Origin Density and Total Initiation Signal Across TAD Domains

[0287] To calculate the origin density across TAD domains, each TAD was divided into 100 bins (bedtools makewindows −n 100). As the bin size in each TAD was a fraction of the TAD size, the number of origins in each bin of the TAD was normalized to the bin size. To determine whether origin density across the TAD was significantly different in different cell types, the origin density across TADs for each bin was normalized to the 20 bins in the middle of each TAD (bin numbers 40-60). These values represent the differential origin density between the TAD middle and borders, rather than the overall origin density across the TAD.

[0288] The inventors have calculated the sum of normalized (background subtracted) signal from origin regions that fall onto TAD borders or TAD centres (dataset on Table 3, FIGS. 48 and 51). As before, TAD domains were divided into 100 bins and the 20 bins (1-10,91-100) were defined as borders, while 20 bins (41-60) were considered as centers.

[0289] Statistical Significance

[0290] Different statistical tests were used depending on the data nature, as indicated in the figure legends. Specifically, the R commands “wilcoxon.test”, “t.test”, and “chisq.test” were used to measure statistical significance. p=1 E-307 and p=2E-16 represent the lowest value stored in the memory of R (depending on the version). The Chi.square test is essentially a one-sided test, while Wilcoxon assumes a non-parametric distribution.

[0291] Data Availability

[0292] Data downloaded from external sources can be found in Table 3. Raw read files for SNS-seq/RNA-seq and processed files can be found at the NCBI Gene Expression Omnibus (GEO) under the accession code GSE128477.

[0293] Code Availability

[0294] Scripts and other bioinformatics pipelines used to analyse SNS-seq data can be found at https://github.com/iakerman/SNS-seq.

[0295] Results

[0296] The landscape of DNA replication origins in the human genome

[0297] Using an optimized SNS-seq protocol (see Methods and FIG. 52), the inventors identified DNA replication IS from 19 human cell samples, representing three untransformed (human embryonic stem cells, hESC; cord blood CD34(+) hematopoietic cells, HC; primary human mammary epithelial cells, HMEC) and three immortalized cell types derived from the HMEC line (ImM-1, ImM-2, ImM-3) (FIG. 1). Owing to the high number of cell samples investigated, a total of 320,748 IS were identified, the overwhelming majority of which were low activity IS belonging to immortalized cell types (Table 1a, see following section). The IS repertoire included the previously identified human LaminB2, MYC, MCM4 and HSP70 origins (FIG. 2 and Table 1 b).

[0298] As the raw data clearly exhibited variations in replication origin activity, the inventors classified origins in ten quantiles, based on their average activity (i.e., mean normalized SNS-seq signal): from quantile 1 (Q1) that contained the top 10% (highest average activity) to quantile 10 (Q10) that included the bottom 10% (lowest average activity) of origins (FIG. 3, FIG. 53). Origins in each quantile displayed similar mappability, which is a measure of the ability of SNS-seq reads to be matched to the human genome. Therefore, the variation in SNS-seq signal at origins belonging to different quantiles were not due to the technical differences in the inventors' ability to map them (FIG. 54)

[0299] Strikingly, the inventors' classification revealed that 70-85% of the origin SNS-seq signal originated from Q1 and Q2 origins in all cell types analysed (FIG. 4, Table 1a). In addition, the inventors observe that almost all the enrichment of the SNS-seq signal across the genome comes from regions that are defined as origins in the inventors' study, suggesting that broad and diffuse initiation outside origin regions is not substantial (FIG. 55, see Methods). As the SNS-seq signal represents the amount of DNA replication initiation events that take place in a cell population, the inventors concluded that Q1 and Q2 origins host the majority of the initiation events, highlighting these 64,148 regions, termed “core origins”, as replication initiation hotspots, irrespective of the cell type.

[0300] The remaining 80% of IS (Q3-Q10, 256,600 regions), hereby termed “stochastic origins”, had low mean activity across 19 samples and only hosted −15-30% of total

[0301] SNS-seq signal in each cell type (FIG. 4, Table 1a).

[0302] Most core origins were clustered together, because the distance to the nearest origin was shorter for core origins compared with stochastic origins or random distribution (FIG. 5, FIGS. 53 and 56). This is consistent with a previously observed community effect whereby clustered origins have higher activity than isolated origins4,10,22 (FIG. 56). Remarkably, a similar number of core origins in Mus musculus host 69% of all initiation events detectable by SNS-seq, suggesting that the core origins are a feature not specific to the human genome (FIG. 57).

[0303] The Position of Core Origins is Consistent

[0304] Origin activity was highly correlated in the different cell types (FIG. 6, average Pearson's r=0.69, p-value <2E-16 for all comparisons), suggesting that a given origin has similar levels of initiation in different cell types. About 77% of origins shared by the different cell types were core origins (Table 1a). Conversely, stochastic origins were less shared (FIG. 7, FIG. 58). In support of the inventors' findings that core origins are more ubiquitously active in different cell types, 72% of core origins were identified by an independent SNS-seq study using different cell types (FIG. 8, FIG. 59). Moreover, 49% of regions identified by a different origin mapping method (INI-seq) in a different cell line overlapped the inventors' origins, majority of which were core origins (FIG. 9). Early firing core origins were more likely to be identified by INI-seq, which maps early-firing origins (FIG. 60). In addition, almost all (87%) regions identified by OK-seq, overlapped origins identified in this study (FIG. 10). However, as this method only maps 5000 to 10 000 regions, with an average size of 34 kb; this overlap was not statistically significant. Nevertheless, core origins and core origins found in tight clusters (see Methods), which resemble initiation zones similar in size to those identified by OK-seq, overlapped significantly with regions identified by OK-seq (49.7%, FIGS. 61 and 62).

[0305] Core origins also coincided with regions previously shown to be bound by the pre-replication complex (pre-RC) components ORC1, ORC2 and MCM7. Specifically, 28% and 39% of core origins overlapped with ORC2 or MCM7 bound regions (FIG. 11, FIG. 63). Clustered core origins (initiation zones) overlapped with pre-RC component-bound regions more often (40% with ORC2 and 60% with MCM7, FIG. 12). Given that only about half of all core origins is active in any one cell type, the amount of overlap is suggestive that most active core origins are associated with pre-RC components ORC2 and MCM7. Reciprocally, 57% of ORC1- and 55% of ORC2-bound regions overlapped at least with one origin identified by SNS-seq (FIG. 13). Broader ORC1- or ORC2-bound regions, which might represent regions with multiple ORC1/2 binding events as suggested in S. pombe, were more likely to host an origin, and mostly a core origin (FIGS. 64 and 65).

[0306] In summary, the inventors' analysis identified core origins that represent bona fide IS in different cell types, which are also identified by alternative origin mapping methods. On average, core origins represent ˜40% of all origins identified in a single cell type, representing on average ˜30,000 regions (FIGS. 14 and 15). It is worth noting that core origins are different from “constitutive/common origins” previously observed with SNS-seq data. The inventors' analysis has the highest number of samples amongst these studies and based on the inventors' data, the inventors infrequently observe origins that are active in every sample.

[0307] Human and Mouse Genomes Share a G-Rich Sequence Signature

[0308] The inventors next investigated whether DNA replication initiation sites are placed in homologous regions across mouse and human genomes. The inventors find that only a small fraction (8%) of human origins have homologous regions in the mouse genome and only 2% are also identified as origins in mouse cells (FIG. 16, left panel). The inventors find a comparable level of homology for randomized genomic regions (7% conserved, 0.8% overlapping mouse origins, FIG. 16, right panel) suggesting that the majority of DNA replication initiation sites are not located in homologous regions in the mouse and human genomes. In accordance, the inventors observed a low level of sequence conservation of the origin DNA sequence compared to promoters and exonic regions across 20 mammalian species, reinforcing the idea that these sequences have appeared independently in the different lineages during evolution (FIG. 17). Interestingly, Phascon20way scores of regions flanking the origins (+/−5 Kb of origin summits), display moderately conserved regions 0.5-3 Kb upstream of the IS region for core origins, which are mostly attributable to regulatory elements/exonic sequences (FIGS. 66 and 67).

[0309] Despite lacking sequence homology, functional regions of the genome may contain sequence elements that are shared between species. Thus, the inventors next examined sequence elements that might be shared across replication origins of different species. To identify DNA sequence elements that coincide with origins, the inventors examined the relationship between the IS and G-rich putative G4 structures, which are helical DNA configurations that contain one or more guanine tetrads. 83% of core and 34% of stochastic origins contained at least one putative G4 element defined by two different methods (FIG. 18, FIG. 68). A large number of putative G4 elements has been predicted in human and mouse genomes, but as previously noted, only a fraction of them hosts an origin. Hence, the presence of a putative G4 element is not, on its own, a strong predictor of origin placement, but most core origins indeed contain a G4 element.

[0310] Similar to previous findings in mouse, a number of G-rich motifs upstream of the IS were evident (FIG. 69) and were enriched in origin sequences even after C/G and CpG content normalisation of the control regions (FIG. 70). Analysis of the base composition of human origins within ±1.5 Kb of the oriented IS summit confirmed that core origins were enriched in G-rich sequences with an asymmetrical enrichment up to 1.5 Kb upstream of the IS centre (FIG. 19).

[0311] The inventors further asked how the replication origins determined in this study position relative to the placement of pre-RC factors on the genome. When the inventors aligned the positions of the pre-RC components ORC1, ORC2 and MCM7 relative to the IS, the inventors found that they were preferentially positioned upstream of the IS, near the G-rich region in both core and stochastic origins (FIGS. 20 and 21). In addition, the distances between the IS and these pre-RC factors recapitulated independent biochemical methods measuring positioning of pre-RC factor binding sites, such that the median distances between core IS (peak summit) and ORC1, ORC2 and MCM7 binding sites (peak centre) were 512, 446 and 302 bp, respectively. This positioned the peak of MCM complex downstream of the ORC subunits, at 300 bp from the IS (FIG. 22). Indeed, the MCM complex sits on at least 68 bp and binds to a neighboring nucleosome, increasing the size of the protected DNA up to 210 bp. In addition, the MCM helicase must unwind the DNA over a minimum length in order to allow the DNA polymerase to bind to the unwound DNA. The inventors believe that this result, linking the IS determined by SNS-seq and pre-RC binding sites determined by ChIP-seq, is a clear independent demonstration that the SNS-seq method accurately maps the initiation sites of DNA replication. Furthermore, the inventors' results show that the relative in vivo positioning of Pre-RC components and IS are similar to those determined by biochemical methods.

[0312] Origin Positioning can be Predicted Based on DNA Sequence

[0313] As strong origins display a G-rich profile (a putative sequence signature), the inventors asked whether DNA replication origins could be predicted from the DNA sequence alone. Classical motif search algorithms are designed to detect enrichment of short, but highly similar stretches of DNA, typically bound by transcription factors. Given the core origin size (average 716 bp), the inventors hypothesized that they may be specified by hyper-motifs, which are discriminatory DNA sequence patterns that are typically longer than classical transcription factor binding sites. To do this, the inventors modelled the asymmetrical base composition of the core origin and its flanking sequences and scanned the human genome for similar DNA sequence patterns (FIG. 71, see Methods). The genome scanning (GS) algorithm identified 228,442 non-overlapping regions which located 83% of core origins and 33% of stochastic origins with FPR of 66% (FIG. 23). The predictive ability of the GS algorithm decreased in parallel with the mean origin activity, suggesting that origins with higher activity (core) are more likely to contain discernible G-rich sequence elements (FIG. 24). The inventors' GS algorithm also predicted 76% of core and 54% of all origins in the mouse genome (FIG. 25), which display a similar G-rich sequence signature at core origins (FIG. 72). Asymmetrical base composition at origin sequences has previously been observed. Interestingly however, only the modelling of core origins, but not of stochastic or previously published origins led to high predictive power with the GS algorithm (see Methods). In conclusion, despite lack of evolutionary sequence conservation of DNA replication origins in these two mammalian species (FIGS. 16 and 17), the inventors' data suggests that most human and mouse core DNA replication origin positions can be predicted using DNA sequence alone based on the same G-rich DNA hyper-motif, suggesting that a conserved mechanism(s) governs origin selection in these vertebrate species.

[0314] To improve the predictive power and reduce FPR, the inventors modelled the DNA sequences around the predicted regions and used two different machine-learning (ML) algorithms (see Methods) to better differentiate true origins in the inventors' predictions. Modelling of the DNA sequences included using information, such as the density of di-, tri- and multi-nucleotides (CC, CG, GG, CGCG, etc.), inter-prediction distances, and the base composition variations (A, T, G, and C) of the DNA across a 4 kb region (see Methods). Remarkably, GS algorithm coupled with a ML algorithm (logistic regression with greedy feature selection, LR) identified 67,297 non-overlapping regions and predicted 67% of core origins with a total FPR 27.8% (FIG. 26, FIG. 73). In other words, a large proportion (67%) of core origins contain discernible DNA sequence patterns, and when these patterns are present in the genome, they are associated with an origin 72.2% of the time, in at least one cell type. Importantly, when the inventors employed a completely independent ML approach (SVM), this resulted in vastly overlapping predictions (FIG. 26, FIG. 74) with an FPR of 23.4% (FIG. 73). Coupling of GS and ML algorithms thus allowed the prediction of origin positions in a genome as large as the human genome.

[0315] Both SVM and LR approaches identified the upstream G density as critical parameters for predictions (FIG. 27, FIG. 75). This is in accordance with the presence of an origin G-rich Repeated Element (OGRE) or tandemly arranged multiple (up to 6-12) G4 structures as well as ultra-short C/G-rich nucleotide motifs found at human, mouse and chicken origins.

[0316] Cell Differentiation Alters Origin Positioning and Activity

[0317] The inventors observed that in the human genome, core origins were preferentially placed near promoter regions and depleted from intergenic regions (FIGS. 28, 29 and 30). This is in agreement with a number of studies suggested that transcription is a predictive factor for DNA replication origin specification with varying degrees of correlation. The inventors' data also suggests that in hematopoietic cells, genes with higher transcriptional activity were more likely to host an origin in their promoter region (FIG. 76). Both the number and activity of origins within promoter regions increased with the promoter transcriptional output (FIGS. 77 and 78). Either RNA synthesis activity per se, or open chromatin induced by transcription complex assembly might favor pre-RC formation. However, the correlation between the position of core origins at promoter and intergenic regions (FIGS. 28 and 29) is not observed for gene bodies (FIG. 30). This finding suggests an impact of the chromatin environment of the promoter, rather than RNA synthesis per se, in the preferential localization of origins at promoter regions.

[0318] The inventors next used hematopoietic cells undergoing erythropoiesis to examine the impact of changing transcriptional landscape on origin specification. CD34(+) hematopoietic cells were isolated from human cord blood and differentiated towards erythropoietic linage using erythropoietin (EPO) (FIG. 79). Gene ontology analysis (GREAT) revealed a single enriched set of genes with origins activity increased upon erythrocyte differentiation (FIG. 80) suggesting that DNA replication origins are recruited to gene domains undergoing transcriptional and epigenetic changes.

[0319] G-Rich and Transcription Impact on Origin Activity

[0320] In HCs, 89% of highly expressed genes hosted a CpGi (a G-rich region) in their promoter, whereas only 48% of silent gene promoters hosted CpGi (FIG. 81). Therefore, the inventors asked whether the concomitant presence of a CpGi (or a G-rich stretch) and high transcription activity was required for high origin activity in hematopoietic cells. The inventors did not observe a profound impact of transcription on origin numbers, clustering or activity near CpGi(+) promoters (FIGS. 31, 32 and 33). In addition, DNA replication initiation activity from CpGi(+) TSS did not correlate with transcriptional activity (Pearson's r<0.01, FIG. 34).

[0321] In contrast, there is a clear increase in origin positioning at CpGi(−) promoters when the level of transcription is increased (FIG. 35). Moreover, the number of clustered origins increased proportionally with the transcriptional activity, and the total origin activity was higher with increasing transcriptional activity (Pearson's correlation r=0.25—FIGS. 36, 37, 38). The inventors observed similar trends for gene promoters that contained a G-rich stretch of DNA instead of a CpGi (FIG. 82).

[0322] Immortalization Results in Increased Origin Positioning Stochasticity

[0323] As aberrant DNA replication is a hallmark of many cancer cells, the inventors next asked whether the origin repertoire was disturbed after cell immortalization, a key step in cancer development leading to uncontrolled cell proliferation. To this aim, the inventors used three previously described immortalized cell lines obtained by mis-expression of oncogenes of the parental Human Mammary Epithelial Cell (HMEC) cell line: (i) ImM-1 in which p53 levels was reduced by at least 50% (ΔTP53), (ii) ImM-2 in which the oncogene RAS is overexpressed, and (iii) ImM-3 in which WNT is overexpressed. The inventors identified more origins in the immortalized cell types than in the untransformed cell types (hESC, HC and HMEC) (on average 100,000 vs 70,000 origins). This could not be due to higher proliferation rates in these cells as the hESC and HCs proliferated at the same or higher levels (see Methods). Nevertheless, untransformed and immortalized cell types shared a common core origin repertoire (FIG. 40) and the bulk of initiation events (˜80%) originated from core origins (FIG. 83). The higher number of origins in immortalized cells was clearly caused by an increase in stochastic origins (FIG. 41). While core (Q1 and Q2) origins were shared between untransformed and immortalized cell types, quantiles with lowest activity (Q8-10) were predominantly contributed by immortalized cell types (FIG. 42). In order to study origins from untransformed and immortalized cell types disjointedly, the inventors re-classified origins of each category into quantiles separately as described before. Genomic localization of core origins in relation to genes was comparable in untransformed and immortalized cell lines (FIGS. 43 and 44). However, stochastic origins from immortalized cells were less enriched near promoter regions (FIG. 44), but were enriched in heterochromatic regions (marked by K9me3) (FIG. 45). Therefore, immortalization induces low activity origins associated with what is heterochromatin in untransformed cells.

[0324] Immortalization also results in differentially up- or down-regulated origins. Strikingly, most down-regulated origins contain G-rich elements such as CpGi/G4, whereas up-regulated origins tend to be G-poor (FIGS. 84 and 85). Therefore, a change in the specification of origins occurs, with preference shifting from G-rich to G-poor DNA for both core and stochastic origins.

[0325] The inventors next asked whether there was a specific distribution of core and stochastic origins across topologically associating domains (TADs), which are large regions of the genome that self-interact to form three-dimensional (3D) structures. TAD borders are involved in the insulation of the corresponding chromatin domains, confining chromatin loops inside the TADs, and are enriched in TSS and the insulator factor CTCF. Both human core (FIG. 46) and stochastic origins (FIG. 47) were significantly enriched at TAD borders (i.e., “smiley” trend-line). Total amount of DNA replication initiation measured by SNS-seq was also 1.5 fold higher at TAD borders than at TAD center (FIG. 48). The inventors obtained similar results for mouse core and stochastic origins (FIG. 86). The inventors conclude that the replication origin density pattern mimics the structural organisation of the genome in individual chromatin domains. This distribution was clearly disturbed in immortalized ImM-1 (TP53^{KD}) cells compared with the parental HMEC cell line, and that this variation in origin density on TAD borders was statistically significant (FIGS. 49 and 50). Total amount of replication initiation at TAD borders and TAD centre was also markedly different in the ImM-1 cells compared to the parental HMEC (FIG. 51). hES cells, or other untransformed cell types did not display altered core origin density at TAD borders, suggesting that this property is specific to immortalization and does not reflect high proliferation rates (FIG. 87).

[0326] Altogether, these data suggest that the presence of either a CpGi/G-rich stretch or transcription is sufficient to recruit origin activity. In highly active promoters, CpGi or G-rich elements are not correlated with replication origin activity. Conversely, at inactive promoters CpGi/G-rich motifs are clearly associated with replication origin activity (summarised in FIG. 39). This result is also in line with the presence of G-rich elements at most replication origins.

### DISCUSSION

[0327] DNA replication origin specification remains poorly understood despite the progress in next-generation sequencing technology that allowed IS mapping genome-wide. In this study, the inventors used the SNS-Seq method, which has the highest resolution to map replication origins, in which the signal was corrected with suitable experimental controls generated in parallel (see Methods). The inventors found a remarkable consistency in the specification of a subset of IS, termed core origins, in multiple cell types that is maintained even after immortalization. Core origins, which represent −30,000 regions in any given cell type, hosted the bulk of DNA replication initiation events (70-85%) in all the studied cell types. The inventors uncovered that most core origins could be predicted by a computational algorithm based only on sequence recognition, thus unequivocally concluding that replication origins are preferentially activated in a precise set of regions in mammalian genomes in different cell types.

[0328] The inventors' study also reveals that the underlying DNA sequence is a prominent predictor of origin positioning in the human and mouse genomes. The G-rich sequence patterns commonly found in core origins were predictive of origin placement genome-wide. When present in the human genome, 72% of these patterns were associated with DNA replication initiation in at least one cell type. The stretch of G-rich repeated DNA sequence (OGRE) upstream of the IS corresponds with ORC1, ORC2 and MCM2-7 binding regions, coupled to a region with lower G and C content (FIGS. 19, 20, 21 and 22). Core origins are also often clustered, suggesting that they represent regions of the genome with several potential pre-RC binding sites. This organisation might constitute a broader pre-RC binding platform that may host several pre-RC and increase the efficiency of MCM loading and origin activation. Conversely, most stochastic origins contain a shorter stretch of G-rich region, possibly representing single putative pre-RC binding sites (FIG. 19). The position of the initiation sites revealed by SNS-seq is in perfect agreement with the positions of pre-RC factors determined independently, which are found upstream of the initiation site, coinciding with the G-rich region as expected, (FIG. 22). Importantly, this finding is an independent confirmation of the association of G-rich regions to metazoan replication origins.

[0329] How can a G-rich region be involved in initiation of DNA replication? One formal possibility for G-rich SNS-seq peaks could be the experimental protocol involving the use of lambda exonuclease, where G-rich sequences could be resistant to digestion (PMID: 25695952). However, the experimental conditions for SNS-seq used in most studies, including the inventors' ones but excluding the aforementioned study, are stringent (see Methods). Moreover, control SNS-seq samples treated in parallel (+RNase) are only slightly enriched in G-rich DNA. In addition, the G-rich nature of replication origins has been also confirmed using a nascent strand purification method that does not employ lambda exonuclease. Finally, some factors involved in initiation of DNA replication co-localize with DNA replication origins (this study) and can bind to G4 (see below).

[0330] A second possibility may be linked to the ON/OFF stages of DNA replication origins. The opening of DNA at the replication initiation sites requires two temporally successive steps. First, Pre-RCs form in G1, through the binding of ORC, Cdc6, Cdt1, which permit the recruitment of the MCM helicase. It is accepted that all potential origins are pre-set at this stage, but it is still not known how the metazoan origins are recognized by the ORC. The activation of the MCM helicase occurs at the G1-S transition, but only 20-30% of the pre-RCs are activated in S phase. A fundamental characteristic of G4 is its ability to form several structures, including folded and unfolded forms. These two forms might regulate the OFF stage (pre-RC) or the ON stage (initiation) of a replication origin; Exogenous G4 sequences able to form G4 structures do not inhibit the formation of pre-RCs in Xenopus egg extracts, but do compete with the firing of replication origins. This result may suggest that the folded form of G4 participates in the initiation of DNA synthesis but is not required for origin recognition by pre-RC proteins. In agreement, MTBP, RecqL and Rift, three factors involved in origin firing, all bind to G4.

[0331] A third possibility is guided by the NS profile at replication origins which may suggest that G4 act as a transient pause of the replication fork initiating at replication origins. Several previous studies have reported the enrichment of G-rich regions 5′ to the initiation site and suggested a transient pause of the replication fork at the G4. This hypothesis suggests that the G-rich/G4 structures are folded when origins are activated and then unfolded through a mechanism imposing a transient pause of the progressing replication fork, a phenomenon similar to transcriptional pausing.

[0332] The finding that the underlying DNA sequence is predictive of origin placement in a given species naturally leads to question to which extent chromatin and transcriptional environment is also involved in initiation of DNA replication. Origin positioning has previously been correlated with open chromatin and various histone marks related to active chromatin. Core origins often coincide with transcription and regulatory elements of the genome (e.g., promoters and enhancers) (FIG. 28, FIG. 88) that are associated with activating histone marks and open chromatin. It is conceivable that the DNA sequence pattern the inventors identified is usually part of open or permissive chromatin. However, core origins are also present in non-genic regions (19.4%) or silent genes. In addition, the impact of transcription and the presence of a G-rich element can be uncoupled. The presence of a G-rich element/CpGi in the promoter region of silent genes, or in non-coding regions, is sufficient to host replication origin activity. Of note, polycomb group proteins associate with CpGi(+) promoters and can bind to G4 DNA. The inventors previously showed that the presence of these proteins is a strong indicator of origin positioning, supporting a mechanism by which silent CpGi(+) gene promoters or repressed chromatin may host origins. Interestingly a recent report also supports a role for G4 elements in the regulation of polycomb-mediated gene repression. In conclusion, even though the DNA sequence information is not as strictly defined as the consensus ARS element sequence present at S. Cerevisiae origins, its predictive value shows that sequence specificity is a conserved feature of replication origins in metazoan cells. The inventors also acknowledge that a combination of select epigenetic marks together with sequence information might improve the prediction of metazoan replication origins.

[0333] Besides core origins, which represent most of the SNS signal, the inventors' analysis also identified thousands of stochastic origins, which poorly coincide with G-rich elements. Interestingly, immortalization greatly increased the number of these low-activity origins, especially within heterochromatic regions. This was accompanied by equalisation of DNA replication initiation events at TAD borders and centres (FIG. 51). The finding that replication origins are enriched at TAD borders might reflect a role for DNA replication origins in the formation of chromatin loops or their consequence. As such, density of origins could play a role in the insulation of replication domains. This is also reminiscent of previous findings that origin density/origin activity is highly correlated with replication timing. In addition, replication timing boundaries correlate with TAD boundaries. Hence, altered DNA initiation density, aberrant replication timing and altered chromosomal structure organisation might be linked in cell types undergoing immortalization. A previous study linked mis-expression of the oncogenes MYC and CCNE1 to formation of intragenic origins upon premature S-phase entry in a tumor-derived cell line. Here, the inventors show that both the number and distribution of replication origins is perturbed during immortalization, an important step in cellular transformation. Both the increased stochasticity in origin placement and perturbation of the DNA replication initiation density profile on TADs could therefore be new landmarks associated to cancer cells.

TABLE 1a

| | Percentage | | | | % of | | | |
|---|---|---|---|---|---|---|---|---|
| | of hg38 | | | | initiation | | | |
| | (number | | | | events | Of the | | |
| | of bases | | | | originating | origins | Number | % of |
| | that are | | | | from Core | shared | of origins | origins |
| | called | | | | origins | between | shared | shared |
| | origin/total | | | | (% of total | two cell | with at | with at |
| | number | Number of | Number of | % | SNS-seq | types, % | least | least |
| Number of | of bases | Core | Stochastic | Core | signal on | of Core | 1 other | 1 other |
| origins | in hg38) | origins | origins | origins | origins) | origins | cell type | cell type |
| 74534 | 1.3 | 39056 | 35478 | 52.4 | 72.9 | 81.1 | 57267 | 76.8 |
| 98086 | 1.5 | 45562 | 52524 | 46.5 | 79.9 | 82.1 | 61801 | 63.0 |
| 37703 | 0.7 | 23520 | 14183 | 62.4 | 87.2 | 84.3 | 31593 | 83.8 |
| 90761 | 1.0 | 15868 | 74893 | 17.5 | 73.2 | 65.7 | 39129 | 43.1 |
| 109137 | 1.9 | 47545 | 61592 | 43.6 | 85.0 | 79.2 | 63232 | 57.9 |
| 111531 | 1.4 | 27902 | 83629 | 25.0 | 78.6 | 70.2 | 55778 | 50.0 |
| 86958 | 1.3 | 33242 | 53716 | 41.2 | 82.2 | 77.1 | 51466.7 | 62.4 |

Number of DNA replication origins called per cell type (MACS2inSICER peaks, merged peaks from 2-6 replicates)

TABLE 1b

| | Nearest | | Origin name | Origin |
|---|---|---|---|---|
| Origin name | gene(s) | Reference | (this study) | type |
| LAMINB2 | LMNB2 | Giacca et al, PNAS, | HO_268397, | Core |
| | | 1994 | HO_268394 | |
| cMYC | MYC | Vassilev et al, MCB, | HO_146581 | Core |
| | | 1990 | | |
| MCM4 | PRKDC/ | Ladenburger et al, | HO_139765 | Q4 |
| | MCM4 | MCB, 2002 | | |
| HSP70 | HSPA1A | Taira et al, MCB 1994 | HO-104401 | Core |
| SCA-7 | ATXN7 | Nenguke, HMG, 2003 | HO-56313 | Core |
| HD | HTT | Nenguke, HMG, 2003 | HO_69221 | Core |
| (Huntington's | | | | |
| disease) | | | | |
| TOP1 | TOP1 | Keller et al, JBC, | HO_289103 | Q4 |
| | | 2002 | | |
| DNMT1 | DNMT1 | Araujo, JBC, 1999 | HO-271898- | Core at |
| | | | HO271901 | promoter, |
| | | | | (Q6, Q3, |
| | | | | Q4, Q1) |

Genomic coordinates of previously identified DNA replication origins (hg38)

TABLE 2a

| PREDICTOR | Description (based on 2 consecutive windows of 500 bp) |
|---|---|
| UP_A_fraction | Density of the base A in the first window (watson strand, 5′ to 3,) |
| UP_C_fraction | Density of the base C in the first window (watson strand, 5′ to 3,) |
| UP_G_fraction | Density of the base G in the first window (watson strand, 5′ to 3,) |
| UP_T_fraction | Density of the base T in the first window (watson strand, 5′ to 3,) |
| Down_A_fraction | Density of the base A in the second window (watson strand, 5′ to 3,) |
| Down_C_fraction | Density of the base C in the second window (watson strand, 5′ to 3,) |
| Down_G_fraction | Density of the base G in the second window (watson strand, 5′ to 3,) |
| Down_T_fraction | Density of the base T in the second window (watson strand, 5′ to 3,) |
| G_content_2 kb | Density of the base G 2 kb upstream from the first window |
| | (including) |
| C_content_2 kb | Density of the base C 2 kb downstream from the second window |
| | (including) |
| rampG | The slope with which the G-density drops from first to the second |
| | window) |
| rampC | The slope with which the C-density drops from first to the second |
| | window) |
| CC | The density of the indicated k-mer in the first window (watson |
| | strand) |
| CCC | The density of the indicated k-mer in the first window (watson |
| | strand) |
| CG | The density of the indicated k-mer in the first window (watson |
| | strand) |
| CGCG | The density of the indicated k-mer in the first window (watson |
| | strand) |
| GG | The density of the indicated k-mer in the first window (watson |
| | strand) |
| GGG | The density of the indicated k-mer in the first window (watson |
| | strand) |
| AA | The density of the indicated k-mer in both windows (watson strand) |
| AAA | The density of the indicated k-mer in both windows (watson strand) |
| TT | The density of the indicated k-mer in both windows (watson strand) |
| TTT | The density of the indicated k-mer in both windows (watson strand) |

Predictors used for machine learning in this study

TABLE 2b

| LR | | SVM | |
|---|---|---|---|
| PREDICTOR | weight | PREDICTOR | weight |
| UP_A | 0.0254 | UP_A | 0.218680435 |
| UP_C | 7.9 | UP_C | 0.139793978 |
| UP_G | 100 | UP_G | 9.371271338 |
| UP_T | 0.0249 | UP_T | 0.341651336 |
| DOWN_A | 0.0587 | DOWN_A | 0.873924681 |
| DOWN_C | 0.0306 | DOWN_C | 0.008394576 |
| DOWN_G | 0.044 | DOWN_G | 3.551440913 |
| DOWN_T | 0.087 | DOWN_T | 0.02648294 |
| G_2 kb | 0.594 | G_2 kb | 10.16243823 |
| C_2 kb | 0.012 | C_2 kb | 0.070957798 |
| rampG | 0.4332 | rampG | 6.94E−05 |
| rampC | 0.0026 | rampC | 4.29E−06 |
| AA | 0.1215 | AA | 5.25E−06 |
| AAA | 0.342 | AAA | 0.005761185 |
| CC | 0.0062 | CC | 0.000142966 |
| CCC | 0.6531 | CCC | 0.015779588 |
| CG | 0.1746 | CG | 0.002986597 |
| CGCG | 0.062 | CGCG | 0.107479555 |
| GG | 0.0528 | GG | 2.49E−05 |
| GGG | 0.0133 | GGG | 0.003187274 |
| TT | 0.0548 | TT | 8.57E−06 |
| TTT | 0.3173 | TTT | 0.008014669 |

Predictors used for machine learning in this study

TABLE 3

| Data | Cell Line |
|---|---|
| ORC1 ChIP-seq peaks | HeLa |
| ORC2 ChIP-seq peaks | K562 |
| MCM7 ChIP-seq peaks | HeLa |
| Gencode genes | not applicable |
| SNS-seq peaks (other study) | HeLa, K562, IMR90 (merged) |
| Phastcon20way scores | not applicable |
| H3K9me3 ChIP-seq peaks | H1 hESC |
| Heterochromatin | H1, K562 |
| INI-seq | in vitro, HeLA |
| OK-seq | HeLA |
| G4 mismatch | in vitro |
| G4H | human genome |
| TAD domains | human (hESC H1), mouse ESC |
| mappability | hg38 |
| Early and late replicating regions | H9 (hESC), Hematopoietic cells CD34+ |

Sources of datasets used in this study

TABLE 4

| | | Function/ | | |
|---|---|---|---|---|
| | | target | | |
| | Neighbouring | of | | |
| | gene | the | | |
| Primer | (if | primer | Forward | Reverse |
| pair | present) | pair | primer | primer |
| 1 | LMNB2 | origin | CACATGGAGGTTCTATG | CAAGTTCACGCCCAAGTA |
| | | | ACTGC (SEQ ID NO: | CA (SEQ ID NO: 43179) |
| | | | 43178) | |
| 2 | HBA1 | origin | GTCCACCCCTTCCTTCC | TGGAGGAGGTGAGACTT |
| | | | TC | AAGGA |
| | | | (SEQ ID NO: 43180) | (SEQ ID NO: 43181) |
| 3 | NPRL3 | origin | GAGTTCCGCGGTGCTGT | AACCAACATCGAGAGGG |
| | | | C (SEQ ID NO: 43182) | ACG (SEQ ID NO: 43183) |
| 4 | PAPD4 | origin | TGGGAGGTTCCAGCAGT | CCTCTTTTGGTCCTGGAG |
| | | | ATC (SEQ ID NO: 43184) | TG (SEQ ID NO: 43185) |
| 5 | DACH1 | origin | GAACTCGGAGCAGAGAC | GATGATCTCCCTCTCCTT |
| | | | TCC (SEQ ID NO: 43186) | TTCC (SEQ ID NO: 43187) |
| 6 | BTBD2 | origin | ACGGAGGGGTCACCAGT | CCCAACCCACTGTTTCTA |
| | | | AG (SEQ ID NO: 43188) | GG (SEQ ID NO: 43189) |
| 7 | LMNB2 | Background | GATTGAAAAGTCTCCGG | CGAACTGCCAGAACGTG |
| | | (no | GGC (SEQ ID NO: 43190) | TG (SEQ ID NO: 43191) |
| | | origin) | | |
| 8 | HBA1 | Background | GGGCTGACTTTCTCCCT | ACTCCACTCCCGCCCATC |
| | | (no | CG (SEQ ID NO: 43192) | (SEQ ID NO: 43193) |
| | | origin) | | |
| 9 | NPRL3 | Background | GAAGGCAGATCACGAGG | TCAAGCGATTCTCCTGTC |
| | | (no | TCA (SEQ ID NO: 43194) | CC (SEQ ID NO: 43195) |
| | | origin) | | |
| 10 | PAPD4 | Background | GGCAGGATTTAGGAACT | TCAGGATTCTTTAGAAAG |
| | | (no | GGA (SEQ ID NO: 43196) | CAGAAT (SEQ ID NO: |
| | | origin) | | 43197) |
| 11 | DACH1 | Background | AGGGAAATGAAACAGGG | GGGTCAGAAATAAATCCC |
| | | (no | ACA (SEQ ID NO: 43198) | CATAG (SEQ ID NO: |
| | | origin) | | 43199) |
| 12 | BTBD2 | Background | CCAGTGTGGGTGACAGA | GGACAGTGTGACCGAGG |
| | | (no | GTG (SEQ ID NO: 43200) | AGT (SEQ ID NO: 43201) |
| | | origin) | | |
| 13 | cMYC | origin | ACCAAGACCCCTTTAACT | CCTCGTCGCAGTAGAAAT |
| | | | CAAGA (SEQ ID NO: | ACG (SEQ ID NO: 43219) |
| | | | 43218) | |
| 14 | none | origin | TCTCACAGCTTGTGCAG | GCTGTTTCCCCACAAAAC |
| | (intergenic | | TCC (SEQ ID NO: 43202) | AC (SEQ ID NO: 43203) |
| | origin) | | | |
| 15 | none | origin | AGCCACGTTAGGGAAAG | CAAATGTGTTTCTTGGGT |
| | (intergenic | | GTC (SEQ ID NO: 43204) | TGG (SEQ ID NO: 43205) |
| | origin) | | | |
| 16 | none | origin | GCTGGAGTGGAGACAGT | CTCAAACCCAAACCCAAT |
| | (intergenic | | GAA (SEQ ID NO: 43206) | C (SEQ ID NO: 43207) |
| | origin) | | | |
| 17 | none | origin | TCTTGCTTTCTCCTTGCT | CAGGGGAGGTGAACAGA |
| | (intergenic | | GA (SEQ ID NO: 43208) | TG (SEQ ID NO: 43209) |
| | origin) | | | |
| 18 | none | Background | CAAGAATCGGACGTGAA | ATCATTCCAGGAATCCTC |
| | | (no | GG (SEQ ID NO: 43210) | TGG (SEQ ID NO: 43211) |
| | | origin) | | |
| 19 | none | Background | AGGGCTGAGCCATAATT | CTGCAATGCACTCACAAC |
| | | (no | CTTCT (SEQ ID NO: | AAC (SEQ ID NO: 43213) |
| | | origin) | 43212) | |
| 20 | none | Background | CTTGCACAATGCCTCAC | GAAAACACCAGCCACCA |
| | | (no | TCA (SEQ ID NO: 43214) | GAA (SEQ ID NO: 43215) |
| | | origin) | | |
| 21 | none | Background | GCTACTGATTCGGTGAG | GAGTTAAAGCACCCCTGT |
| | | (no | CAG (SEQ ID NO: 43216) | TGG (SEQ ID NO: 43217) |
| | | origin) | | |

List of primers used in this study (5 to 3 prime)

TABLE 5

| | | GS | GS + LR | GS + SVM |
|---|---|---|---|---|
| | | (overlapping | (overlapping | (overlapping |
| | Description | windows) | windows) | windows) |
| TPR | True positive rate | 0.51 | 0.36 | 0.34 |
| TNR | True negative rate | 0.87 | 0.97 | 0.98 |
| PPV | Positive predictive value TP/(TP + FP) | 0.20 | 0.36 | 0.34 |
| NPV | Negative predictive value | 0.97 | 0.96 | 0.96 |
| | TN/(TN + FN) | | | |
| BA | Balanced accuracy | 0.69 | 0.67 | 0.66 |
| | (0.5*(TP/(TP + FN) + TN/(TN + FP) | | | |

Confusion table displaying the performance of the genome scan (GS) and the machine learning algorithms on the test set.

### Example 2—Non-Viral Eukaryotic Vectors with Autonomous Replication

[0334] I. Main Objective

[0335] The goal of the inventors was to develop non-viral, self-replicating eukaryotic therapeutic vectors by introducing sequences containing a human origin of replication with high replicative capacity into defined plasmids. The sequences containing origins of replication of interest are previously determined through the exhaustive analysis of the repertoire of origins of replication of the human genome established in the laboratory.

[0336] II. Results

[0337] Objective 1: Define the minimum size and characteristics of vectors.

[0338] The first objective of this project was to define the basic receptor vector for insertion of our replication origins, as well as a rapid vector replication detection test.

[0339] 1. DpnI Replication Test

[0340] This assay is based on the resistance of plasmids to digestion by DpnI, a methylated DNA digesting enzyme. (FIG. 89). The plasmids are prepared in E. Coli Dam+ bacteria. Therefore, the original plasmids used are methylated and sensitive to digestion by the restriction enzyme DpnI. In contrast, the DNA loses its methylation upon replication in human cells, and thus loses its sensitivity to DpnI. The replication status of the transfected plasmids can then be identified by testing its sensitivity to DpnI digestion. After transfection into bacteria, the formation of colonies indicates the presence of replicated plasmids (FIG. 89).

[0341] 2. Basic Vector: pEPi-Del (peGFP-S/MAR)

[0342] As a first step, the inventors tested the pEPi vector, a non-integrating vector whose expression can be monitored by fluorescence and which has the advantage of having an attachment site on the nuclear matrix allowing it to be better retained in the cell nucleus. The inventors had previously adapted it by removing the origin of replication of the SV40 virus that it contained (Ori SV40): pEPI-Del (FIG. 90). These two vectors allowed the inventors to develop their method for rapid testing of episomal replication in a dual cell system, HEK293T cells that express the large T antigen and allow replication of the SV40 origin (as a control) and HEK293 cells that do not express this antigen and do not allow replication of the SV40 virus origin (FIGS. 90-94).

[0343] Following the inventors' preliminary results, they readapted their strategy (FIG. 95). First, the inventors modified the reporter gene (eGFP) with a gene allowing antibiotic selection (puromycin) of positively transfected human cells. They also decreased the size of the S/MAR site. On the other hand, the inventors chose to be able to quickly screen a large number of sequences. The original sequences to be inserted were synthesized and cloned into the new receptor vector, using the assistance of the company Genscript.

[0344] 3. Base Vector: pPuro-Del-MAR5

[0345] In order to validate the relevance of the inventor's new vector design, they first checked the impact of replacing the S/MAR sequence by the shorter MAR5 sequence (FIG. 96), as well as the impact of using the puromycin resistance gene instead of the one allowing eGFP expression (FIG. 99). The expression of eGFP was monitored by flow cytometry (FIG. 97). It shows that the vector with the MAR5 sequence (pMAR5) transfects 5 to 6 times better than the vector with the full S/MAR sequence, and as well as a vector with no nuclear matrix binding sequence (peGFP-C1). The replication assay (FIG. 98) shows a higher replication rate of the pMAR5 plasmid than the vector with the S/MAR (pEPi) and higher than the pEGFP-C1 vector. These results demonstrate the value of a reduced S/MAR sequence size. Furthermore, the replacement of the eGFP sequence with the gene conferring puromycin resistance allows the use of the Dpn1 replication assay up to at least 13 days after cell transfection, compared to 5 days with the previous construct (FIG. 100). The receptor vector finally retained and cloned: pPuroDel-MAR5_MCS is presented in FIG. 102.

[0346] Objective 2: Qualitative and quantitative analysis of autonomous replicative capacity (WP 2.1).

[0347] 1. Selection and Synthesis of the Origin Bank to be Tested

[0348] The inventors selected 67 sequences containing human replication origins and 2 control sequences (synthesized by the company Genscript). These sequences were chosen in view of the method according to the invention, i.e. the complete repertoire of replication origins identified by the inventors. A genome-wide and high-resolution repertoire of human genome replication origins was identified by an analysis of 24 triplicate samples obtained from different human cell types: pluripotent embryonic stem cells, primary CD34 cells, hematopoietic differentiating CD34 cells, epithelial cells, and oncogene immortalized epithelial cells. This analysis revealed a particular class of origins that we named “Core origins” (Core Oris) which are responsible for 80% of the replication initiation signal, and which are common to most of the cell types analyzed. the inventors have selected a series of origins that present different characteristics representative of CORE origins. These criteria are for example the presence of binding sites of the ORC complex proteins involved in the recognition of origins, the frequency of sites capable of forming G quadruplexes (G4), the presence of transcription initiation sites (TSS), the presence of post-translational modifications of Histone 3 (e.g. H3K4Me3), the presence of Rloop, the co-validation of the location of these origins by other techniques (IniSeq, EdUseq), the presence of binding sites of the Treslin-MTBP complex which is involved in the activation of the helicase responsible for the initiation of replication 4 examples of origin profiles are presented (FIG. 101).

[0349] Sequences were cloned into pPuro-Del-MAR5-MCS at the EcorV site contained in the multiple cloning site (MCS) (FIG. 102). Upon receipt of the library (i.e. containing the origins), the vectors were transformed into competent bacteria, subcloned, and then prepared. Their overall size and structure were verified by restriction enzyme digestion followed by agarose gel migration. In addition to the expected profiles of “simple” vectors, we identified dimeric plasmids (or mix of simple and dimeric plasmids) that we had to simplify in order to continue our study (about ¼ of the library).

[0350] 2. Application of the Dpn1 Assay to the Vector Library

[0351] To assess the autonomous replication capacity of the vectors from the library, we applied our rapid replication assay based on DpnI digestion to 293T or 293 cells transfected with pools of 5 plasmid vectors (FIGS. 103 and Table 6). At the end of the assay, the colonies were counted and the results of the replication capacity of the plasmids (6 days after transfection) were presented (FIG. 104). The plasmids contained in the kanamycin-resistant colonies from the DpnI digestion were prepared and sequenced. Once identified, vectors that were able to replicate autonomously were individually resubmitted to the rapid replication assay. 6 days after transfection, replication is clearly detected. However, its rate is low compared to a vector containing the SV40 origin of replication, in 293T cells encoding the viral replication protein (T antigen). However, SV40 has the ability to deregulate the cell cycle and allows viral DNA to be re-replicated within the same cell cycle. This is totally impossible for cell replication origins, a major regulation of which is that each origin can only be used once and only once during the same cell cycle. Indeed, re-replication leads to gene amplification phenomena resulting in genomic instability. The inventors have undertaken a quantification by qPCR or ddPCR as well as an evaluation at later times (12-13 days after transfection) in order to estimate more precisely the number of vectors replicated during successive cell divisions. These data demonstrate that the replication origins allow a self-replication of the vectors comprising them in Eukaryotic cells.

TABLE 6

| Pool | Vectors |
|---|---|
| A | 1_5 |
| | 2_1 |
| | 2_2 |
| | 3_1 |
| | 3_2 |
| B | 3_3 |
| | 3_4 |
| | 6_4 |
| | 6_5 |
| | 6_6 |
| C | 6_7 |
| | 8_1 |
| | 8_2 |
| | 8_3 |
| | 8_4 (c-Myc) |
| D | 11_3 |
| | 11_4 |
| | 14_3 |
| | 16_3 |
| | 17_4 |
| E | 17_5 |
| | 17_6 |
| | 19_2 |
| | 19_3 |
| | 19_4 |
| F | 19_5 |
| | 19_6 |
| | 19_7 |
| | 19_8 |
| | 19_9 |
| SV40 ori | pPuro5-RE-SV40 |
| No ORI | pPuro5-Del-MCS |
| Ctrl Seq | Ctrl2 |

[0352] 3. Special Cases of Replication of Dimeric Vectors

[0353] During the subcloning of the vector library, the inventors highlighted the presence of dimeric vectors, symmetrical (FIG. 108), showing a band profile of the supercoiled form of the plasmid, 2 times higher than expected, while the double digestion profile is the one expected for a single plasmid (FIG. 105, for instance 16.2). In other cases, the inventors observed plasmid preparations containing both the single and double forms (case of 14.1, FIG. 105). Partial digestion of these vectors with a restriction enzyme cutting a single site of the single vector (example, 15.2, FIGS. 106 and 107) confirms the dual size of the dimeric plasmids. Interestingly, the inventors observed that dimeric plasmids have a better replication capacity than their simple form (FIG. 109) (especially for vector 10.3). This observation motivates the production of vectors containing multiple origins, when necessary.

[0354] 4. Sequence of the Vectors
[0355] empty vector (without human Origin) pPuroDel-MAR5_MCS: SEQ ID NO: SEQ ID No: 43289.

[0356] The following vectors contain an origin of replication as defined in the present invention:
[0357] >1_1_pPuroDel-MAR5_MCS: SEQ ID NO: 43290
[0358] >1_2_pPuroDel-MAR5_MCS: SEQ ID NO: 43291
[0359] >1_3_pPuroDel-MAR5_MCS: SEQ ID NO: 43292
[0360] >1_4_pPuroDel-MAR5_MCS: SEQ ID NO: 43293
[0361] >10_1_pPuroDel-MAR5_MCS: SEQ ID NO: 43294
[0362] >10_2_pPuroDel-MAR5_MCS: SEQ ID NO: 43295
[0363] >10_3_pPuroDel-MAR5_MCS: SEQ ID NO: 43296
[0364] >10_4_pPuroDel-MAR5_MCS: SEQ ID NO: 43297
[0365] >11_1_pPuroDel-MAR5_MCS: SEQ ID NO: 43298
[0366] >11_2_pPuroDel-MAR5_MCS: SEQ ID NO: 43299
[0367] >12_1_pPuroDel-MAR5_MCS: SEQ ID NO: 43300
[0368] >12_2_pPuroDel-MAR5_MCS: SEQ ID NO: 43301
[0369] >12_3_pPuroDel-MAR5_MCS: SEQ ID NO: 43302
[0370] >13_1_pPuroDel-MAR5_MCS: SEQ ID NO: 43303
[0371] >14_1_pPuroDel-MAR5_MCS: SEQ ID NO: 43304
[0372] >14_2_pPuroDel-MAR5_MCS: SEQ ID NO: 43305
[0373] >15_1_pPuroDel-MAR5_MCS: SEQ ID NO: 43306
[0374] >15_2_pPuroDel-MAR5_MCS: SEQ ID NO: 43307
[0375] >15_3_pPuroDel-MAR5_MCS: SEQ ID NO: 43308
[0376] >15_4_pPuroDel-MAR5_MCS: SEQ ID NO: 43309
[0377] >16_1_pPuroDel-MAR5_MCS: SEQ ID NO: 43310
[0378] >16_2_pPuroDel-MAR5_MCS: SEQ ID NO: 43311
[0379] >17_1_pPuroDel-MAR5_MCS: SEQ ID NO: 43312
[0380] >17_2_pPuroDel-MAR5_MCS: SEQ ID NO: 43313
[0381] >17_3_pPuroDel-MAR5_MCS: SEQ ID NO: 43314
[0382] >18_1_pPuroDel-MAR5_MCS: SEQ ID NO: 43315
[0383] >19_1_pPuroDel-MAR5_MCS: SEQ ID NO: 43316
[0384] >20_1_pPuroDel-MAR5_MCS: SEQ ID NO: 43317
[0385] >21_1_pPuroDel-MAR5_MCS: SEQ ID NO: 43318
[0386] >5_1_pPuroDel-MAR5_MCS: SEQ ID NO: 43319
[0387] >6_1_pPuroDel-MAR5_MCS: SEQ ID NO: 43320
[0388] >6_2_pPuroDel-MAR5_MCS: SEQ ID NO: 43321
[0389] >6_3_pPuroDel-MAR5_MCS: SEQ ID NO: 43322
[0390] >7_2_pPuroDel-MAR5_MCS: SEQ ID NO: 43323
[0391] >9_1_pPuroDel-MAR5_MCS: SEQ ID NO: 43324
[0392] >9_2_pPuroDel-MAR5_MCS: SEQ ID NO: 43325
[0393] >9_3_pPuroDel-MAR5_MCS: SEQ ID NO: 43326
[0394] >1_5_pPuroDel-MAR5_MCS: SEQ ID NO: 43327
[0395] >11_3_pPuroDel-MAR5_MCS: SEQ ID NO: 43328
[0396] >11_4_pPuroDel-MAR5_MCS: SEQ ID NO: 43329
[0397] >14_3_pPuroDel-MAR5_MCS: SEQ ID NO: 43330
[0398] >16_3_pPuroDel-MAR5_MCS: SEQ ID NO: 43331
[0399] >17_4_pPuroDel-MAR5_MCS: SEQ ID NO: 43332
[0400] >17_5_pPuroDel-MAR5_MCS: SEQ ID NO: 43333
[0401] >17_6_pPuroDel-MAR5_MCS: SEQ ID NO: 43334
[0402] >19_2_pPuroDel-MAR5_MCS: SEQ ID NO: 43335
[0403] >19_3_pPuroDel-MAR5_MCS: SEQ ID NO: 43336
[0404] >19_4_pPuroDel-MAR5_MCS: SEQ ID NO: 43337
[0405] >19_5_pPuroDel-MAR5_MCS: SEQ ID NO: 43338
[0406] >19_6_pPuroDel-MAR5_MCS: SEQ ID NO: 43339
[0407] >19_7_pPuroDel-MAR5_MCS: SEQ ID NO: 43340
[0408] >19_8_pPuroDel-MAR5_MCS: SEQ ID NO: 43341
[0409] >19_9_pPuroDel-MAR5_MCS: SEQ ID NO: 43342
[0410] >2_1_pPuroDel-MAR5_MCS: SEQ ID NO: 43343
[0411] >2_2_pPuroDel-MAR5_MCS: SEQ ID NO: 43344
[0412] >20_2_pPuroDel-MAR5_MCS: SEQ ID NO: 43345
[0413] >22_1_pPuroDel-MAR5_MCS: SEQ ID NO: 43346
[0414] >3_1_pPuroDel-MAR5_MCS: SEQ ID NO: 43347
[0415] >3_2_pPuroDel-MAR5_MCS: SEQ ID NO: 43348
[0416] >3_3_pPuroDel-MAR5_MCS: SEQ ID NO: 43349
[0417] >3_4_pPuroDel-MAR5_MCS: SEQ ID NO: 43350
[0418] >6_4_pPuroDel-MAR5_MCS: SEQ ID NO: 43351
[0419] >6_5_pPuroDel-MAR5_MCS: SEQ ID NO: 43352
[0420] >6_6_pPuroDel-MAR5_MCS: SEQ ID NO: 43353
[0421] >6_7_pPuroDel-MAR5_MCS: SEQ ID NO: 43354
[0422] >8_1_pPuroDel-MAR5_MCS: SEQ ID NO: 43355
[0423] >8_2_pPuroDel-MAR5_MCS: SEQ ID NO: 43356
[0424] >8_3_pPuroDel-MAR5_MCS: SEQ ID NO: 43357
[0425] >8_4_Myc_pPuroDel-MAR5_MCS: SEQ ID NO:

1-15. (canceled)

16. A method for isolating a mammalian genomic DNA replication origin, the method comprising:
(a) isolating the genomic DNA molecules from a somatic cell of a mammal;
(b) dividing the genomic DNA molecules into 500 bp windows every 100 pb along said genomic DNA molecules,
(c) identifying a first 500 bp windows such that:
the first 500 bp window has at least 172 G nucleotides,
the first 500 bp window has at least 105 A or T nucleotides,
a second 500 bp window immediately adjacent to the first 500 bp window at the 3′-end of the window has a G content lower than the 172 and higher than 125;
wherein the variation of the G content between the first and the second 500 bp window is ranging from 8% to 40%;
the G content in a large window consisting of 8 consecutive 500 bp-windows constituted by a third 500 bp windows adjacent to a fourth 500 bp windows, itself adjacent to a fifth 500 bp windows, itself adjacent to the first 500 bp windows, itself adjacent to the second 500 bp windows, itself adjacent to a sixth 500 bp windows, itself adjacent to a seventh 500 bp windows, itself adjacent to a eighth 500 bp windows, is higher than 960;
isolating from the genomic DNA molecules the fragments that have a size from 500 pb up 6000 pb corresponding to a putative mammalian genomic DNA replication origin, wherein the putative mammalian genomic DNA replication origin consists at its 5′ end of the first 500 bp window,
selecting from said putative mammalian genomic DNA replication origin a fragment that is able, when contained in the DNA of an Eukaryotic cell, to produce nascent DNA, and to initiate DNA replication; and
isolating said fragment, wherein said fragment is a mammalian genomic DNA replication origin.

17. The method for isolating a mammalian genomic DNA replication origin according to claim 16, wherein said putative mammalian genomic DNA replication origin have size varying from 500 bp to 4000 bp.

18. The method for isolating a mammalian genomic DNA replication origin according to claim 16, wherein the first 500 bp window of a fragment interacts with ORC1 or ORC2 replication initiation factors.

19. The method for isolating a mammalian genomic DNA replication origin according to claim 16, wherein sequence immediately adjacent to the first 500 pb window contains:
either multiple tandemly G4 structures, wherein said tandemly G4 structures are present up to 12 times, or
G-rich Repeated Element, or OGRE, or
both.

20. The method for isolating a mammalian genomic DNA replication origin according to claim 16, wherein the fragment contains a 716 pb core initiation origin sequence, the core initiation origin sequence being complementary to nascent DNA fragments sequence.

21. The method for isolating a mammalian genomic DNA replication origin according to anyone of claim 16, wherein the fragment contains polycomb proteins binding sites or histone acetylation marks, or both.

22. An isolated and purified mammalian genomic DNA replication origin liable to be obtained by the method as defined in claim 16, the mammalian genomic DNA replication origin comprising one of the sequences as set forth in SEQ ID NO: 1 and SEQ ID NO: 3 to SEQ ID NO: 43,177 and in SEQ ID NO: 43,220 to 43,288.

23. The isolated and purified mammalian genomic DNA replication origin liable to be obtained by the method as defined in claim 16, the mammalian genomic DNA replication origin consisting of one of the sequences as set forth in SEQ ID NO: 1 to SEQ ID NO: 43,177 and in SEQ ID NO: 43,220 to 43,288.

24. A vector comprising:
a mammalian genomic DNA replication origin as defined in claim 22,
at least a sequence coding for a protein allowing the resistance to a compound killing eukaryotic cells, and
a region independent to the mammalian genomic DNA replication origin allowing to insert a gene of interest and its expression.

25. The vector according to claim 24, further comprising
a prokaryotic replication origin.
a sequence coding for a protein allowing the resistant to an antibiotic.

26. The vector according to claim 24, comprising or consisting in a sequence acid sequence as set forth in SEQ ID NO: 43,290 to 43,358.

27. A mammalian cell comprising a vector as defined in claim 24.

28. A non-human mammal comprising a cell according to claim 27.

29. A method for expressing in a mammal cell a gene of interest, the method comprising administering a vector in the mammal cell, the vector being as defined in claim 24, the vecor comprising the gene of interest, the sequence of the gene of interest being inserted in the vector in the region independent to the mammalian genomic DNA replication origin.

30. A computer program product implemented on an appropriated support comprising instructions to execute the steps b- to c- of the method of claim 16.

The application's sequence listing, which the Patent Office published only in electronic form, follows.

SEQUENCE LISTING (43359 sequences)

SEQ ID NO: 1 - DNA, 931 bp, Artificial sequence
  DNA replication origin
ttagactgaggagctctgtgggcagccccacctgaagctctgggactaagcctgcgagagagatggattccccaagggaaatggggccattgcttgagtaaaaaggaaatagttgctgaagaggaaaaccacgtgcttactccacatagggcagactcctggaagaggggggcagggtagggaggtggatatgcaggttgccctggcagggtctggaaatgggggctgcaggcttggagggaggcctcagtgtggcttggaacgtggtgtatggtggtctgccgcgaaggccggcctgcacaggggtgggaggggggtgcttctgcatgggaagcacagacagcgctgcctctcccttgcactcagctctcggggcatgagaggctgactttccgtgagcctgtgggccaggcctctttgaatggggctgagggagctttgccctggttcctttgtgtccccacggtgccacgggaggctccctggcagggtgtggggcagggcagtgagtgaagagttgggatgagtgagttagggcccacggattactcaagacaggacttcaagttgattcaggcgtgttagggagctgtgattggattttgagcagggcagggatgggacagaagagtttggggaaggttcctcaggcatccgtcacggaagggacaagaagggagagagagtggatgccagggacacccagaagctgttattgtagtcaggatacgacaggggtgaggctacagacaggggacttgcaagcagggagggcagggtgagacattcagaggaaacgacgacaggaaatggtgacagatagggaacgaggatgaagggaagggagagccagtgacgactggcagtggagtggggagcaccgccacctctcctcctccacttgcccctcctgtggcactggacaagctag

SEQ ID NO: 2 - DNA, 1192 bp, Artificial sequence
  DNA replication origin
ggcaaggggctcgggctgacctctgtccgcgtgggaggggccggtgtgaggcaaggggctcgggctgacctctctcagcgtgggaggggccggtgtgaggcaaggggctcacgctgacctctgtccgcgtgggaggggccggtgtgaggcaagggctcacactgacctctctcagcgtgggaggggccggtgtgagacaaggggctcacgctgacctctgtccacgtgggaggggccggtgtgaggcaaggggctcacactgacctctctcagcgtgggaggggccggtgtgaggcaaggggctcacgctgacctctgtccgcgtgggaggggccggtgtgaggcaagggctcacactgacctctctcagcgtgggaggagccagtgtgaggcaggggctcacgcctctgggcagggtgccagaggcatgagttgggcatcaacaggccaccgtgagggaggagctgggccgcacgcgggctgctgggaggcaggcagggacttggccccgggaggccgccgtgggggcaagagctgggcctggagaggcccctgggaggcaagggcggggcctgcagaggctgttctccaaccagtgctagaactgtacaggccaccaggaggcaggaggtgggccctcagagcttggctggagaaagttcggggcctacaaaggcggttgggagctgggcaggagttgagccaaaagagcttgcttacttgctgggaggcagggccgggagagcccgacttcaggacaacttgggcctgcggcggtcgccgggaggcccaaccttggcgtggaggagcccaccgaccggagaccatttggggcctggagatgccatcggagggcaggagctcatcctggagaggccaccgtgaggcctgacctgggcctggggagcttggcttgaggaagctgtggaccgaccaaggccgccaggagatgggtaggcactgagtccaaagaggttgttgagaggcaggaatcgggcctggagacccaaccaggaagaagagctgggcccggagagaacgcccggagggtgcaagtgggtctggagaggccgacttgaggaggttctgggcccggagaggccgctggaagggaaaaactgggcctggaaaggccgttgtcaggaatgagccccatgggcctgaagaggccactggcaggcgggagctgggc

SEQ ID NO: 3 - DNA, 1348 bp, Artificial sequence
  DNA replication origin
acagaagttgggcaaaagcctgatttgaggaagttttgggcttcaagagtcagccacgaggcaggcactaggcctggaaatggcctcacagtcataagttgggcctaaatgggccactgtgagggaggagctgtgcctgttgaggctgctggcaggcaggcagaaatttggcctggggcagctgccatgaggcaagagctgggcctggaaaaagcccctgggaggcaagagcagggcctgcagaggctgttctcaagtcaaagctgggcctgttgatgccaccgggaagcagaaggtgggcctggagagtttgacttgaggaagttttgggcctacattggccgccattagctggacaggaactgggccaaaaaaggctgttgtgaggcagcagttgtgcctgtagacccagccaagaggaagaggtgggcctggagaagcccccatgaggcagaggttgggcctgtagacgctgacaggaggcaggagctgggcctggacaggtcaacttgaggagattttgggccttcataggccaccaggaggcagcagttgggactagagagtctgacttgagtaagttttgggcccggagatgatgtcctgggacaggagttggccgtggagaggccaccgtgaggcataagctggatgtagagaggccagtgtgaggcaagacctgggcctgtctaggctgctgggagacaggcaggaatctggccagggaaggttgccatgagacaaaagttgggcctggaaaggcccttgtgaagcatgagcttggcctaaagaggccactgggtggcaggagctgggtgtgtagaagctgctgaaaggttgggagcttggcttggggggtccacagtgaggtagaagctgggcgtgaagaatctgctgtgaggcagacgttgggactgtagaggctgacgggaggcagaggctgggcctggaggggccaccaagatgcaggagctgggcctggagaggctgcaaagaagcatgagctgggcctggtgaggtcaacttgagaaagttcagggcctggagagaaggctgggaggcaggagctgggtctaaagaggccattgtaacgatggagctgtgcctgtggaggctgttgtgaggcagtagcctcatctgcggaggctgccgtgacgtagggtatgggcctaaataggccattgagagtcatgagcttggtctgtagaggctgactggagaaagttctgggcctggagaggctgccgggaggtaggagctgggccaaaagatgtaagcacatttgcatttattaggcactttatttccattattacactgtaatatataataaaataattatggaact

SEQ ID NO: 4 - DNA, 1199 bp, Artificial sequence
  DNA replication origin
ctcagggcctggttttgcttttcttccatgtcagtttgcttctttgggtctggctgcattcccagacaggccatgctgtcgtggtagcaaggtgacacgacacagggtcaggtccagcaggaaagaatgctctcctgtgtccccacttcctccagaagccacactcacccatcccacctggcttggtcctcatgtctatcccagaatccattaatggggccaggggactatgacacaaccacttggcttagactgaggagctctgtgggcagccccacctgaagctctgggactaagcctgcgagagagatggattccccaagggaaatggggccattgcttgagtaaaaaggaaatagttgctgaagagtaaaaccacttgcttactccacatagggcagactcctggaagaggggggcagggtagggaggtggatatgcaggttgccctggtggggtctggaaatgggggctgcaggcttggagggaggcctcagtgtggcttggaacgtggtgtatggtggtctgccgcgaaggccggcctgcacaggggtgggaggggggagcttctgcatgggaagcacagacagcgctgcctctcccttgcactcagctctcggggcatgagaggctgactttccgtgagcctgtgggccaggcctctttgaatggggctgagggagctttgccctggttcctttgtgtccccacggtgccacgggaggctccctggcagggtgtggggcaaggcagtgagtgaagagttgggatgagtgagttagggcccacggattactcaagacaggacttcacgttgattcaggagcgttagggagctgtgattggattttgagcagggcagggatgggacagaagagtttggggaaggttcctcaggcatccgtcacggaagggataagaagggagagagagtggatgccggggacacccagaagctgttattgtagtcaggatgcgacaggggtgaggctgcagacaggggacttgcaagcagggagggcagggtgagacattcagaggaaacgacgacaggaaatggtgacagatagggaacgaggatgaagggaagggagagccagtgacgactggcagtggagtggggagcaccgccacctctcctcctccacttgcccctcctgtggcactggacaagctagtgggcttttcgttgtccatgg

SEQ ID NO: 5 - DNA, 1123 bp, Artificial sequence
  DNA replication origin
ctcagttcagttgtggcaggaaagggaaagagccatgaagaaaggagagggggatggagagggagaaaggagagggggatggagaggagaaaggagagggggatggagagggagaaaggagagggggatagagaggagaaaggagagggggctagagaggagaaaggagagggagatggagagggggatggagagggggatggagaggagaaaggagacggggatggaggggggatggagagaagaaaggagaggagggtggagagcgacagctgcagagggaggcagggaggctggctgggcgtggacagctgcagagggaggcaggggaggccggctgggcatggacactgcagaggggacacagccactctgggaacagcagccagtggcggatctgcctggaatgctgttccctcctgtccaggatgggcctgtctctgcagacaggggccctccccttcctggcctggctgtgcactccccatgtgcatggtggaagctctgcagaggccgttctgctccagagtggggcatagcctcgggcgaggttcacagcttggggggctggtcctgccctgtcccacatgtggctgtgtgggcagcatggatcttcttccgcggtgaccctgtgtgcccaccccccccaacttatgcctgcttcccaaggccatgggcctcaccctcagacttcacttttgtgtatatggaaagacacaattatcgggacagaaacagatcagtatttgccagtgggtgagtgaggggagaggagtttactaccgaggggccgaactggggccatttttgagggatgaaagtcttctgtgtggctctacagagttgggtacgtgatgctgtgcttgtcaaaccccacaggactggacctcactgtgggaacaacaagatcaacaagaggagcaagaacaacatcaagagtcagggcccgggggtcctgacgggtacaggacgggtacagacccacacaggaatcccagagtgtgttccacagcaggacacgcctgcgctgaaagagtgggcagaaaggagctgacctgggtaagtccaaaaacagtgttttgattagattctggaaagaatcaaataactctgcatatctaag

SEQ ID NO: 6 - DNA, 978 bp, Artificial sequence
  DNA replication origin
gttctctgtggccagcagacggcgctgcaggagagctcaggagcaggggcctgggcctgctccgggggaatccgcccaccccaccgcggcggcctctcctgaggttccctagtggccgcgaagggtgggctcagggtgaagggtcaggccacaccagtgggtgcggggatggctgcggccacgggagggcgtccagggaggaggccggagctcaggcccactctgcacacccagcccgccacctcccccggctctctcttccttcgtgcacattctggggctcatgcttctgctgtggtcccatttagccaacctggccagcctttcatgcctgcttcatgggtgagacgtggaggccaggtcagccgcagagcccggggcacacgccgcagccagcacagcagcaggtgggcgtctgcggccggggccagcgcagggcccactgggcctcggaggggcctccctgccgactctgcccccgtcctgtggccgtaagtccacccagagcgctcgatcttccgtccaccaggccagggatgcacgcagagtaaggatgtgtgtgtctaggcatgtgggggtgtgggtgtgacggggtgtgtgctgtgtgagaacgtgtgtgtagtgttcacatgtcctctgtgcgtgagtccctgtgtgtgatgttgtgttctcggtgtgagttcatgagtgtgacggggcgtgtgctgtgtgagaacgtgtgtgtagtgtccacatgtcctctgtgcgtgagtccctgtgtgtgatgttgtgttcttggtgtgagttcatgggtgtgacggggtgtgctgtgtgagaacgtgtgtgtagtgttcacatgtcctctgtgcgtgagtccctgtgtgtgatgttgtgttctcggtgtgagttcatgggtgtgacggggcgtgtgctgtgtgagaacatgtgtgtagtgttcatatgttctcagtgtgagttcatgtgtgtgacggggtgtgc

SEQ ID NO: 7 - DNA, 1209 bp, Artificial sequence
  DNA replication origin
ctggagaagggcgtctgcagaccccgctgttgcctcccaggggagtctccaggcccagctctcgccccaccgcgacctcccaggcccaagtccctgcctacctcccagcagcccgagtgcgatcctgttcctccctcacggtggcctgttgaggcagggggtcacgctgacctctgtccgcgtgggaggggccggtgtgaggcaagggctcacactgacctctctcagcgtgggaggggccggtgtgagacaaggggctcacgctgacctctgtccacgtgggaggggccggggtgaggcaagggctcacactgacctctctcagcatgggaggggccggtgtgaggcaaggggctcacgctgacctctgtccgcgtgggaggggccggtgtgaggcaagggctcacactgacctctctcagcgtgggaggagccagtgtgaggcaggggctcacgcctctgggcagggtgccagaggcatgagttgggcatcaacaggccaccgtgagggaggagctgggccgcacgcgggctgctgggaggcaggcagggacttggccccgggaggccgccgtgggggcaagagctgggcctggagaggcccctgggaggcaagggaggggcctgcagaggctgttctccaaccagtgctagaactgtacaggccaccaggaggcaggaggtgggccctcagagcttggctggagaaagttcggggcctacaaaggcggttgggagctgggcaggagttgagccaaaagagcttgcttacttgctgggaggcagggccgggagagcccgacttcaggacaacttgggcctgcggcggtcgccgggaggcccaaccttggcgtggaggagcccaccgaccggagaccatttggggcctggagatgccatcggagggcaggagctcatcctggagaggccaccgtgaggcctgacctgggcctggggagcttggcttgaggaagctgtgggccgaccaaggccgccaggagatgggtaggcactgagtccaaagaggttgttgagaggcaggaatcgggcctggagacccaaccaggaagaagagctgggcccggagagaacgcccggagggtgcaagtgggtctggagaggccgacttgaggaggttctgggcccggagaggccgccggaagggaaaaactgggcctggaaaggccgttgtcaggaatgagccccatg

SEQ ID NO: 8 - DNA, 1316 bp, Artificial sequence
  DNA replication origin
ctggcaggcaggcagaaatttggcctggggcagctgccatgaggcaagagctgggcctggaaaaagcccctgggaggcaagagcagggcctgcagaggctgttctcaagtcaaagctgggcctgttgatgccaccgggaagcagaaggtgggcctggagagtttgacttgaggaagttttgggcctacattggccgccatgagctggacaggaactgggccaaaaaaggctgttgtgaggcagcagttgtgcctgtagacccagccaagaggaagaggtgggcctggagaagcccccatgaggcagaggttgggcctgtagacgctgacaggaggcaggagctgggcctggacaggtcaacttgaggagattttgggccttcataggccaccaggaggcagcagttgggactagagagtctaacttgagtaagttttgggcccggagatgacgtcctgggacaggagttgggcctggagaggccaccgtgaggcataagctggatgtagagaggccagtgtgaggcaagacctgggcctgtctaggctgctgggagacaggcaggaatctggccagggaaggttgccatgagacaaaagttgggcctggaaaggcccttgtgaagcatgagcttggcctaaagaggccactgggtggcaggagctgggtgtgtagaagctgctgaaaggttgggagcttggcttggggggtccacagtgaggtagatgctgggcgtgaagaatctgctgtgaggcagacgttgggactgcagaggccgacgggaggcagaggctgggcctggaggggccaccaagatgcaggagctgggcctggagaggctgcaaagaagcatgagctgggcctggtgaggtcgacttgagaaagttcagggcctggagagaaggctgggaggcaggagctgggtctaaagaggccattgtaacgatggagctgtgcctgtggaggctgttgtgaggcagtagcctcatctgcggaggctgccgtgacgtagggtatgggcctaaataggccattgtgagtcatgagcttggtctgtagaggctgactggagaaagttctgggcctggagaggctgccgggaggtaggagctgggccaaaagatgtaagcacatttgcatttattaggcactttatttccattattacactgtaatatataataaaataattatagaactcaccataatgtagaattagtgggcgtgttaagcttgttttcctgcaactggatggtcccacctgagcgtgatgggagaaagtgacagatcaataggtattagattctcataaggac

SEQ ID NO: 9 - DNA, 1154 bp, Artificial sequence
  DNA replication origin
gtcagtcgggtgagggtctgctttgcttacaaggtccagaaacccagcagaaaaccctcgaggccacatcagtgaagagtaacttatttcagcaacatttccatgtgtgacacaagacacacatttcctgcatccacctttaaagtcaagaagttgaagctgaataaagccagcaggcagcgaaaatcacctgcactcagttcagttgtggcaggaaagggaaagagccatgaagaaaggagagggggatggagagggagaaaggagagggggatggagaggagaaaggagagggggctagagaggagaaaggagagggagatggagagggggatggagagggggatggagaggagaaaggagagggggatggaggggggatggagagaagaaaggagaggagggtggagagcgacagctgcagagggaggcagggaggctggctgggcgtggacagctgcagagggaggcaggggaggccggcatggacgctgcagaggggacacagccactctgggaacagcagccagtggcggatctgcctggaatgctgttccctcctgtccaggatgggcctgtctctgcagacaggggccctccccttcctggcctggctgtgcacagcctatgtgcatggtggaagctctgcagaggccgttctgctccagagtggggcatagcctcgggcgaggttcacagcttggggggctggtcctgccctgtcccacatgtggctgtgtgggcagcatggatcttcttccgcggtgaccctgtgtgcccacccccgccaacttatgcctgcttcccaaggccatgggcctcaccctcagacttcacttttgtgtatatggaaagacacaattatcgggacagaaacagatcagtatttgccagtgggtgagtgaggggagaggagtttactaccgaggggccgaactggggccatttttgagggatgaaagtcttctgtgtggctctacagagttgggtacgtgatgctgtgtttgtcaaaccccacaggactggacctcactgtgggaacaacaagatcaacaagaggagcaagaacaacatcaagagtcagggcccgggggtcctgacgggtacaggatgggtacagacccacacaggaatcccagagtgtgttccacagc

SEQ ID NO: 10 - DNA, 1774 bp, Artificial sequence
  DNA replication origin
aggagagctcaggagcaggggcctgggcctgctccgggggaatccgcccaccccaccgcggcggcctctcctgaggttccctagtggccgcgaagggtgggctcagggtgaggggtcaggccacaccagtgggtgcggggatggctgcggccacgggagggcgtccagggaggaggccggagctcaggcccactctgcacacccagcccgccacctcccccggctctctcttccttcgtgcacattctggggctcatgcttctgctgtggtcccatttagccaacctggccagcctttcatgcctgcttcatgggtgagacgtggaggccaggtcagccgcagagcccggggcacacgccgcagccagcacagcagcaggtgggcgtctgcggccggggccagcgcagggcccactgggcctcggaggggcctccctgccgactctgcccccgtcctgtggccgtaagtccacccagagcgctcgatcttccgtccaccaggccagggatgcgcgcagagtaaggatgtgtgtgtctacgcatgtgggggtgtgggtgtgacagggtgtgttctgtgtgagaacatgtgtgtagtgtccacatgtcctctgtgcgtgagtccctgtgtgtgatgttgtgttctcggtgtgagttcatgggtgtgatggggtgtgtgctgtgtgagaacgtgtgtgtagtgtccacatgtcctctgtgcgtgagtccctgtgtgtgatgttgtgttcttggtgtgagttcatgggtgtgacggggtgtgctgtgtgagaacgtgtgtgtagtgttcacatgtcctctgtgcgtgagtccccgtgtgtgatgttgtgttctcggtgtgagttcatgggtgtgacggggtgtgtgctgtgtgagaacgtgtgtgtagtgtccacatgtcctctgtgcgtgagtccccgtgtgtgatgttgtgttctcggtgtgagttcatgggtgtgacggggtgtgtgctgtgtgagaacgtgtgtgtagtgtccacatgtcctctgtgcgtgagtccctgtgtgtgatgttgtgttctcggtgtgagttcatgggtgtgacggggtgtgtgctgtgtgagaacgtgtgtgtagtgtccacatgtcctctgtgcgtgagtccccgtgtgtgatgttgtgttctcggtgtgagttcatgggtgtgacggggtgtgtgctgtgtgagaacgtgtgtgtagtgtccacatgtcctctgtgcgtgagtccccgtgtgtgatgttgtgttctcggtgtgagttcatgggtgtgacggggtgtgtgctgtgtgagaacgtgtgtgtagtgtccacatgtcctctgtgcgtgagtccccgtgtgtgatgttgtgttctcggtgtgagttcatgggtgtgacggggtgtgtgctgtgtgagaacgtgtgtgtagtgtccacatgtcctctgtgcatgagtccctgtgtgtgatgttgtgttctcggtgtgagttcatgggtgtgacggggtgtgctgtgtgagaacgtgtgtgtagtgtccacatgtcctctgtgcgtgagtccctgtgtgtgatgttgtgttctcggtgtgagttcatgggtgtgacggggtgtgctgtgtgagaacgtgtgtgtagtgttcacatgtcctctgtgcgtgagtccctgtgtgtgatgttgtgttctcggtgtgagttcatgggtgtgacggggcgtgtgctgtgtgagaacatgtgtgtagtgttcatatgttctcagtgtgagttcatgtgtgtgacggggt

SEQ ID NO: 11 - DNA, 2249 bp, Artificial sequence
  DNA replication origin
cccaggaggcagaggtcaaagtgagccaagatcataccattgcactccagcctgggcaacaagagcaaaactccatctcaaaaaaatatatatatacatatacatacatatatatacatatatatacacatatatatatacatatatacatatattatataggtaaatgtatatatatgtgtatatatatacacacatatatatacacatatatatacatattataactacatatatatacacacacacatacatatacatgcacacatatgtttattgcagcactatttatgatagaaaatacatggaatcaacccaaatgcccatcaatgatatattggataaagaaaatgtgatatatattcaccatggaatactatgcagccgttaaaataaatgagatcacgttctttgcagggacatggatgaagctggaagccatcaccctcagcaaactaacacaggaacagaaaaccaaacaccacatgttctcagtcgtaagagggagttgaacaatgagagcaaacacgtggatacatggaggggaacaacacacaccagggcctctcagggggacaggggtaggagaccatcaggacaaacacgtggatacatggaggggaacaacacacaccagggcctctcagggggacaggggtaggagaccatcaggacaaacacatggatacatggaggggaacaacacacaccagggcctctcagggggacaggggtaggagaccatcaggacaaacacgtggatacatggaggggaacaacacacaccagggcctctcagggggacagggggtaggagaccatcaggacaaacacgtggatacatggaggggaacaccacacaccaggacctctcagcgggacagggggtaggagaccatcaggacaaacacgtggatacatggaggggaacaacacacaccagggcctctcagggggacagggggtaggagaccatcaggacaaacacgtgggtacatggaggggaacaacacacaccagggcctctcagggggacaggggtaggagaccatcaggacaaacacgtggatacatggaggggaacaacacacaccaggacctctcagcgggacagggggtaggagaccatcaggacaaacacgtgggtacatggaggggagcaacacacaccagggcctctcagggggacggggggtaggagaccatcaggacaaacacgtggatacatggaggggaacaacacacaccagggcctctcagggggacggggggtaggagaccatcaggacaaacacgtgggtacatggaggggaacaacacacaccagggcctctcagggggacggggggtaggagaccatcaggacaaacacgtgagtacatggaggggaacaacacacaccagggcctctcagggggacggggggtaggagaccatcaggacaaacacgtgggtacatggaggggaacaacacacaccagggcctctcagggggacggggggtaggagaccatcaggacaaacacgtggatacatggaggggaacaacacacaccagggcctctcagcgggacagggggtaggagaccatcaggacaaacacgtgagtacatggaggggaacaacacataccagggcctctcagggggacggggggtaggagaccatcaggacaaacacgtgggtacatggaggggaacaacacacaccagggcctctcagggggacggggggtaggagaccatcaggacaaacacgtggatacatggaggggaacaacacacaccagggcctctcagggggacagggggtaggagaccatcaggacaaacacgtggatacatggaggggaacaacacacaccagggcctctcagggggacagggggtaggagaccatcaggacaaacacgtggatacatggaggggaacaacacacaccagggcctctcagggggacggggggtaggagaccatcaggacaaacacgtgggtacatggaggggaacaacacacaccagggcctctcagggggacggggggtaggagaccatcaagacaaacacgtgggtacatggaggggaacaacacacaccagggcctctcagggggacaggggtaggagaccatcaggacaaatagctaatgcatgcagggcctcatacctaggtgatgggttgatgggtgcagcaaaccaccatggcacacatttacctatgtatcaaacctacactttctgcacgtgtatcc

SEQ ID NO: 12 - DNA, 901 bp, Artificial sequence
  DNA replication origin
aggccttcgagaggcaggaggccgggcctgcaaaggccgactggagatcaagttctgcgcctgaagaggctgccaaaagtcaaaagcggggcctgggaaggccgccgagagccatgagctgggctgggccgaaagaggccactgggaggcaggaggagctgggcctggagaggctgactcgaggaagttttgcacctggagaggccgtcgagaggacggagctgggcccagggaggccgacttgctgctcttccaggcccacttccaggccgacttgaggacgacttgggcctgcagaggccgccgggaggctggagctaagcctggagagactgacttcgggacgatttgggcctgcagaggccgccgggaggcccaagctgggcctagaggagcccaccgaccggaggccatttggggcctgcagatgtcatcggagggccaggagctgagcctggagaggccaccgcgaggcctgagctgggcctggggagcttggcttagggaagttgtgggcctaccagggccgctgggagctgggcaggagctgagtccaaagacgttgttgggacctggagtcgggccagagtccggcctggagatgcagccgggaggaagagctgggcccggagggggcgccgggaggctgcaagtgggtctgagaggccaacttgaggaggcctggcctctgcctcccgcattgcccagctgttcctcctggctgcatctcccacctcccagcaaacaagctcttttggctcagctcccgcctgcgtttgtagaccccgaagtttctgcaaccaagctcttcagacccacatcccttctcccagtgactgaacagtcccagctccggctggagaagggcgtctgcagaccccgctgttgcctcccaggggag

SEQ ID NO: 13 - DNA, 1096 bp, Artificial sequence
  DNA replication origin
catcccttctcccagtgactgaacagtcccagctccggctggagaagggcgtctgcagaccccgctgttgcctcccaggggagtctccaggcccagctctcgccccaccgcgacctcccaggcccaagtccctgcctacctcccagcagcccgagtgcgatcctgttcctccctcacggtggcctgttgaggcaggggatcacgctgacctctgtccgcgtgggaggggccggtgtgaggcaagggctcacattgacctctctcagcgtgggaggggccggtgtgagacaaggggctcacgctgacctctgtccgcgtgggaggggccggtgtgaggcaagggctcacactgacctctctcagcgtgggaggagccagtgtgaggcaggggctcacgcctctgggcagggtgccagaggcatgagttgggcatcaacaggccaccgtgagggaggagctgggccgcacgcgggctgctgggaggcaggcagggacttggccccgggaggccgccgtgggggcaagagctgggcctggagaggcccctgggaggcaagggaggggcctgcagaggctgttctccaaccagtgctagaactgtacaggccaccaggaggcaggaggtgggccctcagagcttggctggagaaagttcggggcctacaaaggcggttgggagctgggcaggagttgagccaaaagagcttgcttacttgctgggaggcagggccgggagagcctgacttcaggacaacttgggcctgcggcggtcgccgggaggcccaaccttggcgtggaggagcccaccgaccggagaccatttggggcctggagatgccatcggagggcaggagctcatcctggagaggccaccgtgaggcctgacctgggcctggggagcttggcttgaggaagctgtgggccgaccaaggccgccaggagatgggtaggcactgagtccaaagaggttgttgagaggcaggaatcgggcctggagacccaaccaggaagaagagctgggcccggagagaacgcccggagggtgcaagtgggtctggagaggccgacttgaggaggttctgggcccggagaggcc

SEQ ID NO: 14 - DNA, 1207 bp, Artificial sequence
  DNA replication origin
gctgctggcaggcaggcagaaatttggcctggggcagctgccatgaggcaagagctgggcctggaaaaagcccctgggaggcaagagcagggcctgcagaggctgttctcaagtcaaagctgggcctgttgatgccaccgggaagcagaaggtgggcctggagagtttgacttgaggaagttttgggcctacattggccgccatgagctggacaggaactgggccaaaaaaggctgttgtgaggcagcagttgtgcctgtagacccagccaagaggaagaggtgggcctggagaagcccccatgaggcagaggttgggcctgtagacgctgacaggaggcaggagctgggcctggacaggtcaacttgaggagattttgggccttcataggccaccaggaggcagcagttgggactagagagtctgacttgagtaagttttgggcccggagatgacgtcctgggacaggagttgggcgtggagaggccaccgtgaggcataagctggatgtagagaggccagtgtgaggcaagacctgggcctgtctaggctgctgggagacaggcaggaatctggccagggaaggttgccatgagacaaaagttgggcctggaaaggcccttgtgaagcatgagcttggcctaaagaggccactgggtggcaggagctaggtgtgtagaagctgctgaaaggttgggagcttggcttggggggtccacagtgaggtagatgctgggcgtgaagaatctgctgtgaggcagactttgggactgtagaggctgacgggaggcagaggctgggcctggaggggccaccaagatgcaggagctgggcctggagaggctgcaaagaagcatgagctgggcctggtgaggtcgacttgagaaagttcagggcctggagagaaggctgggaggcaggagctgggtctaaagaggccattgtaacgatggagctgtgcctgtggaggctgttgtgaggcagtagcctcatctgcggaggctgccgtgacatagggtatgggcctaaataggccattgtgagtcatgagcttggtctgtagaggctgactggagaaagttctgggcctggagaggctgccgggaggtaggagctgggccaaaagatgtaagcacatttgcatttattaggcactttatttccattattacactgtaatatataataaaataattatagaactcac

SEQ ID NO: 15 - DNA, 1016 bp, Artificial sequence
  DNA replication origin
taataacctgtaaatcacagagagttaaaggtgcttccccaaaacactgatgacagaatgaacggtgaggagtgttagccacaggtcagaagtgcaggaaagtctctcagtgtgggttgttgaagaaatgcaggtcttttttcttttggaagtctccctagaatgcggtcaaggactctgcccactctaggatgaaaaattgggatattagacaccctcagatatttatcccaagctttcattttgggctcttaattagttcatccatcacaatctcaaatgctaagcagggcagttgaatctctccacagtccaaatcagcaccgtcttttaaagttgagtttcttattattctcacctggtataccttatttatcccacacccaccccaataacatatcgtgctcactgttgggaggacgtcatggatgcaggtgcagggggaagaccacgtgagagcacgggaggacgtcagggatgtgagtgcagggggaggaccacgtgagggcatgggaggacgtcatggatgcaagtgcagggggaggaccatgtgagggcacgggaggacgtcagggatgtgagtgcagggggaggaccacgtgagagcacgggaggatgtcagggatgtgagtgcagggggaggaccacgtgagggctcgggaggacgtcagggatgtgagtgcagagggaggaccacgtgagggctcgggaggacgtcagggatgtgagtgcagggggaggaccacgtgagggctcgggaggacgtcagggatgtgagtgcagggggaggaccacgtgagggctcgggaggacgtcagggatgtgagtgcagggggaggaccacgtgagggcacgggaggacgtcagggatgtgagtgcagagggaggaccacgtgagggctcgggaggacgtcagggatgtgagtgcagggggaggaccacgtgagggcacgggaggacgtcagggatgtgagtgcagagggaggaccacgtgagggcacgggaggacgtcaggg

SEQ ID NO: 16 - DNA, 963 bp, Artificial sequence
  DNA replication origin
gtgggcgagtatgggggagcgtgggcgagtatgggggagcgtgggggagtgtgggcgagtgtgggggagtgtgggggagtgtgggggagtgtgggcgactgtgagggagtgtgggggagtgtgggcgagtgtgggcgagtgtgggggagtgtgggcgagtgtgggggagtgtgggcgagtgtgggcgagtgtgggcgagtgtgggcgagtgtggggtgtgggggagtgtgggcgagtatgggcgagtgtgggggagtgtgggcgagtgtgggcgagtgtggggtgtgggggagtgtgggcgagtatgggggagtgtgggggagtgtgggggagtgtgggggagtatgggggagtatgggggagtatgggggagtgtgggggagtgtgggggagtgtgggagagtgtgggggaggagcgtgggggagtgtgggggagtgtgggggagtgtgggagagtgtgggggaggagcgtgggcgagcgtgggcgagcgtgggggagcgtgggggagtgtgagggaatgtgggggagtatgggggagtatgggggagtttggggaacctctcccacctcccagctgcttccaggaaccacttctttcgagatgagacactctcctgcctgcctgtccccatttggctgcaatagaccattgacaacattcagagaacaagaaggggcctcacctgctttcccggacatgtcagaggcagatgggcatgcctaggggacctggggtagcgcctgttcatctccccacccctgggctatgctggcttcatcttatctgtgtgatgggggtagggtgggaattaccaagagaccaacacacaggccatggacaagttctacaagagccagggagaagaacactgtccgtgcgtgttgcccagcacccagctcacacacacagctctcatttgacagcttccccaaagcaggctttgcagtccaggctccccaag

SEQ ID NO: 17 - DNA, 1112 bp, Artificial sequence
  DNA replication origin
aactgagccctacaactcccactacactggttagctgccagccccagcctctgctccttcctgggcccctgtcggcacagttctgaagtcctacaagaatgttgagatcctaagccgactctcacccaagaggtaaacaaccaggggcctccaggggtagagaacatacccagacaggttctgctgcctgtaggcttcatgtccttcccctacaacacgccatgcttgccaggctggaagaggggctccagaaacttggaaacctgggcctgtagctggcatatggaaaagaggcctggaaaagcaccactcctgtccatgaagcccccagatggaaccaggtaattgggaaatacatgggcactaagcctgatcccccctcagactcaagtgggaactgcagcggtgacttgccccctctgccactggctgtgccactacgggagggaggaacatctagccccacgtgtgagtggagacactaggtgtgggcaggttccagtggttgctgtagctgaaccttcccaaccaggtccatgcaaggccatctcagatgggtgcgcacctgggttgggcaaggacacccctcagacagtgagagccactgagtggggctgtcacagaggccccttttcctaacctgagaacagtttgggggagtatgggggagtgtgggggagtatgggggagcgtgggggagcgtgggcgagtatgggggagcgtgggcgagtatgggggagcgtgggggagtgtgggcgagtgtgggggagtgtgggggagtgtgggggagtgtgggcgactgtgagggagtgtgggggagtgtgggcgagtgtgggcgagtgtgggggagtgtgggcgagtgtgggggagtgtgggcgagtgtgggcgagtgtgggcgagtgtgggcgagtgtggggtgtgggggagtgtgggcgagtatgggcgagtgtgggggagtgtgggcgagtgtgggcgagtgtggggtgtgggggagtgtgggcgagtatgggggagtgtgggggagtgtgggggagtgtgggggagtatgggggagtatgggggagtatgggggagtgtgggggagtgtgggggagtgtgggagagtgtggggg

SEQ ID NO: 18 - DNA, 1775 bp, Artificial sequence
  DNA replication origin
cggcgcgaggagctgtggcgccccctggtggcggagtgcggcctgcgccgggcgctgcggaagcggccacgttcggaggaggcggcggccacgttcggaggcggccacgttcggaggaggaggcggccgcgttcggaggaggaggaggccgcgttcggaggaggcggcggccgcgttcggaggaggccacgttcggaggaggaggcggccacgttcggaggaggccacgttcggaggaggaggcggccgcgttcggaggaggaggcggccgcgttcggaggaggccacgttcggaggaggaggcggccgcgttcggaggaggcggcggccacccgggcctggcggtggagggggaggaggagcagagggcggggccggggccggcggcctctttggaccccgcggctttgagggggccccggcactcacgccctgaccctggcgtcctgagcctgcgtccaaggggttgccacctgccccgatgccgccccccacccccccaccctctgctgcgtcctgggctctacacccactggggtggagggctcgcttctaataaaaacggcaggaccaggaagaccaggaccccgggcccctgggagtcgcgctgtcctctgcactggccccttgtgcatccttgtccccctcagccattccaaagccccggccctccgccccaggcctcccatcctccactctgagtgcagcaggaacctcgtgagatgagcatgtggagggagctccccgggatgctgggctgggcacagggtctgcaggggccgacggcccctaggctgaccttccagagctccctctccagccacccgggctcggcctgctgggaacagagctgccccaaccttgtgcccgctgggcctctgtgcagggttcccaggactgccttctggacaccttccctgctggggttctgacagcggggtggacagccttgcccagcctcagggccgtgcagcgccaggggtaaatgtggctctccttgcaccgctgcgcctagggctgccctaaggaaacacagtcggtctccaaggctggggctgcctccatggatgcagacggctcactgggggacttgaacatctgtggattttggtatctgtggggatcctggaatcagtgccccacagatactgagagatgactgtaccacagactgggtaggttaaacagaaattaattttctcacagttctaggggctggaagtccagggtcaaggtgtgagctgggcctttcctggcgagggctcttacctggcttgcagatggccgcctgttctgtccccacacgtcggagacagggagtgggtgctctggtgcctcttttataaggacacgaattctatcagatcagggccccacccttagggcctcatttgacgttaattactttcttagagggcccgttgaacacttgttcaatgaaccagttgacgaaaaagatcacagtcacacaagctaaaccgcagcacacaccacgcagtggtggggaggtggtgcgaagtcagagtgtgtgtccccccgccccaaattcctgtgctgaggccctaacccccaggacctcagaatatggttgtttggagatggggtctttaacgaggcgattaaggtgaaatggggtcatggggcgggccctgatacaatgtataagaagaggagatgaggatttagggagaagacggtgtccacaagccaaggagaggcctctggagaagtcagtctgtggacaccgtgaccgcggacctccagcccccagaatt

SEQ ID NO: 19 - DNA, 1080 bp, Artificial sequence
  DNA replication origin
cctagccggctctccttcatgaccacagagaccaccttgctcagagagctgcccagggagctgctgactagggacccccacaattttgctgagtgagaaagggctgagggtgaaaagcaggcaggtctgaaagccagagggcatctctggttgcacacaggatgctctcacctccagcaggagggtagcagagcccaagggactaaacatggaagaaggtgaaatactcaaccaaggccagaggccagggtcctggttaggaaagctggaggccctggcggacgcggtggagacacctgggcagacatctgagtccccactcttcctggaaactctgagcctatgcaatcagctcctccttgggcactgggcctgagaaaaggccagctcaacggcacatgctgggctgctgcaggacacagctagtcctggcaagagggtgggtagtgaggagggctttgacccaagaagatggccctcccggggctgccactgaggagactgaacatgctaaaggccaaggtctgctgtggaggcaggggttgaagctccaggaggcccagaaggagcggggccagcctggcagcaggccaagggcaagagtgcctggtggtgtggatctgggtgggggcttggtgggccgggtcaagggcagggctgggggccagaggggtcctacccgtagttcagggagatgggagggtgggcttagtgaggatttcagacgtgggccttcatggtctcctggggggtggacgaagctggtcgtggtggagcctgggtgagggcagaggtggtacaccccagaagaccctgctccaggccgcggtggggtgggccctgcagccagcttgacctatttattctattgagatgaaattcacataacaaaattaatgacgttaaagcaaacaattcagtggcatttagcgctttcatcttgtcctgcaaccctgacctcgacctcgtcccagaacacgtcctcaccctgaaggggaaccatacacgttaagcagtcggtccctgttgccccctcccgcgagctctggcaaccacgatgtcttttctttatctgtggat

SEQ ID NO: 20 - DNA, 1290 bp, Artificial sequence
  DNA replication origin
tcccttgagggtgggcaaggaaacagacagtgaccccagcccctctggccagtgcaagaggctgcagggcctgacattctcatcatggaaagaagacttttttttttttttttttttttttaggagacacagtctccctctgttgcccaggctggagtgcaatggtgtgatctcggctcactgcaacctccacctcttgggttcaagcaattctttcacctcagcctccccagtagctgggattatgggcatgcaccaccacaccatgctaatttttgtatttttagtagagagatggggtttcaccatgttggccaggctggtcttgaactcctgacctcaaatgatccgcccactttggcttccctaagtgctgggattacaggcgtgagccatcatgtccagccaattttttttttttttaagatagggtctcactctgtcacccaggctgacgtgcagtggtactgttttggcttgctgcatcctgggaaaggagagtgtaacagcactttaaggaacagaagcctttcaatggccagagagtgacagaaaagtcttagggaggtaggggaaaacgagaggcctgggagccgggctcccgggacggcggtggctcagccttctctcctgcggaggtgcacccagcccatgctccctgcacttctggcctcctcgggtgtggtgaatgagtgtgcttaaaggggaagcgacagcccatgctccctgcacctctggcctcctcgggtgtggtgaatgagtgtgcttaaaggggaagcgacagcagactctggcactggctgttctgtctgtggctaaggagaatgcccgggacgtgtgctgcctgcaggggtggcaggacaccagctgcagagacacctcctgtgctgccctccggggtgggctccagactctcttcccggctcctgtgcacttcaggtgcggggggccagctgagttgaaggggagaggcagctgagtttccggcactgtcctagccggctctccttcatgaccacagagaccaccttgctcagagagctgcccagggagctgctgactagggacccccacaattttgctgagtgagaaagggctgagggtgaaaagcaggcaggtctgaaagccagagggcatctctggttgcacacaggatgctctcacctccagcaggagggtagcagagcccaagggactaaacatggaagaaggtgaaatactcaaccaaggccagaggccagggtcctggttaggaaagctggaggccctggcggacgcggtggagacacc

SEQ ID NO: 21 - DNA, 798 bp, Artificial sequence
  DNA replication origin
tctgggattagggagcatctggagctgactcttcctccatgggaccctccctttttcaggaaaacttcccctcctcggggatcccgcagggctaagaaacaccctcttcacctccctcctgcccggtccttctgaccagccgagagagtacagaccctccccgatctgggaggagggcccatcactggctccctgccccctgctcgccaagccccccgggacttcccaggctgttccttccacctgaagggtctccctctggccaaggcgaggctcacagttcccctgtcaggatggggccttagacacccagactgacccagtgacaatcaccttaattctccacagataactacctacaagttttctgatttattcattagtggatttgttcgtgatcagccccacacctgttagaatggaagctgcaggcagcaggaaccagtgtggccaagtcggagggcagcacaagccggtcctcctcgtggacagcaggtgtggagcaggccaggcccacaggagggcgggcaggagggcaggcaccgagaggtgcggatggcctctcagaacaggggtgcaggctggtgggggcagcagctggaaggggaaggtcacagagccagaaagatagggtgtccgccacagccagttctttggaagtttccctgaaaaagggaaaagagacaagatatggttcaaaggaaagcagggcctgggagaggcctgtgtgcagtgtgtctgcaaagggaggaggaggcaaagatactgaaggtgaagagggaaaggaggaagggacag

SEQ ID NO: 22 - DNA, 963 bp, Artificial sequence
  DNA replication origin
cactcagtggctccccctgctcttcgattccttgggtcccttctcctggtgacataccttctccactctgctgcctgcctagcgcccaccctggccaccacatccagaccccacatcccagatggcctccctcagcccccagcccccgcaagcacatgcacacagaatcgtgcacacgtgtgcttttaccaagggcacacatcagacacgtacaaatccactgacttgccattgccagctgcgtgtgagcacaaaggcgcagctcaccaggtttatctggcccaggcctgggaaccctgagcagggagccccaccccctgccgcgggctggctctagactgatgccatttatcactggctgaggatgagtaattttaccgtgaacacagttcagggtgatagatgagggagtgggggcaggtgatcgccgtgctgcctgcccgccccagagggaggctggaaggaagactcctgcctgtttataacgggatagtggcccaggaggggcacgtggacggaagagcccctgtcagggaggctggcacagccacagtggggcggggaggcagaggacgcaagcctggtctcatccatgtcccgggccttgtgaggaccatgagcagagcccactcagagagacgtggccatcccccaaatcctgcccagggccgaggtcccaggagccctatgctgtgggaggatggggacaggcgagtgtgtggctccagtgtccagacagaagaaaaggagagtttcccctgaagaccgctgccatcctctcccggagtcctgacctcacctttgggtcatagtcaagctctgtgaattgacatctcttcagcagtgccggcctcaccgcaggtgcagctacgctgcccacaataacaaggaagactttatctgctggccacgcacgtgtgcagcggcagggctgggttttctggagcctcttccacactgtgg

SEQ ID NO: 23 - DNA, 1270 bp, Artificial sequence
  DNA replication origin
ggagccggcaactctggaagccagaaaggtggggctttagtgcctgtcctcagaccctcaggtaaccaaagccaaattactccctgttggaaacacaacctcacataccgggccacagcacggacacccacgacagcaggccacagcacggacacccacggcagtggcccacagcacggacactcacagcatggacagcagcccagagggacccttgcccagaccctgaccagggggaagagacagttgtgtctgggtttgtcagtcctctggttgtggcagggcccctctgggtgggactcggcacctgtacctgggagcacctgctcagatgagggagtgggagcaggaacagcgctcatgctctctccctgtgtccagggctggggccctggtctggcgggtaggcatagggcacctcctgccctctcatgccctcatacacctgctgctggggttccctgtcccaccccaaaagggagaagccaaggctgaggcaaggttggaaaatcagggtggggactctggaatccagacatcccgacagaggatgcaggaggaatcggcgtgagcgcagggtaaactcacggacccgaactctcagatgtgcttcctgggctcagcttcccctttctggagggctgggggttccagaaccttgccttgaatttgtgaggatggtgggacctggagggcaggtggcgcagatggtgtgagccctcaccccaggacgctgtgcccacttctggctgtgcagccttgggaaggcttctgacttctctgaacctcaatctgtaaaatgggaatgagaatgaaacaagatgaaattaacatgcattgagcgtgtggggtggggcagagacagccaccttgcagctggtgaggcccttacagcatctggtcctgccacctcgcagctggtgaggccctcacagcatctggtcccggagcccacacagccctttgcagagactgccctacccacgtgcaagcgtttcgccctcttcccacgggcgaccccagcttggccgcatgcgtttttgctcagaacgtccccacctatgtcccacctgccctctggcttcgggagtgctgggcgcagtggtggcaggtgcctcggtgcccttggacttgcccggtcgtctgttgcttctgaggcggccccgttgatgggtgctccttctcttctgggtgcattttccttttcctgcttcctcgcatgcctggtgatttttgaatgggtgacagggattgtgaattttgctgggtg

SEQ ID NO: 24 - DNA, 1060 bp, Artificial sequence
  DNA replication origin
ctcctccccaccccacctctgggtcatctccggctggggctgtaccacatctgggctcaataaatggttgattgattgatgaggggatggatgagaagggctctaagagaaatgctggggagcctgggcaggcactcccggatggcggaggcggcatgcgggctggggcagcggcccctggcgcccccacactcccccaggacgtctggggtcaccgtctgctccatggcagccccagggttatttatgacctcctccctctggcggcgggaggcaggctccagcctcagcccagcggcggaggggccccagcagggggacccggagcagcgacagaggcaccaaggcccaggcaggcggggctcggtgggccggaggaggggcggtggagtccacaccgccaggtccctgcctcgctcaggatgattccagcgccagaactccgttcctctggcctctgccgccagcctgaggagtgcaggggagagtggggcccaggtgtcccagaccaagacaggtgtgtgagtggacatgggacacaggtgtggtagtggaggacacgtgtgagcaagtgaacacatcacacagatgtgcgagcagacacaagacatgggacacaggtgcgccagtgaacacgggactggtgtaagccagcgggcatgagacacgggtgtgagcgagtggacacgggacacgtgtgagtgggcacggacagtacaggtgtgagcgagtggacacgagacacaggtgtgggagtggacacaggtgtgtgggagtggacacagaacaggtgtgaacatggacacggacacgggtgtgtgtgagtggacaggaccaaggaaggggcacaaccccgtggaaaagggtgatgctgggggtgaggagcctggtcctgtgggaacgtggcctctgaacgggtgcctgcttcccaggaagacaaggaggtggtggggaaggcctcctcacccagcccctggagggacctccagaacatcagggagtggacagtgaggatagaggggtgcctccagctttggacccagtcagggtcttttctgga

SEQ ID NO: 25 - DNA, 1832 bp, Artificial sequence
  DNA replication origin
ggtggggaaggcctcctcacccagcccctggagggacctccagaacatcagggagtggacagtgaggatagaggggtgcctccagctttggacccagtcagggtcttttctggaagacaccatgggccccgggtaggcccccacacccagccagaaacccagggccagccccatgcccctccttaaccacactgtgggcctgagcatgatgagatgctggtgaacaggggagggctcttggaagggaaaggaggcccctctgctggcccaggtcagaggagaggcctggcccaagggcctcagaccctgagaggcactgccatgcagacctgcgcctccccagcctccctctccaaatcactgtgtgaacatcagggagtcaggtgcaggcgaacctagaaggagggtcaggtgcaggtgaacctagtagcccacacacgggcagtagggtcagggctgcatccagacagtgggcactcagggccagtccacatggcctccagctggccccaggagcagactttccacatggtatcagacctgggagaagacacagacttcaggagaggaaggcacaggaactcactggcagccacagctggggtcagggatgtgctggtgtcctggatgcagacaggttgatagggccaagggtggccacataaggaagggtcaccgacactcacacccacactcctacctggccccccagaccccaacagaccaacgagcccccacagaacagggccaggatagcgggggaggcttctgggcatgttccttgcctgagcagagcactcctggcccagacctcactccgcgggttggctgtgggaccagcagaagcctctggtgagataaggtgaaggagcccagcgtggtcacccagggtcaggtttatgctcaaggaagctggtctggcaggaggtggtggtgggctgttccctccctcgaagaaggcacctgtgcaaacaggcctgtggcccactcacccctggacctgctctgggagatgcccacagggacatgccagctgcatctcaagggcaggggccagggtcagaacaggaggcccctttctagtggatgcaacaccgcacagcagcgcaggacaaggctgtctcacctgctgttaccaacgcccccaggttgtgtttctcttcggaacgctccagatgcaatgccgatctgggcacgcagggaggtggggggtgatgggaagctcaccaggaaccagggactggggcccagactgacctgtcagaaggcaccaaggtggacgtggtgtggccggtcctgcttcactagccttgctcctcctagtgggaggccgtgcactctgccaacccgctatcccccaccctcaccctgcctcggatccacaccaccttcctgctgggaggtgtggggtgacaggaagctcttgccccacaccatggtcctggcgcggtcctggtgtgagacatcctgcatttgaaacagctgtgtgacttcaggagagttacttgacctttctgtctcagcgtcttctgcaaaagactgaacaggaactccgtggctcgggcgaactcactcctgtcaagtgcataggaaggggcacgagtgggcggggaggtgctgccctgttattcacagaacactttgcccaggcaacacactacaaatccacaacctcgctccctgcaggtgcactgagaccacccacgccctcccggacaccaacgcccaccatcagattcgctgcgcaaagtcccagagccgccggcgcacgctcacaccccggcgagcagcccccagctccctccctccgagaggagcccggtccgcgacca

SEQ ID NO: 26 - DNA, 1946 bp, Artificial sequence
  DNA replication origin
ttacggggactcgagagagcgggcaggaggcgggttgggagggcgcggagccccgggttcgggggagactggaggggcgcacgtgcggccgggtgcgagcgcgcggcgggggaggctgcggggcggcgcgggggcgcgcgcggagcccgagcggcggcgccaggtcacacaacctgttttggcgcctgcgggcgcctgggcccaagggtgcgacgcgggggcgcctgagccgggacacagggggtgcggtgagcgccaggcgccgcggggagttaaaaagttcgggacctgagcggtgcgtggttccgcggtggccgcctcttcctgccgcgcaggccgagggtcccgacggcgccgctcaccgctccgggactcagcctttctgggcccggcctgcggttccctcggggccggggagagggtggagcgcgggaggaggggcgccgggtggggacgcccaggcccttcgtcgggggagggcgctccacccgggctggagttgcagagcccagcagatccctgcggcgttcgcgagggtgggacgggaagcgggctgggaagtcgggccgaggtgggtgtggggttcggggtgtatttcgtccacgagccggggagggggtactggccctgccgctgactgcgcgcagaagcgtgccgctccctcacagggtctgcctcggctctgctcgcagggaaaagtctgaagacgcttatgtccaaggggatcctgcaggtgcatcctccgatctgcgactgcccgggctgccgaatatcctccccggtggtgagatgcggggctcggttggggctgggagttactctcccctgcggagcttgtccctgcggttttcagggttttcaggatcgagagtcctaacctcacccctgcgggtgtgctggagggagcctccgaagggcagggggaagcggctttacctcgtgctctcccagcccttctacctggacgggggaggagtcctcgggcacccgagcgccctccccggtggagacaggggggccgcgcttgtcttagagcctccccttgggtgccttttagctgcttatcctcgagtcctgggtcagggtcttctccctgggaggagtaattcaacgtgggcctggcactgtgccctgtcaccgcttgggggtcaccgtgttctctggcccagctggtgaggtgtgattctgggacgacagcattttggggagctacaggcttgggtgtgagtgacttgtgtctctgggtgctgaaggccagagggtgcaagggcctggacgtcgaagtgtgtcctagggacgcagaggctagccaggggcagagtctttgcagtgtgggcctttggtgtccagggaactggagtcggaggctggttcaaggccccaacccagggtagacagctatggacaccctcactgagggagcaggcaggagagacggggatgctgggagctgccttctgctcagggaggcacctgcaccccctacccagtctccagccccctagttgggcagcaagggttagaggattgatctgaaaaggaagaatgcctgttgggaaggactagtttggagccaattagggccatggctgctgggggtgggggctgcaattcctgacacactcaggaaccccttcttccaggaaagggtaggagaggcagaggtgcaaaatgggcctgagggtcccgggcgtacctccgcttgcctgctttgggcctgaggtaggatgggggaggggatgcccaggggcctgtgagccatgagtgccgtagccagggagctgggcggctgcagacacacctgtgaagacggctggtccctcagacatacagcatgttgggcaggggaaggggacacagccgcacctcacccatgtgcccacctgacacacaatccgacatggacctgcacgcacaggcaggcagctcacagagttcccaggcag

SEQ ID NO: 27 - DNA, 934 bp, Artificial sequence
  DNA replication origin
tgcatttgaaggtgatggtggttctaggtctgaggaggacaccctcctaacagcctcatccccaagctccgggctgtgttgtggcaatgggagggaggaagtctgaggagaccctggtgactgaacggaggagggagtgagttagacgctctcaagggctctgccacctcccggagccagcggcctgttactacatttaaaaaagcctcccgcccactggaaaataatcaataactttcctttatccctgggggtggcaggacctagaaacactggaggagtccggaagtgcctggggctgggccggcgctggtgtgctgtgcagggtgccgcgggcacgtccgccgcgtgtgtgcgtcagctcggggctcggctgtgctctgcagggaccacagcgggcgtgtctgtgctcccacccgaggcacccacagctccacacgctcgttccgtgggtgcaaaggagatgggagaaagaagccctgtgagaaatgcggggcagggtttgcggaacaggggacctgggctggtgagggctcctcgtctggtgacctgtgagccccggggcctgcagtctgcgagggttcagctcagacagttgccagtggccttgcaccaggctgcagctgcccctgagccgggctgtgcgtggcgctgatgaaatagaaaagggcattcgcttgtcaacgttggcatcggtggcagggtgtggtgggcagaagggtcacaaagtacgggtgggattggcaggcagatacacggagggaacgtgcgcatttgagtgcacgtccaccagcaccagccccaggccacaggcagatcccaggagacacgcaggggccctaagaagggagctgggaatgaggggccacacaagcccgggacggaggcctgtcgcacatggggtggccccgactcaggccctggagttggccag

SEQ ID NO: 28 - DNA, 951 bp, Artificial sequence
  DNA replication origin
ggggaggcggctgcgttacaggtgggcgggggaggcggctgcgttacaggtgggcggggggggcggctgcgttacaggtgggcgggggaggctgctccgttacaggtgggcgggggaggctgctccgttacaggtgggcggggggggcggctgcgttacaggtgggcggggggggcggctgcgttacaggtgggcgggggaggcggctgcgttacaggtgggcgggggaggcggctccgttacaggtgggcgggggaggcggctgcgttacaggtgggcgggggaggcggctgcgttacaggtgggcaggggaggcggctgcgttacaggtgggcaggggaggcggctgcgttacaggtgggcgggggaggcggctccgttacaggtgggcgggggaggcggctgcgttacaggtgggcgggggaggcggctgcgttacaggtgggcgggggaggcggctgcgttacaggtgggcggggggggcggctgcgttacaggtgggcgggcggtgctgcaggaggactgctcagggagtggcgcctggaccctgagccccttctctgctgactggggagaggctcacggaaccgggaaggggtggagggccgtgctccacacagttcgtctcattgctctctgggactctgtggatgtgggattgggctgaattagcaagaagaggagaaatgagggaagaaaagagttaaatgcatgttgattccaagcccccgcctgccggggggacagcgggaggttggagcacgcagccctggtgcctggtgcgagctgcacgtgtctgccggtgccgtgtgtgcgtggggcgcgtctcatcagctgcaggactgtggtctgggcctcagtttcctcgtgtgcagaaatcgggggtcaggggatggttcacatgtggcacattctctcctggggcctgtcctgcaggactgcccctgagca

SEQ ID NO: 29 - DNA, 2141 bp, Artificial sequence
  DNA replication origin
ccaggctaggaggaggccttagccccccacagaacggagagggtagtttccactgtgtacaatggaaaagtgattgccaggaggtgagaggccttgctaaccctgagggcatgtgcatggtgggccaggtggcaggtgtggaaaagagccaggttcccccagccttggcccaccccctcccagcccaccgagctctggcacgggaggctgtgggggagacgatggcttctcaggggcctgagcagtggtgcctggatccgtgtgtggccaggtgccccccgccgcccgccgggcccagccacccgatctgtcaccgaggtggggaccctggaccagaccgtgggactgaccctctctctggggccgggcctgacagcagccgggccaggatcaataagttattagcaccactctgtcagctgtaatgtgggattgatcggtgtggccgccgcacttccccagcctgataaaaatgacagattaagggaataagaaaaaggaattaggcctggagctgacggcagggcttgtggggggacgggcttgggagccccactgcctaggcctcatggaggtcttgggtcacaggggagtggcccctcactccacccagctagagccctcatgaggatgaggaagggccagagtcggaggcactggctggcctgggagacccccagggcgtggagtcaggggcttcggaggagctcggggtgggtcggagatgggtacatggatggtgtggtctggaatgggtgcggtcggcaggacccaagggaggacctcaggagagtgagctgggcctggcctgggcctcccctctgccacctgctgggctgtgtttggggctgaagctggacctggcctgggcctcccctctgccacctgctgggctgtgtttggggctagggctgggctggcctcgtggctgaggaggtgggtgaagctactgggaggtgcaccccagaagcccagagcctggctgggctggtggacaagggcatgacagccacgccagggtgctagctcaggcaggactgggccagagaggaggacgtgggccttctgggggcagggatgggtatgaccaagtaggaggcctgggagtggaggcgcctcgaggcggcctggggggcccacagcccagtgactcacagagcagcaagaggtcaggtgtgaggtccttcccggcttgtctcaccccacgctggcatgtgaccctgcacagcccgccctcactcctgtccaggaggggaaggtggtgcctggtcaaaccaaaagctttttattctcctctagggggatgagaggggggctcgttaacttgcacaagaggctagatggcgggtggggcagctgggtgcctgctgtggatctcttctgcacacacgcaccagggccagtgtcagagctcccctgtgcccctgtcccgccacagccaggcgtgatgtcctctgcgctgaaggctggggctgccagggctgggcaaggcctgtactcaccaggaccaagggccccctgagagatggtgggtgcggtccaggctgagctggagcaggggctgggttccccttccattccttgagatgcaggtgggcactcactaccctcccgcaggtgacctgttgggcaagaggctgggccgctccccccgtatcagcagcgactgcttttcagagaagagggcacgaagcgaatcgcctcaaggtaagagcgtggctgggacgagagacaggtcaccaggggagggggcagtccctgagggtcccctggacctcgagcaggcactctagaggggcgtggtcctcggcagtgcctggagaaacctctcaccccgggtcctccccagcagaggcgctgctgctgccgcgggagctggggcccagcatggccccggaggaccattaccgccggcttgtgtcagcactgagcgaggccagcacctttgaggaccctcagcgcctctaccacctgggcctccccagccacggtgaggacccaccctggcatgatccccctcatcacctccccagccacggtgaggacccaccctggcatgatctcccctcatcacctccccagccacatgtactcggccattcctgttgctgaggccctgctgacaccaaggccaggctgga

SEQ ID NO: 30 - DNA, 1073 bp, Artificial sequence
  DNA replication origin
gggcagctcaggcaccaagagcctgaataattcaccaaatgttaataatgtaaaaatcctcctttttaattgctttccctgctctgcctggggccgctctgctggccgcgcgggggaggggcgccggccgccggggagcgcgctgtcaatcaggccgcgccgccgccccccccccccgccccgccgcggagccggccgtaaataaccctgtaactaacccggccgctagcgcgggggcgctgggccccgctgggatcgatgcgggcggccgcgccggctgggctctgcgggctggcacccggcccggggcgggacccacctccgctttcgggtaattaatttataaacagaggcggcggtggagctggcggagcctgcatagtgggggctgcggggactcgggaggcccgggcgggagggagaggccgagagacctgggacgcggcgccttagacgcgggcgctgcgtgcgcattggggcgagtgtggccacgcgggacagtgaccctgcgcagccgggactgggcgacccctgtgctagtgtggcgtgcgtgcgcgggcgctgccttgcctttgtgacaagctttggccagccgcgtctactatggggacctcagattttcttgcctcccaccgaagagggggtcccctgggcggtcagcccctggctggcacttctggactctctcgctgccccgcaggctctgtggcctcgggacgtctgcacagccccctccccgcaaggctcagccgcctctcaggccggaagcctccaggcacccggctccccttcggggaagagcttttcccgacacttcctcgcccagcatcttgtctgccgtctcggccctgtggccgcccatcctcctgccccgtgcccgagaccagcccaggggccgagcacggccgagtggtgtggtcagttccccacctcagtgttctacgccaggacgcgggctggggaggatgagggcgcatagccggggggatcactgctgttgtcccccacccagatctcctgagggtccggcaggaggtggcggctgcagctctgaggggccccagtggcctgga

SEQ ID NO: 31 - DNA, 1259 bp, Artificial sequence
  DNA replication origin
ggccggctcggaccgcctcggaccccccgaccccgcgttgtccccctccccaccaggctacggcttcctgccccccgcgcaggcggagatgttcgcctggcagcaggagctcctgcggaagcagaacctggcccggtaggtgcggggaggcgggcggggccgcgcggcccgggaggcggctgacccgcgtctgcccccggcccaggctggagctgcccgccgacctcctgcggcagaaggagctggagagcgcgcgcccacagctgctggcgcccgagaccgccctgcgccccaacgacggcgccgaggagctgcagcggcgcggggccctgctggtgctgaaccacggcgcggcgccactgctggccctgcccccccaggggcccccgggctccggaccccccaccccgtcccgggactctgcccggcgagccccccggaaggggggtcccggccctgcctcagcgcggcccagcgagtccaaggagatgacgggggctaggctctgggcacaagatggctcggaagacgagccccccaaagactcggacggagaggaccccgagacggcagctgttgggtgcagggggcccactccgggccaagctccagctggaggggccggcgccgaggggaaggggcttttcccagggtccacactgcccctgggcttcccttatgccgtcagcccctacttccacacaggtgggcacccccacactctagatccttccagagggcacaggactggcaggccgcctgtggaagggtcttggggggaggaaaaattccccttaggcacccatcccccacctcagcaattggggcacacgacggtcaggagacgggcgggtatgggaaagccagccagagccctagtaacacgccccacaactcaggcgcggtagggggactctccatggatggggaggaggccccagcccctgaggacgtcaccaagtggaccgtggatgacgtctgcagcttcgtggggggcctgtctggctgtggagagtacactcgggtaagggggggccccagttcctggggcggggctggagctggctggcagtcactacctccctggaaaggatggtggggtagggccattccccaacgccctctccctccccaaaagcagtgcgcagcagggactggactgtgcaccccaccttttttttttttttttttttttgccaggtgttttctgcctgacactcaaacccaacagatcactgtttttaaaaaatttccgtgag

SEQ ID NO: 32 - DNA, 989 bp, Artificial sequence
  DNA replication origin
gggaagggtggatgggttgagaccccgtgtgcaagatgaggaaatgattcctgtgccggcccaggaggaacgtgcatcagcctgacttgtcagcctggccagtagctgacgtggttctctctgaccaggaaacataccagtctgtgtacaactggcagtatgtgcactgcctcttcctgtggtgccgggtcctgagcactgcgggccccagcgaagccctccagcccttggtctacccccttgcccaagtcatcattggctgtatcaagtgagttgtggggtgggcagggttgtgcgggagggtcaggagaagcaaatttgctgggactgtgtgggcggtgcctctggcgttcagggccttggggcctgagtctgtgtcctggccgtccctgaggaagggctggggtccctgtacctgctacggggagatgctctggattctggagagctagggctggtgggcacctgtgacatgagctcctccaacagcggtttagccgcctcgggtgccacccagcgtgtgttctgggggcttgtgtgcagtttgcagtgagtttggttcattacgtggggttcttgggtggagcacatctgatgcagtgaactgcattttgggtgtgagcgcttaggagggtccaggcacggtaggggctgcagcaggaaaaggtgggagcagtactgtggcctctttggccaggagggggcatctgtctggctgagccttagaaactcaaggctgggaagggaggtgggaagtccaagggaagaagtaggaaaggcgggaacagggaggagagcaggcaggaacagatgacccctgccaccgtgttgaaataaagctgaaagctgggtaaggtacctgcagccccatagctgggcaaggggtgcaggtccctggggttcagacgtgccttgtcctgctttaggggtctgatgtcggtgagtgggggaggaggtccaagacagcagggggaggggcaggggctgcc

SEQ ID NO: 33 - DNA, 1360 bp, Artificial sequence
  DNA replication origin
tggcccggtctccgcggatcggaggcgaagccagcctggccctcgggtcgcccgtcttttgtcgagctggcgacatcagtgcggttcccactgcccctcgcgttttccactggactccctgctttttattgttgatttgtgggagctctttgcataggagccccgccgttgcagtctggcgtcctcgcaggcgcgtgccttcggagcgccgggtgggctgcgggcgcggcgggactcccggtcttccccggggcggacaccggcgtcaccgcgtcctacggagccgggcgccgagcgggaggcgcatctgggccccaccggggctgcccgcaccgagcacgcgaacgcgccctcccgccctgaggccgccggcgttgcggtcggagaaccatagagccactcggctgggcgtggcgcggcggggcggggaaaggggcggggcctgggcggcggaagtgcgcagccgcgcggcattctggggccggaagtggggtgcacgcttcgggttggtgtcatggcagctgcggggagccgcaagaggtaagccgcgggtccgagggccgatttggcctcccggtgggtgtctgtatccaagggggcttttcttgctcctctcagcggggctggggcgagctgggcgtgcgggcagctgtgactcctgcgtgacccgcaggcgcctggcggagctgacggtggacgagttcctagcttcgggctttgactccgagtccgaatccgagtccgaaaattctccacaagcggagacacgggaagcacgcgaggctgcccggagtccggataagccgggcgggagcccctcggccaggttagtggggacatgcgtgagcagaacctcttgctcgtcctgtcccaccccggttgggttgctgacctcgcctggggtctcagggccaaggcctaaggatcgccgacctctgccccccagtcctttcagcttaacttactctttcatccgatgtttactgagctcctgttccgtgccaaactctgtcctaggcagggagcgtatgttggtgagttgtgcaaaaatctcttcccgatctaggagaactctcacgttcttgggtgaaatcaccgcctgcagttcggtagaagagagataagtgctggggagggaaaggaaggacagaggggctgaagagagagttgcaggggagccgagttgctctgttagaaggagcggaggctgtgctcggtggctcacgcctgtaatgccagcactttgggaggccgaggcgggcagattacctgaggtcaggaattcgagaccagcctgaccaacacggaaaaatcatgtctctactaaaaatataaaaattagccgggcgtggtgggcacc

SEQ ID NO: 34 - DNA, 958 bp, Artificial sequence
  DNA replication origin
cgccagactgcaacggcggggctcctatgcaaagagctcccacaaatcaacaataaaaagcagggagtccagtggaaaacgcgaggggcagtgggaaccgcactgatgtcgccagctcgacaaaagacgggcgacccgagggccaggctggcttcgcctccgatccgcggagaccgggccagcgccacgaacaccacgcagggcgctccccgtccatggccctctgggtgccgaccgcggctcttcccggggacgccgcacgggacgaagacggtggggaggccggcgccttccttcccgctaccagcctgacacccgggcccccgggcctggacagccagaccccgcgacaagggcgccgcggggcgcaggcacggctcccccagccctggcgctgagggggcgcgtgaggcgaacacgggcggattggcctcggggtcccattcgacttcttggtgccgcggggccccggggctccccggaggagagcaagttagggggtcgggggagcggggatggcttccgggggaggaggagggcgaggcctggggggctcctcggaggaggaagagggcgaggcttaggggggctccttggaggaggaggagggcgaggcttaggagggctcttcggagaaacaggagggcgaggcctgtggggggcttcccggggaagaaggaaggcgagacctaggggggcttcccggaggaggaggaggaggagggctaggccgggggcttcccagaggaggaggatggcggggcctggggggcttctcggagaaggaagatggcgaggcctaggggggcttctcggaggaggaggagggcgaggcctggtggggggcttcccggaggaggaggatggcggggtctgggggtgcttctcggaggaggaggcggacccggggcgcagcgctggaagaatccgcgtccaacgtctagtccccgaagcctct

SEQ ID NO: 35 - DNA, 1468 bp, Artificial sequence
  DNA replication origin
cagcgccggggacgtgtgcggctggtgcctaggacgcccctctgctcaggcagcaggtggaacttcagggcctcgatgaggaggtccttgcagtcagggtggtgcctcaccaggctctcggcatccacgtggcccagcaggaagtcgcggctcagcaagggcagccgcacacacttcatgagctggggtgcagggaacgccaaggtcaggcgggaccctcgggcacactgggcgtcagggctgagacaaccccccagatgcccgtaccacctgtgtgatggattcttcttcagacaggtgggggcaccacccccacggagtccctgaactcggggaaggtcagggtgcaccaggccctcagccacctgcatgccctcctggatgctgtgggagccccccgcggccgcgcctcacccgtgggacatgctgcctgcgggcgtccacgtcgtgtttcacccagctcaggacggctcggtagacctcctcctctgaaggcacgttcaggctgtcgctagagaccagttccagaacctgggagtgggggtcctcagacctgagatctggggagggtcctgtggacccagggagccctgaagatgcctaggagggagggttagcaggtgggggctgagtgttcatactgggaggggccgagcagagtcaggagccacagacgaggctcctggggggcccagatccagaaaggtctcggggacacacagcaggcactaaggattgtgggcagggctgtgtcaggaacaaaacggggtcgggagtcaaagacaaagactggggtggggtggggtggggggcgagggctgggcccgccagctgttacctgtttcaggggcagcagcataaactcctcggtcttggccacgtccacgaagtgctgcagcacgtacctgtgggcggccttgagcaggtcgctgcaggagtgcgcatcggcaaagccccggatacccaggcagttggaggggtcgagctgactcagtagaaacttgcagcaagcgtctcggacgccattcagctgcaggagactggcggctgggagcagagtctacggggcaccgagaggcaggtgagggaggcacagggtcgggggacaccgggatccgggtgagggagccctcacctgcacattgccctcgcccaccacaatctcagccgtgtaggcaaactgcaccagctggtccaaggcctgagggtcgatgtcgtgcagcgtcacgtgggtctggcggctctcgctcatctcatctgcggggacagcgggttacacgagctgacccgagggacccacggagcccccagcgccgcccaggcgggtacttgcttgtgaacatggcgtggaagtaggggctgcaggaggccagcaccactttgtgcgcacggatctccttggcagccacgtgcaggacgatgtcgcacaggaggccgcgctggcgcatgcggctcatggccacgaagg

SEQ ID NO: 36 - DNA, 1554 bp, Artificial sequence
  DNA replication origin
gctgcccttgctgagccgcgacttcctgctgggccacgtggatgccgagagcctggtgaggcaccaccctgactgcaaggacctcctcatcgaggccctgaagttccacctgctgcctgagcagaggggcgtcctaggcaccagccgcacacgtccccggcgctgcgagggggccgggcctgtgctttttgctgtgggtatggccccccgcccgtttccctcttgccctgtgccttctactccccaccagcacaagcccaccccacctgtgccggtcaggtcctgacctgcccctccgcccctccattcaggggcctctccaggagcctggggtgtggcccagcagtgggatccactcacgagtcccgtctccacctgccctccccaggcggcgggagcctgtttgccatccacggagactgtgaggcctacgacacgcgcaccgaccgctggcacgtggtggcctccatgtccacgcgccgggcccgggtgggagtggctgcggtggggaaccggctctatgctgtgggcgggtaagcctggaggctggacttgggtcgggtctggcacgtgcccgccaggccagtcttgacctgcagtggcttaattccgctagctatgatgggacctcagacctggctaccgtggagtcctacgaccccgtgactaacacgtggcagccggaggtgtccatgggcacaaggcgaagctgcctgggtgtggccgccttgcatggactcctgtactcggccggcggctatgacggggcctcctgcctgaacaggtagttggggttggggccccagtggctttgtacagtccatctgcaagaggcaagtttgtgtcaccatcacaggggtcgtatctgatggggtgttaaaggaggtgatccgcgaggccgtttcaccccaggccactgccacactgggcctgaactcttggctttgctgccccagtgccctttcctctctcgggtccttacccccagtccagaggctgggcccaggtgggtgtgcacccagggttgttcaggcagccagggtcctgtgcccaccagcgggccctgcctggtaggactttgcggtctgagtttgactcctagggtaagatttcagccattccgctggggagggcaggtcctggggccgggacgcctttctgtctctgctgagctgtggctgcggtcctggtgcccacagtgctgaacgctacgaccccctgaccggaacgtggacgtccgtcgctgccatgagcacccggaggcgctatgtgcgagtggccacgcttggtgggtgatggggcctgcctggggggcatccccaccttcccccaccgtggagaccccactcccagcaggagtgccacgggtgtgttgacttccggcagatgggaacctgtatgctgtgggcggctacgacagctcctcacacctggccactgtggagaagtatgagccccaggtgcatagtgcacccctcctggccaccccctcccgtgcgccgcggggccctcctccctctgtttacccacatcccccccattcctgacacccca

SEQ ID NO: 37 - DNA, 1104 bp, Artificial sequence
  DNA replication origin
aggagggatgccagtggcgggtctgcgtccagcccacgccctcgcccccaggtgaacgtgtggtcgcccgtggcgtccatgctgagccgacgcagctcagcgggcgtggccgtgctggagggtgccctgtacgtggcagggggcaacgacggcaccagctgcctcaactcggtagagagatacagtccaaaggctggagcctgggaaagcgtggcgcccatgaatatccgcaggtccgcagtggggctgcggggaggggggcgcgggtccgcagtggggctgtgggaggggtccgcgcgtccgcagtggggatgtgctgcggggaggggggcgcgggtccgcagtggggatgtgctgccgggaggggggcgcgggtccgcagtggggatgtgctgccgggaggggggcgcgggtccgcagtggggatgtgctgccgggaggggggcgcgggtccgcagtggggatgtgctgccgggaggggggcgcgggtccgcagtggggatgtgctgccgggaggggggcgcgggtccgcagtggggatgtgctgtgagaagggagttctcccaacctcagcgagcatgtcccgccaccacccctttttgtggtgcagcccctccccccgcatcccttcctgcagccaggggctcaccccgccttccccccaggagcacgcatgacctggtggccatggacggatggttgtacgccgtggggggtaacgacggtagctccagcctcaactccatcgagaagtacaacccgaggaccaacaagtgggtggccgcatcctgcatgttcacccggcgcagcagtgtgggtgtggcggtgctggagctgctcaatttcccgccgccatcctccccgacgctgtccgtgtcctccaccagcctctgacccacctaccaccagaggcctgcagcctcccacatgccttaaggggaccgtggcccccaccagggacgtcctgcgccatccgttcacgtctctgcatccattccttcatgtctttatttagttgtttatttatttagttatttatcttatttattgaggggtgaggagtgccacggctgcccgtttacacctttagcgtctggtcctcct

SEQ ID NO: 38 - DNA, 1030 bp, Artificial sequence
  DNA replication origin
ggttgtacgccgtggggggtaacgacggtagctccagcctcaactccatcgagaagtacaacccgaggaccaacaagtgggtggccgcatcctgcatgttcacccggcgcagcagtgtgggtgtggcggtgctggagctgctcaatttcccgccgccatcctccccgacgctgtccgtgtcctccaccagcctctgacccacctaccaccagaggcctgcagcctcccacatgccttaaggggaccgtggcccccaccagggacgtcctgcgccatccgttcacgtctctgcatccattccttcatgtctttatttagttgtttatttatttagttatttatcttatttattgaggggtgaggagtgccacggctgcccgtttacacctttagcgtctggtcctcctgcgtgtcctcccctccactgcctgcatggggggcgcggggagtgaccaggcgggggcctcaccgccccagggccgttgcctgctcagaccttgcaggctgtggagcaagaggccctgggtctctccaagcagctgcagaccccagctcgaattttgcacatggcggggtcccgggaagggtggggagcagttgtccttcctgtcgtcgtctgccgtgtgccatctttcctggatcttgtagtgggtgcacacgcgtgcactgggaccccacacagcaatacgagtccaacttaataaacacatttctggggttcctcaggctgagcatctctctctggcatgtggggcagctgcgcaactttgggtcctgtctggggtccagggtgaggggtgtgggggggtgccctgagatgcgcaggcatctgggagctgcaaggcagagctgtgcgtccagggagggtgggggccgtgcagttcctgtggaccagcgtcccagtgtgggtggcgtttgcctgggctgggtactgaggccgaggtccccgccacatcgtgggctctggggttagggctggggaggacagccttgcccccgagtgcgctgactgtcttggccgtctaggggg

SEQ ID NO: 39 - DNA, 1489 bp, Artificial sequence
  DNA replication origin
ccgggcctccttctccagaaagccctcgctgaagggaaacaggtgagcggggcgtgggtgcggccacctgggcgcagggctcccccacccgctccggggccaagccacgagaccccttgccttgtccccagagaggacagcgcgcggatgtcggccggcctgccgggccccgaggctgctcgaagcggggacgccgccgccaacaagctcttccactacatcccgggcacggtgagcgcggcgtgcacggtggctgtggtctgggagcgtggctctgcccgcgcgtgtgtgccgtgtgtccgtgcagctcagggtcttcccctcgcccccggggcgttcagaccccggtaggtgaggagccgacgctgactgccccgccctggggagctcatccggccgaaagtctgagcggagagcgaaaccgcgacgcaggactgagtcagtcgggagagagctgggcggggcgggccgcgggcggggcctcccgggacctcctcccgcaggggaccagcgcacgtgtctctgtcgctgcagtggggcttggggtcgtgccggcaggtagtgtcacttgagagtaaggggcctcagatgagcagcgagccagccggtcacctacaccggcctttctccctgggtgtcccgcaggaagttgccgctgggtatggccgcctggtccacagcaatccctctgtgcacgcgccggcctcctcccagcttgccaaggccatgcagcaaggaggtgtctcccaagcacacactaggccacctctccgtcaaaggagcagaagaccacccccatgcccaccccccccccagcccctgtgggactaagggtcttcacagggtagatcccagcccctttcagatgtgtctggtgctgggatgagggaacaggaccaggaacctgggcttcagggcagacaggaacccccactgcacccccgtcaggcagcctggatgggtgggctccgctatgtgcaggccctaggagcatctgcgggagaggacgcctgccctgcactcctgggtccagcagctggcatggccgtgcagacccctttgccaacatgcccccgccaggcaggaagctcgtgccataccctctcctgacctccagagtttcagggctccctgcagacaagtactggtttcggaaaccacgctgcctcagaggagtgggcagggagagggagccgggctgggttaggggtggggtccctgtggctgcatctcagacaccactccctctgtccaggcccaggacatgcagtgtgaccctggggggtcctatgaggtgtggtgggtggccgtagtggtcctcccttgccaggacatggtagccacagaggcaacaacctgctgaacctcgggaaatggggctgggggaggagctctgggccagtcctagagccagtgctccgcggccctgtacctgggctctgcacccagtgctgtgagctggctctactacggctccaagctgagtcct

SEQ ID NO: 40 - DNA, 1290 bp, Artificial sequence
  DNA replication origin
ccccaaattcttctaacaagtcttcagaggttgaataacccaagccatgttacacagcttaggaaagaatgaagatgggtttaatccactgagtccagatctcaccatctctaccactagaccaggcagctctgtgtggggaagtgtgtctgtgtgtgcgtgtgtgtgcacaagtgtgtatgtgtgcatgtgtttgcacgtgtatatgtgtgcacacatctgtgtgtatatgcacaggtgtatgtatacgtgtgtgttggtgtatttgtgtgtgtgtggaaatgtatgcatgtatgcagtgtgcatgtgtgcatgcatgtgtgtgcatgtgtgtataggtgtgcatgtgtatgtgtgcacgtgtgtatgtgcacgtgtgtatgtgtatacatgtgtatgggtgtatttgcgtgtggatatgtatgcatgtatgcacgtgtgtgcatatctgtgtatgtgcaactgtgtatgtgtgcacgtgtgtatccatgcatatgtgtgcgtgtgtgtacatgtgtgtataagtgcgtatgtgtgttcccgtgtgtatgcatctgtgtctgtattgtgtggcatgtatgtgtctattgtgtgtgtatgcatgtgtgcgtgtatgcatttatacatgtgtatgtgtgcgcatatatggatgcatgcatgttgcctgcatgtgcacgtatcgggtgtgtgtgcgtgtacgtgtacacgaatatgcatgtatgcatatatgtatgcacgtgtgtgtaaattctgccgtgactgttttcctgtggaaaggctgagtgtgcaggttctgtgcctgtggggggctgttcttcacgtatgtgttgtgtggctgtgcacaggttctgtgcctgtggggggctgttcttcacgtatgtgttgtgtggctgtgcacaggttctgtgcctgtggggggctgttcttcacgtatgtgttgtgtggctgtgcacaggttctgtgcctgtggggggctgttcttcacatatgtgttgtgtggctatgcacaggcagaccatgctatagtcctgtagctgtgtggatgcgagcggagggggtggggggcccaggggaggccccctcccctgagctctactcctcctaggacatcctggacctggagaaccagcgagaaaacctggagcagccattcctgagtgtgttcaagaaggggcggcggagggtgcctgtgaggaacctgggaaaagttgtgcattacgccaaggtccagctgcggttccagcacagccaggtgggggccgggctgggtggagcacgctaagggtgcag

SEQ ID NO: 41 - DNA, 1160 bp, Artificial sequence
  DNA replication origin
tctgggctccaacgtctgggaagaagaactcgcacatgtccggccactggacgcctgccggatcctgaccggccgctgccgcctcagcctcttcgttctcctcgatggtgtcacagaagaagaactcgtaggcctccgggagggtcacggcaaagctgctcccgggcccgaccctcgtcacggcagagggaggggggcgaggcaggtgcttgaggatccgaggctggtggggccggggcccgacagccacagcctcccaggctccgggccccccgtgggccccagttgctgtctggggggctgagggccgggctgaggcctgtcctgagcctggcttattggggctgggcccagccacggagaagcgcactttcttcttcctggggacttgggtgagacccagtgcgggtgccccagagcagcatccgggggcccctgctgagggctcagacacaaccgcctccatctccaccacatcaggcccagctctgcgggtgggaggccaggcgaggccagcggcgtcggctctgggaacaggtgtagacacaagcccgctggactcggtcatcctcggcacagcctccgagacaggtggagatgaagccacctctagcttagccactgggcctgctgtaggcaaggccacatccaggccatgtttggaggcaggtgtggacacagccacgtccgtgtccaattgtggcttggagatgggtgtagacagagccacactggactgaggctcagaagctggtgtagacacagccgtgtcagattgcggcttggaggcaggtatagacacagccatgtccctgtcaggttgcggctcagaggcaggtgtagacacagccatgtccgtgtcaggttgcggctcagaggcaggtgtagacacagccatgtccctgtcagattgcggctcggaggcaggtgtagacacagccatgtccctgtcaggttgcggctcggaggcaggtgtagacacagccatgtctgacttagcccttgagacatctgggagggcttcccagacagtcgtggacactgtgtgcagcttggctcggcgcggggttctgatttggtctgtgccttgctctgtcacagggacaggtgtagacaggcccaaacctggccctggtctgtcttcctgcacaggggacctg

SEQ ID NO: 42 - DNA, 1439 bp, Artificial sequence
  DNA replication origin
cgagcacgtgccgttgtcgaccaccgagttaccaggcagcgccggacgttcccctgaaccagcgccgcggtcgccatcccggtcccgcgttcgggggggtccggcgcagttcgaggcactcagccgaggcagagggtctccccctgagccgcacccagggccatttcccaactggggccgagttcaccagggcccacgggaggcgagcgagccctcccaccagcactggccctccaggccccagtctgtgcctccatcaggagcccccctgggccctccaggacacagccgtgcacagcttgtaggagcctcccaggcccaacaagccaggccacccctggcccctggctgccctgccccctccctgagctccgagggccaggccagtgaccctgggcggggtagcattgggctgggggtcccacccttggtccccccagcagtcctactctgggggtcctggtcccaggagagcctcaaagtagcccttccccttgggagcctgagaccccatgagggaggcccccttctccttgggagcttgagaccccgtgagggaggcccccttccccttgggagcttgagaccccgtgagggaggcctcctcagcagcacaggaagggacggtcttcttgggggcagctggaagctcagcgtggccgggggaggggagttgctcagagaaggcatcagtgcagaaggggaaggagggcctggggcagcgaagctgggagtgtggggaggagctcagggtaagagaggcaccccacaaagtcacccgggctgtgggtcccaagagggcagggcatctctccaccaggctctggccttgaatgccctctccactgtggcgaaagggccctgcatagctgcccagggaccactcaggttctgggggaatcacagtccttgggcagtcccttcgcagtctgggttcctttgtgctccacaccacctgccccctggcttttcccccttgtttcctcctaacttgtcgtccatcccatctgccgcaggctgggtggtgcatcatccgggcccagctggacggggctccagagggcgagggctgagtctgtccagaagctctgtcctcagcacccaaaacagggaaatggacccacggggacctaatccatccctttgaatgacagagctgggaggtttgggttagactagcgaggtctcaggaaacacagcctgaggggccgggctggacgggggcagcataggggctgtcctgggctccccctcaggccgcccccttctcagagcccccctcgggcctccgggagccagcctctgcctacacccagccaggacgcccaccagaacctgcttaggcacgcgggggttctttctgccctccccaccctgcatcctgtggccccagacgtgaggtgccccctcccgcggggggtcctttctgccctccccac

SEQ ID NO: 43 - DNA, 1294 bp, Artificial sequence
  DNA replication origin
agccggggccgagcaacgcgccgggaggggccgctgggggcgaacggggcccgggacccccggggctgggcggagtctcggggctcactctcccgcccagggggccgggagccggggctggacggagctggggctgtggccgcgcgggaagtcgggaaggaaattcccccagtggcgcagggtccggcggcgccgaggggtgggcgagcctcggtctcgagcctcttggcttcctccgcccgtccccactccggtcccggtttgggccctgctcggtctccgagtttgatccgacaccggctcggcctccgggggtcccaccctcaggtgtgcggcctggagcacggagggctgcagaaagccttgggagcgacagagccgggggaaggtcggcggccgggtcggcaggcgggagggcggagtcagcggacggcgaaggggcgcacgggtggccccgcagagcagggccggtgatggcgcgggccgggccggaccacgaggagcagaacgtgcgcgtgacgcgagcgggctggtgacgtcaccaggcacccggggcgatgacgcaagcctgctgggatgacgtcatgtggcccgtgtcgccacgtgcttccaggtgacccgctggcgaactcagcagcagcaaagtggggctcacagaaaaatgaggggccactgttaatataactgcaaaggggcaggttgcgtaaaacagggctgtggttattttcgtgtttgctgtttttatttcgaatgccgctgcggggcacgttggtcctttccgcactcggggtccccggcggcctcacgcgtccgtgcagcggaggcttcctgagccccctggagagcctggcctgggcccgggtgtggagaccctcccgggctttcaatccgggcaggaggcagatggcagactcagcagtcacgtaagagaaccgaattaggtgggtggcctgggtggacaaaagccttcttgacgccgggtggtcccaaaggcttctgcggggtggggggtcctcaggggggaagcctcaagggagggcgtggcattcccagggtgcgaagggggcgcagggacgagggaggtggggagggggagctgggccagcgagaaccgggagcttctggtcggggagggagtcggggaactttttggggagcttttctgagccagggagtcggctgattggcaggttcgcccctgcccgggcacctggacccagggtttctgtgcggaagcttcccctcccctcggaccccacgtctaatctggccccaagcaaagtcctgcggccca

SEQ ID NO: 44 - DNA, 2262 bp, Artificial sequence
  DNA replication origin
tggttcctcggtggctttggccccagctgcctgagtgcacagcccgctgccctgggcaggagttggggaccatgctgaggaccacctgcagggggtggctacaggtctctgatgtcaggagtcagtgtgtgaggggggtgttgagggccgtggcgagatggcagccgccacctctgggtcagaggttgggaggggaggtcacagccagcacctcacaggccttttggggacactggctgtggtcatggagtgcggccacagtggcccaatgtgaggagaccccccaacaaggctgaggcccccccaggtccagcctagaagacaccccggttttccccacagtctccccactggcgtgtgaatgtcctcatcagtcaccccccttagctaacagggggctgtgcagatgccccggggccacccgccatttggagcttgacccactcagggccaggaggtcggctggatttcagtggctcccaagaagcacccgttagatgggggggaggggtggggaagtcgctgagcctctgcctctgtggaagagaggaagggatcagcgaggagggagcaggggtgaggagggaagggtcactctccctgggtcagggccccagcccacctccactattccagtcttgagtgccgcaccacaaaccaccccaaaacagcacgctcagcaaccaccctactgtgtgcgggcagccttggaacggggcgcgctgggacctgcgccggaagctgctcaggagtctggaatccaatgctgattcctccacggggcctctccttgaggccagggcgtgctccctcccagcacggcagctgggttccaagagcgactgtcccaggacagcgaggtacgcatggcgtcttccaagtcagcctcagaagtcatgtcctgccaaacaccccattcttcccagctgagactgtcacagagtctcatgtagaaggcatttcaagatatggggatgggagatactatcacggccgtctctgaaaaacgcaacctgcccccaacccaggtgtcggcaccatcctgggctgcagcccaggatccacccccacactcagagcaagggaaccccaaggccctcaggaaccctgaggcccctaccacaaatcgaggccagattcgagaggcagggaggggaccatcagaggccaagggcacagacccagagagacagacacacagatgggagctgtcctgtggcaaagaaggtgggaggaacacagtccccggagatcctggagtgggctccctggcagggggcagggagcaggggggtctcttcctctccagaagagcagaggcaagtgctggtggcccctcctgcctctgctcagcaaggaccccagctgctgcccaggggcaggaaccctggcagatgggcgtgggtgctcactatgagttggacgccgtcagtggctttaaaagtagaatctcctggccaggcacggtggctcacacctgtaatcccagcactttgggaggctgaggtgcgtggatcacctgaggtggggagtttgagaccagcctgaccaacatggagaaactacatctctactaaaaatacaaaaattagccaggtgtggcggcacacgcctgtaatcccagctactccagaggctgaggcaggagaatcgcttgaatacaggaagcagaggttgtggtgagcccagatcgtgccactgcactccagcctgagcgacaagagtgaaactccgtctcaaaaaagaaaaaaaaaaagtagaatctcctattaagaccagcctggccaacacagtgaaaccccatctctactaaaaatacaaaacactagccgggcgtggtggtacatgcttgtaatcccagctacttgggaggctgaggcaggagaatcgcttgaacccgggaggcaaaggttgtggtgccactgcactccagcctgggcaacagagcgagacgctgcctcaaaaaaaaaaaaaaaaaaaagttagctcccttttacagatgagaaaacaggtacaaggaggggaagtgagcccatctaaaaaccagtgagggaatgatcagtcccagccacgcttggcagggaggagactcacgcctgtagtcccagcacgttgggaggccgaggcaggagcatcgtctcgggccaggagttcgagaccagcctgggcaacatagggagatccccatctctacaaaaaaaaaataaataaaaacgatcctcaggctcctccttccatcccgaactccctgcctgtctaggg

SEQ ID NO: 45 - DNA, 902 bp, Artificial sequence
  DNA replication origin
ggggtcagtgtgtgcttcgactcctctggaatctggctgctgtgacttgctttggccgatggagtgtggtggagattttactatgtgcgttctggatcctggcctcaagagtccctaggcttccacttcgccctcctggaacgctggccatgtgttaggaggaagctgactgagagtgggtaggactccaggctgcacggctctggcagagagcccggcagctgagggacagcagccccaggtgtccagcatggctacccttgggcccttcccacccagctgaccttggcccagggccgcaggctgtgagaggccccaggaagccactggcactgccctgatccccactacggaaagaataggcaggtggtgcttaagccaccaagaaggtagggattccacacgggctgtggtctgcccacatgaacaggaaggagggagggtgaggggcagacacaatggccggccagataggcttctcttgataaggagagaacagacaggggaggaggaagccgcagatgcaggctgtgcatctgcccgagatctcagggctggcggacagcagaggcgggagctgggaggggggcagagagagtggagaggctggaccgtggaggggtgcagttgggagaaaggacccagtggggtaagtggggaggggacaggacccctgaaagagaggaagtcaaagttggagaattgctggtgtggattttgaaggcatggccgggagagtgacagggagcaggtgtcccctcctgcaggaaaggggtgccgatgacttcaacacagtgaggtctggtcacaaagcgggggtggttttggtggaaaaggaaagcagtctgggagtgccagtgaggagggacaagggcacccacctcgtcctggtacagcagaga

SEQ ID NO: 46 - DNA, 1086 bp, Artificial sequence
  DNA replication origin
ccgtggggcgggaaaggggcggcccgggagggggcggggagaggagagtggggggcgggtctggatcccgcaggcgcccctcccccgccgcggccccccggaagtgcggctgcacccgagttaatgcctaatctggaggagacgtgacgggactgccgaggggctccgggcggcgcggagccgggcggcagggctcgaaggccgccgggaggggccccagacccggccccgatcccgctccgcaggccgcgcccctcccccgcggggccggacaccgaggctcggccgggccggaccccccgggagctgcggcgcggaggcgggtcccggtgccggggcgggcgctgattggccagcacggggcgcggccccgcccctcccggccccgcccccccaggccccgccgcggggaggttcgcgcccccttccgtcccgcggctgcaagcgcgggtcccgccacgccccttcccagctctgggccgggcgcctctgcagcttggcctggctgggtgcagggggaaactgagggctggaggacccaagtgggagcctggcctagctgaagattgaaaggagggagcggaggccccctttgtcccttcagaactgtgtctaggctgggcgtggtgactcacgcctgtcatcccagcactctgggaggcggaggcagcaagatctcttgacaccgggtgttcgagactagcctgggcaaaatagcaagaccccatctctcaaaaaaattaaaaattagctggatgggccgggcgcagtggctcacgcctgtaatcccagcactttgggaggctgaggcaggtggatcacgggaggtcaggagttcgagaccagcctggccaacatggtgaaaccccgtctctactaaaaatacaaaaattggccggtgtggtggcaggcgcctgtagtcctagctacttgggaggctgaggcaggagaatcgcttgaacccaggaggcggaggttgcagtgagctgagatggtgctgagaggtgacagcgtgctggcagtcctcacagccctctctcggtcttcacgcctcctctgcctgggctcccactttggtggcacttg

SEQ ID NO: 47 - DNA, 2250 bp, Artificial sequence
  DNA replication origin
ctcccttggcgaccgccaagccccgggagggggggtcgccgggtcccgggaaactcgcgggcgccggggaaagttgctgcgccgccgccgtcctccgcccgccgccgcctccctcctcgcggagacaagtgcacctcgcccacggactgcggctgccgcgcgccctccctaccggccgagaaggagaggggcctggggagggggggcctttgcccgggcggggagcgggggctgggcctgggatccgcttgttcccctccccagaggcctttcccggggcgagaggggttggtcaggagagaaaaaggggcgcacagcctgagctcccaaccccgggagccaggtggggggtgccgcagtggtgcggggggggggcgtgcaggagcagagaggtgggcggggccgtcaccgggcctcgtgtgcttgggggcagggccggtgccccatcgcgctcctgcgggaaccggggctccccaccccggggaggggaagtttccctggtttctccttcaggtgcttctgggagcccccggggtaggtacgctgggacccccaccatcttctcctagtaggggctcgggggacccagagccggcgcccgtgtacccccaaaaccatctcctgggaccagaaatccactcatttccctccacggaggtggagaaggtggcagcttctttcagactggccggtgcgggctacagctgggctcccccgccggcccagtctcctccacagcggccagggcactttgccaggcccctgcaggattttcccgacttcctccccgctgctcctgggtgtggctggggtgggggaaggcgatgaaagccaccaggccctccccctgcctgggtcatctgcctcctggagcctactgttggggggcgtggaagaggctctgcctgcgcaactggagggggtccctgcggatgccgcagtcctgaggctcccagcaggggctgcgcagtggacaggccaaccattgtctctccccccatccggcagccccagccccccagatctgaggaaggggctgcttctcccggctttgttctcaggggagtgcgtgagtgcgtgggtccctgtccccgtgagggccgccaggtcggctgtagcctttaccacaggccaccgtcagagcagctgccctcagggccccaggagctgagaaggtggagggtggggcaccctgcactgcccaaacttgatttcgtggttcacaggctgccctgagtgcacagactgtagaagcccgaggaaggggcgtctcagcccagccacagggccaagctggccccttaccccaacgccccatccccctcctccactgcccaagcttgctgggaggtgggccctgagcactgggcaggtggggagaagtgtggaaggcaggcaccccaagccaggtgggcccccttcccaaattcggccttagctgatagggacgttattggagctggggtggctgaagttggttagacctgggggaggggatgtgttcacaggtgacgcatctctgagcgttcccgcatgggctgtggtggccagtgtgggcttcccccagcttccgcccagcgggctgactcagaggtctccccacatctctgcccagggcttgagtctactgtggacatttgccctaaacacctaaagcccccagtctagccccttccccaggagaggactaatgacacctaccgccatgtccaccccaggttcgggtctggcggtacttgaagggcaaagacctggtggcccgggagagcctgctggacggcggcaacaaggtggtgatcagcggctttggagaccccctcatctgtgacaaccaggtgtccactggggacaccaggatcttctttgtgaaccctgcacccccatacctgtggccagcccacaagaacgagctgatgctcaactccagcctcatgcggatcaccctgcggaacctggaggaggtggagttctgtgtggaaggtgcgtggtggggggctcgtgtgggggcctgtgggggtcagggcagtggccaagggggacaggttgcaggggtcgctgtgcggggtcctttcgtgctgtgccggaggctgcagcacacggtgtcttgtggtccaacctcattctctgcttctccgtccctggctccccagctgcatctccaagccctcacattagacatctttggccctggggcccaaggcaagtcccagccctgcaaacagatggcctcctgcctcctcccctcctccc

SEQ ID NO: 48 - DNA, 1060 bp, Artificial sequence
  DNA replication origin
gaaacaccgtggtggcctgcccacctcaggatggaaccccggggtcccaggaggtgcctgcccctcagagatgagaaaaaggaagtgcagggctgagatatcaccccatggacagtcgcccgctggaggaggaggctctgtacccctgcacctcctgcctgctgggtgagctgctgggagctgcactggggctcagagcagtcctgtgcgcccctcaggctgtggcaagattgtggctgggatctagggaatgaggcaggtctctagcggagcctgcagcactgagggaagcccccccgaaggggcctctccccccagcacagatcctgggaacttcctctgaggaaggccccctgccaggggcagctcacagcaggacctgggaaagggagacggcccctcccagccccctcctcctgcagtccccccacggagcagaggcgtgggagaaggggcgtgctgtgtcctacaggcagccggctgtttccagctgtgtggcctgcgtgtgtgcatgtgtttgtgtgtgtgtgtacacgcatgtgtgtgcacgtgcctgcagcctcagatgtaccagcctgtgcacttcagaattctgcctggagcctccactagtgggccatggttcttaccaccctatgtccctgggttcagcccgggctggtgctgcaggtgtgaggctggtggtgggtgaccctggcctgtccagggggcctcggagctgggctcttcctctgtcctcgtgcacgtgtctcgcctcagcttgctgttggttgtccactctcctgccccctgctcactgcgtccagcacgctgccccgtgtctggcaaagggcccaggaccttctgcaggtgctgcctctgagatgaccagtgtggtttctgaaggtttgagatgaaggcatgctgggtcccttggggcggcagtgaggacaggagagggtcctgggtcacagtccctcacatgcctgcgggacctcgagactgacacagatgcccacccctgcccagatgggactctgtctgggggcagcagggcagtctgggagtcagaccaggcctg

SEQ ID NO: 49 - DNA, 2585 bp, Artificial sequence
  DNA replication origin
cccctcgtgggccaagggcgcccacagccacgccaccctttccgaaggaaccgagccccagcccctcgtgggccaagggcgcccacacccacgccaccctttccgaaggaaccgagccccagcccctcgtgggccaagggcgcccacagccacgccaccctctcccaaggaaccgagccccagcccctcgtgggccaagggcgcccacacccacgccaccctctcccaaggaaccgagccccagcccctcgtgggccaagggcgcccacagccacgccaccctttccgaaggaaccgagccccagcccctctggggcctgccaattgccagagagccccagtgctccacccactccaggccccaacccccaccttctgagggcaggataagtacctgcgggtgcccaaccagagtgtgcctgtgtccacacgggaacatatgggtgggaggtgaggagaacgtgccttcccagtgtatgggtgggggttgagggacaaaattaatgttgcacaaagatatgggggatgcccaatatctatgcaggcaggtggggggatcagtgtctatgcaggcaggtgggggggacatcagtgtctatgcaggcaggtagggggagggggacatcccgtgtctatgagggcaggtggagggagagaattgaggctggggctggggtcagcagtggggctgaatggggcagagtgggggtcaaggagcaggggtggtgctgggcaggccaggaatacccattgtgtggccgtgtgtgtgtgtgcagtgcatggtgctgtgagatcagcatgtgtgtgtgtgtgtgcagtgcatggtgctgtgagatcagcatgtgtgtgtgtgtgtgcagtgcatggtgctgtgagatcatgtgtgtgtgcagtgcatggtgctgtgagatcagcgtgtgtgtgtgcagtgcatggtgctgtgagtgtgagatcgtgtgtgtgtatgcagtgcatggtgctgtgtgagatcagcgtgtgtgtgtgtgcagtgcatggtgctgtgagatcagcatgtgtgtgtgcagtgcatggtgctgtgagatcagtgtgtgtgtgtgtgcagtgcatggtgctgtgtgagatcagcatgtgtgtgtgtgtgcagcgcatggtgctgtgtgagatcagcatgtgtgtgtgtgtgtgcagtgcatggtgctgtgagatcagcatgtgtgtgtgcagtgcatggtgctgtgtgagatcagcatgtgtgtgtgtgtgcagtgcctggtgctgtgagatcagcatgtgtgtgtgtgtgtgcagtgcatggtgctgtgagatcagcatgtgtgtgtgtgtgtgtgcagtgcatggtgctgtgagatcagcatgtgtgtgtgcagtgcatggtgctgtgagatcagcgcgtgtgtgtgtgcagtgcatggtgctgtgagatcagcgtgtgtgtgtgtgcagtgcatggtgctgtgtgagatcagcatgtgtgtgtgtgcagtgcatggtgctgtgagatcagcgtgtgtgtgtgcagcgcatggtgctgtgtgagatcagcatgtgtgtgtgtgtgtgcagtgcatggtgctgtgagatcagcgtgtgtgtgtgtgcagtgcatggtgctgtgtgagatcagcatgtgtgtgtgtgcagtgcatggtgctgtgagatcagcgtgtgtgtgcagcgcatggtgctgtgtgagatcagcgtgtgtgtgtgcagcgcatggtgctgagagatcagcatgtgtgtgtgcagtgcatggtgctgtgagatcagcgtgtgtgtgtgtgcagtgcatggtgctgagtgtgagatcagcatgtgtgtgtgtgcagtgcatggtgctgtgagatcagtgtgtgtgtgtgcagtgcatggtgctgtgtgagatcagcatgtgtgtgtgtgtgtgtgcagcgcatggtgctgtgagatcagcatgtgtgtgtgtgtgtgtgtgcagtgcatggtgctgtgagatcagcatgtgtgtgtgcagtgcatggtgctgtgagatcagcgtgtgtgtgtgtgcagtgcatggtgctgtgtgagatcagcatgtgtgtgtgtgcagtgcatggtgctgtgagatcagcgtgtgtgtgtgtgcagtgcatggtgctgtgtgagatcagcatgtgtgtgtgtgtgcagtgcatggtgctgagtgtgagatcagcatgtgtgtgtgcagtgcatggtgctgtgagtgtatcagcatgtgtgtgtgtgcagtgcatggtgctgtgagtgtgattgtgtgtgtgtgtgtgcggtgcatggtgctgtgtgagatgtgtgtgtgtgcagtgcatggtgctgtgtgagattgtgtgtgtgcagtgcatggtgctgagtgtgagatcagcatgtgtgtgtgcagtgcatggtgctgtgagtgtatcagcatgtctgtgtgtgtgcagtgcatggtgctgagtgtgagatcagcatgtgtgtgtatgtgtgtgcggtgcatggtgctgtgagtgtgagatcagggaccagggggctagtactctttcctgcacatgagcctgcgtgggctggtcagggctgaatgattttgtctgaagatcccaaaa

SEQ ID NO: 50 - DNA, 1645 bp, Artificial sequence
  DNA replication origin
accagggggctagtactctttcctgcacatgagcctgcgtgggctggtcagggctgaatgattttgtctgaagatcccaaaatagctcatgtcgcctgagctccctccctggctgggcctggggcctcaatggccctttgtctttctgaaggcatctgggcctctgtggggggctcagacactgactggggctgggtggggccaggctgcctgcctggttccccttcccctggcccagcccaaggggccctaagcctcattccagtgtcggcctggggcagccaggccccccacgtgactttcagcttgttgggccccctttgctggcagatcccagggtctctctgtgtgggggcaaacttcccaggcagtgtttgaggccccctctgccagcccgtacctggggctcccccacccctcccacattgtggtacctgtcctcctcctgcagagcccgcccagagatcccatggctgaaggtggtggcagcaggcgggctggcgcgtgacctggtagcacggcctgggtttgaccctggcactgcccctgggactcagagctgggaggtgagaaatggggaatgcatgtgaaccacctgcctctgcacacagcaagtcctgttctgggttttctcatccctgggtcacaccctgcgctggggagataaaaagtcagaccctgcccggggcacccacagtcagcaccgccggaacactgtcagcctggtgtggacagtgccaaggtccagcagggtggggtggttggggtaggagctcccctgaggagagagtgaggccagcaggggtgggtctccaagtgcttcctttgacagctgctctggatgggacgtggcttggggtgggtgagaacccttggctgagtttggattttcctgcagggtttcattggaacaccaggttccagggccgtagagatgtggaggcctcctgtctgggtgatggggcatggtgctggtccctggctgtggggtggaaaggagtcccaagagagggagctggcaagacaggaccttcccagctaaggtggggttggtgggatttggctggggcccttggaggagcctgaccaggaggtgagacagggcacctggaaggaaggaggcgttggggagagtccagatggaggccatggggttgaggggcccagacacccggctgggggactccaggaaggcagcaggtgtgggcagtgggtcctctggggtggactgaggtgaggcctgggtgtgaccacgcggtggcactggtggctgccggcagctgtcgtctgcagagtgggtgagaccgagtgtggcagatggcttggtccgcggtgctggaggggactggcggagcagaagcgccctggcgccgggtccttgctttcctggagctggggcttggggaatggggtcggtcattgcagggacagaggagagggcagggtaatgggtgcgcaggggtcccttccaaaggctgcgggtggccaggggtgtgcgggggcgctgaggtgcggtcgccgagagattctggcctccagggtggtcgggcctggcatggactctaggggatggtgcacacaccggaccggacgggcccctcccttacccccggatcccccggctgggcagcggccagggagaggg

SEQ ID NO: 51 - DNA, 2029 bp, Artificial sequence
  DNA replication origin
taggtggccgcgggcggggcgtcgcactggccaagccccaaccccgaggcccctgcacatagaggctggaggccgcggcgggtccgcggggctcccggcagcttcccggggatgggatgggtcactctgcggacccctcggtccctggaggccgtccttgggctctcagtgggcctggccctcacccaaagctgcagaaacactttctgcgggagctggggagggaggggcagccggctacactgagagccggcagttgggggtagggcaggacctgcggtggactcttccagggaagggggtcctgcctgcacccctgtggctggggccccatctgacaggggtcaggccatgactatttggctggaggggcagagaaaagcaggggcctctgtctcagacctcagccagcccatggggtcagggctggacccttcagcagcctggatccctggggctagcggtgggggggggggggtgggcaggggtgcccctttccaggctgggcaaagggatgggacagggaggagcctgctcagaggagcctaacttggggatttgttttcttccagataaacccgggacccacttcactccagtgcctccgacgcctcctgatggtgagtagggctgagttcgggggacctggatgggctgtggcactcttgggagtcaggggccatttggaggtgtgcacccagacgtgtggagtgtgtctggagtgaggaggaggctggacaagggcacctgcgtctgtcctgggagtccgcagcggtgggccgcagtaggaactcggggtctagaggccgccgcctgacggcactggacctcggctctcacttctctgggcctcagccccctcagcctcaaaactgggaacaagtcctgggacccacaggttgtgaggtgatgtcagacctgtagggcagggccagagtccggtcagggggctccgctctattgtcctcccttctccctgttcagcaaggggtggggctggacagaggctggaagtggacaggagcttgcagggaaggctgagctgggggagggccctgacctgatcagtgacagctgtctggggaggggcctggagggcggcagtctgtccctgggactctgcaggctgtcatggggggacacaagtgatggagggggcgggctgaccttgttgacctgctttgtgaggtggggcctgtcctccccggggtgctcctggtgtttgggccactgtcatcggggtggtgtgagggtgtgaggggaagagaggaagtggtcagctttgcagaggaacacagacggggggaccggtggctccctcgccaggcctggggtcctttccagcaggtggggaaggagcacctgccccatcactgggtctcacttgcgttcagttgtgtgtgcagggctgtctgtgagggctgtgctgaggccttcctgaccagcacatggggtgggaaggacgacctggggaatcctgaagtgatctgaagacagagccctgggctggatagatcgtctcggccactttccaggtcttgggagtgggggatgatggctggaggaggtggccaggccttggcagggggccctgtgatgcccgcctgtgctgagaggtgggggcagcttgggatgctcagtggtctgaaagatagggtggggtcttccctcggagtgtggagtttaggcacctgggaaccggagctggattcaggggtgtgagatggaggccctctgcttcctcgaccgcctgccaggctggggtgacctgtagtcagctgtgctttgctcctgaagccgcacaccagcaagtgggcagtggttctcccacacttggctactcaactcctggtcccagggactctggcctggggcagcgctgggcctggggtgaggagctgggcagcgggaatggggaatggtggctgtgggaacccgtcctacccctgggctctagccctgcaacctgtctgttggcccccagcccctgatggccctccaacacccgccccccaaccccaccaggctg

SEQ ID NO: 52 - DNA, 1287 bp, Artificial sequence
  DNA replication origin
ggccgggcagggccagggcaagaactgcgtttccaccacctgtgagccagaggcctggagccaactggatttaaagaggtgctcaggtgggaggtcccctctcttagcatcctcagcctcgtttcctgacacccagaaggctggggagtgtctccttttctttacacactgcccccttcacctggccacagcccaccctgccacagagtcacggagggctccacaccaaggccatcgtgacccacatgccacctaactgtggtcatagttacgggccagagctcacagcagggctggggcatcctctccatcccccagcctacccaggaccaggaagggagttaaatatacccgctcctataaaaagcactgccgcctccagcgttgcacacagtgggaggacccgtcacgctgcgggagagtgggtggggaggccgagtggccggggaggggctcctgcaggaggtggagctaagacaggcgtggcaggacccccaaaaatgacccatcgggaacacagggctctcagggtcctaggtgtgtcacctgcatctatgaggggccatgtgggcaggtgaccggagcacagatgtgtctgagcccagtgctggcatttctagcagtgtggccttgtcaggtggcctaccttcctcctgccagctggcaggggagacatctcggggcgtggctgctgcaatgcgctgtgcctggcgggtacgtgcgtgtgtgccatcaccacgtgcacctgtcttcaggtgatctcgtgtggagcctctatgatcccctaggcctgtggagactcagcacagtggtgggagcggcccctcacctaagcccgcagtgtgagcggagaatgggggggtggggcttcccggaggccgtgattcctgagctcactcttgaggggcagatgtgtttccagcctggatggggataggagggagggaccagcactgtgacctttaaaccctgggctggccggcagtgtcacaccatcaaatgctgtgagggagatccacccccactccacagctggggccacattccaagaggagcggactctctgaggccctggaggcagaggggaaggggccaggacctggccctgcacaccagatggggatggggagccagtgctcagcctggcttcaaggtcccgccaggtacccaaggtctctccactgccctgccacattggtccagcagctggtcactcagagcctgtccctaaggtacctctaggctcccatcccagagcttgctctccatgcccctgcaagcagtcca

SEQ ID NO: 53 - DNA, 1018 bp, Artificial sequence
  DNA replication origin
cctggccctgcacaccagatggggatggggagccagtgctcagcctggcttcaaggtcccgccaggtacccaaggtctctccactgccctgccacattggtccagcagctggtcactcagagcctgtccctaaggtacctctaggctcccatcccagagcttgctctccatgcccctgcaagcagtccagccccgctcaccctggtgagctgccatcatcaccttcttccccaaggctctgtcttgggacgtagcaggacctcgggctggactatggagggagctgcgggtcctggtggatgaggagcatgcccgccatccaggaacagtgcccttggccatggtgtcagggccttgggagaggtctggctgagccaaggtgaccaaaaggggagaaaggctcaggagccctggtgcagggaggtgactgggtccttggccatggggttgggacctggggggaaccattggtccacaggtccagccgaagcccaggagaacagctggctgggcatcagcaggtgcccgttggatttggactgggagtcccagggccttggacaaggcagggccaaagggagagggagatgctgaggggagagagaaggggaaccagaagggaagtgaaagggccaggggtgcatgtggtttgagtttgatttgagccaggacgggggaaggccagtggtgatgacagccctcatgactatacttacagtggcagcagacgggccacatagcgctgtgtgctgggcaccctctaagctttgcagatactggcccatttaaccccacaatcctgggaggtaggtcctattgctcctattcaccgaaggggatactgaggcccaggcaggtgataacctgcccacattctcacagtgggtaatgcagagctgagcagcctggctgtaagacctgaggtgggagagtagcagaagaggggtgggggcacagccaaggtttggggaggaagacagggatctggtggggggagcatgggtaggttgcagggatg

SEQ ID NO: 54 - DNA, 965 bp, Artificial sequence
  DNA replication origin
attgctcctattcaccgaaggggatactgaggcccaggcaggtgataacctgcccacattctcacagtgggtaatgcagagctgagcagcctggctgtaagacctgaggtgggagagtagcagaagaggggtgggggcacagccaaggtttggggaggaagacagggatctggtggggggagcatgggtaggttgcagggatggcaggcggatggccctcactcagccttctggggtgggggcagggacacccagacagacagcgccagagcctggggtgggctgttgctatagcaacagctggctccagctcccagtgcacccaccctccttggagatggggggggttcctcctgccccatttcacgagcctgctgggaagtgatgggtggtagccacccctctgacatgacttattaatgataattggacccaattaaacatttattaaatccagacagctgcagccgctaacggacccttccctgatcctgggtgggccatgctgggggtgggggtgctcaggatgggctgccgcaggggctctgggttttaacgtgcctgaggcagctttgttggccacgttgaggtctggtgatgggacgtgtgtcaggcgctgtggtctgcagctgtaagaactaaaatgagcaacagttcctgcacctctccaagaaggaagttcgctttgacagagagtgagggcgatggaggaggcaagagtgaggtggggggccgggggatgcccagggaggagggggcgtgtgggtgccccagggatcccagggagcgatgggaggctgcagaagggcacaggcctgccgcgggtggggggctggccagggagaataggagatagtagaggcggaggccaggaatttgcacttctccagggaagctggggaagagttggggagagggaggcaagaagattccccacccatcttaggcgcagggagcggtcaggg

SEQ ID NO: 55 - DNA, 952 bp, Artificial sequence
  DNA replication origin
actaaaatgagcaacagttcctgcacctctccaagaaggaagttcgctttgacagagagtgagggcgatggaggaggcaagagtgaggtggggggccgggggatgcccagggaggagggggcgtgtgggtgccccagggatcccagggagcgatgggaggctgcagaagggcacaggcctgccgcgggtggggggctggccagggagaataggagatagtagaggcggaggccaggaatttgcacttctccagggaagctggggaagagttggggagagggaggcaagaagattccccacccatcttaggcgcagggagcggtcagggaggcgccagaggtgggccagagctgtgacctggcctcacaccccgtcccggtggggctctcaggcccctgagggccagacgcgggacctgggtgcgacccgggcgggaggcggcagggctcagctgtgctggacgctgcagcagcgcgggaaggggctcccccggctccatggggtgaatcggtgaggggctccggtgccgatgtggaaggagctcctgagcagaactggggcctggactgcttgtgcccgagttggtttcgaggcgtctctgcttttcgctggaggcccacgaggtgggtgggaagtgggtgctcgcccgtcgcagaaacagagtcgggtgccgcctgcggcagacgcccctctccgcgcctgcaggtgcggggtgggggagaaaggtcatccctggagaggcccggggctggcgggaatcctcggcgggcggggtctgcgaggggcagggccggtcctgtgagcgcacgcacgcgtgtccgtgtccgtggtggacccccgatgcggcgcgggggcgggtgaatgcgcgggctgcgagcacggcaaggtctctcaggcttgtggacgtgggtacgggcgtctcggcaccctgagctttctcccctacccgccc

SEQ ID NO: 56 - DNA, 1049 bp, Artificial sequence
  DNA replication origin
gcgctccggccagtgccagggtcgaggtgagcggctcccccgggggagggctccggccagtgccagggtcgaggtgggcggctcccccgggggagggctccggccagtgccagggtcgaggtgggcggctcccccgggggagggctgcggccagtgccagggtcgaggtgggcggctcccctctgggagggccgcctgctcccctgctccctgcacatcccagggcagggatggagggtgctccagcctctccgtgactccctcacccctgcgtcctagaccagtgcccggagccctgccggttcaatgccgtgtgcctgtcccgccgtggccgtccccgctgctcctgcgaccgcgtcacctgtgacggggcctacaggcccgtgtgtgcccaggacgggcgcacgtatgacagtgattgctggcggcagcaggctgagtgccggcagcagcgtgccatccccagcaagcaccagggcccgtgtggtgagcgccccggggtggaggccaggcggggtgggctgctcctgcgtcagtccctgcctggacatcacatgccatcttcatccatcatgttcctcttggggtcctgggagtgggccggtccctctgggaaggctctggggagggtggagcctgtgtgcggagggtacctggatacctgggggctggtgaggcagaggcggggccttgtccaggctccctggtccctgacctcagccacgccctccctgggagtcctctggcctgtccgcatgtctccacgctgtaagcacaggctgttggggtgggcaggctggacacaacaccagggtcctcactcttgggacatgggcagccgtcggccgttttggaggcagtgtcaggacttgaagggccagggggaggcagtggccgtcgtgtcccgtcgtgttcgtcttggtcagttcgcccatcttctggtctttctctctgcgtctgtctcttctctttggtctcttcttccctgtcggctccgcctcttgtgtcttccagcctgacctgctggcaggatgaggtgccgtgcctgc

SEQ ID NO: 57 - DNA, 1180 bp, Artificial sequence
  DNA replication origin
ctgttggggtgggcaggctggacacaacaccagggtcctcactcttgggacatgggcagccgtcggccgttttggaggcagtgtcaggacttgaagggccagggggaggcagtggccgtcgtgtcccgtcgtgttcgtcttggtcagttcgcccatcttctggtctttctctctgcgtctgtctcttctctttggtctcttcttccctgtcggctccgcctcttgtgtcttccagcctgacctgctggcaggatgaggtgccgtgcctgccctccaggagcccgcagcccgaggtctgcccctggtgcggcagggggggtggcttgctgctgcctggccttgtggtcctcagagcaagtggacagacacctcctcccccgtgcagccctgggtgtgactctgggggtgcaggctcctcccacccacagagagcccccccacatgcatgggtgtcctggggatgctggtggtcaggggtcagtggcctgggcaggctggggaagcctggccctcccatagcctgctgtggacaatcaggaagccccaagcttgggggcagcctcgcccgcagccaccggggactcctgggtgtgtgttccgctcgcctctgccgcgtgtctgtccctttctctgccgtgtctgctgtgcatctggcccttctcctgtgttctctcttcctccaccatcccctccctggaagagggactgctgcgtggggctgggggctttgcctgcagcggagggggggcttgtgggaccactgagcccctgtgtccttcccagaccaggccccgtccccatgcctcggggtgcagtgtgcatttggggcgacgtgtgctgtgaagaacgggcaggcagcgtgtgaatgcctgcaggcgtgctcgagcctctacgatcctgtgtgcggcagcgacggcgtcacatacggcagcgcgtgcgagctggaggccacggcctgtaccctcgggcgggagatccaggtggcgcgcaaaggaccctgtggtcagtggcgggtgaggggtctggtgggggtcggggagagagaggttcctggtcgcctggtgatggaagctcctccccagaccgctgcgggcagtgccgctttggagccctgtgcgaggccgagaccgggcgctgcgtgtgcccctctgaatgcgtggctttggcccagcccgtgtgt

SEQ ID NO: 58 - DNA, 966 bp, Artificial sequence
  DNA replication origin
ctacgatcctgtgtgcggcagcgacggcgtcacatacggcagcgcgtgcgagctggaggccacggcctgtaccctcgggcgggagatccaggtggcgcgcaaaggaccctgtggtcagtggcgggtgaggggtctggtgggggtcggggagagagaggttcctggtcgcctggtgatggaagctcctccccagaccgctgcgggcagtgccgctttggagccctgtgcgaggccgagaccgggcgctgcgtgtgcccctctgaatgcgtggctttggcccagcccgtgtgtggctccgacgggcacacgtaccccagcgagtgcatgctgcacgtgcacgcctgcacacaccagatcagcctgcacgtggcctcagctggaccctgtggtgagtgaggccctggggccgggcgggccagggtcctgtgcctccctcagcctgggcctgccgacccctgcctggctctgtctcctgcagagacctgtggagatgccgtgtgtgcttttggggctgtgtgctccgcagggcagtgtgtgtgtccccggtgtgagcaccccccgcccggccccgtgtgtggcagcgacggtgtcacctacggcagtgcctgcgagctacgggaagccgcctgcctccagcagacacagatcgaggaggcccgggcagggccgtgcgagcagggtaggccgggggacgctggcgaaaactgctgggctctggctttggacaagaagcccctgggtgactctgctccccttccccgcagccgagtgcggttccggaggctctggctctggggaggacggtgactgtgagcaggagctgtgccggcagcgcggtggcatctgggacgaggactcggaggacgggccgtgtgtctgtgacttcagctgccagagtgtcccaggcagcccggtgagctctgtacccctggctctcggcgggcggcggggacggggctgcggccg

SEQ ID NO: 59 - DNA, 1235 bp, Artificial sequence
  DNA replication origin
gctacgggaagccgcctgcctccagcagacacagatcgaggaggcccgggcagggccgtgcgagcagggtaggccgggggacgctggcgaaaactgctgggctctggctttggacaagaagcccctgggtgactctgctccccttccccgcagccgagtgcggttccggaggctctggctctggggaggacggtgactgtgagcaggagctgtgccggcagcgcggtggcatctgggacgaggactcggaggacgggccgtgtgtctgtgacttcagctgccagagtgtcccaggcagcccggtgagctctgtacccctggctctcggcgggcggcggggacggggctgcggccgctcacactgacaccaccctccaggtgtgcggctcagatggggtcacctacagcaccgagtgtgagctgaagaaggccaggtgtgagtcacagcgagggctctacgtagcggcccagggagcctgccgaggtgagccggctgcacgtggggtctcaggcacaggcggggcggcgtctgggtttccgtgtctggatgtgggcgtgcccgtgtgctgcgttgggcccctgtggacgtgtgtattgtgttgtaagtgagcatcgtccagtgttggtgcctgtgcacatttgtgcagctgcgtgtgtgggcgtgtgtgtccatcagtcagtgggcgtgcaccaggccaggcctcagtgctgagaggcagcgtgaaccatgcggggccccaccgtgtgggcactttctctgcatacgtccatccggtcgatgtatcacatcaattaggtaaaagtggtgcccggtgtgtgtgatgcgcgtgcacagatgtgtgtctgcagaggggcgttaactgtacggtttggaggaatgtgggtgagaacgcatgctgacgtcttcagatgtctgtttctcgatttgcaaggaagctcgcgtgtgtgtgtgcacagagctgcgtgtccgtgatctttggatgctctgtgtgttgtgtgttcctggatctgcatttacagacatgttcttgcgtaagatgtgggagcctcacctgtgtcctcagccccaggctcccgggctcctctgggagctgggatcgggacggctgagtggtgacagtgggggtaggtggaggcagactggctgggtccagggtgggtgtccagcactgcatgaaatctgagtcccgtaccctttcctgcaggccccaccttcgccccgctgccgcctgtgg

SEQ ID NO: 60 - DNA, 1105 bp, Artificial sequence
  DNA replication origin
ggggcagcacctcggccgagcccaggctatcctcacactcccctcgcccagccgtccactcaccggggcagttggagccctctgcgtccagcgagggcgtcttcccatcagagcagcagcccaacgcggagttgtagcaggaagccctctcgacaggtggcccaggggtggccacgctgctgccctccaagggctcgagccctggggagacgcgctctgagcccaggctctggtggagcctctcggcgcctgcccacccaccccaagtccttgatccctgctcacccccagagccacccccactggcctcctggtccccgctcagttcctcatcgctgcttccatcagtgctgccagattcaccaaaggcggacgccaccaggctgggtgcaggggagggtgccgtggggggcaccgtcagcacgggccacacggtggtcctggggacgctggcagtggtccgaggtcgtgatgagggcggaggggtggtctggctgtgtgcggtactgctgggagccagggggagggcgccggggggggccggcagtgcctggctcaggaggagccctggggtggtcacagtcacggaggcagatgtcgggtgagtgctgggagcaacagcctctgcaaggagagggaggttggcggggggaccggttgggacagggtcaggtggctcagggcgggtggggctggatttagggcagcgtcaggccttcctggtcagttctggggcagtggccgtcaggcctcaccctggcacgggcccaggctctggatagagatttgcaggccctggcggcaggcgatggtcttcagctgacactcgttgccgtatgtgactccatctgacccacagacctggggcagagaacaaggatgttcaaggcgaggcctcctccccactccccttcacatcccacacccctcaccttggtagcgttggcctctggacaggtgagcatcgggcagacacagtgggctgagccagactcctccacgcaccgcgcaccgaactcacagcgcatctccgcacaggtcgcaggcgcagaagcgtctggggcacgggcatgggaaacctctgtggctcgggtgaccccacccc

SEQ ID NO: 61 - DNA, 2028 bp, Artificial sequence
  DNA replication origin
attctcctgcctcagcctcacgaggtgggattacaggcgcccaccaccacgcccggctaattttgtatttttagtagagacagagtgtctccatgttggtcaggctggtctcgaactcccgacctcaggtgatccgcctgcctcggcctcccaaagtgctgggattacaggcgtgagccaccgcatctggccgaaaccccgccttaatccgggctcctgcccccaactcaaagcctgatggtggcttagccccacccccaatccttgcccccaccctgctgcctccccgccctcctctgcagtggacatccttacccttctcacagacggcgcctcccctgcctgccgggcagctgcaggtgaagcccccgcccaatgcccagtcctggcaggtccccccgtggaagcagggctgtgagtcacagggctttggaggctgctggggggccgggggccgacgtccgggcacacggctgggggcagtggtggggggccgacgtgtggtgggggctgccgtggtcttggcaacgggctggcttgtgtgactggggtgcggggcccgaggggtcacagcagaggacggcaggcgcgatgcagtggtggctctggccgtggctcccgcagcaatggctcctgacgtggcccccgtgataaacgcaggaaaccagtctgccggcacagggagctgttagggtttcctgggagcagggccaggaaggggtgaggggcaggggcatgggcagaggagggggcaggtaagctgtggctcgtggcctggcgctcaccaaagtccataaatcgcacgtgctcctgcagcggccgcctcacccccaaggaccggcgcctggacacctggatctgccggagcagggcccgggccacgtcgggtgccctgaaggctgtggctggggaggagggagctctgagcatggcagagccccaggcatcccccacccattgcctcccaggaagggtccagggtgcaggtctcactggggtcaaagtgcacatccacaatggcgcggacggatttgccgggccccaggtcccgcaagcggacactccgaaaatccttcttgacgtctgaattccggaagaggtcgtccagctgtggcagggagtaggcaaggacttggggggccgcccaagccgggctgccctggtgctgctctgggtatctggggaggaaggccagtgggtaggtgggggctgcgcccccgtcttacggtgctctcaatgctcctggctgtctccccgaacagttctgacttggggtcagccatctcgggcgtgtagaacagctcctggccctcgacgccctccagctccaggacgccctggaacaccttggtggctgtgggggaggtacagtgaggccctgcctggcatctgcctggcatccaggctggcccaggcacaggccccagcagcaagccacaagggtgcaagggaaggtggatgttagtcagatggtcatgaggttagtggggaccccagggtggggctggtgtcggttaccaggaggactcctcagagcagtgtgccacaccggcttgcaacgagagagacgggttaggcgtggggtccccggcacgcacatgtttgagggggccgagtcccaagaccataacccccggcactgacctgctgcccaggcgagggggcagcacctcggccgagcccaggctatcctcacactcccctcgcccagccgtccactcaccggggcagttggagccctctgcgtccagcgagggcgtcttcccatcagagcagcagcccaacgcggagttgtagcaggaagccctctcgacaggtggcccaggggtggccacgctgctgccctccaagggctcgagccctggggagacgcgctctgagcccaggctctggtggagcctctcggcgcctgcccacccaccccaagtccttgatccctgctcacccccagagccacccccactggcctcctggtccccgctcagttcctcatcgctgcttccatcagtgctgccagattcaccaaag

SEQ ID NO: 62 - DNA, 1085 bp, Artificial sequence
  DNA replication origin
tgagcgccaggccacgagccacagcttacctgccccctcctctgcccatgcccctgcccctcaccccttcctggccctgctcccaggaaaccctaacagctccctgtgccggcagactggtttcctgcgtttatcacgggggccacgtcaggagccattgctgcgggagccacggccagagccaccactgcatcgcgcctgccgtcctctgctgtgacccctcgggccccgcaccccagtcacacaagccagcccgttgccaagaccacggcagcccccaccacacgtcggccccccaccactgcccccagccgtgtgcccggacgtcggcccccggccccccagcagcctccaaagccctgtgactcacagccctgcttccacggggggacctgccaggactgggcattgggcgggggcttcacctgcagctgcccggcaggcaggggaggcgccgtctgtgagaagggtaaggatgtccactgcagaggagggcggggaggcagcagggtgggggcaaggattgggggtggggctaagccaccatcaggctttgagttgggggcaggagcccggattaaggcggggtttcggccagatgcggtggctcacgcctgtaatcccagcactttgggaggccgaggcaggcggatcacctgaggtcgggagttcgagaccagcctgaccaacatggagacactctgtctctactaaaaatacaaaattagccgggcgtggtggtgggcgcctgtaatcccacctcgtgaggctgaggcaggagaatcgcttgaacctggcaggcggaggttgcggtgagccaggatcgcgccactgcactccagccggggcaaaaagagcaaaactccgtctcaaaaaaaaaaaaaaaaaaaaaagcagggggcggtttcagggataaaagtggggaatcctcggagcttttccagccggccctcccggtcgccctttgcagtgcttggcgcccctgtgccggccttcgagggccgctccttcctggccttccccactctccgcgcctaccacacgctgcgcctggcactggaattccgggcgctggagcctcaggg

SEQ ID NO: 63 - DNA, 952 bp, Artificial sequence
  DNA replication origin
ctcctggtggcagggcgctggagcggaccttcgtgggcgccggcctgagggggtgcatccgtttgctggacgtcaacaaccagcgcctggagcttggcattgggccgggggctgccacccgaggctctggcgtgggcgagtgcggggaccacccctgcctgcccaacccctgccatggcggggccccatgccagaacctggaggctggaaggttccattgccagtgcccgcccggccgcgtcggtgagggtggggccggggcgggtgggagtgggaccccggggcctgtgggcggtacccaaccgacgcctcctgggacctcggtcccggtcccgtcttcctccatccaggaccaacctgtgccgatgagaagagcccctgccagcccaacccctgccatggggcggcgccctgccgtgtgctgcccgagggtggtgctcagtgcgagtgccccctggggcgtgagggcaccttctgccagacaggtcgggggcgtggggctctcggggcagggggggggggggggttgaacgtttgggcgggtacaggttccaggtagcattgcagttaggatgcggctcagtctagtctgggttttgagttaggatccacacacggctggcatggggtgcaggaggccccgggggtcaggactgaggccttggtgactctccctacagcctcggggcaggacggctctgggcccttcctggctgacttcaacggcttctcccacctggagctgagaggcctgcacacctttgcacgggacctggggtcggtggggcaggagcagggggaagggccggcccccacctccgtctctcctgtggggaggggacagcaaagacaccccgactccccatgaccccagggagaagatggcgctggaggtcgtgttcctggcacgaggccccagcggcctcctgctctacaacgggcagaagacgga

SEQ ID NO: 64 - DNA, 993 bp, Artificial sequence
  DNA replication origin
gatggcacgttacctctcggtcacagcgttgaggtactcgacaaaggtccgcccgtcaaaggccaaggtatccacgtcccccgctgacttctccaccagccctgtgagataggcaggtgagggtggggcctcgtgggctccgggcccatccggcctccgccccctgccctgtgccaggctcacccttctcgcagtgcggtcctgagaatcccccgggacacaggcacacataggcagcctccctcgggacgcaggaggccccattgaggcaggggtggcctgaggcccgggtgcaggggtgacctgcaaaggacgtgacgtccacctgccgcagcacgtgctccggggtcagcagctggcggcctccgagggagacctgcagggcagggtgagggccttgtcccgcctgccaccccgcccgccccggaggccctgctgggacgccccgcccccacataccagctggatggcaccgtcgaagccagaggacacggcagcagcacgggccagcttgctgaagtcgggagcgccccctacgtagagcggctccttcaggttgaggacggtgtgcggaacctgcggggacgccaggtaagtggctgtgcagagcccacccacggtgcagacccagggcccaggcacctgcacgcacccgccccacccgcccattgcctatctagggggcagcgttaatcacacagaaatggcagggtccttagtgggggaggagctaccctaggggttgaggcgccagagacggtgagcggatgagaggccgacagtaccttgcgggatttctggcctccgaagagcgggtggggttgcagagcgagagcagagagcagggaggcagaggaggcagaggacagggcaggcggccaagagaacaggacagaaaaacagctccgtgagcgccggcaggggcggggctgccgcccgaggaggaagagcaggcagcagcgggagtcccctcgcggcccagagcactcaccg

SEQ ID NO: 65 - DNA, 927 bp, Artificial sequence
  DNA replication origin
catggacccatatgcacacacacacacacggacacatacctgcatgtctccctcatatacacacacatacatggagccatgcacacacacggccgcatagtcacacacgcatatctacatgtcccccccacatatacacacacacatatacatggacccatgcacacacacagctggatattcacacacacttgcacatccactccatatacatagacacgcacagacacagctgcatgttcacacacgcggaagtgcacacggacacagacatgcatgcatatgcgcacaggtgtgtacagcctcagtggtgggggttggctgtggggcgaccctcggcctgtgccctgggaggggcgactgcacttctgaggcaggaaacggcctcttgcagccaaatagcgccggacccccatcctccgccacaagggatggaaagttccccgggggctccggactctgctccccaccaggaaggatggaggagtgggagtgagagggagcggggggcgccgagctctactcacacggggatctcattggccagttcgcttggaaacaaagagacagacagtgagaggcgggaggaccgggaggtgagagagaggcgggaggacagaggtggcagcaccgggccgtcccctcctgggccctcctggtgtgggggtccggtgtcccgccccgagggcacagatggaaccgacagccagcagaggatggcacgttacctctcggtcacagcgttgaggtactcgacaaaggtccgcccgtcaaaggccaaggtatccacgtcccccgctgacttctccaccagccctgtgagataggcaggtgagggtggggcctcgtgggctccgggcccatccggcctccgccccctgccctgtgccaggctcacccttctcgcagtgcggtcctgagaatccc

SEQ ID NO: 66 - DNA, 1279 bp, Artificial sequence
  DNA replication origin
gcctttcagacgtggaaactgatcattgcttctcctgcatcttcttggcccttcctcctcccactggcagtgacctcggctcaggcagcaaggcgtgtcctccctgacccctggtcacaagtgactggacacagcccagctgggcaagtctgggcagccctcgccactattctcggcacgctgggttccctactcacctatgtgccacgacccgcaaccagcggttggtgttgacgggcacggtggaacgcagcaccacgggctgggagcccaggttgtagctcagttgcaggtgcccgtccacaatggccagtgccacatagtctgcccgctccgtggccttgccactccagagcaccagcccctgcgtggcctcagtgcgcaggctcagttcaaagtggttgctctgcagtgccttctcgctggagggcagagggcaggtcagggcctctaggaaggtggcaacaggacagggtgggggaggcgggaggacaagggccccagctgcggaggccacaagggctgtgacgggacccaggggtggctggtgggcagacaccgacagtgggagggagaagagggatggagacaggggcagcctggcagagagagatcagagagacgggcgggaggacagatgggccagccaggggtctgcaggcactgctgccacgtgctcacctgtgaagggccccggaatccagagtttcggggcttagaagcaggaagagagggaggcgggtgagcaggggacaggcggggccaatgcaaacccatctcaacactgtggggtgcaaggagcaggcacccacagaagacatgcgtgacctcgaggatcactggccgcccaccaaagagcccagcagggacacctacacatgcttgtgcggacacgagacacgtgagggtgcagacacccacgtgcagacacgagacacttgagggcacagacacccacatgcagacacccacgtgcagacacccacgtgcagacagcaggggagcacagccaaggctgggcgcagagatcaaggaggtaggcgtagggtggtatggagtggagaccaggggcttggatgccccagtacacacatgcatgtgtgcatgcacgcaaacctacacacggacacacacacccctccatgttcacacacatacacacgtgtacacgaacacacacagacacacctgagtgctccccacttacacctgttcatacacacacacatctacatatccccccatatatacacgcatatacacggacccatgcacacac

SEQ ID NO: 67 - DNA, 1026 bp, Artificial sequence
  DNA replication origin
agcgtcagtgaaagtcgtccttgtctcagaatgaccaggggccagccagtgtctgaccaaggtcaaggggcaggtgcagaggtggcagggatggctccgaagccagaaatgccttaaactgcaacgtcccgtcccttccccacccccatcccatccccacccccagccccagcccagtcctcctaggagcaggacccgatgaagcgggcggcggtggggctgggtgccgtgttactaactctagtatgtttctgtgtcaatcgctgtgaaataaagtctgaaaactttaaaagcattgcttttgtccatcctcaccagcgcgctggcccgttggcttcttgctccgctttgtggtgggagcacggacttggagctcccttgggtggccctggatggagccaggccctgcacagggatccttgtggctgatgaggccctgagtggggagcacacactgctgagcactgtgggaggcggggccgtggaggcaggaggctctctggcgtgcacgtgtgggtgcgtgtacgtgtgggggtgtgtgtgtgtgggtgcgggtacgtgtgggtgcatgtgcctgctctctggcgtgcacgtgtgggtgcgggtacgtgtgggtgcgggtacgtgtgggtgcatgtgcgtgtgggtgcgtgtgcctgctctctggcgtgcacgtgtgggtacgtgtgggtgtgggtgcgtgtgcctgctctccggcgtgcatgtatgggtgcatgtacgtgtgtgtgggtgcgtgtgcctgctctccggcgtgtatgtgtgggtgcgtgtgcgtgtgggtgcgtgtgcttgctctccggcgtgcatgtgtgggtgcatgtacgtgtgtgggtgcgtgtgcctgctctccggcgtgtatgtgtgggtgtgtgtgcctgctctctggcgtgcacgtgtgtgtgtgtgtgtgtgtgcctgcacacataattggcccacatctgtgtcagagcacagggttgggaggaggctgcacccaggactggaagggtctggggggagccaggg

SEQ ID NO: 68 - DNA, 2164 bp, Artificial sequence
  DNA replication origin
tagccaggcgtggtggtacacacctgtagctccagctactccggaggctgaggcaggaggatcacttgaatccaggaggttgaggcagcagcaagctgtgattgcaccactgcactccagcctgggtgacagagcgagaacctgtctaaaaaacagagctggcacccagcaccggcagatgtgagccctggggagaagcaggggaagaaggggtagggtgtgtggccagctgggtggcccttcgcaaactgctgtctcttatgaaaaataactaagtgtagttttctattttgtattaatgattttaaaaaaaaagccaggtgcgctggctcacacctgtaatcctagcactttgggaggccgaggcgggtggatcacctgaggtcaggagttcaagacgagcctggccaacatggtgaaaccctgtctctcctaaaatacaaaaactggctgggcatgatggtgggtgcctgtagtcccagctactccggaggctgagacgggagaattgcttgaacccaggagacggtggttgcagtgagccgagatcacgccattgcactccagcctcagtggctgaaggagactccgtctcaaaaaaaaaaagaaaaaagaaaaccacaaaaacatcgaaataaaataacaccaatggctgggcacattggctcatgcctataatcccagcactttgggaggctgaggcaggcggatcacctgaggtcaggagttcaacaccagactggccaacatggtgaaaccctgtatctactaaaaacacaaacatctgggcgtggtggcaggtatctgtaatcccagttactcgggaggctgaggcacgagaatcgcttgaacccgggaggcggaggttgcagtgagccgcgattgcaccactgcactccagcgtgggcgacagagcgcgactccgtttcaaaaaaaaaatgaaaagataatacccacaagctccacacccaggaggtcccatgcgtctgagtgtttgctttctgggcttttcatcacctggtcctctggggatatgctgaccgaccctgtgtgcctggcaggtgtcaggcactgggggtcggggaggagagagtccaggagcggtggccacacacaggtcgctgacggtggggggccagggtgggggcagactaactttggttttcaggaaaggtccagagaaaacacgcccaaacccagacccgaagcatgagcagggggagggcaggtgaggaggccagaggcggggcatgtggtgtgggtccattggacggtgtgcagggccctgtggcttgacaaagggatctttcagcaggaagcggaggcgtaggagcggccagaggccagcgtgcaggacagaggccacaggtcagagcagcagaggctggacagagatgggcagggcaggtccagtggggctgcgtgggcctggggaagagagctgggggtgctgcctgaggagctgtgggaggctcctggagggctccaagcaggaggccaccagatttcatgaagacgcccctggctaggacagggtgctaggctgcagggggagcagagggagggatttgggggagaatgggcgggtcgaggggggtgagaagaggcgctcagggacgtggagatggagctggaggcaccggagctttgggtggattcgccctgatgcgtctggagggatggctgggctggggaagctggggttccctgagtggggtccagggggccgaggggtgccaggcagggagaggctgggctgaagcctgaggcaggtgctcctgctgggtgttgcctaggagaggagaaaaagccccgacgccagaaatggaggagggaggaggacctcggaggggaggaggagggtgcgcagaaccaggagaggcagtttggggagcaaccgctgcggagcgcgcaggacccagaggactcaaaggggacctggagggtgacgaggccttccgtggccgggggtgaggaggagggaagccgcgcgggcggagaggcgctggtgggtcccaggttggaggctgtgggtctgagaggcgaagcccaggggagcccggggccaccgctgaaaaggatggcagctgagcgcaggcgagggagaggcgcgcgtgtccgggacagaccgcggtgggagctcgactccggaaaccggcgggcc

SEQ ID NO: 69 - DNA, 1419 bp, Artificial sequence
  DNA replication origin
accggcgggcctggggctgggacctacagggaggcggacgcggcacagccagggaggtcggtcccgcgggccccgccccgccccccagcctggagcgcccccctccggccccggtccgcagtggaggcggccccggaaaagccagagggtcttggaatggagggcgggacggagccgcctgcaacgcccgcgacccgcgacccggctgcccgcgggacccccggctctgaagcggggacggccggagcttccgcctgcagcccaaactcccaggcgcccggcaagagtggcgggcgcggaccctttaagaaggccggggggcgtggcctcggggcgtggcccggggcgtggcatcggggcgaggcttcgggggcggagcccaggcagcgccttcgcggagttgccggagggtgcggccgcccagagcgcaccccgagcgccggcgagcggcgcggtgagaccctcgtgcaggtgagcccggcgcacggcggcccagaatcctggaccccaggagaagcgtctacggccccgacaggtgggcgtggcgaaatgccacccgggccctcctcgcgctcccagctgggtcacgcctcagacccggggtcctggacgcctgcccccctccacccgcaggccctgccaggacactttggtccctggcccgccaggcctggcctcactcaggcttggctgtggggtcagagtcgggcagaacggaaccaacagtcctggcaggcccaggcggttggaggagaagtggtcggctctggacacctttgttgttttttgttttttgtttttgagatggcgtctcactgtgtcacccaggctggagtgcactggcgcggtcttggctcactgcaacctccacctcccgggtttatgcaattctcctgcctcagcctccggagtagctgggattacaggtgtatgccaccatgcctggctaatttttgtatttttagtagagacggagtttcaccatgttggccaggatggtcttcaacttctaacttcgtgatccacgctgctgggattacaggtgtgagccaccgcgtgtggcctctgggcaccttttgaaggtaggatgagaggaactcatggatcggagccggcagggagcgccgaggggggccgggggcagggcggccacccttgcctgtgtggggaagatgaagaagagggtgtgggccgcgggggcaagatcaggagctttgggttttgaagatgttaggaaagacgtgctgctgactttgcaaacggaggtgctgaaaccgggtgtctggagctcagagaagaggtggcgctggactggcctagactctgtgcagacacagaagagccagggcctggggctcccatcgaggaggaggacaaagggccctggccagggcaaggtgggaagccgggaagtgcagc

SEQ ID NO: 70 - DNA, 1389 bp, Artificial sequence
  DNA replication origin
agccgtgctccgtgtccggggcaggtcaggaagctcgggggatgtcactgcaaacctcgcggccccatgcaggcagaggctggtgctgccggcatctggaggggaggctgaggctgcagccctgccccttcctggtgaacagcccccccgtcccaggaccttcctagtctgcagccccccatgaggtcagggctgccccggagcccacgtccgagatcacaactgctccttacttttgtggcactggactccggagctcaggactacattgtactcaggcggcagccccagagcccagaatgtcagcaaaaaagagccacacccgtgagtgactgagggagggagggagggagggagggaaggggtgtgagagggagggaaggaagaggggagggaaggggatgtgggagggagggaatggtggtgagggagggagggaaggaagggggagagggacggagggaacggggacaagggagggagggagggaggcggcagaggaaggaactgaggacgtggggctcccccagccctctgtcttccccagctgtgctgtccacacaggggcggcttctggacacctggctcttgggcatctcctggctgcatagatgatacccaggtggggcctgctggctctaggacctccgccccacgctggcccggcctggttgtcagtggaatcataacctgtgcacgaatgggtgggggttgctgtgccctgggcagaccttgctccggcccccatggctggtccagaggaggaggaaggttgagggcggtcctgccccctctgccccacaaagggcagctgcagggctctttctagaatggaggcctcaccgcagtctctgttaaaggcctccatgaccaggctcatgcctataatcccaattactcaggaggcgggtggattgcttgagcccaggagttcaagaccagcctgggcaacatagccagacctcatctcacttaagaagaaataaaaaataaaggcctccacaggctttcacccctgagaatggagccaagatctcccctcctctgcagcacccacaggtcctggctggtccccctggggaccccatccccggctccagcccaccctggccaggtccctctcccggggccccagctcctcctcctccttcgggccctgcctccactccttgcagctcctgcccctctgctcccctctgagcacaacttctggaagaagtttgtatggctgtgtgatttgtaaataggaatgaattaaaattcatggccgggtgcgatggctcatgcctgaaatcccagcactttgggaggctgaggcaggcgcatcacctgaggtcaggagtttgagaccagcctgaccaacatggtgaaaccccgtctctactaaaa

SEQ ID NO: 71 - DNA, 1680 bp, Artificial sequence
  DNA replication origin
tcccctcttccttccctccctctcacaccccttccctccctccctccctccctccctcagtcactcacgggtgtggctcttttttgctgacattctgggctctggggctgccgcctgagtacaatgtagtcctgagctccggagtccagtgccacaaaagtaaggagcagttgtgatctcggacgtgggctccggggcagccctgacctcatggggggctgcagactaggaaggtcctgggacgggggggctgttcaccaggaaggggcagggctgcagcctcagcctcccctccagatgccggcagcaccagcctctgcctgcatggggccgcgaggtttgcagtgacatcccccgagcttcctgacctgccccggacacggagcacggctcccaggggccgcacaggcacccgctggcctctcggcccctccctgtgcaccaccccctcctccccccgacccccatccctctactgagtgtctcaattccagtgttatggacctgggacgccacagtgcggggaacagcttctgccctctgggagataagaacccgtcgtcaggcagctgggctgctgaaacagtgaccataagctgggcgggcaggcgctccttccctcagctctggaggctggaagtccgagatcctggccgtggaggctgggaggggtggagtggacggggctgctgacagcctcgggggcgtgtggagaaggagggagccccagtggccccaggccctgccacttgggggagaattccagcccctctgtgtccctgggaccccacagcccctggccagtggccattcccggcttcgagcacagtggcctcaagccaccatcgtgggtgttaccgtggaaacaatgagggaggtttgtgtggggccagattcctcctctgggcactgacctgctctccccactccaggtggtttcaccccaacatcagcagggtggaggcggagaagctgttcctatccagaggtcagcgtggggacttccttgccaggcccagtgagagcagcccggggggcttcacgctgtccgtcaggtgggtgggccctggctgggcatggacagggtctggttgaaggcctcctggaggaccggtgggcagcttcctggacacgaggacttggtgcggggggccgatgccctgggaaggtggtgagagttggacgtggtgctgggcggtctctgggcaggaaggaactatttagagaggcccttggggagggctcattgagtcaggggctcagcaggaccctttcctcccctgtgagggccctggggacaggcagggcctccgtggctgcgaccgtgttgccagagcctgggggtgcagctggggagtgcagcggggttcccattgagctctggtacccgctgggctgccaggaccccgcgttggagtggtgagccctggcccagcatccgcgtgtcagcacacgtgtgtacgtgtgcatgtgtgtgttcgcgtgtccatgtgtgttcatgtgtgtgcgtgtgcatgtgtgtgtgtgtgtgtgtgcgtgtgcctgcatcctgagggacggcgtctgctaagcactggttcagggcacagggtcctgcacctgcctccctcaggcctccttccttcaggtctcaggcactggagtccagggtgactcagggaagccggtgcctcccctggc

SEQ ID NO: 72 - DNA, 1272 bp, Artificial sequence
  DNA replication origin
gtgtggtctgcggggccctgggggggtgtggtggggtctgcggggccctgggggggtgtggtgtggtctgcggggccctgggggggtgtggtggggtctgcggggccctgggggggtgtggtggggtctgcggggccctgggggggtgtggtggggtctgcggggccctgggggggtgtggtgtggtctgcggggccctgggggggtgtggtggggtctgcggggccctgggggggtgtggtgtggtctgcggggccctgggggggtgtggtggggtctgcggggccctgggggggtgtggtggggtctgcggggccctggggggggtggggtctgcggggccctgggggtgttgtggtggggtctgcggggccctgggggggtgtggtggggtctgcggtgccctcggggggtgtggtggggtctgcggggccctgggggggtgtggtggggtctggggggccctaagcttagatgcaggtctctccctggcagcccctcaaggccacgaggatcagtgctcggagcctggagggctgtgtgcaggagtagcagggccactgatgccagcgggaaggccaggcagggcttctgggtggagttcaaggtgcatcctgaccgctgtcaccttcagactctgtcccctggggctggggcaagtgcccgatgggagcgcagggtctgggactgtagggtccagccctacggagcttagcaggtgttctccccgtgtgtggagatgagagattgtaataaataaagacacaagacaaagagataaagagaaaacagctgggccccggggaccactaccacaaagacacggagaccggtagtggccctgaacggctgggctcgctgatatttattgcatacaagacaagggggcaggataaggagggtcagtcttctaagtgattgacaaggtgaagcaagtcacgtgatcacaggacagcgggcccttccctcttaggtagctgaagcagagagagaaggcggcaggcatcagcgttttcttctatgaacttataagatcaaagactttaagactttcactatttcttctaccgctatctactacgaacttcaaagaggaaccaggagtacggaaggagcatgaaagtggacaaggaacgtgaccattgaagcaccacagggaggggttcaggcctccggatgactgcaggcaggcctgggtaacatccagcctcccacaagaagctggtggagcagagcgttccctgactcctccaaggaaaggagactcccttt

SEQ ID NO: 73 - DNA, 1249 bp, Artificial sequence
  DNA replication origin
gaggggttcaggcctccggatgactgcaggcaggcctgggtaacatccagcctcccacaagaagctggtggagcagagcgttccctgactcctccaaggaaaggagactccctttcccggtctgctcagtaacgggtgccttcccagacactggcgttaccgcttgaccaaggggccctcaagcggcccttatgcgggcatgacagaaggctcccctcttgccttctattcacttctcacaatgtcccttcagcacctgaccctatacctgccggttattcctaggttatattattaatgcaacagagtaatattaaaagctaatgattaataatgtttataataatgatggataattgttcatgatcatcgctgtatctaatttgtattatgactattcttattctattttctttattatactgaaacagtttgtgccttcagtctcttgcctcggcacctaggtactcttccgcccacacgggacgggctgggggtggccatctcgggctctgggaaggggccggggctgtgagctgaaggctccatcacctccagatgctgcagcagcaggaatgccggttcctgtaccctcggaaggaggggcagagtgtggagaacaagcccaagaatcactacaagaacatccttccctgtgagggcggaggccagggcgtcacccgtcgggcctgggggaggtggggggcaggccgagcatctgccaccgctgacctgaggctcccccttgcataccctggaccctccatctctgctcaccacagggtctgcgggcaaagaggcagggtgaggcccacgagctgtgccctggagaactgagcggcacctcccttcccagttgatgctacccttgagtcatcctgctcaacgaggatgacagcgggcccggagccgactacatcagggtgggtgtgtgcgggaggcggggcctgggcccattgctcctggggggctcaggaagaaccagggtccccaagggaggggtgggcggcagtctccaaggggtcctcagagaggctggacgggcattggtcctcagccccttgctggcctggagtgaggagtgtgtttaagccaccagggctctttgcataatatttgtgtgtcgtttgcatatcatttgcatagcatttgcatggacttgtttgtcctctgttaacagcagcagttggcctcattccctttcagactgaccctgaggaggagccgggccatggcaggggcagggtgg

SEQ ID NO: 74 - DNA, 1135 bp, Artificial sequence
  DNA replication origin
tgaggggtggggtcgtccggaggggtggggtcgcccggaggggtggggctatagcagggcagggcggggggacccagagtggagcggctcgccctgcctgcggatgacgtccaccaggatgtcaatcacgatgatggtgcccgtgcatccgatgcccccactgaggacaaactaggcggcctttgacgagagtggggggcgggggcgggggcgcccccgcccacccgatggctccgccctcgtcgtcccgcgtggccccgccccgccgcacctgcacctgcacagcccgcgtggccccgccccgccgcacctgcatctgcacagcccgcgtgggcccgccccgccgcagctgaagtgcaccaccatgggcccggcccgcggcttgctgctctgggcccggttcacctcgtcccggaagccgaggacgccggcgggatcggcccggacgccgtagtccggccagccgaagtactggaagtgctgcaccgtacgctgtggctcctcctgagcggggcaagcggtgagtgtgaccccagggtgggaggaggaggctgaggcacagctgggtttccgggagtgcccaagcggaggggctgcgggagccaaggcgagcaggaggaggaggaaggaaatggggagggggcgccgagatggccccaggtggctcaggtgcctggggaagggaagagggagctgggggcgggcgaagcaggctgtgaggacagttattttataaggaaaaaccaaatgtgaggggtccatggggtcctggaggacccccccacacacactgggcgggggctggagggaacacgaggtaatctgcccggagcagaaatgggcgtctctggtatacaacggagaccaaagctgcagttggagaggtgtgtgggaggagcggccgccagcccagggctgagaatgtggccacgtcagtgacccctgtccaggcttggaatgcacctcctgggttgaggggtgtggaagcccccaaaggcagtggggttggatgcaggcaggtgtggggtctcccagtgcaggccgacagcaggcacgctccacagccgccaggctcacctggcccggccgccacacctgcagctcccgcacgcagtagccctgggcctggcccttg

SEQ ID NO: 75 - DNA, 1390 bp, Artificial sequence
  DNA replication origin
gcctcaggagcgcgagaaccaaaacgtgggcgccgccccccgctaatcgggttgcagcccccggctccccgggcatccccggtgtgagtggagcgccggggccggtccggagtcctctgggagggactgggacgtgcggggtgcagggctgagccgctgctccgcgcgcagaaccccgcagccctgggacggcgaggacgcgaacctgcggagccgcgggtgtctgaggagccgcagggaacccccggcctagccgcgcccgcgtgtggccggagctgcgggccgggactgtgtccaggacagagccacaagcttgtccccagctcagggaggtccaggggcggcagagggagcgacaggctgcgaagcccaccggtgaccacgtgtgaacccgcgtgcgcccccagctcggccactccgtgcgggtctgccctcaccgcagctccggcctgccggccctgcctgctcccgtggtctgggatgtggccccggtgaggacccggccccatcaggcacagggtggatgtctgtggagtgaggtgtgtgtgacatattcatgtgaccacccgtgcagcgtcacgcgcctggccctgccgatgacaagggtgtgggcctgcgtgggcatgactgtgtgtgtgacacagagtgatgttgctgtgacccgtggctgcactccccacatcaccggctttcacagccttccggtaaagtgctgtgttctcccttctgtgtcttcgctgggacctggggcaagggtgggtgtggcccccacagctggagtcagcttctgtggggccttcccgagccctccccaccctggaccagaggcccagctggttggagcaggaagtacctgggctctggggtcagggatgggaaggctgaggaggcctgcgtgagctggacctggcctgggccctcctggccgtgcctgcctggtggtgcaggattcctggggctgatgacagacggggtagggctggggttggcgagcctcctgccgatacctcacgtagctgacctctgactcttccccagccaggctggccctgggagttgccggagagtcagtggatctgcaggctgcacgctggctgttacctttgcttctgggttcccacaggggtcatggttctgtggttctccagtcagggaccctagcagggccatggggcgtgacttcctggaggtgtggcctagtatggccacggcagaggatgggggaagagaaaggccccctttgtcagcccccgggctctgaaccaagctgaagccctccccctggtccagcctgccctgccccaagtgtcctgggcctctccccatctccctggggagcctcacattgctgagtcgccagccaactccagaaacccccagcctgtctgca

SEQ ID NO: 76 - DNA, 1332 bp, Artificial sequence
  DNA replication origin
gggctggggttggcgagcctcctgccgatacctcacgtagctgacctctgactcttccccagccaggctggccctgggagttgccggagagtcagtggatctgcaggctgcacgctggctgttacctttgcttctgggttcccacaggggtcatggttctgtggttctccagtcagggaccctagcagggccatggggcgtgacttcctggaggtgtggcctagtatggccacggcagaggatgggggaagagaaaggccccctttgtcagcccccgggctctgaaccaagctgaagccctccccctggtccagcctgccctgccccaagtgtcctgggcctctccccatctccctggggagcctcacattgctgagtcgccagccaactccagaaacccccagcctgtctgcagccagaggggctgggagttggaccccctagaaccttgggcccacctgtcccagtggctgctgggagtctaattctgtcagggtatcctctgggttgaggctgcagcaggggcacccagggtgaggccctcttgccaaagatggatacaaataatttattttaaaaggtacaattcacaaggttggaggggtagctggaagtttctgtggttaccttgcactggggggctgccctgcctccactctctccccacagtccgagggcaagatgagcacccccacccaatggcaggaccagccctgcggggaaatgtcagcatgagtggaagcacggcaaggccccttccttcttggcaaggggcttccctggcaggcagttcacagggtgtgtgggtgggggggatgctgaccagctgctctcctggacccttcctgtacgagcctgtttttttttgttttgttttgagacagggtctccctctgtcgcccaggctggatgcagtggtgcaatcttggctcactgccacctccacctccccggttcaagcagttctcctgcctcagcctccccagtagctaagaggcacccaccacgatgcccggttaatttttgtatttttagtagagatggggtttcaccatgttggccaggctggtgtcaaaatcccgacctcaagtggtctttctgcctcagccctccagagtgctgagatgacaggcgtgagccaccgcgcccggtgagactgtggttcttggaggctttggggatcctcttgtccaccccgtcaggacccagcctggagaatgaggggtggacaagctaaatggagcctggtcttggtggggccccggtggagtcctcagagatgccaggctcctttcgcgtcctcggggaccgacttccagtggctgctgtgcc

SEQ ID NO: 77 - DNA, 1841 bp, Artificial sequence
  DNA replication origin
ggctgtgctggtggccgggggccgggggggcaggggcaggcagcgcaggttcccggtcttgagcgcgcactgcaccggccagagtgccacacagaagagcatcagcagcagggcagagaccagtgccatgcgcctccagtccctgcagcgcgcccagcagcgggccaggcggccccggcggggggcagggtcccgggcgggcgcgggcggctcggcaggcttgctcaaacccacgtccacgcatacgaaaccgggctcgcggccaggtgtggtgggcagtggctggcagcacagcttggtgccctccagccacacaggctcctcacgccgcaaatgcgccggcatccgggcctgcagctggcggctggtgcacagcgcgggggctccggcgggcggcacggccgtgggctgcctgcagaaggggcaaggtacagcctcaccaccggggcggcccacaggctgagcagccgccagccgggccaggcactccaggcagaagacgtgggtgcaggagagctccttgggtgtcttgaagatgttgtcatagcctgagaaacagatggagcactccaggggggaggccaccctctccgagccaggggtgccaggggacctggggctgccggccgagctgggggacctgggcatcgaggctatggagctgctccggcgagggggtggcacagccgtgtgccacacctgctggcctgacgacatgtctctgagctgtgggacagggactgtggtaagcaatcaccggccgcccctttctggtggtgttttatctctccctcccctctctcgccccagagatcccagggaaggactctgtttcctgcgcgccactccagaaagttcctccggtgcccctggaggtcattctgccccacgtgcaatcctgtcctctccaccccatcacatggctgcaccggggtgagcctcccacagggccccaggcctgctccgggaatgcaggccgtgtgtaggggggtctcactgaccgctcggcagacacctcctgttggccctgccccacctggctggccctgctgcccgggcagaaataatggtgaggatgacaatagccacagtcgtcactgtttatgtcggagctctgcaaggctgggcccacatcacgggactcacacaacgccacagtgtggaaaaggccgcccagagcatgggtgactcggccagggccaccccaagggagctggcgggccctggaccctggcagatacggctctcaggcaggccagggactccaagtcaagtgaagtgagtttgaactcagatcccaggatgggtgcctggcttgggcggtgcaggcctgatttgtaggcagctatgtgagggtggggtgtgggggtctctgggtctggggaccgggctgagccccgggggctttgggacgacagggagggcccaggcaggggcaggggtcagtgcccgaggaaggtgcacgtcaggcacgacctgcggcctgcggggccggcttgtctagctgctgagggtctgatgtgcacagtgtgggggtgggacttggataagcccagccattccctctgggccagcccactgcctcatggtcaggtgatggtcagggcaccctcagccgcccactgagtgggtgtttcttctccctgacccaatcccacttcatggcagggaccctgggggacggacactgggggatgctgctctgcccctgggcatggctcaggtgggcatctcagctgacctgggaccctgctccacctcccgcccctcccctgcacccaggatccgctgcagggagccacaggggtcccacctggagggaagtgggcaagggtgacagt

SEQ ID NO: 78 - DNA, 1201 bp, Artificial sequence
  DNA replication origin
ctgaggctatggggactccgtggggggaggctgaggctatggggactccgtggggggaggctgaggctatggggactccgtggggggaggctgaggctatggggactccgtggggggaggctgaggctatggggactccgtggggggaggctgaggctatggggactccgtggggggaggctgaggctatggggactccgtggggggaggctgaggctatggggactccgtggggggaggctgaggctatggggactccgtggggggaggctgaggctatggggactccgtggggggaggctgaggctatggggactccgtggggggaggctgaggctatggggactccgtgccgggaggctgaggctatggggactccgtggggggaggctgaggctatggggactccgtggggggaggctgaggctatgggcactccgtggggggaggctgaggctatggggactccgtggggggaggctgaggctatggggactccgtgaggggtggctgaggctatggggactccgtgccgggaggctgaggctatggggactccgtggggggaggctgaggctatggggactccgtgcggggaggctgaggctatggggactccgtgcggggtggctgaggctatggggactccgtggggggaggctgaggctatggggactccgtgcggggaggctgaggctatggggactccgtggggggaggctgaggctatggggactccgtggggggaggctgaggctatggggactccgtggggggaggctgaggctatggggactccgtgccgggaggctgaggctatggggactccgtgccgggaggctgaggctatggggactccgtggggggaggctgaggctatggggactccgtggggggtggctgaggctatggggactccgtggggggaggctgaggctatggggactccgtggggggtggctgaggctatggggactccgtggggggaggctgaggctatggggactccgtgccgggaggctgaggctatggggactccgtggggggaggctgaggctatggggactccgtggggggaggctgaggctatggggactctgtgcagggccgctgtgaggccctgaaagcactcgtcggaggctcctgcttcctgaggtccgtgactcgggtcacatgccgcctccaggaagcaccctggccc

SEQ ID NO: 79 - DNA, 806 bp, Artificial sequence
  DNA replication origin
tatggggactccgtgccgggaggctgaggctatggggactccgtggggggaggctgaggctatggggactccgtggggggtggctgaggctatggggactccgtggggggaggctgaggctatggggactccgtggggggtggctgaggctatggggactccgtggggggaggctgaggctatggggactccgtgccgggaggctgaggctatggggactccgtggggggaggctgaggctatggggactccgtggggggaggctgaggctatggggactctgtgcagggccgctgtgaggccctgaaagcactcgtcggaggctcctgcttcctgaggtccgtgactcgggtcacatgccgcctccaggaagcaccctggcccctgcagctctgggaacgtcctcccgacagctcctgggaatatcctggcactgaggtcactctgggctcccggctgacactcgtgccggaggcaaaggtgaggaaaggccggaggaatgtgtggtctcggcgccaggccaggcctccctgtgcaggagaggagccagcagctccccttctctcagctcagacggtctctcagggctctcgggaggctcagagcagcttggctggcagattccagggcagggggtgggcccgcctggtcccctccgtcgcagccagtgggcgggaggctgggctggtgagcgtgtgggcgtgtgtgagcacacgtgcccatgcttgagacatggatgctggtgtgagcacctgacccctcacctccttcactcggtctcctcacgccctctcagggactccttc

SEQ ID NO: 80 - DNA, 1325 bp, Artificial sequence
  DNA replication origin
ctgcctggttgggaccccccgccccgcgccgcacattttctgccacaggcccattccccagatgcaacctgtgcaggtgggacctgtggtccccgaacccccagctcggagtgaggtgggacagagtgtgggtgtgcgtttccatcggccggccgggctgcgtgggggctgcagacacgggccccgggagggctgccatggccatctgggggggcagcagtgtgggggtgtttgctgacagtgatgggcctggccagagagggctgagctggggcaggacaggccttgagggcagagggcccgggcaccaggatgccagagcgcgggccctgctctcgtaaccgtgccctccacccaggcagaaacgtccactgcctggagggtcgtgtccttagacacctgcatccctgtccccaaaaacccccagcctgaggtttgcagccagggagtatctgggggagcattggctctgccctgggccctggcccaagaagtgtcctggggctgggagggtcactggtcctggggagaaagggagggactggacagcccaaggccactctgagcccagtacccaccgccccacctgatgccctgggccacgcccctgtgacgcgggagcccccagactcctcctgtggggaaggagacagggaccgagatgggagcagagggaaggagacagggaccgaggtgggggcggagggaaggagacagggaccgaggtgggggcggagggaaggagacagggaccgaggtgggggcggagggaaggagacagggaccgaggtgggggcggagggaaggagacagggaccgaggtgggggcggagggaaggagacagggaccgaggtgggggcggagggaaggagacagggaccgaggtgggggcggagggaaggagacagggaccgaggtgggggcggagggaaggagacagggaccgaggtgggggcggagggaaggagacagggaccgaggtgggggcggagggaaggagacagggaccgaggtgggggtggagggaaggagtccacatccccctggaaactccactcctgcatttgcaccaggctgggcgtctggtttggaggataaaatcggaaacaggcacgaacagcaggtccagccaggcagggtctggaggccaggccagacacagacaggcacctcccagcccaccctctgagcagccccccaggccccatctctcaattctgggtcccctcctcctcctcccacccagtggcccaaaccaaaaacccagggtcatcctgacacctccacatatccccctcagctggctccccacgtcccccacctg

SEQ ID NO: 81 - DNA, 1617 bp, Artificial sequence
  DNA replication origin
gagcccctggcttttctaggcagagcggcacctgccccatagatcgtgccagctttggctgcaggcgctggggcctcaccgtgtttcctgggggggcccggaccccccaaggcctcgatctgaagctctgaggtctcatggatgcctgctcctggtccgataaacgagatggctgtggtggggaggagcctcaggcggcccgggaccctttggcgtccgtcgctgggaggcggagggactcagagccgaggctgtgcccaggactgtcccgggcgccgggcgatgccaacactttgtgctggttcccgccaaggggtcggcctccgggtccctgccgccaagtgcgtggcgtggtctcggcctccaggtcagacattgctgatacgggcctcccccgggaaggcagcgggatccgtggccctgtccaggggccgctcccgcctgacgtagcgcggcttccgtactgaaacgggtcagagacaggcgaggtcagagtgggacctggacagcagggacagtgcaggcctcagccctcaccggaggctctcgggagtgggcatatggcacaggcgcccggggctgtttactctgaccaggtgggaacccagatgccccctgcccctaaggcgccctcagagctccagctcgggaaagggacggcttcctcctgcccggctgtgtcctctcatttacaccctgggccccggggcctggacaagggccaggcgatccccgaagacagagatgtgggtcccagagtatcatgcacctcagggggcgacaagcaggccgtagtcccaagacctcgaatgtgaccttatttagaagaaggggctttgcagggggttacgtcagggtctcaggtgtgatcgcccagggttccccgggcaggccctgaaacaacggccagggcccacctgagagagaggcagagagagaagacgcagaggtgggggagacgccgtgggaccaggggacagagacgggcaacgcagccacagatgcctgagccggcaggggctgggaaggcagacagcgtcctccccggagcctcgggaagcgtgtggccttgtttgccccttggttttggacttctgaactctaggatagtcagattaaaggtctgctgttgaagctggcagccccggggcactcgggcaccgtggggtctgctgggcacttgcagacagggctgctttagggacggggcacgtccagccttgatggagaacggtctgtcccctaaaggcacggtcacctgcccccatgacagacttctgcacagggggacggaggccgggtgagccctgctcatggccttggagctgtgtggctgtgcgccggtcactcagcctgtgtctgtggccccgcacataaaatgggtcctaaccgggctgactcttgggtccgcctgacccagcaccactgaagcgatggctgctcaggagggcctggcggaggccggctgcgtctgtcctcgggtggagctggacttcaaggaggagcaggtattgggggtctgccctgtcgtggtgggtcctcctttcctgcagaccccacgtctcgggaacaggaaagagcatggaagtcacggggattaaaggggggcgggcaggg

SEQ ID NO: 82 - DNA, 675 bp, Artificial sequence
  DNA replication origin
aggggctgaccctggccgggctctgcggaaacacctctccgattccagttgcccctgaaagccagggggttctcagccttgttccttcctccgggctcagcacaggccctggggcccccacacagggcagagcctcaagctggcagcaggtgctcctgcaccccactcacctccacctgcctgggccaggacaggccagggctgctggcctggggctcgggacagttggcaatggctgctgggtgtgctctgagatgctggggaggagactccccaaccctgagacacaggcgtgtttgccaggcttgggggcctcgctccttcctgccccagcacagagccacaggaggccaggagcccatccaggccaaccccaccctaaaacactgccactcaggtcagcaatggacccaggccagctcagggccgtgagtgtgaacctgagagcgtgcagtgtggccgtgagcgtgaacctgagagtgtgtggtgtcagcgtgagccgtgagtgtgagccttaagtgtgaacctaagagcgtgcggtgtggccgtgagccatgagtgtgaacctgagagcgtgtggctgtgagctgtgtgaccctgagagagtgcggtgtggccatcagggcctcccctaactacggccctttagagatgtggcagagccccccatgacgc

SEQ ID NO: 83 - DNA, 1008 bp, Artificial sequence
  DNA replication origin
agggtcgggatcagcttggggcaggaggctgtgctgctggcgggtgggcctatcctgcttgggcggcatgagggaacacggggtgcgaggcagccgctccaggcactgcagatgggggtcttgggggaggcgtggggggtcctgggggaggccgtgggggggtcctggggaggcgtgggagggtcccagggaggcgtggggaggtcccggggaggcgtgggggaccctgggggaggcatgcgggggtcctgtgggaggccatggggggggggtcctgggggaggccgttgggggatcctaggagaggcgtggggggggtcttgggggaggcctggggcaggcgttgcagtgggggttcttggggagtctgtggggtgaaggctgggtggtggaagccgggcccagcctgcagtcctgcagagcacgagtccctccaacaggcctgttcattctggatgctgccgcctaccactctctgaagtacgcagtgtggagtactcagggtcggggtgctcagggccggggtgctcggcgtggagtgcagcgtggagtactcggggctggggtgctcggcgtggagagtgcagcgtggagtactcggggccggggtgctcggcgtggagagtgcagcgtggagtacttggggtcggagtactcagggtcagggtgcgcagtgtggagtactcagcgtggggtgctcacggccccgccatgctccctgggggtgtccttgtctgccgcccacctaccctccagagcatgttagtatctggaatgaaagttatctcaccaactcaaatagagaatcattcccaggagacccagctggtgtggattttgctttggctgacatgcccgtcctctgccccacgcaggctgttacaggcgctggaacgcggacgggagcgccagctgcgtccgctgtgggaacggaaccctcccagcctacaacggctccgagtgtagaagctgtaggtctgcccggctccccccggctcccttctcaca

SEQ ID NO: 84 - DNA, 1078 bp, Artificial sequence
  DNA replication origin
acagtgaggggtccccaccctccacccgctccgcctgggagtctggagccgccgcagctacactccccgatagcgatgcgcggcacgctgtgctgtcaccgctggcagaggtgctcccattgcgggccaggatgcctcaccgtgggggccccgcctgacccagccattcctgagcaggcgctcacccagcaggcagcggagggctcccctctgcgaggcacaggcccctctgaccccagcagtggacctggtcagcacctctggggctgggacatcagtgtcctaaaggtggaagggttagaccctctaggggaagggcccaccgccctccacagaggctctggcttaggccgcgtggacacgtgaggggggcacctaccgtgttctccatggacttgctggcgactcccacgagaaggccagccaggagggcgaggtgccgcagcgccatgccaggagcagatgcgcagagcctgccacagggaggagcatgcggagccaaagagatggagtggggctgaggcagggtgggtggggccaaatgaaagtggggtcaagagatgttgggggggtgcgggccaaggcaaggagggcagagccaaatggagatgggtggggctgtggtggagggtggggccaaatggaagtgggcggggctgtggtggagggtggggccaaatggaagtgggcggggctgtggcagggagggtggggccaaatggagatggggtggggcggggccgcggcagatgactgagttaaatggagatggggcagggccgtggcaggggtgcagggccacgacagggaaggtggagccaaatggaggtggggtgaaagagtgaaggcttggggcctttggaggcacgggtggggcgaggtgtaggcagggccttacctgcccctccaggatggggactaccgacatcagccctttgcccgcctgggtgttcaggggttagctctgggagctcatgggctcagctgagccctgcagaccccggcccagtcctgcagatgaagacagcaggtgaggccgtggtcacgcgagggcaacccaggtgggccgtggcctacg

SEQ ID NO: 85 - DNA, 801 bp, Artificial sequence
  DNA replication origin
ggaagtgggcggggctgtggtggagggtggggccaaatggaagtgggcggggctgtggcagggagggtggggccaaatggagatggggtggggcggggccgcggcagatgactgagttaaatggagatggggcagggccgtggcaggggtgcagggccacgacagggaaggtggagccaaatggaggtggggtgaaagagtgaaggcttggggcctttggaggcacgggtggggcgaggtgtaggcagggccttacctgcccctccaggatggggactaccgacatcagccctttgcccgcctgggtgttcaggggttagctctgggagctcatgggctcagctgagccctgcagaccccggcccagtcctgcagatgaagacagcaggtgaggccgtggtcacgcgagggcaacccaggtgggccgtggcctacggtgcggggtctgggtccggtccgggccctctgtccacacccttgccggcccctggctgtcgagcagggcgtcctggaggggctgtctccacgagtgtttcccccgagctggcctcctggcctcctgcgggtgagagtgcctgggatacaggccctcgctgggatacgggccctcggcccggcctttgctcagggaccaggtacggagctcagtggcccaggctgcacttggtggacaccggtcctcccgcacaaaccccctctctcccccctgcacttccagccacaggacctgttaccatggccctgccttcctaagggaggaaacgcctgccaggcgcacaaatcctcaagtggtgtcactgc

SEQ ID NO: 86 - DNA, 1655 bp, Artificial sequence
  DNA replication origin
tatggtggcaggcatgtagtcctagctacttgggaggctgaggcgggagagttgcttgagcccaggagttcaagatggcggtgagctatgattgcaccactgcactccagcctgggcaacagagcaaacccatctctaaaagaaagaaagaaattttaaaaaggaggaaaggaaagaaaggagaaaagaggaaaggaaaaaggaaaggaaactgttcccattaaacactaactccccattcctccctgccccccagcccctggcaaccaccgttgtcttttctgtctctatgaattcgacaaccctgggaacctcatgagtagaatcatacagtatttgtcctgttgtgatgagctgctttcacttagcatagtgttttcaaggttcattcctgttgtagcatgcgtccaaaatttcttttcaggactgtagaatattccacggtctgtatagaccaccttttgtttatccattcatctgtgggtggacacttgctcccaccttttggctgtggtgaacaatgctgctgcagacatggtggctgtggtgaacggtgccgagacatggtggctgtggtgaacggtgctgccgagacatggtggctgtggtggacggtgctgctgagacatggtggccgtggtggatggtgctgagacatggtggctgtggtgaacggtgctgccgagacatggtggctgtggtggacggtgctgccgagacatggtggctgtggtggacggtgctgctgagacatggtggccgtggtggatggtgccgagacatggtggctgtggtgaacaatgctgctgcagacatggtggctgtggtgaacggtgccgagacatggtggctgtggtgaacggtgctgccgagacatggtggctgtggtggacggtgctgctgagacatggtggccgtggtggatggtgctgagacatggtggctgtggtgaacggtgctgccgagacatggtggctgtggtggacggtgctgctgagacatggtggctgtggtgaacggtgccgagacatggtggctgtggtggacggtgccgagacatggtggctgtggtgaatggtgccgagacatggtggctgtggtggacggtgctgccgagacatggtggctgtggtggacggtgctgctgagacatggtggctgtggtgaacggtgtcgagacatggtggctgtggtggacggtgctgctgagacatggtggctgtggtgaacggtgccgagacatggtggctgtggtgaacagtgccaagacatggtggctgtggtggacggtgctgctgagacatggtggctgtggtgaacggtgccgagacatggtggctgtggtggacggtgctgctgagacatggtggctgtggtgaacggtgctgctgagacatggtggctgtggtgaacggtgctgctgagacatggtggctgtggtgaacggtgctgagacatggtggctgtggtggacggtgctgctgagacatggtggctgtggtgaacagtgctgagacatggggctgtggtgaatggtgctgccgagacatggtggctgtggtgaatggtgctgctaatgtgtctagaattggtggattcttggtctcactgacttcaagaatgaagccgcagaccctcgcagtgagtgttacagt

SEQ ID NO: 87 - DNA, 1049 bp, Artificial sequence
  DNA replication origin
gcccgcgtcctcgtcgccgcctcccaacgagcctggccgcggtcctatgggggaaaggcgcccgggctgagcgggacgcctggggaggggaaggggcgtctgaggagggcagggggaccccggggaggggtggggagggggtccctaaggaggggagggggttcccggagcggggagggggggtccctggggaggggaaaggttcccggggcagggaagggggtccctggggaggggagggggtccctggggagggaggggggtccctggggaggggaagggttcccggggcagggaagggggtccctggggaggggagggggtctctgggggagagggggcacctggggaggggagggggttctcggggcagggagggggtccctggggaggggatgggacgggcgcccgggggaagaaagggggcgcgttcgcctcgccttcccggcagccgggagtgggggcaccggcgcggtccccggtgtcctagaagtcggccacgattcaggtctttttcccgcgaggctttaggatttgtttttgtccgtttgtcacctggagtagccgagggctagtcggggtgcagtttttcgggagcgcgtgttccggtggcagcgagtcgatgattgagtttgggtgtaatttaagcccaggtgttcgggggcatttcttaccgcgtttcaaagcaaacgcggcttcttccccgggaactattttgtggctgaattcttagccgcctcgtcctgttaaatttcaggatgtcaaacttggcctcctttttttggttttcatttttcttagtattaccagggtgtgcagagaaggcagagctgcgtcttcctcttttatttttccgtaagttactggggtacaggtggtgtttggttacttggttacatgggtaagctctttagtggtgatttgtgagattttggtgctcccatcacccgagcagtacgcactgcaccctatttgtagctttttatccttgtccccctcccacccttccctccgagtccccaaagtccagtgtatcgttcttaggcgtc

SEQ ID NO: 88 - DNA, 885 bp, Artificial sequence
  DNA replication origin
cccaaagaaaactacaactcccggcggcccgcgcgagagccgccctcgcctggtggtaccatcgcgcgcggccgtgggtggggcgccggggcggggcgcgaagcgccctgggaaatgtagtcctagaagaaccagcgcatgtctcgggtccctgacacggagggactacattcccccggattcctcgcgcgccggctgcttggcgttgccgggagacggggcggggcgtcgtcggggtctcccgggcgaccgcacaagcgtcggcgtccttagcgttccgccggtttaggcggaggcggaggcggagcgtttgggggcggccggggcggcttcggcttcatcggagaaggcggcgcggctgcaccaggtttggccgcgggcgcgcggggccagcgccctccagacccacggagcgccccgagcgcctcgcgagccgccgccaaatgcgccccaggtccgcggccggcgccagtgctgggacctcggcggccggtgtcggagcgcggcgggagagaccctgccttgggtgcgggactgggacggctcggacccagagggctcccggggcttcgcctctcggacgggtcagggctctgcggtctcaggacgctcccccgtgagtctcggcggccccggggtctgggcggcgtcgctgccccacaggccgggcgcgtgggtttttccggggctctgcctctgagccaccctcggagaaaagacagctctgtgcgtcccgcggcgcccgcagctttcggcaaacatgtttaaaggagctccccgaaggaactggggacgtccgtccgctcatcaaaggcttcaatcctgtcggtgtccccgggccctctcctagctgggccagcgcgcagggtgggggggcgctgcagg

SEQ ID NO: 89 - DNA, 1159 bp, Artificial sequence
  DNA replication origin
tcatctcagccctggcaaggttgaggctgtcccacagccgccggaggctctttagccagcacaggacagtttctagggaagagacgccccccacacagagggttcctgaagctctgaggagggagcacccacagcccagcccgctggtccccacgtctcctggtcgtccatcggccgagagcccagtgggcatcagggccagtggctcagcctgggaggctccaggacctcagggctggcacccctctgcccagagcaaggaaggccccaccccacccacagaacaggcgccacgtgaggctggcctcacccctgggcctgctgcggctgctgtaggggcaggagtcccagatggggtggggtgggggagggggggcaatcccagggggcaatggggggaggggcagcgtgggcaccgggaggggctgggggtcgccacagccctgttcagcgcagaacacagggcctgcctccgcagagcaggaggcttcagcctcgttgcagggcagcagcctggctggggaggaggtggggccatgaacagcacttgcctcctttaattaggggattaactgcgtgctgataattgagcctcccccagcacctgcctgtttggaagagctaacacctccacctgctcctcccttaggcaaggaggcctctgggccctgcatgtcggtgtgggggggtggacaaggtgtccaggctcagcactgccgggggtaaagggcacccagctgcagttctgagcctccctcgtccacgcacgtcctggtgtagctatgtggggactgagccccttccccgtgagctgaagagcaccccccatcagggaggcacggcctggcctgctgggaagagcagcccttctgggaatggcctgcggataattggagtcccagtgcagtaggaagccagcgagccttggcacgccagccccagggaccgcatagaggtgacgcaacagaaaccgaaccccaccaaggcccccaaaaccgagccccaccgaggcccccaaaaccgagcctcactgaggtccccaggagccctcaggaggagctgctgtttggcacggctgggagctccgcctcagtttccctctttccgaagtcatctcttaggctttttgtttgtttttgagacggagtctcgctctgtt

SEQ ID NO: 90 - DNA, 1251 bp, Artificial sequence
  DNA replication origin
tctggagaaaaacccgcatttccttccgtcacactgaccacatttaacttaaaatgggaagagagcaaaacattccacaggcaaagtcaggggactattttaatgacagagacacatggttgaaatcaatgctgcactctgagcccttagaaaccgtcgcaaaggactccacggaagggtgggggcagccccagcgaggtcgtcagggagcagagcccgagtcatgggacacaaggccggacccctcaccgccagggaagcggagtcacaggcacgtggccctctgcgcccagggtcagggcacgggaggcagagcctgagacgggggtgcccatgcagggtgtgctgggggtggggttgtggggcctctcaggggcaaggggcaggaccggacagcagagagatcccactcctgcctgagacccgccgccatcgccgccgcgagccctgcgttgggcattggggccaggcacctgccaggagggcctcttccgaggtggggtgtcacctgggatgtgtccgctggcaaatgggagaaacaccagggcggctgccggggaggtcgatgtcagggagcccgtagccctgagcccatgtgtggaggaagccctttgtctgaggagcctgcggccgccttggaccctggatgcttgcagggaatctacacagggttgtcaggtacgacaagggtgcccagggctgaggagggtgcccatgcggcctcctacaatgcgtatgggaagccggtgaacgccctccctcagggctggccgggtgcgtctggggttgtcctagctccagctgctggaacaaaataccgagcctggggacttaagcaacagaaatgtattttctcacagcctcggagggggaggggaaggtccggtgtcccagggttgccgggctggttctgcggaggcctctcccgctgctgccttctctcaggcggcctctgcgcaggtccgtcccgtgtccctctgccctaacctcctcctgcaactaggacaccagtgggacccggccagggctcatcctcacggctgcttcccacatactcacctgtctcgtagccccttctccacacacgctcgcgttgttggtactgagagtttggattctaaccatgaactctgggggcacaacctgccagaggggtcactgtgtagcccgggggaccttgcaatgtctcatccttaaaaccccaggaagagcagagctctgctgcgtgtgctcgcgggttccgcctgagag

SEQ ID NO: 91 - DNA, 889 bp, Artificial sequence
  DNA replication origin
ggaagccagccatcgctgcccagcccccagggagcctggcgagtaagccaccccctcacggtgtccccctcctgagaggggctgcagcctcagatggcgaggaagccacacccctcacggtgccccctcctgagaggggctgcagactcagatgtcagatgctgctgcgggatgtacccatcggggagcctccccacggggccacctgctactgtggggctctgcgcctgcacggacccccaccggcctccaaatgtgcaaacacaggcgcctctcaggcactctgggcccctgttcggcggaacgctgaaaagggctggtgcccatcccactgagggtcctgcgggcacctcagcaggacagcggaccccgaggagctggtggagacacccagggccctgcgaggcctcagcctccccgtgtcgcggggccgtgtgcagggtctgggtgtagggacagccacactatgccaggcctgcaggagacccctcccccctgaggcagccccctggtccctcggggaactggatgttactggtgctcccaggacagcacagaactgtttagggagggaagcactggtgacctgttctggtttttgagagtggagtcggggtggcgaggtgagggggtgaacggtttgacagtggagttggggtggcggggtgaggaggtgaatggtttgggacagggcagaaagcagacgcgggcatgtggggaggggggcgtgagggatttcgccatgcggggatgttttgacagcactggttacctgaggcctgtatttctttcttttttttttttttttttgagacggagtctcgctctgtcgcccaggctggagtgcagtggccccatctcggctcactgcaagctccgcctcccgagt

SEQ ID NO: 92 - DNA, 1675 bp, Artificial sequence
  DNA replication origin
ctccccacatgcccgcgtctgctttctgccctgtcccaaaccattcacctcctcaccccgccaccccaactccactgtcaaaccgttcaccccctcacctcgccaccccgactccactctcaaaaaccagaacaggtcaccagtgcttccctccctaaacagttctgtgctgtcctgggagcaccagtaacatccagttccccgagggaccagggggctgcctcaggggggaggggtctcctgcaggcctggcatagtgtggctgtccctacacccagaccctgcacacggccccgcgacacggggaggctgaggcctcgcagggccctgggtgtctccaccagctcctcggggtccgctgtcctgctgaggtgcccgcaggaccctcagtgggatgggcaccagcccttttcagcgttccgccgaacaggggcccagagtgcctgagaggcgcctgtgtttgcacatttggaggccggtgggggtccgtgcaggcgcagagccccacagtagcaggtggccccgtggggaggctccccgatgggtacatcccgcagcagcatctgacatctgagtctgcagcccctctcaggagggggcaccgtgaggggtgtggcttcctcgccatctgaggctgcagcccctctcaggagggggacaccgtgagggggtggcttactcgccaggctccctgggggctgggcagcgatggctggcttcccaggggccttcctgagtcacggacccatggggtcctggctgactttgcctgcggcgtcaaagggcttgaatctccgtgtagccaccgaggcctccactcctggagaccccacccgtgatcccacctcccccaggcagatatcttggctgcagccattgtccatcccccggggtcaccgtcccctccccgccccgatgctctgaccacccgggggctcctcccgtatcctttgggccttcgggagaccccactccaccacgggggcctggatacagggtcttgccacctccctccccagggaggggcctgggagagtctggaatgggatggtcgcaggcagtgggggccctcagggtaggggcctgatctgtgcatttgggcacaaattccctgggcgtaaatgtcaccggaaagggatcccaaagagggctcttggacctcgagcaagaaacagtttgggggagtccactgataaactgaaagcaagtttaataggaaagtaaaggaataagagaagggctgccccataggctgagcagcggcctgggctactccactgagaatacttattgttgtttcttgatatgtactaaacatggtgtggattattccggacttttctgggaaaggggcaggcaattcccagaagtgagggttcctccctcttttagaccatctagggtaacgtcctggcgttgccgtggcaactaaactgtcctggtgctggtgggcgtgtctctcatgctaatgtattataatcagcgcataatgagcagtgaggactggctgtcttggttttggtgatttggggccggcttcttcacagcatcttgttttatcagcggggtctttgtgaccagtcttgtgccaacctcctatctcatcctgtaactaaggatgcctgacctcatgggaacgtggcccagccgggctcagcctcattttacccaggcc

SEQ ID NO: 93 - DNA, 985 bp, Artificial sequence
  DNA replication origin
accagtcttgtgccaacctcctatctcatcctgtaactaaggatgcctgacctcatgggaacgtggcccagccgggctcagcctcattttacccaggccctgtgcaagatggagttgctctggttcaaaggtctctgacataaagacctcaaccaggctggtctcacgctgccaggacagctggtgagtgcaggtgggcaggggccactgccccagctcccgtgggcaaggctgagggtgaggggttccggagcgttccacattctccttgcaatgctggaagcacgggtgtctcccatcccgacacgcctcattctgtctgcagctcacagggcccggcttctgcagctcacagggtccggcttctggaaattctgcttttgcattttgtactctgtccaggggccaaaacccaggtctggaattggtgtggtccctggtggcacaaaccagtcctggctaagaggccggcccctctcactccactgaagagacagggggctgcatgctgagagggccaaggccaaaaggagcctgctgctgttcacagccccctgtgtgcctggggcccactgttcacagccctctgggtgcctgggggctgggctgggggctactgcaacccttggcctatggtgtggtcgagggaaggggaagggacagggctttgagaaacacggtgatgggggtgagggtggggactggggacggtgggcgtggaggtggaggccctgtgggtgctgggcagggcagaggagctaggccagatgctgtgtttgtgtggggtgctgagtggccagcctaaaaccttctgagaaagtaggatccagcacagggagcttcagcttctctgatgggaggcaggagggggtcaggtgggagctgcagggcgtgtcgagccggccctgccctgggtccctgcgggccgcctggcacacaggagggcggttcctttcctgttggacccggtctcacttcatttgcc

SEQ ID NO: 94 - DNA, 2276 bp, Artificial sequence
  DNA replication origin
aaaaaaaaaaaaaaaaaaagtgacaaaaggccaaggaaaggagaaggggcaggaacatcctctgggcggtgggatggccacagttggtcccacctggcagcgaaggtggctggagtgacccatagggcctggcccactcagacacaactgtcggtgcctcaggcaatggtcaccacagcagagggctggggcaccacacgctgtgcttgggggaggtctggggggattctgcggtgtgagaacttagggagaagctctctgaagacggacctgcccgtctggggacaggttggggggcctggggcttgcagtgttgcaggtgaactctagggccctatctctgcaatgggacggcctccaggtcatgggagggcccagcctgcgggttctggaccccaggggccacactgggcgggaccccgttcacaaggcgggaaggaatcctgccccaggaccacccacagaggcatcctgagctgcatccgggggaagcaggactccgaaccgggggacctgggtcctggggagcttcctggggtcagaaggtgggggtgtcaacgtcgaaccgggggacctgggtcctggggagtttcctggggtcagaaggtaggggtgtcaatgtcgaaccgggggacctgggtcctggggagcttcctggggtcagaaggtgggggtgtcaacgtcgaaccgggggacctgggtcctggggagcttcctgggttcagaaggtgggggtgtcagcatcgaaccgggggacctgggtcctggggagcttcctgaggtcagaaggtgggggtgtcagcatcgaaccgggggacctgggtcctggggagcttcctggggtcagaaggtgggggtgtcagcatcgaaccgggggacctgggtcctggggagcttcctggggtcagaaggtgggggtgtcagcatcgaaccgggggacctgggtcctggggagcttcctggggtcagaaggtgggggtgtcagcatcgaaccgggggacctgggtcctggggagcttcctggggtcagaaggtgggggtgtcagcatcgaaccgggggacctgggtcctggggagcttcctggggtcagaaggtgggggtgtcagcatcgaaccgggggacctgggtcatggggagcttcctggggtcagaaggtgggggtgtcaacgtcgaaccggggggcctgggtcctggggagcttcctggggtcagaaggtaggggtgtcaacgtcgaaccgggggacctgggtcctggggagcttcctgggttcagaaggtgggggtgtcagcatcgaaccgggggacctgggtcctggggagcttcctgaggtcagaaggtgggggtgtcagcatcgaaccgggggacctgggtcctggggagcttcctggggtcagaaggtgggggtgtcagcatcgaaccgggggacctgggtcctggggagcttcctgggttcagaaggtgggggtgtcagcatcgaaccgggggacctgggtcctggggagcttcctggggtcagaaggtgggggtgtcagcatcgaaccgggggacctgggtcctggggagcttcctggggtcagaaggtgggggtgtcagcatcgaaccgggggacctgggtcatggggagcttcctggggtcagaaggtgggggtgtcaacgtcgaaccggggggcctgggtcctggggagcttcctggggtcagaaggtaggggtgtcaacgtcgaaccgggggacctgggtcctggggagcttcctggggtcagaaggtgggggtgtcaacgtcgaaccgggggacctgggtcctggggagcttcctggggtcagaaggtgggggtgtcaacgtcgaaccgggggacctgggtcctggggagcttcctgggttcagaaggtgggggtgtcagcatcgaaccgggggacctgggtcctggggagcttcctgggttcagaaggtgggggtgtcagcatcgaaccggggaacctgggtcctggggagcttcctggggtcagaaggtgggggtgtcaacgtcgaaccgggggacctgggtcctggggagcttcctggggtcagaaggtgggggtgtcaacgtcgaaccgggggacctgggtcctggggagcttcctggggtcagaaggtgggggtttcaatgtgtaaagcagtgaaatgggtcccagagagtccacaggtggagaacggccttcaccaggcagccagggaacggtgtggggtgctcaccaacaccccgtcactgctccagaacccctggcagccacagagct

SEQ ID NO: 95 - DNA, 1520 bp, Artificial sequence
  DNA replication origin
ggccgagctcccaggctgcagccaccgccccgttctgtctccacggacttgcctgtcccaggggttgcccagtaccagggtcacacacacgatccagggcctttcccgcctggccgaggggaccccactccacacagccgcgccctcagacacggggcagctctgagctcccgcggagcctgtccagtttgttcacagcaatggccctgccctcagcctaggctctaggaactggcagggcaagggggcaggagggggcccagcaacagggccacaccctcaggggatgcccaggaaggacgggagaagccacgcagggctgagcgtggggcggctgggtgccctgatggagagccggggctctgtccacacctggacacctcccggccgtggagagcagaggtcggcctggaactgctcccgagatgcagtgtggggctgggggaatagagagcgagtcaggcgagtccccaggcagtgcagggctgggagaatagagagagggtcgggggagcccccaggcagtgcggggctgggagaatagagagagggtcgggggagcccccaggcagtgtggggctgggggcctagagagtgagtcgggggagcccccaggcagtgaggggctgggggaatagagaacaagtcgggggagcccccaggcctgaggtaggcagcgcggggaggcgggtttgggagaaaagcaaagaccacagttttagacacaagttcgtatgagagcaggacacttcagcgaccgttagggcgggaggccgggcccatgaggcttgaatttgaggcgacccacaaggcctcagcccggggtggctcagcccagctggggtctctgaagttcccggtgccagagctgccacgtgagaagaggcaggtgccgccctccatggcacagcccgcagcaggcatgtggcaccagtaaagccgggtcctccaaagacgagaacagcagctggggggggacctggcattttccgaagacacaagggtgtctggggagaagggctctgctgcccctgctccctggtggacgctggcgctgcctggagctgcgtggggacctggctgacggggatccctccctgcgccaagacgcttggggttgctaatatcaggggtgagccggcccctgacgtgcagggtgaccatgtgcctggagaaggaagatccttttagaaggtaggaggagcagagcgtgcaggtggggaggtgggaggacagcaggggtcccggctgccttcagaggccgaggggaggctggggtcgtggcaggaggcagtgggggaaccgttttgctaaacgggaggctgagagggcggcagtgcaggggtgctgtggggaggacggtcttgactgaaagacggggacggggtcgggcacagtgactcacgcctgtaatcccagcactgtgggaggccgaggtgggcggatcatttgaggtcaggagtttgagaccagcctggccaacatggtgaagccccatctctactaaaaatacaaaaatt

SEQ ID NO: 96 - DNA, 779 bp, Artificial sequence
  DNA replication origin
ttccctggcagggaggggagcgctggggccctgggctcctgttggcagaggcctgacccagctgggccaggtgtggccaggtttctccaggcccctgagctgcgggagagtctgcagccgccctgccctgcccgtgggctggctccttccccctttctcgacgccgcagcagagttaatgaggccactgggcctctgccgggtaattggtctccaaaggcgggaaagtgtcaccaaagacgctgccgggacaacagcaagaaaaccgccaccgccttttccactcccgggtctaactgtgccctgggccacccagcccggggggagtaggcttgtctctcagaggcaccggagagaagacgcacttcctcctctccaggtgctcagaggagggccggaaacaggcctgggcctgggcagccgccgagggtgatggggctgcccggggccgtcgagaggggaggctgcttgcccggacctgggaggcaggtgctggctgttctcaaggggctgcgtgtgatgggagaaggggcggagacaaggtgcattttgcaagagagtttgtgttttaattggagcagaattcacatagcataaaataattttgaagtgagaatttggtggcatttattgcactcacagggctgagtatccaccacctatatcaaggtccagaacattccgtcaccccgagggaggccgagctcccaggctgcagccaccgccccgttctgtctccacggacttgcctgtcccaggggttgcccagtaccagggtca

SEQ ID NO: 97 - DNA, 1075 bp, Artificial sequence
  DNA replication origin
tttgcttcccaaagcagcagtggtggcagcatcagcatctaatttgagtgagaattctcagattcggggcagggggggctctggaaccccacgcagtgccaggcagtactgagaatgggccctcccagggctgcccaccggcccccagaccccagagggtgccaggaaggcagtggacaggctcctctcccaccaggatggggccgagagggctctgcgggatcccctgtggcctcctggccctcccagcccctgcactcccggcctctccatgctgctttgtggcctctgacccctgaccctcctgggtcagccagtggagaaggtctgcccctgagcctcagacgccctggcaggccccaccctggcaccacctctgccaacgtcaaaggccgctccccctggctctgccggacctgcagcccctccggcctcctggactcacctgggctctgcccctgcccccagccctcggccttctgggagccctcctggggggtcagccatgaggtcaggggggtcagtgaggtcatgaggatcagccatgaggtcagatcgggtcggccatgaggtcaggtggggttggccatggggtcactggggtgagccataaagtcaggtggggtcagtcatgagatggggttgggtcagccgtgcggtcaggtcaggtcggccatgaggtcaggtggggtcggccatgaaggtggtgggggtcatgaggtcacaagggggtcggccatgtggtcaggcgattacatgccctccttgccttccttccccgggcggccctcagctgctcccgcctgtcccctggcagggcgtgtcctctggagatacgggcggggctctcggggcagaggctggatggacggggccaggtccggtgctggagttcaagtgacactgactgaggttcccggggagcacaggccaggaggggccacggtgtcagccaggagggactgtggttgggtgtggaggggaggagcggggggctgtggggtgagacccctcccggctgactgggtgctgtgggcactgccggccgcatgccagggttcctgcctcgtgggga

SEQ ID NO: 98 - DNA, 963 bp, Artificial sequence
  DNA replication origin
caggtttacatggacctgggtggcccctggccacttgcacttgcagagggcgttagagcctagggaccaggtgacaccaaggacagccctggggcggtgggttcagaggtcagaacaggaggggccagaaaaggagccaccaggggcagagaggtgggaagtgggacctccggtgcctggaacccaggtaggaaggtggggacccccggtgactggaacccaggtaggaaggtggggacccccggtgcctggagcccaggtaggaagggggggacccccggtgcctggagcccaggtaggaaggtggggacccccggtgcctggagcccaggtaggaaggtggggacccccggtgcctggaacccaggtaggaaggtggggacccccggtgcctggagcccaggtaggaaggtggggacccccggtgcctggagcccaggtaggaaggtggggacccccggtgcctggagcccaaggggaaaagtcctcaaggcagaggtcccagcccgaggtgccagccctgctgaggggccgagcaatgtggggttgggggattggagtcagtgagtctggacccatcttccaggccctgcagcggccccagcctgctccccacaggtggacgacaggactcaagctgcagtttgcaaggggtctgataaaaagagggagggttggggggcacaagggccctcctgccgggactcagtgtaagttgctgaggagagaggatggcgcccgtcttggctgttgaggctcatattgtttggggctctccttaagaaaaagcacaggccgggcgcggtgactcacacctgccatcccagcactttgggaggccgaggaggaaggatggcttgagctcaggagtttgagaccagcctgggcaacacagagagaccccgtctctacaaaaaatgaaacaacttagccacgtgtggcggcgcctgtggtcccagctac

SEQ ID NO: 99 - DNA, 702 bp, Artificial sequence
  DNA replication origin
ggtgtgggaaggttgcagcctgcactcggactgcgggtgtttgggggtgtgggaaggtctcagcctgcactcggactgcgggtgtttgggggtgtgggaaggtctcagcctgcactcggactgcgggtgtttgggggtgtgggaaggtctcagcctgcactcggactgcgggtgttttggggtgtgggaaggtctcagcctgcactcggactgcgggtgtttggggggcctctgtttgcagcatggacacccgagtttcaggataagagcgtcaggcccagaagaagcagcacctgcaactcttctgcagaaattatttcagaatgaaaagaaagaactcccacgaaggaaagtctctaaaactaataaacgaggaaccgaggccccagccagtcctccagcccccgagggaaggaggagggaatgaagtggggtccgggatcagaggtcaggggggtgcagttgccacgggggcaccctgtgtggcatgagcagccgagggggacccagggacctggtgagggtgcgagagggaggggctggggcgagtcaccccaaacaggaggccttgcggagaggaatagacagggccaaacaccccggaaattcaggcaggtgggtgaggaggctgggacacaagctgcggggcctggaagctgaaggtggggacaactgcagacccctccccagcccgaggggagg

SEQ ID NO: 100 - DNA, 986 bp, Artificial sequence
  DNA replication origin
ctgtttgcagcatggacacccgagtttcaggataagagcgtcaggcccagaagaagcagcacctgcaactcttctgcagaaattatttcagaatgaaaagaaagaactcccacgaaggaaagtctctaaaactaataaacgaggaaccgaggccccagccagtcctccagcccccgagggaaggaggagggaatgaagtggggtccgggatcagaggtcaggggggtgcagttgccacgggggcaccctgtgtggcatgagcagccgagggggacccagggacctggtgagggtgcgagagggaggggctggggcgagtcaccccaaacaggaggccttgcggagaggaatagacagggccaaacaccccggaaattcaggcaggtgggtgaggaggctgggacacaagctgcggggcctggaagctgaaggtggggacaactgcagacccctccccagcccgaggggaggaggtggctgagtggctggggtgggtttgctggagggctgagggtccgcgggcccgccccgtggtgggaaggggcagaggagggcaggtcccgtggtgggaaggggcgtggtgggaaggggcgccccatggtgggaaggggcgtggtgggaaggggcagaggagggcaggtcccgtgggtcgaacgccagtgtcctgggagtctgggggttcctgcaggtgacacagatgtggggttgggacgtcaggaggttggttttggggatgcagcagtcggaggctatgaggatggggagtgtctgcagccctcccttggaggagggggaggcgtgggggctggtcagagaccccatgggggtgctgagtgtgggctgcaaggctggcaatggaggggggctgcccaaggcccccttccaggtactctaggccctgctgagcagtggagaagtttgctgtgagagcacggggctgcaggccaggtgaggggtggccagtggaggcctgagctcaggaagat

SEQ ID NO: 101 - DNA, 1789 bp, Artificial sequence
  DNA replication origin
caccagtaaacgtttgctaagagaatgtgcaaagcacacacagccacgggacggttccaggcagaaggtctgctgtgtgaaaagtgatgaaatcccagttgattttggctttgcacagcaataatactaacaatgaattgcggcatttttcaatatctggaattaaaatgcaattgtttgctgggtgccatggttcacatctgtaaccccagcactgggaggccaagactgggggatgagttggaaacctgcctgggcaacatggtgaaaccctgtgtctacaaaaaatacaaaaaattagctgggcatgggagtgcgcaatggagtcccagcacttgggaggatgaggcgggaggatcccctgagcccaggagggtgacagagtgagaccctgtctcaaaaataaaaaaataaaatgcaattgtttacagtcccactagtggagaaacctgatgggcacagcctcagctgggtgatggaggggagtgttgacagagctgggtcgtgtggagagcctgggtccctgagaggatgatagagccgggtcatgtggagagcgtggatccctgatgggatgatagagctgggtcatgtggagagcctggatccccaatgggatgatagagctgggtcgtgtggagaacgcggaaccctgatgggatgatagagctgggtcatatggagagcctgggtccccgatgggatgatagagctgggtcgtgtggagagcctggatccctgacgggatgatagaactgggtcgtatggagagcctgggtccccggtgggatgatagagctgggtcgtgtggagagcctggatccccgatgggatgatagagctgggtcgtgtggagagcctgggtccctgagaggatgatagagctgggtcgtgtggagagcgtggatccctgatgggatgatagaactgggtcgtgtggagagcctgggtccctgagaggataatagagccaggtcatgtggagagcgtggatccccaatgggatgatagagctgggtcgtgtggagagcctggatccccaatgggatgatagagctgggtcatgtggagagcctgagtccctgagaggatgatagagctgggtcatgtggagagcctgggtccctgagaggatgatagagctgggtcgtatggagagcctggatccccgatgggatgatagagctgggtcatgtggagagcctgggtccctgagaggatgatagaactgggtcgtgtggagagcctggatccctgacgggatgatagaactgggtcgtgtggagagcctgggtccccgatgggatgatagagccgggtcatgtggagagcatggatccccaatgggatgatagagctgggtcgtatggagagcctgggtccctgagaggatgatagagctgggtcgtgtggaaagcctggatccccgatgggatgatagagctgggtcatgtggagagtctggatccctgatgggatgatagagctgggtcatgtggagagcctgggtccctgagaggatgatagagctgggtcgtgtggagagcgtggatccctgatgggatgatagagctgggttgtgtggagagcctggatccccgatgggatgatagagctgggtcgtgtggagagcgtggatccccgatgggatgatagagctgggttgtgtggagagcctggaacccggactcaatggggtgatgggacactgggctctggaacttaggactccatcctcctcttcgcaaaacccataaccccagagtataatcatgagaaaaacatcaga

SEQ ID NO: 102 - DNA, 1076 bp, Artificial sequence
  DNA replication origin
ctgaccggacccacctccacctgaggccctgaagctcccatgtcctcccccagggctgtatccctgatagctgtgaggcttagccacggcctctactgaattctcagaaaggcgttaaccaaaagtctggaagctttgcccgtggtctgagacacagccctctcccgggagcctgatctgcagcctgtccctttgttttcttctcagttattcattgagatctgccccagtcctccacagccaccctcgtccccagaggcctctagggcgccaaatccaggggtgaccctacggcctcccagcccagcctgtgggcagccggtcaccacgtgcctctgaggctcaaatccagaggtgaccctatggcctcccagcccagcctgtgggcagccggtcaccacgtgcctctgaggctcagcccactcagccaccggagcacaggcattcctgggaaccagcgggctggggtgctggtgccggggaaatggagggggtggatggagatggggacaaggcgtctggaggctgggaagaatgtgcacactcttccctggtgtcgtcggcacagatttcctgcagattccagctgagcaggtgtagtttgagtgggagtttcccgagtggggactccatgctggttacggcgcccggcagagcctgggtggaagtgcactggcttcgcctgatgacgagggaacggaggctgtggtcaggttggcggtgccctgaggaatcccaggactcctggatgggaagagtgtggggtcctgaaggccaaagggagagagtgccccaggcaggagacatggccagtgcccacaggggtggcctgtttgcaggcgtgctggcggaggttctcagatccacctgctggctgaaaagtactgaaatgttcaaccatccgattaaagcttcgaagagccaaggagctggtaagaactcactaagccaaagccatggataaaatattgcctagagcactctgccacgttcctcgggggtcagcagatgtgaacttttgttccaatgtggaaatcatccaccaggagaccctccccacaaaacctgggagtccc

SEQ ID NO: 103 - DNA, 864 bp, Artificial sequence
  DNA replication origin
gcctggggctaattttggctttgcctcctctagtcagcaccagcctggaacacagacaggctttgcttggagaaccctgggaggaaaacccagtctcctcggcgggaagggtggcgcgtccccagggcctagagtttgagattaaacaggatcgggcggagggaggcccctcccagcagctccgcctcctcggggcgcccagcggtcttttccacctcgtcgccttcccccttcctgctccacacgaaccccggtagcagacacccgtttccaccccggcaggaaggccagggagcctccaggccgatgggaggcagggctggggcggggctgcgggcggggcggggatggaggggctgggctggggcggagctgggggcggggatggcggggatggcggggatggcggggatggcggggatggcggggatggcggggatggcggggatggcggggatgggatgggtgggcggggatgggatgggtgggctgggggcgggatgggtgggctgggggcggggctgcagtccctagggctcgctggatccacctgctgcctttgcctctggaccttgattccagggcccagtgctccccgcccaggccatgcccttctaccatgctgccagacaaggcaggtgaccccaccatgatttaatgctgcacagagcggggggcctcctgcaccctcttccagctagctaccttttctcccactttgtcccggctcctcccacctgacccaagaccccaggcacctgttggccactgcaagctcagggcaccacggttcaagccagaaggtcactctgtccccagcccgaggtcctgggtcctggtcctgctgtgcgaccttgggtctgc

SEQ ID NO: 104 - DNA, 1139 bp, Artificial sequence
  DNA replication origin
aggccggaacctttggcagccaccagttcctggagattccgacaccaagtgcagccactgtgcggggccgggtgtggagtggccccacaccgaccagctcacgccagctggcagagccactgggccccctccgtggaggaggagagaggcctcgggcgccacgcgctgtgccccagggccactcacttccttggtaggtgggggatgccggcctgggcctcccgagacttgagccctgcccctgcccttgcccccagagagacctgtgccagcgagcgtcccaggcctcccctccctgagccttgcacccgggcggtgcgggggccctgctgcaccccagagcgggcatcagccctcagccactccgttagcaatcctccccccagctcagggcctcagaactggccatccacggagctcagaggcacccgagggccctggggcctgggtagggactggccagctcggggtcctccagcagccatacccaggttcatccaggatgaaagcagggcagtgggaaccacgtgattggtttaaaagcaggtgaggggccgggcatggtggctcatgcctgtaatcctggcacttttggaggccaaggcaggcggatcacccgaggtcaggagtttgagactagcctggccaacacggcaaaacccctgtctctactaaaaatacaaaaattagctgggcatggtagtgcacacctgtagtcccagctactctgatggctgagacaggagaatcacttgaacccgggaggtggtggctgcagtgagccgagatcgcaccactgcactccagcctgggcaacagagccagactccatttaaaaaaagaaaagcaggtgaggacgtgtgagcaagtctgggccatgctgccaagctcccgcttctccgagcagctccacacaaggagcagaggcagctccagttccacagccagacacagtcattttccctctactcaggaattaggcaggatggtgtggggcctgagtgtcaccatgaagccgggaagcaggtgttcagccagacgcaaatattcctcctcaaagccaggggagcggccacagtggattttattatggggcgacgggggcacgcccagtgccccgccactctccatgtccacag

SEQ ID NO: 105 - DNA, 1237 bp, Artificial sequence
  DNA replication origin
agggcccggtctgggggcttcggtggtctcgggattggctggtggtgggtggtgaaggcggggctcttcccggctgtggtggaaaacctgctgcctggggactcctggtgggagcttggggcctgtgatgtgggggtgcctccgtgagaagaaaggtcacttctggccttagaccccagaagcccccctcatgagtccatgggctgcagccctgagcctcccaggatgggcctggctccgtgggctgctctgagccccggccagccagagcctgtgcagccgctcctgagggtggccctgggagggccaggactcaggcacacagccccaccaccacccttggtctcaggtaggtgcaggggtgtggggggcaccccaggtgtcgctggggcccacgggcatcctcaggcgagtctggaaggactggtgcctggtcggacggagcaggtggcccccgaggcccctctggtccacgctgctcgtgcacacggcctccgctctgtccgggtcccaggagcagttcttcctggaccccctcttggtccacaggagcctgggttcagctctgactgagacagggagagagagcacacaggtgaggtcatgccagggaacgcctcacagagccgtgggtccctctactgtctccctcccttggacacaagccaaggccccacggaggacagacagcggcccccgcgtgccctccgacccaatcaggcccagtgtgagcaggaagcaaacctccactgacctccactgagcggagggcttggcacctccttccttcccttccctcctccctgcgcatcccccccgaccgtccctgcgctctgatggcggcccctggtcaggactctgccttctccatcagttccaaagctccacccgcagacgaaacgcttggagcaacgtctgccctctgacctcagtggtaaaacaccatccgggtgcggtggctcacgcctgtaatcccagcactttgggaggccgaggcgggcggatcaactgagcccaggagtttgagaccagcctgggcaacatggtgagaccccgtctctacaaaaaatttaaaacttagctggctgtggtggtgcacacctgtgggcccacctgtgggaggattgctgagcctgggaggtggaggcttcggtgaaccgtgatcgcaccaccgcactccagcctgggccacagagtcagaccctgtctcaaaaaagaaaacacaaaggcaaaaggc

SEQ ID NO: 106 - DNA, 2367 bp, Artificial sequence
  DNA replication origin
ccagcgcctcccctgtgccaggcccgggtgggtgtgaaccggcttcggaaggaatggggggcacctgagcccgtccgtcccggtccacggagctgggtgctctgcctcagccagggtcaggcctcagggcgtccgttggcgcggggagacctgcaagggtgagcttcctgcccccgctcaggcgaggccctggcacaggaagtcagttcagacctgcacaggtggacaactcgcccgtctctgggagagtttcgagggcgacgggacaatgggaggcggtggcgaggtgggggcctcgggagggaagagccggctcggcgggggctcgccttacaaggagcagtgctccccgccccacacaggtgcgagctcccgctggccaatctccgctcctggcccccgacaggtgtgtcccctgggctcccataggccgggcgggaggcgggccagtgacggtgacgcaggcccgggccccgcaggccccgcagactccgtcccgcccccaccttgccgcccaccgaggttgaacaaaagccaggatgggaaggcttctgtggggcccgtgtggagtgtgggcgacatgggcaggggtaggggcagccgcgggcaactctcgcctctccacctctgcctccccaccccccagctccgcagggctccttcccaggctgccttagaagcgggtagggtggccccagggtgaggggtcacaacctgcccgccgcctccctgcagcggtggtgccctgtcccatggggctgaggcctctcatggacagagggcaggggccatacctgcctgtctttgctccaggcccgcagcccttaattttggagcaatgaagggaccccccgtaggcccaggtgggtctcaggatcggtctcctcgccaggggctcggaggagctacgtgcccccagtcccaccccaatgggcaagaggctccgagaccccacagacccacagctgggggaatgagggaggggtgtgggtgccttcctgagcctccctgcgaggcagggacagctgagaggccccagcagctcccggaacatccccatctgggctctggaggttactttggagcccctggagtgggggttcaagttttctttgggagcttggaaggcctgggggaccaggggtctgggggtggggagggcagggcccccgcccggtccgggaagcgcccctcccatggcaaagtgtttgcttctcgcatctcccagaggaagagcccataatgaaacgacaaacggtctgtaattagcccgaccagcagagaggtcccagcggaccccacggttttccataatgagctctgggagctcggtcaggagcctcatcaccgtgggcctgtgcccggggctcctggctctcttctcgctggaaactggtcctgggggcaccggtgacctctgacccactgcccttgccccaacagtccctcccccggacagtcagggcccggcccactctgatgcccactcaggtgtctgtgtggggcaggtgggggtggggtcaggacacacccggcgggtgggctcttgtcttctggggagactaaggcaccgcccacacctccaaatccagagtctgctgttggcatccaagtgggagaaggctggacccccgtctcgggctcacacccccactacccgcacgccgcctcactcactggtcccaggtgtggcccttggccccctgcacggcgggacctgcctgggagctggttgatttttgggacaggtgtagtcagatttcatggagcgatgggggcggctggtgagccaccgcacgccatggggaccaggcagagtcaagcttccctggggctgtgtccacacgctgcgttgttccacggctgtgactgtccgggaatgggcgagaggtggggcggaagcgtgacagccccccgggatgggacgggacgtctgggcagaggctctggggtggaagggctgggggcagagcctggggagaagctgctctttctccaagggccacggagaatcgtggagggcagggaaggaccctgggcagggccgctctgggaggtggacgtgggtccctgggtgctggcggaggctctgggcagtagggagagccggggggcaggaggggcaaagggcccggtctgggggcttcggtggtctcgggattggctggtggtgggtggtgaaggcggggctcttcccggctgtggtggaaaacctgctgcctggggactcctggtgggagcttggggcctgtgatgtgggggtgcctccgtgagaagaaaggtcacttctggccttagaccccagaagcccccctcatgagtccatgggctgcagccctgagcctcccaggatgggcctggctccgt

SEQ ID NO: 107 - DNA, 1518 bp, Artificial sequence
  DNA replication origin
ggtctgaactgacttcctgtgccagggcctcgcctgagcgggggcaggaagctcacccttgcaggtctccccgcgccaacggacgccctgaggcctgaccctggctgaggcagagcacccagctccgtggaccgggacggacgggctcaggtgccccccattccttccgaagccggttcacacccacccgggcctggcacaggggaggcgctggctgcagggtcggggcgggagcagcctcaacccggctcctgggccgcggccgcagcagtggaacctgtcggggcaggtaagggcgggcagcggggaggctgaggcgcagggggaggcggctccctgcaggggggccctcgccagcccccgccgtggccgacgtggggcaggggcgcaggtgacagatgggctgtcgccagcctggccagcgtccaggggagctccggtcactgcagacacaggctggagcgggtccttcccccccccagggaaaggtgggcccctgcgcagatgcggctgggtttcgggtgtggagccatcttggacccacgggctgcgtcttccgggcacgggcacagtgtgtgggctccaggcatggggtgccctcagggcagggcctgggcagagggcaggctccgagaggggtcacgttcttgccgcctacctgacagcaggccttctagaaagttctctccagaagcagccaccgccgtcctgaggcactttgtgcggagacgggaagctgtcgcctcagaggtgggtgcgtagaagggtttggccgggtgcgaggatgaccgcgtctcccttgggctctggagtctgcggtgggaagggcttggtttcagcaccctctggtcagaggccggccgagcccatgggcggtgaggttggtgcctggggtcgtggctggtctggtacaggtggggctcagcccggagaagctggagccggttcccaggccccgcgctatgactggggtgggggcaacgtctctcgtgaggttttttacttaaatgtgaaacggctcagtacggtggccgcagccgggaacaaggtccgacccaccgaggcccagccttgaacttgccgcgggggcacctgaacacggttttacagcccggatcactggctttcttgaagtttgggaactgattgatcatggtggcgggaggtaaggttcattgttcttgatgaacaaaattcttagggcgtgaagagccgatgctttaattaaccccccgggagcgtctcaggcctccccccgggagcgtctcaggccccgtttacgctgagtgtctggggaaagacgtggtttggttttgtttttctagtaacccagatgaaatgtttaaaagcatggttggcagcacattgaatttggcaaaattaaggtttgcatttgtgaaaatgcggatgcagtttgcggttcttttcagacattttggtaatttgcaaatacttatttgcgaaacgagtttgtcagaacattttttagtatctagaggaagatgagatgggccgagg

SEQ ID NO: 108 - DNA, 1240 bp, Artificial sequence
  DNA replication origin
cggccgcctgcccacccgactccttgcccctcacccctgtgccaggcacaaggccctgcgaaatccttggtcccccagctgagcctgccggcccaggccaccatctccccacccagccctggagccagggtcggcctctcctgctagctgctcgttggctttacagcttctgcactcaggaggcgcctgggaatcctgccctggaacttaggaaggaggcttctcccacctgcctgccacacgggtctgtccctgggtcccagcctctgccgtgtgcccctcagcctcccgggtgagaacgcaatgactgatgagcctggggtggccaggccagctctggccctgtggggttcctgagaaggctggccctgggtggccaagggcctggggacactggccccgggccctgaacctggcagtgggaggccggcccgtccgccgggtgggctgggaactgtgtttggccccagctgcaagggacgagtgccgggcacctgctgccctccccacgtgacctggcagccaggaatggagctgaaattcaactctgctctgaacgggaagtcttagtttcctttagctcagaaaacaggtgaaattgtgttcctgaagcactgatttgatgggatttgatggcattggtggcgaaggcctgtgaggtgatggaaagggaaagccgggtgccctggagcctgacaggctggggccagggcaggggacctggtgtggggtctccggagagggtccaggcgtgagggaagctgggtcaggacctcggagacgtggcctttggaggaggagactggaaccgggtggacccggcagcaggcgggggcgggcggacacgacctttgttgtggtcggcgggcagacaggggaatcggcacagggcctgcgccccacctacagcctctgtgggtggaaggtgccagaaaacttgaagagtggctctggccagctctctgggcccagttggcaccaggtggttgcagagaaagggtgggaaggaggacaggaaggacggcgtgtccagcgggcggggagccttggtctggcctgagggctgaacctccctcgggtcctgagtgtgcctggagtagaagcctagggtctctgggctccaggcagggccctgagcaaggaggggccacagggctgcccacttcctcctgcccccctgcagaggcggctcagccctcgcggcgtctgaggcttgactgcctgtgtctgtgtttgtggc

SEQ ID NO: 109 - DNA, 898 bp, Artificial sequence
  DNA replication origin
cacccctggctgctcaccgctccggttcttccctgggcttccacagcagcccctgcctgcctggcgggaccccacgtccctcccgggcccctgtgagcatcttaccggacagtgctggatttcccagcttgactctaacactgtctggtaacgatgttcaaaggtgacccgccgctcgccggggacaccaccgaggcacatccggagctcctactccagggatgggctggggcggagggccgagcggggccagcagacgggtgagggcggagggccgagcggggccagcagacgggtgagggcggagggccgagcggggccagcagacgggtgagggcggagggctgagcgggcggcagagggcctgtgtcagctccgaagtccagcccccaggggaggggccggcctctgccgggggtgcccccggggtcactcacgcccaggctgggtctgacaccttgaggaccccttggtgcctccacaggtggcctggagggcatcctgctccccctcccggagccgctgtgcctcccccacccaacctcccaggctgggttttagggtgacctggctccaggaaaggccatagggctgggatgccagggctggagagggaagagcaacagtggcctctctcacgtggtccgggctccgtggagggtctgctgggggcgcaggaaggacaaggtgggttcagattcccgagccccaccatgcaggggagcggggacgctctgcgcttgccctctgagggacaaggggtctcattccttcccccagtcaacaagaacaggaactttgtccaaaacccaccaggccaggatgacccattgtttcatcttttccatctgcaaccagggcgcctgggaccgcacccccacacaaggccccagcctgg

SEQ ID NO: 110 - DNA, 1298 bp, Artificial sequence
  DNA replication origin
accttgggccgtgggtgtgcccggcccgcgtgtccaggtgggtgcagcccccagggccaggcagaatgggggaggcctggcacctctcgggcagtgggtggggtctccaggcaggccaggccctgccactggaagggaggtggcccctttgccaccaacctgtggctgtcaccggggcaggtgtggctggaccaggaagccctcctggctggcgcctggctgcctccatcctgtccgcagccctcgctcctgctggccggcaccatacgctcttggtcacctgctcagagaggccccccagggccaccggctgccccctcggtagctcccttcagcacaggctgaggtgtctccactcagggactcccccttcccccagaaccttgacctgagctgaccacaggagagtcagggaagattcctgagcaaaagaaggagggagggagggacggagagaggaggaggagggaggagggggaaggagggatggaggagaggaaggaggagggggagggaaagaggagggaagggagggagggagcctctcccaggaaccttgggggcctccggggccggatgcagtgtctggggttctgtcctcagctgggccctttgcacggcgggggtctgtgcacgtgtggttaaaataaggagctggtccaagcatgggtgcgtgaactgcagactttattactatacaaagacttttttctgttttgttcccggtgcttatggagaggaggaggaggaggagaaaccgcacagggaggctctgggtacggccccgccagccccagcagggtccttcctgtcacaccccgtgcaacgcagcaggcgctgtggagagtgagccccactgcagtgtggggcgcaacttcatccgaggggtgcttggagggactggccagacgggcacagcggtgaggaggtgctgggatggggaaggtccccgagctccgggcggtgttggatgagctcaggctcacaggtgtggccctgcctggcccgagctctccaggtgtgtccaaaccttgtgttatatgcaccttgcagtccagggctcacccgtgcggtctggtgaggtggacgccacattctgggggtggcactccaagttcttccccacacacgtcgctcaggcggcagcagcatgggggtggtttcagctggccctgcgggggactgccccatctccccagggaggaaagagggtctggagatagccccgggtgggggaggtcaacctgcagatcccggcttggggacagctccagatgacacctcgtgagccgcctggg

SEQ ID NO: 111 - DNA, 1051 bp, Artificial sequence
  DNA replication origin
gcgggtgcaggggcaggggcaggggcaggcgtaggggcgggcgcagggacgggggcaggggcaggggcagactcacctggcctggaccccccccggcaccttgctggccttgctcatggcccgtgcccgtccccgaagggtgctgagcagcccgatcttggtggtgaggagcttgttgttgggaagctggtacagcagctgctctcctggaggtcagaggccagggctcgtgtggagggagcgcaggacctcggtccccacccctccaacctgccctgtgctccggcccaggaggcccctgcaggctgcccgcctctggtgccggctcccgctaccttcccggaagctgccgtagctgtctcggctcttgacctcacaccacttcagcgtgtagtcgtcccggcggctgtcatggatgcgctgccagcccttgcttttgcagtaggagctgatgctgcgaggggtgggggcgggggtgacctgggggccgaggcaaggggttggggatggcgggcggccagcggaggccgggctgggccccgggagcaggcggtgggtattcagtgggaccacgggcgcccagggccgctactcacattgtggccccgttgctgcctccaatgtagaagaagggccccggccgggtgctgtggggcgatggcttcccaccccccagcaggagcccctccaggagggcagctgagggcccggcggcgttagtgtcatccgagtctgcaggccggtggctgttcaggagcccagggggtccgggtgtggcagaggctctttctgccccctccaggtccggcccacagtgtccatctgcgtcgtggtctggctggcttggctgacaccggagtccctcctcctggctgctccccattggcctctcgtgggccgggcctgtgaacggggtggggtcccaccggggtggctacgggagctgcccactcagcccggacatggctcagccagtttgctcccagcccatttctccaataccctggacaatccccctggcccgtctggggctcaagttcagcccgagctc

SEQ ID NO: 112 - DNA, 1190 bp, Artificial sequence
  DNA replication origin
cgcccgcggccgttctccttgtggggactttgcgtttcctgcccctttgcagcacccccccaacgggctgtgctgctggctgcatccttctggccgctgacccccacccgggcccctcccgctggctgctttttccctcatggttgctctcccggctggcaccgtctcagccatttgtgagccaccacctcatggcagtgtcctcacggctgggatgggcggagagcgtggcctgagcccctggccctgccccagctctgtgtgcactggggggtcagcgtggatctcggcctggcctggctgaacctctgactctagctcgtggttttcctttgtgtgggacccccgccccgctttctccttttcagacgacaccaggtttaggtctgaacttcggtctgaagggcccctcacagctgggctgagtctacctctgtggcctgaggtatcctgggcttgtccacgggaggtcctccagggcgggcgctgctgcgtccttttccagcctgcagcccaggggacagagggcctggactgaggggccagctcatggtgcttggagcgggtggggactgggggatggggcatgggtggtgagtgggcggactgtgagttgtggtggaaggaggtggctgggtggacggcggtgcctgggggaaacagctgtgttgctctaggctggaagtggacgctggacatggtgtaaagctggtgtcacaggcaaccaggggcggggggtgcagatggaggcagctgcggttggctgggcgggtgcttggtgcaaaaatgtctgggccaaatgaagtgaggagggataggtgggtccatagaagggcagtgggcagggctgggagcaggaggacgaagtcgctaggatggatggcccagacttgggtgagcgatggacggcctcactcagggcacccacaggtgacggtgggcacggtgtgggattgtggatggattggatggatgtttggggtgaaggcagattgacaggtgggttgtacctgggtgggtctgtgagatggacaggtgggtgggtgtcaggcccagtgggttggggacgtgtgggatcttccccgttcagccacgaggaagagggtgggtttatgggacaggggtttggccctttaaaggacaggtggaaggtggaggcaggtgctgacgggtgggggctggggccagcc

SEQ ID NO: 113 - DNA, 1618 bp, Artificial sequence
  DNA replication origin
tcgctcacccaagtctgggccatccatcctagcgacttcgtcctcctgctcccagccctgcccactgcccttctatggacccacctatccctcctcacttcatttggcccagacatttttgcaccaagcacccgcccagccaaccgcagctgcctccatctgcaccccccgcccctggttgcctgtgacaccagctttacaccatgtccagcgtccacttccagcctagagcaacacagctgtttcccccaggcaccgccgtccacccagccacctccttccaccacaactcacagtccgcccactcaccacccatgccccatcccccagtccccacccgctccaagcaccatgagctggcccctcagtccaggccctctgtcccctgggctgcaggctggaaaaggacgcagcagcgcccgccctggaggacctcccgtggacaagcccaggatacctcaggccacagaggtagactcagcccagctgtgaggggcccttcagaccgaagttcagacctaaacctggtgtcgtctgaaaaggagaaagcggggcgggggtcccacacaaaggaaaaccacgagctagagtcagaggttcagccaggccaggccgagatccacgctgaccccccagtgcacacagagctggggcagggccaggggctcaggccacgctctccgcccatcccagccgtgaggacactgccatgaggtggtggctcacaaatggctgagacggtgccagccgggagagcaaccatgagggaaaaagcagccagcgggaggggcccgggtgggggtcagcggccagaaggatgcagccagcagcacagcccgttgggggggtgctgcaaaggggcaggaaacgcaaagtccccacaaggagaacggccgcgggcgccaggtgccactgcccacactccctcccgccgggccacaggctgggcctcaaaccgcccacccagccaggggcgaagggacagcagctcatcctcctgcctccctgccctgcagggtcctgagaatggaagagtttttcccagagacctaccgcctggacctcaaacacgagagagaggcctttttcaccttgtttgatggtgagacgctgctggccggacaccaggctggccctggggagacagggtgagggctggaccaaggcgggggctgatgagggcagggctgggtctggaggggctgcgtggggctgggacgagacgaggtggtcaggaaggggccagggctgggcctggtctgggtggggactgaggagttggaaaggggagggtctggccttcgtggaggttggggtatgagggcactggggccagggctggagcttggtccgggtgagcgtggtcgaggcacgggcaggagctggggccaggcgtgtggttagcgcagggccaaggttggaatggccgggccgagggtcgcagcctggaggggagggtcctggtcgggccctaggaggggcgtggctgggttgggggcgaggccaggggctcaggccgcgctctctgcagaaacccagatatggatctgcaagcccacagcctccaaccagggcaaaggcatcttcctgctccggaaccaggaggaagttgccgccc

SEQ ID NO: 114 - DNA, 1207 bp, Artificial sequence
  DNA replication origin
gacgtggccaaaagcgggaggtgagaggcagtgctcactgccagcgggggcagcccaggctacttccaggcctgagacacctcccggcctgggccacctccttctgtagctgcaccccctctgcaccccctagcagtgagaacctccttctaatctcatcccaaggctgcagggagggccctcacccatggcagactcacctggttggtcaagtggccgccgaggtcgctggaatgggggtcgtaaaggctaagggtgaggcgagcatagccgtggccaaagaagatcatgtagggtgtggtgcaggcaatgagcaggtaggagcgcacgtcaaactttctcccgtccaccagcagcgggttctggatgtacctgggggcaccatgtcggggctgctgggctgagccacggggccagcctggcctgcatcccctcacaccccaccccgggcctgttccatttcctcagcgccccgcctctgtcccaggtgtgacctccagggaaagggggcatttctgggcctgaatatgtcaggggaattgggaggaaaggcctggcaccctgatgggtgctccagggcataaccgcagtaggagcctggagggctgcctggaggaggagggcatgaaggtggctttggagaggaagggaaggagcgcgccaggcgggcgctaggcagagggagcacagcaggcagagggggtgcgccaggcggagagctcgccaggtggagggacgcgagggaggagccgatggaagctggggacggcagacggcagctgtggtcagagtgaggctctacgagggccgggggtgaggtcgacaggtctaaaccttcagcctcgtgcagccacggggctttctggaggaagccttcccactcagggaaggagtggtcagcttggccataggcctgaaggctgcagctggctggctgggccggggagtaggggggctggcagccgggaggccacccaggccaggccacctgcaggacagagggggccccagctgaaggacaaactgactaacccctcaaccctggatcctgtgtctgtgaccccggcctggtgtgacccctcccctctgctggctacacgggggcccggctgtggtctgcacaggggctggtggtgcggctgctttccacgaccaagggctcctcggcggccctgctgactgcaccagtggggcccgggtcagccag

SEQ ID NO: 115 - DNA, 680 bp, Artificial sequence
  DNA replication origin
tcatccgctgagaccccccttcagccgtgaggaccccacagatcttctcagaaggtccctaccctggactctcccatgaagacccgtccccagaaatctctgcccacagggcccctcctctgacagcctcagaatcccctcggttccgacgcccacccgcaccccatcctcagaaaactcagctgcggcttgggagccaggctgcacgctgagggctacagggctctgagccctttcaccagctaacggggtccctgccacgcccttcttctgacgtggccaaaagcgggaggtgagaggcagtgctcactgccagcgggggcagcccaggctacttccaggcctgagacacctcccggcctgggccacctccttctgtagctgcaccccctctgcaccccctagcagtgagaacctccttctaatctcatcccaaggctgcagggagggccctcacccatggcagactcacctggttggtcaagtggccgccgaggtcgctggaatgggggtcgtaaaggctaagggtgaggcgagcatagccgtggccaaagaagatcatgtagggtgtggtgcaggcaatgagcaggtaggagcgcacgtcaaactttctcccgtccaccagcagcgggttctggatgtacctgggggcaccatgtcggggctgctgggctgagcca

SEQ ID NO: 116 - DNA, 1411 bp, Artificial sequence
  DNA replication origin
gcccccaggtacatccagaacccgctgctggtggacgggagaaagtttgacgtgcgctcctacctgctcattgcctgcaccacaccctacatgatcttctttggccacggctatgctcgcctcacccttagcctttacgacccccattccagcgacctcggcggccacttgaccaaccaggtgagtctgccatgggtgagggccctccctgcagccttgggatgagattagaaggaggttctcactgctagggggtgcagagggggtgcagctacagaaggaggtggcccaggccgggaggtgtctcaggcctggaagtagcctgggctgcccccgctggcagtgagcactgcctctcacctcccgcttttggccacgtcagaagaagggcgtggcagggaccccgttagctggtgaaagggctcagagccctgtagccctcagcgtgcagcctggctcccaagccgcagctgagttttctgaggatggggtgcgggtgggcgtcggaaccgaggggattctgaggctgtcagaggaggggccctgtgggcagagatttctggggacgggtcttcatgggagagtccagggtagggaccttctgagaagatctgtggggtcctcacggctgaaggggggtctcagcggatgaaggtttttgtgggagggtctttgcaggcaggtcagggtggggccgggggagcaaggttaggggcggctgtctcagggacccccagagaacaggccttctaggttagggggatgttctcttggggacccccgtgaggacaggccctccggacagtctgggagccagtctccaggcaccgtgtgcccccagttcatgcagaagccttctaggttagggggatgttctcttggggacccccgtgaggacaggccctccggacagtctgggagccagtctccaggcaccgtgtgcccccagttcatgcagaagccttctaggttagggggatgttctcttggggacccccgtgaggacaggccctccggacagtctgggagccagtctccaggcaccgtgtgcccccagttcatgcagaagaagagccctctgtacatgctgctgaaggagcacacggtgtggagcatggaacacctcaaccgctacatcagtgacacgttctggaaggcccggggcctcgccaaggactgggtcttcaccaccctcaaggtgcgtccactgtgccctccagtctgggagtgagatccctcggggcgggggtgtgtggtcaggctgggcaccaggcacacagatgtccgtggcgtgcgtgggcggctgcgctgaagtgtgacctgaccgtgtggaaccaaacccttccagcgtctctgctcacttagctggcagtgcctgtccccagcagccagcaaaggcccggacggaaag

SEQ ID NO: 117 - DNA, 1605 bp, Artificial sequence
  DNA replication origin
gcccctagggcctcgcgttctcaggctcctcgcgttcctccttggctgtccccggggaaggctcttgcgccgggtgcctgttgcctgtgcccgactgctccgtgcccggggcctggggctccccatcgtgggcgctgtccaggtcggggccgggtggccggggacgctgcggcaccaagggaggtggcgcaggcctgcgggcgcccggctggtctggggcatgcggcatgggtggcccggaggacttggcctggcgggtgggcaggggcggccagcggcggaggctgcacgagccccccaggtgcggccgcgggtcggcctcaccgttgtgcaggagcacgaagcggcgctgggacagcagaggcaacatcttctggccgcgcaggctcttccggaaggtctcgagcaccaggtctggtgcgggtgggggagagagggtgagtggggggcagaggctggggctggagggggtggggagggtgtgaggggtgggacccaggtgagctgaggtgtggggaaggttggggcagggggcggcgctgccacacaggccctcgggaggtggaagagccccatctgtgggggtctgaacttgggaagagggcaggtaggcattcaagactgggcaggttgtgggggtgtggggtgggggcttggaggctcacccagggtctcgatgaccacacctgggatgacctccttcaggacctcgcagttggtgtgcagggctgggttagaattcatctccagcagccatacctgccccagacgccagtcagtccctcctcaccccgagcccactgggccagcaggaggcagaggccctggtcctcattcagacagatggctctgggagattgcttccttcctatagccttgctcccctgtttgtccactgaagctctgagggtctgaagctctggcctgagggggctgctctgaggagggggtgcagttccatcctagctgcacagggggtgagcctcatggatacacccatccccagggctgcatgcaggcagggtgggggctgactgcagattctgcctggggcctgccagtgtggtcagggtgtacagatggcccctgcctccttgcatctgtctactgtgccccccgccgcccaggacagcaccttgaagttgtcatcaatcaggaagtcacagccaatgaggtcaaagtaacccagcttgcagtccagcttgggcttggcggccagaaagcagtgggccatgatctgctgcatccgcttctgcagggaggcagggaggcatcctggctgcggcccgtaggccctgatcacaccccaggtctgaacagccacagccacatccctcacctgcactcccatctgaacccgcacctgtacagccacacctgcccacacgttcgtgcactcagcctcacaggttcacagccagaaactcactcaacaaactcgtgcagctcctgtcctgtgtcaggcactggagatacgagagtgaggaaaactcacaggaaatctctgcccttgagcagaagagacggatagcaaatgggatacgtaaaatctcgaatcttggtaagaactgtgaattatgttgtattttaacgtgctctggtttc

SEQ ID NO: 118 - DNA, 1458 bp, Artificial sequence
  DNA replication origin
cacccctccctggcctcagtgggctgcagaacaggccgctgctgcccttggcccccagagggtccaacagacctgctgggaggggactggggaccccatcacaatgacaggtgtgttcccagcccctcacctgggaacccccactccaggccccagcgaaaggaccatgttggtgggggctgcccctggcctggggtggttcctcactggctctgagacctggggcctcctttggcctctgtggtccccagttccctctgtcctgccttctcctcttcctggcgccctggctgtgccccacctgctgtgctggccagagaccacagccgacggtgccttctagcagtgccggggctgccgagtcccagggaatggagctgctgtccctgtggagcgcagggtggccacgtggccaaagcagattctgctggcccctcagtcccccgtggctgcggagcagggcaggaggagggaccggcgacttggccgtgaccgtgtggagtcggaggcagggcatgtggggggtgggcctgggggcggggccccccgatcctcaggtctcgacttggggggcacagacaccttgagccagccattgggaagaggcccatacactttagctctctgggtgggagatgagtgagggggtgggtagtgtggacgcctcagaggccccgggacgccagagctctcctcgcaaacccccagacccatggggaacagaaccatcagcggctacacagggctgaccagggcctggccagtgtgggcttagcatgtcttctgtgggaccctcttgttggggctagctgccctgtgcccctcacccctggctaagtcctggggccactgcaggaaggttgggggctcagggagctggagcgccaggcttggggcttaaaggcccaggaaggttctgtgccaggcaggctggggcgagctctgtgggtgcccacggcagcaatcctgggctcaaggggctcctcctttggagctccagaggggttcagacccttcctggggatgacaggcaatggtggatcaccggccaggccatgggggccgtggggtcacagggcggcaggagggcccaggtgctgaggggcacagggtggtgggcgggagcccaggatggggcagcccgggagggagtatagaccagccgtggggaaccccctccctcagaacagccccccaggactgggcccagccgcggagaccccctccctcagcacagtctccccagggacagggcccagccatggactgggggctagtgggggcctggggaagtcccaggggagcatctttcaggccagtgctggtgtggtgggggtgaccccggtgggcatgggctcaggggcgctgaggtggcaggactctgctgcagagactgtgtttgtagcaaagtgggctttataggtccctgagggcaggcagcacggctggggcgcgggg

SEQ ID NO: 119 - DNA, 2068 bp, Artificial sequence
  DNA replication origin
gggaggcgggcgggttctcgcgcgtgggggcgggggcgcctccaggggtctcagtgggggaggccgaggccagcgcgaacccgccatggaggggggggtcccaagggcgcggagggtcgggcggggccgggtgcggagaaggggccggggtcgcggcggagaggccgccgccccctcccactcggggcgcagtggtctcggctccacggggaggggcccctctctgctccccctggaagcccgagccactcgcacagggcggcctccatctgcccggaaaaccgcagccgccccaacctcccgctggggtcggacttttgagaaaagggccggaggccacctctgttcccagaagcgcttccggccgctgcggagcctcccctcccagccagccccctccccaccctccactgagatctggacttggccctgcgggaaccccccgcagctgacagagacacctatggcgggggccccttcgcagacagagctggacacagcctttcccagcgccaggacaggtggggaggtccttgagggacaggtggtccccggctgccccagctgctgggatctgtgcccgctgaccaggacctgggtcatcactgctgtcccctccgatgctgggctgagctctgaggacaggacaggagagggctagctcctctcggccagtgaccctcatgggaggcggtggcgcctggcgttggggaggaagcagacccccgcctctcacaaatctcatcttcctggaaaccaggaattgggggtctttccggagttggtaattcagttgtcctggtccccgtcttaaagacacactcaggggagacgggctggagggggcgggggcacagggggccccatggacacgcaggcctcgagtcctccggggtccgaggtctctttagctgaaacagacacgcaggcccactggccctcagcagaccccaggcccccgctgctggtgagagtgtgctggccaggccccacgatggaggctgtggggatggagggtgtgtggctgtacctgggtccgagtggggggcagcttaatcccccacaccttccccttgagtccgctacctggcagcaggacccaggactcacctgtggaagagagagggggagagggaggtgggggggtcagctgtcaggaacctccaccttgggtcccaggctccagcttggcgccgtctccaggaagcgccctgaccctgcctgaacttctcgtgtccccgaggagttctgatgcctttcctgtggcccctggctggtcacttcacttgaatattggggagcaccttgtactgccagatactcaggcacccacagtccccctctccctggtggtccatgctgttgtgacctcgcagacgggtgcttacgggctgggcggcggggatgtggccgttgttcctgggttctctggaaaccttgtttattcattgacttttgggctctttggggcaccaaggactcctgaacagtatctgggtcctcagcttaggtcttcagggggccctgggttgcagggggtggggctcggtcacgccagggcaggccactgccagcgtgcaccctcctcatgggttctggcggtgacacatccagtcagggcccaggggcggcaaaggttccattgtcccctcgggctcaggtgacctctgctgacgtcgtggggcccctgagcctgggggtgtaaccacacgcgccacagggaggggagctggacggttccaatgtcaccaggggatgtagtcctgacctgggatcatggcgcgacacagcaccaggcatgtggggcagagccgagggcagaggccggagggcacaggggccccaggggcatcagggtagcaagagcagagggaggaccctgaggtgatgtggccattagcggccttggaagccgtcaggcagtgtggccctgacccctaagagcaggtgtggattaaccaagtcctgggtgcttggccagccatggaggcttcacccctcccaggcccctcctgcttcacccctccctggcctcagtgggctgcagaacaggccgctgctgcccttg

SEQ ID NO: 120 - DNA, 2483 bp, Artificial sequence
  DNA replication origin
ttcgggtttctcactgtgttccctgggaacaagacccacaacgctgtgtgcgtcccagggtccccgccggcagagccgcttgggtggctgaccgtcgtcctcctggccgtggccgcctgcgtcctcctcctgacctcggcccagcttggactgcacatctggcagctgaggagtcagtgcatgtggccccgaggtctgtcacagcctggtgcggggaggtgggagcatggctgcctgctgaccgtggcccccctgcagagacccagctgctgctggaggtgccgccgtcgaccgaagacgccagaagctgccagttccccgaggaagagcggggcgagcgatcggcagaggagaaggggcggctgggagacctgtgggtgtgagcctggccgtcctccggggccaccgaccgcagccagcccctccccaggagctccccaggccgcaggggctctgcgttctgctctgggccgggccctgctcccctggcagcagaagtgggtgcaggaaggtggcagtgaccagcgccctggaccatgcagttcggcggccgcggctgggccctgcaggagggagagagagacacagtcatggcccccttcctcccttgctggccctgatggggtggggtcttaggacgggaggctgtgtccgtgggtgtgcagtgcccagcacgggacccggctgcaggggaccttcaataaacacttgtccagtgacctgagtggatgcatgctgggtgctgggggaggacggggcacccggggctgggctttggggcaccgtgctcatgcctggccgtggtcccctccacagggggcaaagcggagggcagccagggcccattctgggaactcctggctgggtgggggtggggcccgaggaggggccattccagtcctgggcccagcgctcctcagggatacaggctcagcggcttcccccgttctggggctcttctctggtgcccctgggtctctggtttctggccacacagcctgccggcccccgggtgccatccagcactttctggtgctgggcggccccgtctccaggccagccctctctcctcaccatcccaccctcggcccgcccagcctcccactccaggctccaggtgagatctgatacaggctccctcagctgccggggagtggcgggcaggctggtgcaggcgtctcagcagcaccctggaggcacagcacacctggcccccagctcagctcccagtggggcggtgggcccagctcacagtaggtggacggggcagaggggacgtctgctcccctccccccccaacatgggacctggagtgtggagagcccaagggtggcacagggacactggggaaggtgctcagccctggaggcaggacccggcccttcggcgtcgtggagtactgggctcggggctgggtactgggcttggggatgggtactgggctggaggctgggtactgggctcggggatgggtactgggctggaggctgggtactgggctagaggctgggtactgggctcggggctgggtactgggctggaggctgggtactgggctcggggatgggtactgggctggaggctgggtactgggctcggggatgggtactgggctggaggctgggtactgggctcggggatgggtactgggctggaggctgggtgctgggctcggggctgggtactgggctcggggctgggtactgggctcggggctgggtactgggctgggggctgggtactgggctcggggctgggtactgggctggaggctgggtactgggctggaggctgggtactgggctgggggctgggtactgggctcggggctgggtactgggctggaggctgggtactgggctcggggctgggtactgggctggaggctgggtactgggctgggggctgggtactgggctcggggctgggtactgggctgggggctgggtactgggctggaggctgggtactgggctcggggctgggtactgggctggaggctgggtactgggctcggggctgggtactgggctggaggctgggtactgggctcggggctgggtactgggctggaggctgggtactgggctcggggctgggtactgggctggaggctgggtactgggctcggggctgggtactgggctggaggctgggtactgggctcggggctgggtactgggctggaggctgggtactgggctcggggctgggtactgggctggaggctgggtactgggctcggggctgggtactgggctggaggctgggtactgggctcggggctgggtactgggctggaggctgggtactgggctcggggctgggtactgggctggaggctgggtactgggctcggggctgggtactgggctggaggctgggtactgggctcggggctgggtactgggctggaggctgggtactgggctcggggctgggtactggctcggcgcgctcctcccgtgtgagccccggggagg

SEQ ID NO: 121 - DNA, 2371 bp, Artificial sequence
  DNA replication origin
agccgccccttctcctctgccgatcgctcgccccgctcttcctcggggaactggcagcttctggcgtcttcggtcgacggcggcacctccagcagcagctgggtctctgcaggggggccacggtcagcaggcagccatgctcccacctccccgcaccaggctgtgacagacctcggggccacatgcactgactcctcagctgccagatgtgcagtccaagctgggccgaggtcaggaggaggacgcaggcggccacggccaggaggacgacggtcagccacccaagcggctctgccggcggggaccctgggacgcacacagcgttgtgggtcttgttcccagggaacacagtgagaaacccgaactgggtgcagctggaatacatggacgcggcctcctatcagcccccggacacggcctccgatcagcccccggctgctgccctccgtgctgtctggggcaagggacaggagaggacccttcctcagagtgggcctggaccacccggccaccggcagggcccacccaggactcactctgtccaaggtttgcagtggccttcgtggcccccggagaaggtccccgaggcacagtcgatacactggaagccaaaactgaatttccctggtgtggggtgtggggggagggagggagggaggctggtggagttgctgggatggatgaggagggcgtcaggccagtgcaggggtccatctggggtctgggtgctgagtagaatgccccccccatcatccattcaacagagttcttcatggcccaggactggggcccatgtctgcccgtcccaggtggggcgtctggggtggggcccagtgagggcacctgggggaggtgcgcagagtgcagtgggcctgccagggaggggaaaggcctgcccattgggggctgagggtgggcagaagccaggcaggacccagtagaacagagggtggagaacagtgagggtcccagagagagtgaggctgggtcccagttgaccccagaccctgccccgtccaacctgacacaacctccccagttgtaccttctcccagctctcatgtgcccagcctgacctctcctgtcaggtaaacaagccgctaagaggacttgagctgctccttccagaacagggtgcagccccaggccccagacaggactccggggggcacagggcaggctctttcagtatgtggtgaggacagacaggatgggtgtcccgggcctgagagccagacagctcctggaacccgcccccacctccccgcagggttctcacagccctcgtgctggatggagaagcccaggctgagaaagcagggacaggacacccccagagcttcatggcctgtggtgcctgagcatggcctggcctgcccggcctcacaggactccggaccccacacaccacatgtcctcgccggacacctgtgcccacgagctctgcctcgggccctagtggaacccctggcctgtgtggactcccagaggcacctccaggacttaccctgggactgtaccccctggcctgggggacaagggtggtgccggcaggtcgtgcagcaagggtctccgcagtggaattcaggctggacacacatgcagtcccactcggaacagcactcctcgcctgggcaggagacaggccagccccccagcagctgggctgaggccccctcctccccaggcctcccctcggccctccaggggagtgaggttgtccgttctccacccacagttggctccagggagcagagggctcctggctgggagtctggaccctgggtttatccagctgtctctttctcctggggccatgtggcctggctactccccctttgcgccccacagctgcccctgcccaggtgctaactccatatgcaaccaggagctgcccctgcaggacccaggggtggcccccaacagtgcacagtcccctggaggcccgtcgacacctcagaggccgcctgcctggtgtctgggcgctgctgtccccaccaccagccacactgggcctccggacagagcctcccttcccaacccacaggccctggaggaagaagctctggggtgacttccctgccagcttcctctccagaccagccgtgtcagctgaaccctcatccccaggtgcaggtcagaggcaggcagcaggccagacggtggtgcaggggggccctcaactgggcaggagggggctgggcgatggccaagggctcacgacccgcccagcaggacctggaacagccgtcctccacctccagaccccagacccctcttgagggcgctcccacctggctcacccctgctcccggccggggccactggctggagctggcacacctccgcctccctctgggatcctgcctcc

SEQ ID NO: 122 - DNA, 1095 bp, Artificial sequence
  DNA replication origin
tccggggtgtcacaaacagctaattcctgtcatttaccttggaaaaggaggaaccgccttacggggtgaggcggtggctgcaggtctcaaaagggtgttgaaccacatccacgctcacgttcccgagagcccccacccccagcattcatgggggtctccacctgtgctggacggcgcagaagcagggctgggcaatccagggaggcttcctggtggaggcagggtcccagaacccctcggtgcccacaggggaaactgaggctcagaaagacataggacagtctcccaagagctctgcgaggggctcctcctcaactccctccgggacctggatctgtctggtgtgacggatgaaggtggctctgagagaccgggccctgggtgcccgcgggggcggctgacactgtcccgaggaggcgccagcaccctctcgtctccccaccagctcctcctggtgcccctcccaagccccggggaacttcccaggttggcctgaggggggtcctggagagctgcaagcaagggggaggggagcccacaggcctgcagcccatggtgagtttcacacctgaagccagccaggtggggtgtgctgagccgaggggtccctgtccccattctgtggggttccccagcacggggctccatggttgaggctctctgggggtggccagaatttgtggagacctctcggggactcgcagataccacccggaggcagtgggatggaggagtgattggctgacccccgccctccaaggggcccccatgggacaaggtgctataaacgccgccccctgcactggggacaccaatgtggccgcagactttgcatagaaaacctttctgatccccgccagcctggtttccccgcccctgccggcgacctgcgggggaccgggctgtgtccgcagtgtctacaccccctcctcacacgcacttcacctgggtcgggattctcaggtcatgaacggtcccagccacctccgggcagggcgggtgaggacggggacggggcgtgtccaactggctgtgggctcttgaaacccgagcatggcacagcacggggcgatgggcgcgtttcgggccctgtgc

SEQ ID NO: 123 - DNA, 1580 bp, Artificial sequence
  DNA replication origin
gaggaggagcccctcgcagagctcttgggagactgtcctatgtctttctgagcctcagtttcccctgtgggcaccgaggggttctgggaccctgcctccaccaggaagcctccctggattgcccagccctgcttctgcgccgtccagcacaggtggagacccccatgaatgctgggggtgggggctctcgggaacgtgagcgtggatgtggttcaacacccttttgagacctgcagccaccgcctcaccccgtaaggcggttcctccttttccaaggtaaatgacaggaattagctgtttgtgacaccccggagttctcaaatccaagatgtaggagcctgccttggagaggcagccctcagacactgcagagaaggaaggggtctctgcagctccaggccgccccgacgctcggaaggaaaggggtggggccagctgggcctgggggcctttgagaggcctggagatcttcagccccgaggctgggagggggtctgggcccctggatagaaagaggcgccatcagtggctcacgcccgtaatcccagcattttgggaggccgaggtgggcctcggatcacctgaggtcaggggttcgagaccagcctgacccacatggagaaagcccgtctctactaaaaatacaaaaaaaattagccaggcgtggtggcgcacgcctgtaatcccagctactcgggaggctgaggcaggagaattgcttgaacctgggaggcagaggttgcggcgaaccaagatggcaccattgcactccagcctgggtgacagagcgagactccatcacaaaaaataaagaatgctcatcagaccacacggtgtgagtcatccatctagaggcagggacagagttagaggagcgagcagtttatggggccaagtgggaggcggccagcgggcagaggagcccctcccccccgccccgtggcgcagctgacactttgaacagccggagagcagcttgccacacagggtggtccccggaggggctgcaggggtgtgacgtccaccctcccatccctctcgccgcagaaggcccctccccggctccccgtgactcctatccttgggctgcgaggctggaggtgacttgttcatcttattgagcagctcaccggtgacacaaatgacggggcattcacacagcagagcagcccacgggccgggcgagggacagcccttgcgtacgtccagaagggcagctgtgaggccccacggggagggtgcagatgggcactgagccagagttcaggcagggccttcggcacagatggcacaggagttgccagcagagatggcgtcaggcgagggggcggggagggtgagcatggagaccaagaggaggtggccccgtgtccatctgggggtgcggcaaggggtcctgctggggaataagtcccacggggcctggggggtgctgtgcccagaggggaggagacaggaagcgatgggtatgggcgccaggtttggggaggaggcccctttcccatagccgtcgacctgcgggccccacaggatctggccgctccagtcccggccacctgaccccttcccccacccacccg

SEQ ID NO: 124 - DNA, 799 bp, Artificial sequence
  DNA replication origin
ccgggcgagggacagcccttgcgtacgtccagaagggcagctgtgaggccccacggggagggtgcagatgggcactgagccagagttcaggcagggccttcggcacagatggcacaggagttgccagcagagatggcgtcaggcgagggggcggggagggtgagcatggagaccaagaggaggtggccccgtgtccatctgggggtgcggcaaggggtcctgctggggaataagtcccacggggcctggggggtgctgtgcccagaggggaggagacaggaagcgatgggtatgggcgccaggtttggggaggaggcccctttcccatagccgtcgacctgcgggccccacaggatctggccgctccagtcccggccacctgaccccttcccccacccacccgccatcctgcctggaggtctggcctcgcctgccccacggggcggggggcggggggctctcagaggcgcggccccaaccctgtgcagggcctgcaggctgaaccgtgtgcaggaacccggggaactcggtgaaggtgctggatgggggacaggacggcctctgacttccctatgctgcggggggggaggcttgtggttagcagagagtgggtggaagacagaggtttgaggagagagagacccaggggagaaaaccagctgcagaggcaggaggggtccagggcagcccgaggccagagatgggcgtcttccttacagccacctgtggtcccggcaccttgggctgttgtgagtggcgcgtggcgctcccactgtgcacccccggggccggttcccca

SEQ ID NO: 125 - DNA, 2240 bp, Artificial sequence
  DNA replication origin
agggcgcctggcccagcccagcggggcccccaacccgaataggagaaggggagggcggcatgggggcccctcctgtggaccccacccagcagaccccttcctgcaggccgtgcggttgccgccatcctgggcctgggcctggtgctggggctgctgggccccctggccatcctgctggccctgtacctgctccggagggaccagaggctgccccccgatgcccacaagccccctggtgagtgcctcatggccctgccgcactgctcctggcgggtgaggcccacccaccaatctctccttttttcctccccagggggaggcagtttccggacccccatccaagaggagcaggccgacgcccactccaccctggccaagatctgacctgggcccaccaaggtggacgctgggccccgccaggctggagcccggagggtctgctgggcgagcagggcaggtgcaggccgcctgccccgccacgctcctgggccaactctgcaccgttctaggtgccgatggctgcctccggctctctgcttacgtatgccatgcatacctcctgccccgcgggaccacaataaaaaccttggcagacgggagtctccgaccggcactgtgggctgcacacctgtggcatggaggcttgggccgtgcccgcctctgactggagaggggtcttgggaggcttgggccgtgcccgcctctggctggacaggggtcttgggaggcttgggccgtgcccgcctctggctggagaggggtcttgggagacttgggccgtgccaacctgtggctggaaaggggtcttgggagacttgggccgtgccaacctgtggctggagaggggtcttgggagacttgggctgtgccaacctgtggctggagaggggtcttgggccagggtggaggtgagggtagcggggtcaagtgggaccctggaggttggtccctgggtgcgagttccagattgagtggggagcggggggagagactgggaaagctcaggcccaaggctgcctggggtggaggttcctggccaggcgctgacaagggcagctggcccctgagccccgggttgcccaaggagcttgggagtggctgacccccggggctctgtgtccttggaggaggagtgtagagacctgcccctcttcccctccacacctacgcccaccccttgctgcacctggaagggggtcccagggcccctgagcaccccgaggagtccctgcaaagggcccacacggcccctatgtccctgccataggtgtccagggggacagtcaccttggaaaccacagtttctgcttgagccaactttctgtccaccctgggccccggccgtcccactcctgcgcacttaagagtcctgggatctgaatgagaatgaccacagcgacttcatgtaacgtggccccacagtggagaaacccaggcatccgccagcagcgtggatgcgcgagtgctggcgtgttcagatgagctcccagctcctcggcccacaccacaggtgtccacagacgctcccaaggccctggggccgtccccggccgtgcgggaatcttctcaagctggtgtctgggagtggggtatccttcgagcagcacagagcctgctcccgagcgccagtcacgcccgaggccacagctcgggaacaaggcgggagcagccctgcaggcttcccgcagggaagacaccccgggcgtctaagcgacatctgtgtccctcgggaggcggaggtgcctgttcgcctccatggtgtcaggggctgaagagaaacactcccgagggctaagacgtctcactgcacttgttttttctttctttttttttttttgccggagtcttgctgtgtcacccaggctggagtgcagtggtgtgatctcagctcaccaacctctgcctcccgggttcacgccattctcctgcctcagcctcccaagtagctgggactacaggcgcccagcaccacacccggctaatttttgtattttattagagacagggtttcaccatgttggctaagctggtcttgaactcctgacctcaggtgatccacctgcctcggtgccctggagtactgcgattccaggtgtgagccaccacgcctggccctcactgcactcatgagcaagaaacacacagccgaggccggtcacggtggctcacgcctagaatcctagcactttgggaggctgaggccagacgatcgtctgagctcaggagtttgagacccgcct

SEQ ID NO: 126 - DNA, 971 bp, Artificial sequence
  DNA replication origin
ctggacagctacaagcctggagttggtgagctcggtggctgcggccggcggttgggggtgtgcatagcggctgtctgtgacgcagatgggccgtgggccgcagggacctggccccaccggtgcctcctctggcatcctcaagaccgagctcccgggtcagggcccacgggtgggatgtgggcagggagggcttccagaggccaaacccaccacccagccatggggggcaagtgcctgccccacaggctctgccccatgtccccagcacccggggcctgtgggcagcccctgaccaccctatctttgttgcagactgtgccccctgccctccagggcacttctccccaggcgacaaccaggcctgcaagccctggaccaagtgaggggcctggccaggggctgggaggggctgggggggggttggggtggttaggagggcggaggagctggggagctgggaggggctgggggggcaggtggggtgggggcagttttgggggaaggggaggtgctggtggccctgggggcctggctatgtggctggacctggttggggagcaggaagctgctgcctgggggcagcctttccctgtgggtggagctgggtgtgtgggaccctcaccctccgcagctgggaggccctgggggcacaggacagggaggtgctggtggggggtgtagatgtgggagaagggtgtgtggccttggaggcccctgtggggggcacgtggggctgggcagcgtccttggctgtcactggcctggtgtctgtggtagatgctgcctgtggctggccagcgtggaccctgttatccccaccgcatctcccgggtcccagggggtttctggcctgagcaacacctcctgttccccaacagctgcaccttggctgggaagcacaccctgcagccggccagcaatagctcggacgcaatctgtgaggacagggaccccccagccacgcagcccca

SEQ ID NO: 127 - DNA, 1614 bp, Artificial sequence
  DNA replication origin
ccggcccgcacggacggcacaccgtgttctgggagcggctgcagcggctcaccatcccgttgcctgcagcagaggccggcgtcaggcagcggtcaggccccaggcttgcgcccgtggacccccccaggcggctcctctgccaggcttggccggcccctcacccgccccctccccaggaccagcctcctggctggcccatccctgccccagcccccagtccctggagtgcccgtgcgtggcgacccctcctgaggcctcacctggcctgcactcgtggcagcaccggtcgttgctggggtaggtgtccccgacacagtggagccccgtcacggtgctcagccccaggcccaggaggagcagagccgcacacggcccgcggcccagccgccgagcccccacgcacatcctcgtctctgctgtcgccagagtctgggttttccttgcggggtgtggctataaggactgtggaggaggggaggggagaggggaggagggcagaggaggcgggaggaggaaggtggcaggccggggaccctggctgtgggctgggcacaaaggcggggtctgggcacccccagcattggcttattctgccttctgacctcttctgcccaagaccaccgtgttcagaccccagggcacagtagggcctggcctgcggctcgaccctcagcaaaaaggtccatggagcacgtgggtaaactgaggcagcactgagtcaggagaggcaactcctcagtctggaccttcagggctgtggcactgctgaagcatggtcccccttgtatgcccaagactagctctgagcagcagtgaccacagccatggtaagacagacacccatggccaggcacggtggctcccgcctgtaatcccagcactttgggaggccaaggcgggtggatcacctgaggtcaggagttcaagaccagtctggctaacatggcgaaatcccgtctctactaaaactacaaaaattattcgggcgtggtggcgggcgccggtaatcccagctagtcaggaggctgaggtagcagaatcactcgaacccaggagacagaagttgcaaagcagaggtggcgccactgcactccagcctgggcgacagggcgagactcatctcaaaaaaaaaaaaaaagacacccgtgaccacagcccacgctgagtgtgcctgagcacggcaggtgtctatggctgaactgtgccccttaaattcctgcgtggaagccctaacccccatgtggcagtgtttggagacaggcctctgaggaggtggtgagggtgggtcctggatggcctggcgcacacgggcacgcaggcaggtttccaccttctatgcaaacagttctcaggttccaggtttgcccagaggatgcgaactgcccggagagctggggagcaggtgcggggctgggggctccctgggccctttctgcacctttcaaataactgtgaccagcctgtgattatccaaaagttcatttttgaagttgcaagtggagaggggcctctaggaacagagcagcagggaaggggctggaaatcccctcctcccaggagcacaggaaacagctgcctgtcctcggcccacccgtggggaaattcccagccgtg

SEQ ID NO: 128 - DNA, 1044 bp, Artificial sequence
  DNA replication origin
cagttgatgagcggcgtgtcccctctgcagcgcgcaccccggcggggctttggctgtgacgcggtcggggcgcggggctgggctgtggccccgcggcgccgcctcctccctggtccctcgaaatcgtggcatctcacttctgagaacgaaatctcgcttcagtcactctgccgaaggcgctgacggcatcgcggccggaacctctgggcccggcccctcccagggccgccgctccgtgggaaaaaacagctcctccatttccttgaaaactgaacgattattaaaaatagattaaacttcgctggaaatgagtagccaggaagttcaggggagggtgccgggtccttcccgggcctggcgtgtcggagccacccaggtcccgcagctgccgctgagaaaatgcaaatatttgttgtgacaagaatcacatacatttactttaaatatagttgccttttttggtcagcttcattctttgggcgtgaaacaaaacacaacagcagcgtgctaggtttgtggttacagtttccactggagcgctggaggctggtgctgggtcacgtggagggttggaggtcatggccggttcgaggtgattctcctggcaggtggcaacgggcaggggctctgggaggacggagggcagcgctgcgtttgtgagtaggggtcagggggcagcagacgtgcccactgagtttggggtttggacatttaaggcaggagacagagccgcctgggggttttgggtggaggatggcaaggtctttgggtgcagtggggcaggcctagccccagatggggcagagaatggggtgtgttaggacggctggtgggggtcctgctctgtggcgtgtgggggcccaggctgtgtcctggctctcccagtgggagctcagggaagccgggagtgtgtcctcttcagtctgccctgtggtgcccatgtgaccggcctctgccctgagcccacctgcccaggggcccctgtggggccgagagggcgggttggcacctgggctggttcccaggcaaacgagattcacagag

SEQ ID NO: 129 - DNA, 1594 bp, Artificial sequence
  DNA replication origin
cttggcgggggtccaggctgtgtcttaggggctgggccatgttctggggacgtgtgaatcctggagggtggggccccggtctcgcgggtggctgtgtccctcgagttcaggcagcacctctcggaactttctggatttgcgtgctggcgtctgtcggcctcgatacccacaggctgcgcccctctcagcacaggaagtcctggagaacctgaaggaccgctggtaccaggcggacagcccccctgcagacctgctgctgacggaggaggagttcctgtcgttcctccaccccgagcacagccggggaatgctcaggttcatggtgaaggagatcgtccgggacctgggtgaggctgggtccagcctggccggcacgccaggacccaggaccgactggcaggggccgggcatcgtcgggaggtcggggcaggtcctgcgggagccccagcctgggtgtgggctgacccattcccgtctcgcagaccaggacggtgacaagcagctctctgtgcccgagttcatctccctgcccgtgggcaccgtggagaaccagcagggccaggacattgacgacaactgggtgaaagacagaaaaaaggagtttgaggagctcattgactccaaccacgacggcatcgtgaccgccgaggagctggaggtgagccctggcgcagccgtgtcccggagccggccctgcgaggtgctgtggcgggaggggctggtggatctgggcctgaggcaggaagctgtgctggtgtctggcctgagactccatctgggctggtcactggggcgtttgctcagcggtgtccaccaggctgcatggccgttgttggcgtttaggttcagacggatcagagacaggcgagcctggccgggctccatcctcagccccttgcggaggcgtcagggttctcacagcccctttttaacgggaccacaaggggaagctcatgctgggcccagcatggaggcaggtccaaggcccagcaggtgcaggtgggcggggcggcctgtgccacatggctggaatttaccaccttcctctgaagcgttttcactggtatcatgtgtaggcttgtttttctcccactgctgagtgagtcatcttgtttttatgtagaatcctgtgattcctggcgacagccagtgggcccggcccaggttagggatccttcagaactggggtccaggcctgtgtagcccctgtgccccgttacccctgctggccccgggcaggccttccggggcccccggcttctccctgccctgtgttttcatttgtgccgcctcccttcgggaaccttccagaacgtgcccacactcccgctgcagccaataggcaccttaaatagccacttcgtgcggctggccgcggagctcggagggggaaaggcgacgctgacctgtgccccgctcgcccgcagagctacatggaccccatgaacgagtacaacgcgctgaacgaggccaagcagatgatcgccgtcgccgacgagaaccagaaccaccacctggagcccgaggaggtgctcaagtacagcgagttcttcacgggcagcaagctggtggactacgcgcgcagcgtgcacga

SEQ ID NO: 130 - DNA, 975 bp, Artificial sequence
  DNA replication origin
cagtgagcgcgacgcagaggctgccgggcttgtggcaggggcttcggccagggcagagtcgggcctcacgtgcagggggctgagtgtgggcctcaacactggacttggccactgactgcagtgagccccaagatggggcaggaggtggtgtttctgtcctggagacccagggtggcttgggtccttgggatgtgtggggacctcggggtgagggcccgttggggccgggtgggcacggcaggagagcgggggccacacacccagaggcagtgccgtgtcccggctgggagggttcctgggaagctctgctcagccccagtctcagtcatttctagaaactgtgttttcctccctgtgacgtcacacgtgaaggaaacggaaaagggcagtgagtccttcgccccgcggcgccgtgcgcacgtcagccttcagggtgattccgctcctccagaggggcaggcgcgggtgtggggggtggggcccaggcccatcctgaggggtcccaggcatgaggggctctgagctgtgtcctggggtggtctgggccatggggaggttctggatcatgtcttgagaggtctgggctgtgtggggggtccaggccatgtcctgggggtctgggctgtgtctgtggggagtcagggccatccatgtattgggggtctggggcaggggggggtccaggctgtcttggggagtccgggctgtgtggaggggtccaagctatgcctttggggatcaggcctgtgggaggctctgggttatgtcttggcgggggtccaggctgtgtcttaggggctgggccatgttctggggacgtgtgaatcctggagggtggggccccggtctcgcgggtggctgtgtccctcgagttcaggcagcacctctcggaactttctggatttgcgtgctggcgtctgtcggcctcgatacccacaggctgcgcccctctcagcacaggaagtcctggagaac

SEQ ID NO: 131 - DNA, 968 bp, Artificial sequence
  DNA replication origin
ccctgacggggacggtactgtggctgggccggggtgggtggggcggtgggcggggcgggcagggccatgggccttgcctggtgcctggagggcagacaggccctgtctgagggacgggcggtggggaagtgtcagccggagaccccgaggtgtggtggggtgcacggaagctgggttcatgatgccagaatcctggtgacagaggtgtgtgtgccaagcactgggcgtggcccatggagggcgcctcttatgtcttcggggccttcatctggtggtgtctatgcctcttggtggccccgaggcacagacgttgccggctggcctcacaggtgaggaaacgggtgtggggtgctggccggggccctggggctccagacgctggcatcctgccgcttccagcctgggcagcagagcaagaccccatctcagttgagaaggaagttcagctcagtatcagaggccctgacaggtgtgatctgctcttccaggtcacgtgtcttgggacgagtataaggtgaagtttttggcgagtaaaggccatagcgagaaggaggttgccgacgccatcaggctcaacgaggaactcaaagtggatgaggaaagtgagtgctcagccaggctcccgccaccggtctcaggcatcctgtgtgtgcgcgcgtgtgttgtgtgtacatgagtgtgccgtgtgtgtcgtgtatgagtgtgccgtgcgtgtgctcgtgagtacgtgtgtgcgtgccgtgtgtacgagtgtgctgtgcgcgtgctcgtgagtacgtgtgtgcatgttgtgtgtacgtgtgctgtgtgtgtgctcgtgagtacatgtgtatgcgtgtcgtgtgtacgagtgcactgtgcatgtgcttgtacgtgtgtgcgtgtcgtgtgtacgagtgcgctgtgcgtgtgcttgtgagtacatccaggtagctgttcatgtaggctcgtgagtacatgcaggtgag

SEQ ID NO: 132 - DNA, 677 bp, Artificial sequence
  DNA replication origin
ggtgattctgtgtgacagagggggagggtccatgtgtttccccggggaggggaccgtggcatccaccttccccagtgtctctggcgtggcccggcaccccacaagccccacgtcccggacgcttttcgcgttgcctggtggagcctgtcgctgttggtggcaggttcacgcagccatggagtcctgggccggcggcatccgtctggctgttcggggtcctgggggcccagtctgacggccacctgcccatttgctgtcttgcagggtggatgtgaacactgaccggaagatcagtgccaaggagatgcagcgctggatcatggagaagacggccgagcacttccaggaggccatggaggagagcaagacacacttccgcgccgtggaccctgacggggacggtactgtggctgggccggggtgggtggggcggtgggcggggcgggcagggccatgggccttgcctggtgcctggagggcagacaggccctgtctgagggacgggcggtggggaagtgtcagccggagaccccgaggtgtggtggggtgcacggaagctgggttcatgatgccagaatcctggtgacagaggtgtgtgtgccaagcactgggcgtggcccatggagggcgcctcttatgtcttcggggccttcatctggtggtgtctatgcctcttg

SEQ ID NO: 133 - DNA, 1580 bp, Artificial sequence
  DNA replication origin
tgggtcaacctgaccactcacccacaaggagccaggtcctgcacgggcgccttactccttacggcacggccggggtgccctgcggtgtggccctggaacctacttgcactcagcgctggcctcacccctggaggcagagcagggtcagggcgtgcccgtgagtcccccaggccagccagggtgccgggcagggagccgaggtgcaggtgagagaacaccctgggcctcctgggacctgcgagacctgggcacaaggaggcagcccccgccgcagggcctggccacgagctcaccttcccgcagggcctggccacgagctcgccttcccgcagggcctggccacgagctcgccttcccgccgggcctggccacgagctcgccttcccgccgggcctggccacgagctcgccttcccgccgggcctggccacgagctcgccttcccgcagggcctggccacgagctcgccttcccgccgggcctggtgctccaggaccagtgcagaggggcaggtggcaaagctggtgagcaaggggattgggcagggctggggtcctggggtgcaggagcaggtaggaaaggtgtgaggactggtctggctgtgccacggcccttgggctgagggccaggcgggagggccctgaggatccaggctttcgggcggagcacaggtgagctggtgggacggaggcacggtgccagctggaggacctgggcaccaggtgtggtgtccccttgcacctctcctcagatggtacggttcgggggtccttgcgtggcctgagttcacttggtggtgagctgaccaacccacgaagaggctgctggtgcccctggggcctgtcaggttcaccacccctgagctcacgaaggcctggctcgcggcatcacaggggaagggtccccgtccctgctcagccggtgctgggggtgggctgcacgcctgggcgaggggagttgaggcttctgctcggtgcgtctccagctggaccggggtttctttttggtgcctgtaacgaaaccccaagctgtctcgtttgaggaggtgggcatggggagtgggaagtaacagcaggtctccgggtctccctgactcctgcgccgagcggcgacagcggccgctgtgggtgtttagacttcccttcccacacgcgggtcccttctcgcccttctcctgcgtagggccccgtccctccaggacccacgttcactcagctgtcctgtctcctctgtctcctctgggctggaacggtgtctcagactctcccgtttttgtgaggacgtaacagttctgagaagggctgggtaggaggttttaggctgtccctcagtttgggcttgtgggatgtgttttctcctgaccgtacagggttgagggtttctggaaagagcccccagaggggaggtgccatgtttcctcctgaccgtacagggttgagggtttctggaaagagcatccagaggggaggtgccctgtcctaggggcttttgagcttcacttccttcccgcttccctgcaccacgagatgctccaggctttccttcccgcttcctggcacggtgagatgctctgggctcgcc

SEQ ID NO: 134 - DNA, 896 bp, Artificial sequence
  DNA replication origin
ccccaggaccccagccctgcccaatccccttgctcaccagctttgccacctgcccctctgcactggtcctggagcaccaggcccggcgggaaggcgagctcgtggccaggccctgcgggaaggcgagctcgtggccaggcccggcgggaaggcgagctcgtggccaggcccggcgggaaggcgagctcgtggccaggcccggcgggaaggcgagctcgtggccaggccctgcgggaaggcgagctcgtggccaggccctgcgggaaggtgagctcgtggccaggccctgcggcgggggctgcctccttgtgcccaggtctcgcaggtcccaggaggcccagggtgttctctcacctgcacctcggctccctgcccggcaccctggctggcctgggggactcacgggcacgccctgaccctgctctgcctccaggggtgaggccagcgctgagtgcaagtaggttccagggccacaccgcagggcaccccggccgtgccgtaaggagtaaggcgcccgtgcaggacctggctccttgtgggtgagtggtcaggttgacccatcttggacccctcacaacaggctctcgagactcagggatggggtcgggggagaaagctcggcactaggcacagaggcagcaagagggtctcgggactcagcagggtgggggcagtgacggccaaggatgggccactgacagcacagctctgctcccgaccaggccagcaaaacaagccaaccccacacacccccagcctgcgtgtgatacgcggcccgtgtgtgacagggaccccaaacacacagggtagagggcgtgtcaggaggagcccagagcaccctgtaccagctctccagccacctgtggcagcccctcactcctcagccaggcctcgtc

SEQ ID NO: 135 - DNA, 1285 bp, Artificial sequence
  DNA replication origin
ccaaggatgggccactgacagcacagctctgctcccgaccaggccagcaaaacaagccaaccccacacacccccagcctgcgtgtgatacgcggcccgtgtgtgacagggaccccaaacacacagggtagagggcgtgtcaggaggagcccagagcaccctgtaccagctctccagccacctgtggcagcccctcactcctcagccaggcctcgtccaactggggctgcagcctgcggaggctgcccgtggccggcgtctgcccctcagcatggaggacgctgaccactgcagtgccgcgtgggctcctccaggctgtcctagggacggccacacaggcccactctggccctctgagcccccggcggacccagggcattcaaggagcggctctgggctgccagcgcaggcctccgcgcaaacacagcaggctggaagtggcgctcatcaccggcacgtcttcccagcccggcaggtcccgacacagggcccggcgccccccaccgcgcaaagccaggataggaacacacaggcgagcgcacgcggacagccccccagtctgggcacatggcggcacctacttggaaaagatgaccatcagcttcctccggctccgccgcggctccgcgtcctcatcaaagccacccaggtccttgcctaggaagacctcctggtggaagccgcgattgaggtgcccgtccatctccagcttcaccccgttcaggtggtctgggggcaggatctcattctcctccctgttggctactctctctcgagtggacgagtggttggcaggccgtgcagacgcgtccatcagaaggactgcccccaggagccagaggcagcacggagccaggccaatgaggggaccccacctggacgccatcgccacccagggccagaccatggggcgggctgcagggtgtgggccaggtgctgggaggggcaggggcaggggcagaggaggaagtgaggtcctggctccaatccaatccccgggcaccacggagggctctgtgtccccaggacggccgcaggatggggacaagcagctcacagtctgcagagagacacagacacatcattagcaagactcagcaaagacttccccaagcacgtctatcctgcaacatgaaacatatcctcgattcacaggatccagacatgtggcatcgccttctccagaccacacgtggcactgccttctccagaccacacgtggcattgttttctccgggccacacgtggcatttgttttctctggaccacacgtggcatttgttttc

SEQ ID NO: 136 - DNA, 1356 bp, Artificial sequence
  DNA replication origin
tatccaggactctcccctggtcaggcgatctgggacgacaggaatagaattatgccaccactagggaagggaaaagccctcagccatgttcagaaaatcaggccgggtgcatggctcacgcctatagtcccagcactttgggaggccgaggcaggaggatcacttcaggtcaggagttagagaccagcctggccaacatggcaaaaccccatctctactaaaaatacagattagtggagagtggaggtgggtgcctgtaatcccagctaactgggaggccgaggcaggagaatcacttgaacctgggaggtggaggttgcagtgagccgagactgcaccactgcactccagcctgggcgacagagtgagactctgtctcagaaaaaaaaaaaaaatcagacatgagcccctcacccagggtttccttccttgggggaactcaggcttgtacccctcttggtttgtggcagactgcactgacttcaggaccactttcatggcggccccactggtgtttctcgatacctggaggcagcattttttcgtttaatattacccagggtagcattcgttgagcgcctactgtgtgcaggcagagtggcaggtgccagaacagtgaagctgaataagacggccacagaacaggagtctcagtccatgtgtgttgagggaacagctgtgacatggcggggcctcagcggcacccgaaaggacccgcaggtgtttgccggaggggcagactgtgaaaggagtaggctcgtgggtgagaaggaccccgagttccctttgggatacatgaggcatgaggccctgtgagcccctgcttcccaccaggactggccacgcctcggacggcaggacagacttctgggctcctcggccttggcgttcgctcgcgagtgtgggcaagggcacatgtgtgtaatacgtgcatgcgtgagtgtggatgtgtgtgtgcacatctgtgtgtgggggttgtgtgtttgtttgctgggaccaggccctgacgccctctgcacttagggttggctgtcttcgcaaagcctggtcagtcggggggagagggggagcctcctgtttcttagtgagaagctgaggccggggaggccacatgacttagctaaggtcatagatctcaagaatgttcaagtcagggtctggagagtgaccctaaccccatgggtcagtggcatgatgccaggagggacagagccgggccccacaggaaagctgtgctgcaggtgttgggcgatggggacaggttagcccctggaggtgctgacagctcgagagagagatggaaagacggagagacagggctgaaaactcagtgtctgtaaaaaaaagaccgggcac

SEQ ID NO: 137 - DNA, 1459 bp, Artificial sequence
  DNA replication origin
tccgcagacgccgagccccggggcgctcggaggccggcggccaatcggcggccgtcacgtggcctcgggcacccttgtcattggtcaacctcggagcggccccgcgaccgcttccgcccggaggagagatggtggcgccggcgtcccctccgtgaggtcgcgcccgttcgcaccgcccccgcccgcaagaaagatggcagtggcctgatccgggcccgttggcggcgtcactgacgcttcgctccggtcctcggatcccgagcgcggggaggcagaccggtgagtgaggggcccgggacggccgctgcaggccgcggggccaagtgtacgccggccggacggcgagggcgggtctggaggccgccgccgcctcccgccttgggctggggcatcgtccgtccgctcggccttgagccctggcgagactccgccgccaccggggctcccggggttcccgggggcagggacaggccgacgacgctggcctccccggccgccggcacgtctggtctcctactggccaaaacctacgaatgccaccgggaaacggaggcccaaggggtctggttggactcgcgtttatcggcgaggcgaccttggacaagctgccccgcttccctgcgcctgcgcttccgcttctgaaccgcgtggaccctcatccccagttagtaggatttggagatgtgaagtcggctgtgtggagcccttgatgtctggctcagaggcggtgttatgaaccctgttgagcttttagaatctaaccgtgtgtgttgttaactgccagaaatagcctcgttccaccagagctgaagcccagggatggcaaagaaatagcgtctctgcctaagctgtttcccacgtccgttttgcaagggtgtgttgattccttgctgggaactgagctgctaggggatggcgaagtcgaaaccccattccggtgggaccggcccgctccgctgtgctgcgaacctggcacaccgtgatgaatagatactctgaagccaggagaggaagcgccacttgatggactcctgatatttatagttacttttgggttactttttattccccctttttcgagacagggtcttatctttttgtttttgttttttaaagagacgcagtctcactgtgttgcccaggctggtctcacgatcctcctgcctcaagtaaaccgtgtaactcatcaagatatgtagaatcaagaactagctttattttctctaggaacaaagtacagtctctttgcacacagcgtgtgttttacgactgtagttagtggagtcagcaccaggaggaggtgtcttggttcttatccaggactctcccctggtcaggcgatctgggacgacaggaatagaattatgccaccactagggaagggaaaagccctcagccatgttcagaaaatcaggccgggtgcatggctcacgcctatagtcccagcactttgggaggc

SEQ ID NO: 138 - DNA, 873 bp, Artificial sequence
  DNA replication origin
cccgcgcttcgacaccgaataccggtcccgcggctgcagcaaccagtacctggtgacgcacaagcagagcctggaggacatgctggagaagcacgcgacgctggcgcgcgagggccgcctgtgcaagcgcgaggtgcagctgcgcctgtcctacgtgtacgactggtccgcgccgccctcgcagtgctgccagagaagggagggcatcccctgagccgccgcggcccggccctccgggacacctgcttcacccggcggcgccttggggcaggtgccgagcgggcgcactacgcccgggccccaaggcccccgtcccgcagccacgcttgtggtcgctgcgtcccggtctgcgtttgggagacccctgggggttgccggggcagcgcgccgtgtccaggtggaggtgcccgttcctggacctcagcgagcctgagccgggcccggccgcacgctgacccccgtgctgtccccgaccggctcacggggctgggctccgatcttccgtgtctcttatcagtggcgtttctcacgtctgcgtctcagatctaacgtggtttcacatcaatccgctttcatgggattttggtctctgtccagtgacttcgtggtaaatgtaactcagtgtttgcttgcgacttatttataaatattgtaagtttgtgtcgatgagtgtaagttggcagtgcgcacgtctcggtttttttacatgatttaaggaaagacttttatgtcagaacttggtgcctgtaccgtcaaccccgctgctgcccgtgtttaaacgcaggagaactttaaaactggccatctatcttttcagtgtacaagtcactgaacccattgtttctttctgaagagactttcctttcaaggctt

SEQ ID NO: 139 - DNA, 1111 bp, Artificial sequence
  DNA replication origin
cagtgtttgcttgcgacttatttataaatattgtaagtttgtgtcgatgagtgtaagttggcagtgcgcacgtctcggtttttttacatgatttaaggaaagacttttatgtcagaacttggtgcctgtaccgtcaaccccgctgctgcccgtgtttaaacgcaggagaactttaaaactggccatctatcttttcagtgtacaagtcactgaacccattgtttctttctgaagagactttcctttcaaggcttcccatgggtccgcgccacacagggccggtgctgctttatttcagactctgccccaggttccaggaatccgaaccccggagtgctgacgcggttccccaacttccgccttaagaaaacaggaccagccggcaccaggcccgtctctcacgtactttaacacatccttgaaagcccctcgtttaatgagaaaagcgaacactgcggtccttgccaaagtaaaatgaagctgccccaggacaaggggttaccatgagctccctggagtccgacgcgggttttctctctgggggacctgggtggtccccgctgtggtctttgttgtcccactttgggaccgggtccagtctggggtctagtctcgagcatcagggtcaggctcggggcagggctgggttaggctccgggtcagtcttgccatgggtttgggagcaggtttgggttacttgcgtttgaaggcagcagtggtctcaggaggaagaaacgggggcgggagagagtggtgatctgtggtcagtgggtcagtgacctgcacggtgattctcccacctccaaaaggtaggggtgggactggaggcgtccctaggtcaggccgttgagttcgagctccgatgggccaccttgaatccaggactgaccgcccgtgtgtgcacagtttgttcttggacgaggactcgtgaggatcgagggctggggaccccggtgtgagcaggatggggccctgccctcccgtgggagttgtggactcgagcccaggggctgcccgtcacagcggtgtcccaggtccctgccatccgattttacctgggatgtcttctctggagtttggaattgcttgaggaaccctgcgtgtgcttgga

SEQ ID NO: 140 - DNA, 1053 bp, Artificial sequence
  DNA replication origin
atggacacagaggtctttcccctcagcccacagtgggagagggagacgccagctcacctcagagtaggaaaccaggaaaaagcgccaagcccttcccaggcccctgaaaccagggagcaggccccacacagccagtccaaggagctggaaacttctgacaggctgctgtgggcccaggaagcagggccttgcgcgaacaaggggcctcctctctcctcccggccccgctctgggtgcggagggcctggcacgcacctgtctctggccacctgctcccgaggactccccaagccgtctgggccgctggggcttccattcctgcaacgtcagctggtctcacagtgccacagctggggagcctggggccggtggggccacaggagggccgtgacccccttagacctgaggactctgagctgggacagtcagccagggagagggtggaagagtctggggtgacccaggccgcgggggcagccctgctgcaggctggactgatggaggcctgccgggaacagggtgtgtgctgagccctgcggggaggagatctgggcccagtcagtgctgggcgtctgtgatgccacaaggttgcaggagcccctgcctgcgtctgcaccgaagagcgccgggcacagggaactgggctggcatcctggggctgctggacggggcgtcttccctcgcagccctggaggccacgctcctgactctgggtagagcccttccttgcctggtggggtgggggtggagggtcctcaatccttggcctgcagaggcatcgcctgggtgtcagtctctagccacacagtggctttttcccaggtcttttctggtaaggacaccagttccgtgggagtaaggccacctcaggaccttgccttaacgcaattccacctgcagagacccgacttccagacaaggtcagtttgtagctgctgggttagggcttggaatatcttttagggggcacagttcagtcccgtaacaggagccttgacagccaggatcccagccagacacaggtgggcaggtgggaacctggaggcctcaggg

SEQ ID NO: 141 - DNA, 1508 bp, Artificial sequence
  DNA replication origin
gggggctgggcaaaccccgtctccgcagggaagcgtctccagaccccttgggcccccagcccgcacgcccgggcctctccctgccacacaggagtgtgcaaaacacatctctgcagcaggaggcaccacggccggactcaggccctcgggacgggtgctttttaggctgagttcagctgttcctgggtcggaaggtctgggtgaggcggttgagggtgaggcaccgtgaccgtcgccccggcggggacttgggcctggctctgcccatccctcactctctctccggtctgaggtgggcggtggcgggtgcggggcccctgggggaggctggggccgctgagaccttcggatgccaccggagggagggcctggggcttgggtttccttctgctccagtcaccgggctgggtccggccctgggtcagcggggaggggagctggactgcggccctcctgggctcctgtcctgcctgcccggccggccctggaagatctgcggccacctgtgtttactctggaggatgcagctgaggaggtcctggcagggccacactcgtaacccctggcttctcagctgtgggcgcggtcttgcaccctggctagctgagttgaggggactttgcggcatctgtggccccgaccagggcagagtacccgagccccagcccaaggagaggcctcgctgggcaacgcgaccaggacagaggccgaggctggatgggtggggagcgcctggggccttccagatcctccttcctgcccctcccgcctccacctcccttcagccccttggctgcagccagctctcctgggatcactcatccactgtctacctccactgggaacctcggtgagggaggctcagatccttggggagggaggagggggtgggccccagagagaccttccgaggaggacagggtggggccagatcttggttcttctcctcgggtggttctgacctggccagcgtggtgcagtgtggccatcagggcagggctagcggcaccagcatctagcagggagggtgcggagggcagggaggccagagaaggaggggctgtgagtgctgggggtggggacccaccctggccctgagggaaaggagtgtgtacacccacagaggccaacttgatggggtggcctgggtttcagctcccaaggctgtgggaaggtcctctgggtgggggctgggaggagacctcaaggggaggcccaggggtttgggctgtgccccctcaaaagcctcctctttgaggaccccagagattggccaggcctgtgggatggacacagaggtctttcccctcagcccacagtgggagagggagacgccagctcacctcagagtaggaaaccaggaaaaagcgccaagcccttcccaggcccctgaaaccagggagcaggccccacacagccagtccaaggagctggaaacttctgacaggctgctgtgggcccaggaagcagggccttgcgcgaacaaggggcctcctctctcctcccgg

SEQ ID NO: 142 - DNA, 1293 bp, Artificial sequence
  DNA replication origin
agcgtggcctgcaccttcctggttggcgtgagccctgggctgcggactcccctgtttgcttccagttttcagtggctcctccccaaactgacgggccaaccctgggcaagaacgggctgggggcaggcacccaggatcaggcagcacccagccaggcctttctgaacaccgcctggggcctcaccatccgggaatgggggccctctaggttcttcagcagcagccagtcccccaccctacccagtcccggaggtaggagctgtgatgacagatggacatgccagaaatgggacccagggccgcgtagagcaagatggtgatgagagacaaagagacgtggagtggtggggcggggggccggggctgaatgagttgggggccagggcccgggtgaatgggggcggcgggggctggggcagggaccacggccggggtgaatgaggtgggggatgggggctggtcgggggtggctgggggctggcatgggggccagggtgaatggggggggctggggccagggtgaatggggggcgtggggatgtcctggtgctggcaccacctccctggcctctgcctcctggtttctgccccagtgggaggtgatcagccacttagccgcaattcccctggaatgtgccatctctagccccctctgggcacccaggagcaaaggaatggacaggtcggggtggggtgggcggcctcacaggagggtccaggctcccagcccacccagccaaggctccatcctctggcccagcccagctgcaccccttcattctctctcagcctcacctcctgggctggacccacactgcaatgtttgccatagaagggaccctggactcttgacgagggtgggagatgcctgtcactcacccagccggagcgtggggtccccggggcaggtgcaggccagccagagctgctgttgcttggggtctgggctggctgggggacctggggagcccagggaaacggatctcttcaggcctgtgccccccggtttgggagctggggtattgagtgtcccaagcgtctggcagcttcgtggaccctggcaggagcaaagccagagcagccggctacgtgccggacggcctcaacccgacccctgacccctgacccttgaccccatgccctgagcggcagggagctgccggcttctccgtgacctccaccagggctgacttcccagaaccgcaggccgaccctgctgcctggccggggctgggggcatcggacactcctgccgtgggctccctgccatcctgggaggggccatgcccggtg

SEQ ID NO: 143 - DNA, 1257 bp, Artificial sequence
  DNA replication origin
ccctgcgggctcaggtgcgcccagaccgtgccgtgcccggggcacccaggtggagcagggctggaaccagcaggcttctcctcgcctgctctcggtatggccgcactctaatgaccagggcctctcgggggccttaggggccagaactgccccatggagggtggggtgggccccatatgtgaccatcatgctgctgctccctggcaggtcctgtggatttgggccccacccccaccccattttggctctggcaaacccacaccaaagagtgtaaactggcctcaggacgtccaggcctctgctgagctgcggagatgccatctctggttggcatccagagcccttagtcgctggtggggttggggaggttggaagaggccagagcccacggctgttacccctcccctgggacctggagctgccggggctggcacagaaggggccctccccaaggcttgctgggcagtgaggcgggacagcccagccctgcgacgaggtgtgtgggcaggcgccaatcggcacgaggtgggcttgggtggtgacccgtccccacctctctccctgggccccccagagtggcgtcaggggctggggctgtctggaggggcctctgcttcacttgccaaggctgtggccccggcttaggggctcctctctgccctcagcaccccttctgtgggcacggcctgccccctggggcctggatctggaacggggggtctcccttctgcagcccctgccctgcttggccacagcactcaagagtgctcccttccagagagtcgggcagctgtgcatctgtacagggggaaccaaggttgtgccgggccctcctggagctgggtcagcggggacagcagtgtgggggccctgaggaggcagaggcaggagcgtggcctgcaccttcctggttggcgtgagccctgggctgcggactcccctgtttgcttccagttttcagtggctcctccccaaactgacgggccaaccctgggcaagaacgggctgggggcaggcacccaggatcaggcagcacccagccaggcctttctgaacaccgcctggggcctcaccatccgggaatgggggccctctaggttcttcagcagcagccagtcccccaccctacccagtcccggaggtaggagctgtgatgacagatggacatgccagaaatgggacccagggccgcgtagagcaagatggtgatgagagacaaagagacgtggagtggtggggcggggggccggggctgaa

SEQ ID NO: 144 - DNA, 1256 bp, Artificial sequence
  DNA replication origin
tccctgctgcacgcctggcctcaggcgccccctccccagccccagcagccactcctgggcctgtcctgggatgtgtgccctgaagcccctccccaccagcccccaccccgccccccatgcaccaccctccccagggctctctccgcagaccacagtgagctgcagggcaaggcccggctgcgggcccgggacgtggtgtgtgttctcatctgtattgagtccctgtgccagcgccacacgtgagtgacctcagcccccgctccaggcggcagcccccggaccacccttggaggggctcacaggccacaggggtctctgggcactggagcaggtcttggccccctggacctgcaacgcctccctcttgccctgtggggctgtgttcaggtgcctggaggccgtctcaggcctggagagcaacagcagggtcttcacgctacaggtgcaggggctgctgcagctgcaggtgagtccgggccgggtgtgagcgggagggctcgggtgcactcgggctgggccgggtgtgagctcggtgcactcagggcgcagacctctggggcctcggcacctcctagcgcagggcaggtgggcagacgttggccaccgagtggctgggctgtggctgcggttgtgacgtccccgtgcttcttacaggctggacagtacgcttctgtgtttgtggacaatggctccggggccgtcctcaccatccaggcgggctccagcttctccgggctgctcctgggcacgtgagggcgcccaggggggctggcgaggagctgccgccggatcccggggaccctcctactgatgcccgtggtcaccacaataaagagccctccaccctccccactgccttcgagtgctgcctggatgtttcactgggggtggaagccaggctgccgaggtcggcgggagatgggtgggggcagaagggtgctgttcacaggggagcccggtagcttggggtatgggccgtagagcctccctcggggccgacttacctggcccgggattatggtgatggcaagaggctgggcgctgccctggtagcccctgcaggggccacgtcgaccctgaggacaaggaccactgtccgtgccggccccactcagctctgcccacggcctgtccagccttgggggagcagcaggccgtggggcactggaagccccagaggttggagagcagcactgttctgggccctcgggaggcctgcgtcctgtggggggctctgtgcagggcaagaggacgtg

SEQ ID NO: 145 - DNA, 910 bp, Artificial sequence
  DNA replication origin
tgtccccagggtcctccaccaccttcacgagcggacacggggccgggaggcttccacagtgctctctggagatgccagtcagtgcctgagagcccggagggcgagggggcagccggggtccctggtgggttcccaagcgtcatccccatcccagcctggtctcccgtggctctgcctgtggatgtggcctggggctggggttgacgctggggtctcggcgtggctaccttcgtgtctggcaagaggggagggtctggagtgttccgagctgtccatcagggccggcatgttgaccttgggccactgttagcctcggccaggaccagcggctggagggtcttccagccccacctggccaccccattcctccagccactgagcccaaggggcctgtcgccatgatctggcctcacctttcccccgagtggggccccagcgaggccggccagcacccccaggaccctgggccggggccgtgagtcagggcggggcacccgggggagcctgggtgaggaggtcgtgggaaggggctggggctttggctggctggtagctgccctccggtggctggctgcagaggctgctgtgaggggagccaggttgagttcagctggcagggagggcgaggaggtaggctgctgtcttcacggttcccagaatgaggtggacctttggggaagcaatgggggcagggtggggtctggggacgggaggcaagaagcagcggccggggtcagtgggggtctccgccccgtctccgtccctggccgtcggggcgcccgggcggctggctgatcgtccgagtgtgagcccccaccctggagcctgcgaggtctggggaggaggaggcgaggggaggatttactgggcggcggagtgaggaggccagagaggacgggggctgggagcg

SEQ ID NO: 146 - DNA, 2001 bp, Artificial sequence
  DNA replication origin
ccctcggtccagcctcccagggctgcccgtgtcccggcctgtagggcggagtgggaggcccagcctccctcggtccagcctcccagggctgcccgtgtcccggcctgtagggcggagtgggaggcccagcctccctcggtccagcctcccagggctgcccgtgtcccggcctgtagggcggagtgggaggcccagcctccctcggtccagcctcccagggctgcccgtgtcccggcctgtagggcggagtgggaggcccagcctccctcggtccagcctcccagggctgcccgtgtcccggcctgtagggcggagtgggaggcccagcctccctcgctccagcctcccagggctgcccgtgtcccggcctgtagggcggagtgggaggcccagcctccctcgctccagcctcccagggctgcccgtgtcccggcctgtagggcggagtgggaggcccagcctccctcgctccagcctcccagggctgcccgttttcctgcctgtagggtagagtgggaagtccagcctccctcggtccagcctcccagggctgcccgttttcctgcctgtagggcagagtgggaggcccagcctccctcggtctagcctcccagggctgcccgtgtcccggcctgtagggcggagtgggaggcccagcctcccttgctccagcctcccagggctgcctgtgtcccggcctgtagggcagagtgggaggcccagcctccctcggtccagcctcccagggctgcctgttttcctgcctgtagggtagattgggaagtccagcctcccttggtccagcctcccagggctgcccgttttcctgcctgtagggcagagtgggaggcccagcctccctcggtctagcctcccagggctgcctgtgtcccggcctatagggcagagtgggaggcccagcctccctcggtccagcctcccagggctgcctgttttcctgcctgtagggtagagtgggaagtccagcctcccttggtccagcctcccagggctgcccgttttcctgcctgtagggcagagggggaggcccagcctccctcggtacagcctcccagggctgcctgtgtcccggcctgtagggtagatgggaggcccagcctccctcggtctagcctcccagggctgcccgtgtcctggcctgtagggtggagtgggaggcccagcctccctcggtccagcctcccagggctgcccattttcctgcgtgtaggcctgagtgggaagtccagcctccctcagtccagcctcccagggctgcccactttcctgcctgtaggtcagagttggagatccagcctgttctgtctagagtcacaggggagctcattgccagtgggtgacagagaaaatttggatgccctgcctgtgaggaggggtctggtagccctgggcggggggtctccttggccagggcacctgcccacccctccctttgccccaagcctggattgaggggtgttggggctgcctttcccgacccatgctagatgcaggccacatccagggctcacctgcgggggtccagcagggctggtactgtgtgggcgctgtgccgtgtccccagggtcctccaccaccttcacgagcggacacggggccgggaggcttccacagtgctctctggagatgccagtcagtgcctgagagcccggagggcgagggggcagccggggtccctggtgggttcccaagcgtcatccccatcccagcctggtctcccgtggctctgcctgtggatgtggcctggggctggggttgacgctggggtctcggcgtggctaccttcgtgtctggcaagaggggagggtctggagtgttccgagctgtccatcagggccggcatgttgaccttgggccactgttagcctcggccaggaccagcggctggagggtcttccagccccacctggccaccccattcctccagccactgagcccaaggggcctgtcgccatgatctggcctcacctttcccccgag

SEQ ID NO: 147 - DNA, 1536 bp, Artificial sequence
  DNA replication origin
agcggggagcccggtgctttggtggcttgtttttccctgtctttaataggaatcaagtgtgatatcatgaattgatggggggaagattaagaaggctttgtaagactataagttagtttgctgtgaagagtgtgcttattaaatgctttctgcaacacgaagactgcagcccttgactttgaaatcatctgtttttagaatcttgaaagaattgaaattagttttctggctgattcccttcccttccttcctagaaaagacaactggcagtgcagagtttagcatttaatttgaaagataaagtcttttgtgaattatttcctgaagtcgtggaggtaagaaagacggaagtgggtttcgccttcccctgcgttaaaacacttgagtttcacctctttccaaagagtaaaatctgtgtcctgaagctgcagacctccccaggggatggctcctctcccccaggagccccgaggcaggggaggcagaaagcctgggctctggggggtggcctgcggacagctgtgctggtgggccgggggctgggcctgtcccacaggggcgtggagctcgtggttctgagcagccagctgggtggtgtctggggatagctgggaggcacagcggctgccatgtgggactgggactggagtgctccctggtcttggcctctgtggctcagccttgctctggtctgcctgagtgcaggggccaaggggcacagggccagtgaggccggccacgctcgggccctcacctgtgagatggggtcggaatttgacacagcctagggcttggttcttggtggtggaccgtggactcctgagaacgggagtgctggtcctgaaaggcgctggttggagaccagctgcttttctcgctgtttttctcttaggagattaaacaaaaacagaaagcacaagacgaactcagtagcagaccccagactctccccttgccagacgtggttccagacggggagacgcacctcgtccagaacgggattcagctgctcaacgggcatgcgccgggggccgtcccaaacctcgcagggctccagcaggccaaccggcaccacggactcctgggtggcgccctggcgaacttgtttgtgatagttgggtttgcagcctttgcttacacggtcaagtacgtgctgaggagcatcgcgcaggagtgaggcccaggcgccgagacccaaggcgccactgagggcaccgcgcaccagagcgtgacctcggcaggctggacacactgcccagcacaggcagacccaccaggctcctaggtttagcttttaaaaacctgaaaggggaagcaaaaaccaaaatgtgtgactgggctttggaggagactggagcctcagccctgtcctggccacgggccgctggggctggtgtgggtgggccttgtgtgctggatttgtagcttatcttccgtgttgtctttggacctgttttagtaaacccgtttttcattttattagatgtggtcacttagaaatgcaaacttgctgccgaccgcgggctgctcctgcgt

SEQ ID NO: 148 - DNA, 1080 bp, Artificial sequence
  DNA replication origin
cggacacgtggaacccggcctggtctgtctccaccatcctgactgggctcctgagcttcatggtggagaagggccccaccctgggcagtatagagacgtcggacttcacggtaagttttagagcctctccctggtgggccgtcagccttgtgtctggggggctgttctctgttcctgagttgcagctgcctttttttttttttttttttttttcttgagacggagtctcgctgtgtctccaggctggagtgcagtggcgcaatctcggctcactgcaagctccgccccccggggttcacgccattctcctgtctcagcctcccaagtagctgggactacaggcgcccgccaccacgcccggctaatttttttttttgtatttttagtagagacggggtttcaccgtgttaaccaggatgtcttgatttcctgacctcgtgatccgcccgcctgggcctcccaaagtgctgggattacaggcgtgagccaccgcgcccggccgcagctgcctttcttctcagtaggcggggctgggtggagttcccaccttgtcccaggcactgtcgtggagactgctttgctctgtggcctcgtgttccccgctgcctctcggtcttgcttttatccacatccagcctcatccacacccgccaggggctcctccttgggatcttggggtgggccaaggcggtaccagttgcacagacggcccgggccttgtcagcggggagcccggtgctttggtggcttgtttttccctgtctttaataggaatcaagtgtgatatcatgaattgatggggggaagattaagaaggctttgtaagactataagttagtttgctgtgaagagtgtgcttattaaatgctttctgcaacacgaagactgcagcccttgactttgaaatcatctgtttttagaatcttgaaagaattgaaattagttttctggctgattcccttcccttccttcctagaaaagacaactggcagtgcagagtttagcatttaatttgaaagataaagtcttttgtgaattatttcctgaagtcgtggaggtaagaaagacggaagtgggttt

SEQ ID NO: 149 - DNA, 1066 bp, Artificial sequence
  DNA replication origin
ccaggaggatgccaggactgagaggagagcaccctgtgcttgggtgggcgaagaggggctggctggagtgggaagagggggtggggagtggaggagctagaccagggtggggctttggagaggcggagccaggagtggccccttataaggctatgccgttgggtggtcagaaaccagtggtatggctgggggaggtggctcacgcctataatcccagcaccttgggaggccgaggcgggcggatcatgaggtcaggagatagagaccatcctggctaacacggtgaaaccccgtctctactaaaattaaaaaaaaaattagctgggtgtggtggcgcgcgcctatagtcccaactactcaggaggctgaggcagaataatcacttgaacctgggaggcagaggttgcagtgagccaggatcgagccactgcactccagcctgggcgacagagcaagattctgtctcaaaaaaaaaacaaaacaaaacaaaaaaaagtgggaacgtgtgggtgaccctgaggtcgatcttcaggtcaggtttggtagagcagggagaaagcctggtcaggtggatttgagagcttgggaggggaggacgtgtgaagagccatgaatgaggcccgaatccaggggatcaggtcagggcagggggcatttggcagaacttggaggggtgtgtggtggagagtggtgtgtttgaggtgcgttttgctggcctttgggtgcagttgggtcggggaagcaaacggtgctggagagtcgctgggtctggacctgagtcctgagaggggcggcctcagctgggcctggagctcctgctgtgctgggggtgttgcaaggaggccctgcatgcctcttccgacccctctgctcctggtgggggtgtgtgtggacactccagggagaggggtgtgcagtagctgtggttgtctcgagctcccggggcagtgggggtctgggtccagtcgggtggtgggtacaggtggggtggggaggggcattgggtctgggtggtcatgacagtgggtggtagtggagagcaaggtcagtgggggactgagcctgg

SEQ ID NO: 150 - DNA, 1028 bp, Artificial sequence
  DNA replication origin
acacacacgtgtcctgatggcatgcagacacgcacatacatgcgtcctgatggcatacacacacacatgcacacaagtgcgtcctgatggcatgcacacactcagacacgcacacacgcgtcctgatggcatgcacacacgtgcgtcctgatggcatgcacacacatgcacacacgtgcgtcctgatggcatgcacacacacatgcacacacgtgcgtcctgatggcatgcacacactcagacacgcacacacgcgtcctgatggcatgcacacacacgtcaacgcatgcaggtgtggccagggagtcctggcttgtgcacttgtggtcctctggttggggttggccccaagctctgaatttccaaccaactccaggtgcagcctgggcagccagcgtgtgggcctcgggctggggcggggctgccatgaggcagctcatagagggcctgggagcagggccaggggaagccacacagggtgtgcggctctagattgatttgaaggtggggccaacaggatttgctcatggagtgggtgtgataccaggaggatggagttgccaagttgccatttggtggaagtggccggatttctgtcctggatgggggcgtctgggcgctgtgctgtggacggtcagtgtagtggcctggagtgtgcacagggcccgtgggtgcagggtgggggaagtggctgagcagccattgcagggctcctgatgggaggccgtgaaactagggcgaccccaggaggatgccaggactgagaggagagcaccctgtgcttgggtgggcgaagaggggctggctggagtgggaagagggggtggggagtggaggagctagaccagggtggggctttggagaggcggagccaggagtggccccttataaggctatgccgttgggtggtcagaaaccagtggtatggctgggggaggtggctcacgcctataatcccagcaccttgggaggccgaggcgggcggatcatgaggtcaggagatagagaccatcctggctaacacggtg

SEQ ID NO: 151 - DNA, 847 bp, Artificial sequence
  DNA replication origin
tgacagtggcacttgctcatgccgtccctccactgttgactccacccctgttcctgcgtgtcctcgaatgccagccctgagcagagtgcagagaggaagctgcagcgtccccctgcttggccatgtgtgtcttcaggggaggcagacagtgaagccgtgttttcatttaggatctatgggagggagagcagcccctagtgatcaagagagagacacgagggaaacacgtgcgggaggccacacatgcagggaggccagggaaagtggagagagactggaacccccaggccgaccctttattgggtccagggcgttctgcacacaggtttcccttggggagttttaactggtgggtttaatacaagcgggcacgagccccgtggggccacgctgtgactgtgggggactccgtggtgtggctgcacagtccatgtggggcgtggggtccgtggggacatggggggtggtcaccaggggacagtgcgtagggcgggcgtctgggtggatcagctcgaggaagggggatgtgaactgaaaattgttgcgggtggcagccccgcttctggtcagagaaagtccagcctagattcagagtggatgccgaggcggcctaagatgatgagcgttcctgcaagatgtaaagcactcgaggggcaggggtgctgcatcctacacagggtgggtctagagcagaagagcccgtggcgatttggggactcgcattggggcagggctgtgcacagggagcccaagggaggacagaggccagtgctcctcaaacctgatggcatgcacacgcatacacacgcatgcacgtgtcctgatggcacgcacacacatgcccacg

SEQ ID NO: 152 - DNA, 882 bp, Artificial sequence
  DNA replication origin
gggctgctctgtcttgggagctgggaatgaggagggctggctggggctgcctctgtcaaggggctggcaggcaagaggacgtgttgatgtttatttgcttggctgtggagtatcctgaagggtggatgggggagtgggtgatcggaacagtatgttgacttatgggtacaggagggccttgaaatgggaagagactagaagctcagaccttctggacccacggggggagttgggaggctcctgtggtgttgatgggagaagtgatgacattttgcgttagagaagataatgagagtgggaaggctgtggtgaacaaggattgcaagagtcagggaccccagaacaagaagcagggttgggggtggtgctgaggccacacatttgggagcacgcgttgggtgccctggctgagctctgcactccaggccctgggtgtgtggggtgagcagccaagccctggccattgacatcctcaggttgggagcagacactaaacaggctgctggtggtggttctctgaggaggaataaaccggttagagaggccaagtctgtagatctcttgcaggtggagactgaaaggaggtggaatgtgtggctgtctacaggtgtatgagttggttctcatgctgctataaagatgtacccgagactcagtaatttataaagaaaaggggtttaatggactcacagttccgtgtggccagggaggcctcaggaaacttacaatcatggcggaaggggaagaggcatgtctcacatggcagcaggctagagagagcgggcaagagcagggaacactgccttataaaccatcagatctcctgagaactcgctttcactggaacggcttggggaaactgctcccatgatccagtcacct

SEQ ID NO: 153 - DNA, 1069 bp, Artificial sequence
  DNA replication origin
ctgtgtgaagctcaggaagagtggctggggaaacagcagttgaatcgtgaacatgattttaaaagcctctccaagcaggtatgggagagaagcttgtttgtgactcattggatggaatctattttatttttgcgcggctgtccatgaactttcgttaaacctgcggcctggccacttagctaagcccagacccacctgcacttgaattgtccagtgaattattttgtatatggcagagtgttagcttcagggtgagtgtcgaaaggacagcctgtgtggcggtgctgcttggggtcatcactgtggccatcaccaggtgttggcctgaggggagatccctggcccattggcttctttagccaggagctggggatgccactgtgtggaagcacttccttcccaggcaggactgtaaccccatccctggtgggggccctcctggggaggcactccttaggcagaggaacccgctggggcccagaagggccctgcgttgtgtgtggggtcacatggaggccagtgatgtgtgacagagtgggaggcatttggcagggaaatcagggaggcctctgaaggcggtggctctggctatgccgggaagggcctggggagtttccagtacaggctaggctgggaagcagctgtgagaaggagtgtgtcggtcaggactttggagtgggacctgggccgtgctgggtcttgggagttgggaacgaggagggctggctggggctgctctgtcttgggagctgggaatgaggagggctggctggggctgcctctgtcaaggggctggcaggcaagaggacgtgttgatgtttatttgcttggctgtggagtatcctgaagggtggatgggggagtgggtgatcggaacagtatgttgacttatgggtacaggagggccttgaaatgggaagagactagaagctcagaccttctggacccacggggggagttgggaggctcctgtggtgttgatgggagaagtgatgacattttgcgttagagaagataatgagagtgggaaggctgtggtgaacaaggattgcaagagtcagggacccca

SEQ ID NO: 154 - DNA, 1670 bp, Artificial sequence
  DNA replication origin
gcggcggcgctgcggcgggttcggtgggcccaatcccggggcggtgcggctgtttcgggcgcgggccccgcttttccgcaccctgctccggcctcgactacggcgagcctgagcgcggcggcggcccacgcgcagcgacagggagaggtgagcgcgctcgcaggcctgcgccgggtcctcgggcccgctcgtcccccctgccggagccggccacagcggcggcccggggctgctggggaccctgcgcgacgcttctccgttcgcgcccgccgcccgcggggccccggcccgagcctgcctgcgcggaacccgaggtcggttacggcgggctcccggagctccgggtcagggtcatgtcggggacttgaccactcggccgggtttcccgtcagctgggacacttgcagctgccccaggacgggcagcctcgatcctggttcgtcagtggatcacgggagtctgtgtcgggggagggctgccgtcgagcccgccgtcgcctcgcccctgaactgttagactccagactgccccgtaaaccccgagagaaacgagcgtgcccgggactgtgcttagggccagcgtttctgggaaacccgggcggtgacagtgggagaccaccgccggccggcgagtgagacacgagcccggaacaagtctctaagcggcgccgggcctcgccatccacacctgccagttccctgcatcctttcagcccctggccaggtgtcacctcctggcgtccttttcagtgcctgccacttagtgcgtgtgtatttaactctagtccggttgccatcctcttgccagacccagataggaagcggctgaaaggtcgggcctcagcccggtgggaggtgggcagcgaagagtgtacagcgggcttggctggggcaggtcggtggccccgcgccctgctccaggggaaccagactgtgtaatctggcttccgaagaaaggatcgtgagtatctcgcttagtctagcacctgagcctagggcgtggttgggtctgggtgcccggaacttgcagtccgtcatctgcacggcctggcaccgctgacctccttagcagttccactctcggcagggatgtgcgtgagtgacaggcaggtgagccaggcaggtaggtgagtgcttgagtgacaggcaggtgagccaggcaggtaggtgcgtggatgagtgacaggcaggtgacccaggcaggtgcatgtgtgagtcgcaggtgagtgtcccatttccatcggcccgggcttccgtccagcctccggagcagtctggtggagaaggcagagacttccctggcagtcctggacctgggtgtgccatgcgcctggccgatgggtcaggccaaggtttcctgccacatcccctaagcaggaaagagctgtccagacaaagagggacgggtgagggacgctgggcagccactgcctcagcacctgggcacagctgccctcggtgattcacgctgctttaatgcagtttctgtgtgtgaacatttttttttcctgtgcctttttgttttaaaatcgccaactctttctctcagcaggatgatatgcttggtgtcctttgtctgtggggatgtttgaagggaacccgaggcacatatgcttcaaactctgttctcacagtttgcttcctttgtggaattttttttttttgatacag

SEQ ID NO: 155 - DNA, 1190 bp, Artificial sequence
  DNA replication origin
ccgggcaccgttagtgggcgcgagagccccagaccccgaagccgcgcgcttccctccccatgtgccacggcccagggcggcaggcccggctgagggcgaccccggtggagaaagaaccccgaccctcccgcctcccggctcccgccttgtcctccgctcccacgccccacccggcccttaggggaggcgcggcgcggcccgggcatggagcgtcccgggcccctggaggctcagtggagggttgggctccagggagctcagagctctctcgttcagggacccgagagtgacacgcgtggcatctctttgcaacccacgtccgcgccgcagcaccctcccctgcaggtgcctgcccagccccgggatgcccctgacctccccttggacagactgcagaaagcgcggggcgctgcgtcctctccacctctctctgaccccagacacattgggagagagcggtaggtggcggggcgctggggtgggacgctgggggcaggcgcgcagcccaccgcctccctgagaggccgctgaggacagcggggagctgagggtggtcccctggtgggggatcaggaggtggacctcgccacctggctgcctgtggccctctcctttgccccaaccctgactgcctctcaggaacaaccacaggtcagcaaggtggctgaatattgagggtcagtcccgctgtggctacgggcagagggcaggctgtgtccatgctcagccctgactctggccctctgggacaccttggtgggtctgagacgttgctgcaggccgtggggcagaagccaggaggagtgtccacgcagcctcagcccgtgggaatccagcctgcctccattactgccgtcaccggctccaccttcggagaacatctcagcatccagcctccttcctctgcctcctctcaggcctctgccgttcccatgcagggcaggccaaactgttttcacagcatggaaagttatgtgagggaagccacaccggccgcagatacaggcaccagcacatccactcgcatgcacactcacggctgtggcccgcggcagatggaggcccgctctgccttgtctgtccctcagtagtgtgcgatgacagcacacctgtgggggccctgcagctgggaagactgcagcgaggctcaactcagaggcccctgctcaggagcatggctgagtcacacc

SEQ ID NO: 156 - DNA, 864 bp, Artificial sequence
  DNA replication origin
ctccctttgggcccatgcctctgctctctcccaggaaagacggccaggccccattgaccgagcatggctgtgagctcacctccttgggccgctgaggtggccgggccacaggtaacgagggagcggtgttgtcttctgtgacagcactgccctggagatggcaggcgcctggcatctgtgggaccccagccaggacctcctatcccagagccccgtttcctcccctggggtgagcgtcccccactcagggtcactctgagtcagccctgggacggttctggtgcaatagacaggcagcccaaggtcgggattcccgtgggcatgggcaggccaggggtggcctggggtccctctggggtcctgcacccaggcaggtgaacagcctcccaggcagagccccctcggccccgggcatcaactgcactgtccagtggagcctccgcagaacaggcactaaggtggcaccaaggtgcccccggctgctggcctgggtgggtgctgagggtgggagtgtggagcttggggtctggccggtgtcccctgctgggaggagtaaggtgcgtgtgggctgccttctaggttccctcataaaccaaaaataaaattataagccctgaactgtctggatggacccctggtcttagccatgggcattccaaagttaacctgaaaaactagctcagctgtgatgggaagggagtcggacgcacctcatgcctcctccctgctggaattcaggcacagcatcagcatcacctcaggccttgagtctgatgagaagcatttatagttgattctctctgaggcttgtgacctggtggcttcatctgcgataagaccttcatctgcacaacgccatactgt

SEQ ID NO: 157 - DNA, 882 bp, Artificial sequence
  DNA replication origin
gggggggttgggtgaggggggtggggtcggggggggggttgagtgaggggggtgggggggttgggggggttgggtgagggggttgggggggttggatgagggggttggggttggggggccccacctcaaggtaccaaggtggtggttggggttggggggacccgcctcgaggtaccgtggggggattggggtggggggtaggggtgggggggtggggctggcgggggggctcccaccttgaggtaccaggggctgggttggggggtctctttccgatgcctggccccgtgtgccatcaggaacaggattgcatggtggcaatggggcaggtcatccctgagtgcctccttatcctgaagaaggctgtgtcccattgcgggtacatagtgtgtgctggaccactgggggtgccgagcgtgtgctggaccacggggggtgcacagcgtgtgctggaccacggggggtgccgagcgtgtgctggaccacggggggtgccgagcgtgtgctggaccactgggggtgcacagtgtgtgctggaccattgggggtgcatagcgtgtgctggacagaccccgggagaacactgcagatactgcgtgtccaggcgctgtgcatcccgtgggttggccacatggcacgacgcagatccagacagggtggagaggccagtgtagtcctgtctcacacacacgcgcacatgcagggtggggtccggctcctctctgaccaggggtccaggccctgcctcactcagaagccctggggaccctgactggccctccagaccccaatccacagctcccgcttctgctggcctggcagcccccactagggggatggtgctgccctgtctatgcgccaggtggagacgaggagtgggga

SEQ ID NO: 158 - DNA, 3485 bp, Artificial sequence
  DNA replication origin
ccctggaagcatcacccgtgggagatgaggcccgctgggctccgggtcatctgacgtgccgcctgcaggcgggggcatctgactggcctctggcttgatgctggacgcccctgaggcagggctggctctgggccaggagaaccacgccctgcggagccggcggccgcctagcaccagggtgagggcagaagcatcgagcagcagctccaggagctccaggagggagaggacggaggccccaaaccacaggctgcagaggctgcccatggccgagagcagctgcggcacctgcgggtggggtgcgggtgtgaggggcgggcccaggcccccgtgccccttctgtgcagggccagccactgtcgctgcccccgctctagcccaggcagggggccaaggctcaccgagtacacgggcgcctcctccactgagcggtagttgagctcctggtagacgatgttgattttggccaggctgctcctggggcaggatagaggcatgagggcgctggcccagaccttcatgatggggaggggggctttgaggggagaggggctgtgatgcctctctggagggggagggtgcacccacctctgtctgtggctctgatgcggcagcccctgttcacctagcgtggccagagtccatccctgcagacggaaggtttgctgtggccacggctcccccatgcccccggccatcctgggtaccacgggcggatgtgggggcagagaccacggggcataggctgggtcagttccggccctgcccttgtcttgggtgggctctgtgggacctgtggggtctgcctggctgtccacacccccaccccaccactttggggactcacagctgacttggcggaaggccacctggaggtcccagtggagagcttgaatgcagactccctggaagagacagccgggtgtcacctgccacgctacctggggcaatgatccctggccgcgaccccaacacccccgtctcacctgcagggcctggggcagcgggaggtacaggggagccggtgggtctccaggtcctggtagaggcggtagaagcagtgtccttggggaggggtcagaggcatgtgtgaggctcgctgtgaccccccggctaatggctgacagagtgggaggcagcgagcaggactcaccccaggcagggtgccgggcagagctgcagtactcagcccccgccggcagagggtggaggtagtagccacaggagcaggtctccaccatcagctgctggaagcaggacaccaggcaggcctggggacaggggggatgagcagggacatgggatggagcggagacatgggggacggggcagagacacgggacggagcagggacacgggacggagcagggacacgggacggagcagagacacgggacggagcagagacacgggggacggagcagagacacgggacggagcagagacacgggacggagcagagacacgggacggagcagagacacgggacggagcagggacacgggacggagcagagacacgggacggagcagggacacgggacggagcagggacacgggacggagcagacacgggggacggagcagagacacgggacggagcagagacacgggggacggggcagagacacgggacggagcagagacacgggacggagcagagacacgggacggagcagagactcgggggacggacacgggacggggcagagacacgggggacggagcagagacacgggacggagcagggacacgggggacggagcagagacacgggacggagcagagacacgggggacggagcagagacacgggggacggagcagggacacgggacggagcagagacacgggacggagcagagactcgggggacggagcagggacacgggacggagcagagacacgggacggagcagagacacgggacggagcagagacacgggacggagcagagacacgggacggagcagggacacgggacggagcagggacacgggacggagcagggacacgggacggagcagacacgggggacggagcagagacacgggacggagcagagacacgggggacggggcagagacacgggacggagcagagacacgggggacggagcagagacacgggacggagcagagacacgggggacggagcagagacacgggacggagcagagacacgggggacggagcagagacacgggggacggagcagggacacgggacggggcagagacacgggacggggcagggacacgggacggagcagggacacgggggacggagcagagacacgggacggagcagagacacgggggacggagcagagacacgggacggagcagagacacgggggacggagcagagacacgggggacggagcagggacacgggacggggcagagacacgggacggagcagggacacgggacggagcagggacacgggggacggagcagagactcgggggacggagcagagacacgggacggagcagagactcgggggacggagcagggacacgggacggagcagagacacgggacggagcagagacacgggacggagcagagacacgggacggagcagagactcgggggacggaacagggacacgggggacggagcagagacacgggacggagcagggacacgggacggagcagagacacgggacggagcagagacacgggacggagcagagacacgggacggagcagagactcgggggacggaacagggacacgggggacggagcagagacacgggacggagcagggacacgggacggagcagagacacgggacggagcagagacacgggacggagcagagactcgggggacggagcagggacacgggacggagcagagacacgggacggagcagagacacgggacggggcagagacacgggggacggagcagagacacgggggacggagcagagacacgggacggagcagagacacgggggacggagcagagacacgggggacggagcagagacacgggacggagcagggacacgggacggggcagagacacgggacggagcagagacacgggacggagcagagacacgggggacggagcagagacacgggacggagcagggacacgggacggagcagggacacgggacggagcagggacacgggacggagcagggacacgggacggagcagagacacgggggacggggcagagacacgggacggagcagggacacgggacggagcagacacgggacggagcagagactcgggggacggagcagagacacgggacggagcagagacacgggacggagcagagacacgggacggagcagagacacagggaatggagcggggacacgggggatggagtgcgggcctccacggggactgccccgttcccaggccctctagtactctcccagacccctcccccgttccacccgcccacaccccctggccagcccagcctcacctgcccccgcaccc

SEQ ID NO: 159 - DNA, 1335 bp, Artificial sequence
  DNA replication origin
cagcagcaggctccccagcggcccagggtgggccagaccagcagcccaggaagcagcacacgcggccgtggggaggcaggcaccgggcatgtcggcgcctctggtcaaaccacctacactgcctggggtgggtctcaaggaggcccggggcggaggggggttcccgcgtgcacacgagtgcggctggacgtgccgacacgcggtgatgtacccatgctccgtgtgtctgtgtctgcatgtccacacgtctgatgcacctgtgtacgtgtgtcaagcctagccacctcagctgcagggaggcagaaggcaaggcaggccccacggacacacttgggctgctctgaaataaagctgttgactccacctggcggccagtgtgtgcctgtgtgcccctccagccgccccgcgcccggtgagctgaaaccctgactgcacctggcgggacgagccccagcctagcctcgccggttcgcgtccacccctcttcccaccaggaaactcagtctaggacagagaagggtagaagggcgagacaatggggaccaggggcatcaggacccagattttgtcaaacgagccccaggtccccatcaggccccttgcggcctgttggagtctgacttgagtgagtgctacccggctcaggaatgcccctcggggagggcaagggacacagacactccccggagacagagcagagcaaggcacgggagcccaggagcaggcagtgggcgcaagtgctttattcaaagcgaggggtggggggtgagacccgccagcaggggcctggggcaagaggcggggccaagctcacacagggagaggggcaagaatcaattctgttcttcagggtcacaggcagcaggcaagagagttggggggccgggtccagcgcccactgtgccctcagggagcctccccagggcagcattgcatagtgaccagccgactggccttagcctgacctgcgctgagtgggggaggccctgcctccctgccgggcacctttggggaaggggtgcgtgaaggcattggcaggccctgcaatatgagccgaaagacccctggacccaagggggaggctggtcaggggcagggctggggctcaggcgtcctcaagagtccacagagaaaagacgcaagacaaagtcagacgaggcctatagcaaacccactcggtccgctacaaagaacatgagatgagggctgcaaagtggcaaagtggctttatgcgcaggctctgggccgagtaccaggagaaggtgcctccggaggaggccgggatgcggctggggctgtctggcacggggaccttcgtggccagccacgtggcct

SEQ ID NO: 160 - DNA, 780 bp, Artificial sequence
  DNA replication origin
ccagccgactggccttagcctgacctgcgctgagtgggggaggccctgcctccctgccgggcacctttggggaaggggtgcgtgaaggcattggcaggccctgcaatatgagccgaaagacccctggacccaagggggaggctggtcaggggcagggctggggctcaggcgtcctcaagagtccacagagaaaagacgcaagacaaagtcagacgaggcctatagcaaacccactcggtccgctacaaagaacatgagatgagggctgcaaagtggcaaagtggctttatgcgcaggctctgggccgagtaccaggagaaggtgcctccggaggaggccgggatgcggctggggctgtctggcacggggaccttcgtggccagccacgtggccttgggacgcccgcgtccagccagggctgaggacccaggccagagcccctcccgcccagcacccgcgacgccagcctggatgctggggtcactaagtgaggtactcgttggttccctggatgggccaccctttctgccctgggaggaggctctggggtgtgcaggagggagccagctaacaggtcagtgttctgggcagaagtggggcacgaagtaacacaggccctgaggacacagggacacaggtgacacgggccttaaaagtggcttgtgacatgagcaacccaggcccctgaaaaggggtgacctgaagacagaggttccccaggtggggtgagggacacccgacgatgcagcacccccccagggaaacgtgaggcttcaagag

SEQ ID NO: 161 - DNA, 877 bp, Artificial sequence
  DNA replication origin
ccaggtggaggctgatgaactcctggatacacctgcggaactggagctccgtggggctgcccgccagggcgcccgggggaccaggggcagcctcggcctcgcgcatttcctccgccatgcgcgccagacggagcctacggggaggcacagcgtgagacgcccctgccctggaggccccgcccctgccctggaggccccgcccctgccctggaggccccgcccagccccgagggcccggccgcgctcacagtgtcacgatgtcagcgttggccgcctgcactgcgatggccaacgggtcccgctgctcttggtccagggcgtgctggtccgcgccccgcttcaggaacaggcaaacctggctgaggggcgaggtcggaggggcgtgtcggggcggggcggggcggggcgagtgtggtcgcgggggcgtggccggatagggcatggcggacagggcgtagccgggccggggtaggcgtggtcggggcacagggcggggcgtgggttgcgcgtctcacccggtgcggcccagcagcgtggcgtggtgcaggggcgcccggccccggctgtctctttggttcacgtccgctccgttttgcagcaggaactcacagacgatcaaggagccctggggagccggggcaactcagacggagccacggcaccggcccctctccgcgcctctgcaccctgaccccggccttgggcgcccccagccgggaccgaacgtggtccccaccgcggacaggcgacccttgtgtgggcgccacagaagatgcaaacgcgactgtgcacctgtgtcctgcgcgcagcccccgtggctcgctcacccctagcacggcctgcaccagcggcgtcttgccctcatcctccgcgtccg

SEQ ID NO: 162 - DNA, 2931 bp, Artificial sequence
  DNA replication origin
acacgtgccaccggggatggcccctgccccgcgcctgtgcacacacacacgtgccaccggggatggcccctgccccaagcccgtgcacacatgtgccaccggggatggcccctgccccgcgcctgtgcacacacacacgtgccactggggatggcccctgccccgtgcctgtgcacacacacacgtgccaccggggatggcccctgccccaagcccgtgcacacacacacgtgccaccggggatggcccctgccccgcgcctgtgcacacacacacgtgccaccggggatggcccctgccccaagcccgtgcacacatgtgccaccggggatggcccctgccccgcgcctgtgcacacacacacgtgccactggggatggcccctgccccgcgcctgtgcacacacacacgtgccactggggatggcccctgccccgtgccggtgcacacacctacgtgccactggggatggcccctgccccacacacgtgcacacgcctgtgtgtggctcctgcaagctgggtgtgtgctggtgtgcactggcatgctggcttgtgcagtgtggatgtgcatgtgtgtgcaggtaccatctgcccatgtgagggtgtgcacgtatacacgcgcgtgtgggagtgtgctcggcaccatctgcccacgtgagggtgtgcacacgtacgtgcgtgtgcgggcgtgtgctcggcgccacctgtccacgtgagggtgtgcgcgtgtgtgcgtgtgcgggcgtgtgctcgaggggggggccatctgcccacgtgagggtgtgcgcgtgtacgtgcgtgtgcgggcgtgtgctcgaggggccctggcctgcattggctcttctggctggggaggagggggcctgctggggaaaccatgctggagcccctgcgggaccgagcagctccaccccatcctccagaggctggaccgcacagcatccccgtccacgagcagcatcgactccgccaccgacactcgggagcgtggcgtgaagggcgagagtgtgctgcagcgtgtgcagagtgtggccggcaacagccagtgcggcgactgcggccagccggacccccgctgggccagcatcaacctgggcgtgctgctctgcattgagtgctccggcatccacaggtgggcccctgagggccaggctgggggtgggggttgggctggagcatccacaggtgggcccctgagggccaggccgggggtgggggttgggccggagctgggggccttgcctcccccagactcatccctacctctgctctccaggagcctgggtgtccactgctccaaggtgcggtccctgacgctggactcgtgggagcctgagctgctaaaggtgcgtgtggggctcctggaggccacgggaccccgtttgtgggggcgggagctggggtctgcaggttcgcactgatgcctgctcgccctgtctcccgctagctgatgtgtgagcttggaaacagcgctgtgaatcagatctatgaggcccagtgtgagggtgcaggcagcaggaaacccacagccagcagctcccggtgaggtggggtacagtctggatcagtcagggagccccagcctgggggcacagcctcatgttcccccctggtccaggcaggacaaggaggcctggatcaaggacaaatacgtggaaaagaagtttctgcggaaggcgcccatggcaccagccctggaggccccaagacgctggagggtgcagaagtgcctgcggccccacagctctccccgcgctcccactgcccgccgcaaggtccggcttgagcccgttctgccctgtgtggccgctctgtcctcaggtgggaggccatgccccggcagggctgggaggggcttgccttggtcggggatggactccgtcaaggggctggtggcagggctctgggggcacctcaggctccgcagactcccggcgtgacctggggttccctgccccaccccgggcctgttccacactctgaacacgcactgcccctgcagtgggcaccctggatcgtaagttccgccgagactccctcttctgtcccgacgagctggactcgctcttctcctacttcgacgcaggggccgcaggggctggccctcgcagtaagtgtggggtgggcccagccaggtggcagggcagggccaaggaggctggcctgaagggtgcctgagtgtggatggcccttgccagggaatggagcagcatctgaaggggcggggggcctcctggccacacagctggaggccaaggccctgactgtcaggggtgagctgtgcaaatgtgtgtgtgggctgtgtgcacctgggtgtgtgcacacagcgggtggcccggggtgctggggaagcagagggcgctgccagccggccctcagcctagggcccttctggagccatgctgcccgttggttgggtggagacatttcagcctgggccagccacagacggggctggggggcccactgcggggggtgccgggtaaggcggcgagcgggagggaagggcttcccaaaaggcctgggctttagggggctacccctggcacctttgagctgttatttggttttctctcctttgctcctagcctgcagctggctccccccggccctgggtgggagctggtcctgtccctaggggtggcccctggagggtgggtggagttccagccttgccccagggctctggacggagtctgggcctcccaccctcaggacccccttccctgcggacctgcaggtctgagtagcgacagtggccttgggggcagctcggatggcagctcggacgtcctggctttcggctcgggctctgtggtggacagcgtcactgaggagggtgggtggcgtcttgccctcgcccgaggcccctgcccagcccctgggcagccccgggggttgctttccctgaccgccccctccccacaga

SEQ ID NO: 163 - DNA, 1606 bp, Artificial sequence
  DNA replication origin
accagtcaccaggagttggcagccgtcactcactggctttctccccctaccccctcctgctccggccctccagacgctgctgcaggtaagtgagcacgggccctgggcgggctgtgggtcgggggagaccagatggggcggtgcctttccctcctctaccccaagggcacttcagcaccaaggacacctcccaccagtctcggctcctgctgctgatgcggctgtgaggggctggctccggccagacctccacattccccgtggggttggcggcagctgtcccttcccatcccatgtggcctggggagcaggtggccgcccctcccctctgcttccctggcctgccagatggcgggacacacagggccctcagtgactcccaggcctcctgaatggggctctgtccgcccagctggccacatgaatggggcactcaggatgcggagggtgggggcgcagcttccttcctgatcgcagcctgctggtccctgcagggctggggtggggccggcactctcgggcccccagctgtgaacgtgaggggtctgccccacgggttgcagggctgggggccttgctcaggtcaagaagtggctgtggtgaacagagggtctctcgtctgagcgtgtggtccgtgggccgtgtggcagcctcagacaaggacctcacccccacctgtgctccgggaaagcacggagggtagcagggcccctggggtgggcactgagggggcgggttccatccccccaggacttctcctacgatgagtccaaagtggagtttgacgtggacgcgcccagtggggtggtgatggagggctacctcttcaagagggccagcaacgctttcaagacatggaaccggtgagaggccttcctcaggtgggggcggggtccttaggcgggggtggggtcctcaggcgggggtggggtcctcaggtgggggcaggggtcacagcagccctgggatgggccccgcctgactccccacatccccccacccacctaggcgctggttctccattcagaacagccagctggtctaccagaagaagctcaaggtgtgccctgggcctggggctggggccctgatggctggacgccccacctgggccacagggcagactggtcagttggggttagcacagggccggggcactagtggacgccggagccggaacagtcagggagcagagagctggacacggggcttggggctcaggcagtcggcctccgggtctccaaggtgaagcaggaagtgggtggtcggggccgggtggtggctgagggcaggggccacagcggtgccgcccacaggatgccctcaccgtggtggtggatgacctccgcctgtgctctgtgaagccgtgtgaggacatcgagcggaggttctgcttcgaggtgctgtcacccaccaagtgaggaggcccagcccagggtggggcggggggcgtacctgcccaccggagctgacgcccgcccctccactgcctgcaggagctgcatgctgcaggctgactccgagaagctgcggcaagcctgggtccaggctgtgcaggccagcatcgcctccgcctaccgcgagagccctgacagttgctatagcg

SEQ ID NO: 164 - DNA, 1216 bp, Artificial sequence
  DNA replication origin
acctgaggaaggcctctcaccggttccatgtcttgaaagcgttgctggccctcttgaagaggtagccctccatcaccaccccactgggcgcgtccacgtcaaactccactttggactcatcgtaggagaagtcctggggggatggaacccgccccctcagtgcccaccccaggggccctgctaccctccgtgctttcccggagcacaggtgggggtgaggtccttgtctgaggctgccacacggcccacggaccacacgctcagacgagagaccctctgttcaccacagccacttcttgacctgagcaaggcccccagccctgcaacccgtggggcagacccctcacgttcacagctgggggcccgagagtgccggccccaccccagccctgcagggaccagcaggctgcgatcaggaaggaagctgcgcccccaccctccgcatcctgagtgccccattcatgtggccagctgggcggacagagccccattcaggaggcctgggagtcactgagggccctgtgtgtcccgccatctggcaggccagggaagcagaggggaggggcggccacctgctccccaggccacatgggatgggaagggacagctgccgccaaccccacggggaatgtggaggtctggccggagccagcccctcacagccgcatcagcagcaggagccgagactggtgggaggtgtccttggtgctgaagtgcccttggggtagaggagggaaaggcaccgccccatctggtctcccccgacccacagcccgcccagggcccgtgctcacttacctgcagcagcgtctggagggccggagcaggagggggtagggggagaaagccagtgagtgacggctgccaactcctggtgactggtggacccgtccccaactcctggtgactggtggacccgtccccaactcctggggggctctcccctatcccaaaatagccactcctgcctgcagccaacctctgcccgggatggtggccggggctgctgtcccacaggcaagcaaaggccccgcaaggagccagtgactgaggccacagaggtgaccaccgcctcaaaaggagatcccagcagcggccccacccacacgtgcccctccactgcacacatcaaagggagcagccttggtcccctagagagggtgtgggcagggcaggtgggagacaggcaggaggaaggggcggggagggtgtgccg

SEQ ID NO: 165 - DNA, 1024 bp, Artificial sequence
  DNA replication origin
tgaccaacctggagaaaccccatctctactaaaaatacaaaattaggcctggtggcgcatgcctgtaatcccagctgctagggaagctgaggcaggagaatcacttgaactcgcgaggcagagattgcggtgagccgagacagcaccattgcactccagcctgggtgacaagagcgaaactccgtctcaaaaaacaaaaaacacacaaacaacgatgtgggagactccaggatccagcaggtgccctccctgatctctcaccccacctggcacttggcctccagggatgtgcggaagttcaaggagacaaagaagcagtttgacaaggtgcgggaggacctggagctgtccctggtgaggaacgcccaggccccgaggcaccggccccacgaggtggaggaagccaccggggccctcaccctcaccaggaagtgcttccgccacctggcactggactatgtgctccaggtcagccccagaaatgggctggggggcggggaccagctgtagcgaatggaggcctcaacggccttgtacagaactggagggattttgagcaggagtgacgattcttgctttgcccatgggtgggaactccagacatggggaagcagtccaggaccatgggaggatgaggctggcccagagctgggagctgaagacgacctgggggtctcagggaaccacaagcagctcaggtggactctatggcaggtgcagggcttggggctgcctcagcctccggggctcacctgtgggctccccctctggcagatcaatgttctgcaggccaagaagaagtttgagatcctggactctgtgagtgcgtgggggctgcccctgagcacaggctgcatgttgggggctggaccgggtgtgcttgggcctcacctgtgctgcccccgcagatgctgtccttcatgcacgcccagtccagcttcttccagcagggctacagcctcctgcaccagctggacccctacatgaagaagctggcagccgaggtgagcctttgggaggggtg

SEQ ID NO: 166 - DNA, 1001 bp, Artificial sequence
  DNA replication origin
tccctgctgcagggatgggcaccccagggtggccgcccagggccaggaggcagtggggctccggctcaggctgtgatgaggcagccttggcctctgcactcatcaagggccaggtgggacagaggggcaggggtgacagccatcgcctctgagtgccaactcaggcctgggggctgctcccctgacccccttgaggccagccctgcagggtgggacccgcccctgcatctgggcctgggggcagtgccctctgctggtgaggatggggccttccatctggggctctttcgggacagaccccaaggatctctgcccgcctctgcccccagatcctgtttgaccaggcccagaggtccgtgcggcagcagctccagagctttgtcaaagagtgagtggcccccagggctgggggaagaacactgaggccacgctccctcccttggaggggaagggggtctggggcagagcagaggcaccttgggcccaggcctccaggctgtgcagcggctccacaaggcagaaggctcagaggcagacagccgggtggagtgcggggggttccacaccctgcatgtgtgggtggggtgtccagcccccacagcagagaggtccagtccacgttgggtttgggggtctggagtctggggcatggctggggtctgggctggacagatcttgagagtgaggtggggaggggctggggaggcctggagcagatgatcggggtcagcaggggtgcgggcaggcctgggataggctggtgaggaaggaggctatgcccaggagcaaagaaagggcctggagtggaggggggtggggctgggcatggtggctcacacctgtaatcccagcgtttgggaggccaaggccagagaatgccaggagtttgagaccagcctgggcaacgtaatgagacctccatctctacaaaaaaaaaaaaaaaaaaaaattagatgggcatggtggcacgtgcctatggtcccagctattcaggaggatga

SEQ ID NO: 167 - DNA, 754 bp, Artificial sequence
  DNA replication origin
tttcctgaaagccccttcccatggtggagcccctcagggaggtgcggggggaggtgaagccccgagggggctgaggctgcaggtgaccccagccagccccgttcttgctttagggcgaccattgacgaggtggagacggacgtggtggagattgaggccaaactggacaaggtgaagggcgggcctggagcgccctgtgcccggccaagcttgggatggccacatggccagactcgccctccaggccttactaagccacttacaccccccatatgtggagcatgcgtgtggtgctccaggtcctggtccctgtgtcttagcatgtgtgttccagggtgcacatgtcacatgcacacatgtggctggccctgagtctcgtcccatctgggaggggctgggctgtggtgagtccccgacccacggtggctgcccgtcccctctgctgggctggtgacacggggacagctgctgtgtgggctgagccttggtgtggctggggctggggctgagaaaggggagggggcaacaggccgtggaggggggagccgtgtccatgagccccacatgggctgagaaagagggggcaacaggccgtggagaggggagccgtgtccatgagccccacatgggctgagaaagaggagggggcaacaggccgtggagctgggagtgggcagccttatccatgagccccacatgggctggttctgctggtcctgctggccctgggtcccctgcctggctcctggtccct

SEQ ID NO: 168 - DNA, 1688 bp, Artificial sequence
  DNA replication origin
ggggcgcggcgcggcggcctcattccggggcgggcgggcgccgaggcggcgcgggcgggacgagcggtccgggccggcgcggctgccgctcggcgccgcggtcctcgtgccagtgagcgccgcggccgccgcagccatgaccgtggagttcgaggagtgcgtcaaggactccccgcgcttcaggtgcgccgcccggggccgccggggtgggcgcaggccgggggcgtcgctgtcgcctttgtgcccggcggcggggtggggaggtcagcgccgggccgggccgcggccgccggggaggggctggaggaccggcctcggacaaagcggcggccccgccccgccatgccccgggggttggaacaaaagacgctcctgccctgtgcggccgccccgggtggagggcgtgcgcgtgggcagccgtgggcacctcgggaccgtccgcccccgctctgtgtctgcacctccactgggctgagcccctcccgggccctgcagtccagctctggccagggtcgtctgggtccgtgggggcgtcggcccctggtctctgacttgatcctgtgtccagagcagcgcgtggggaacaggcagctggagccgcgtttaaggcctggggtagggtgcttggaaacgtgaagtggtttgaatgacccaggggcttggaggggtggcggccgagaagagcggcggggaaggtcaggtagggggtaggggttgtgtgcacaccgagtctgcatgttttccatcattcgtggcgtgcaggcgtgtacacctgcgtgaactacatgttcacagacgtgtgcacaagtgtgcatcggctttgcttggtggacatttggcaaacgacaatggaggcaaagaaacctctctgcatccccaagtgcgcacctgcgtgaggccccctcctctgcacgagctcgtgcggggtgcgctcttgtgaactttgcccctctgcgtgcctccctccggacaccaggccttgcacaggacgtgtggatgagctgtgccacggggctgtgcttgcttctgcatgtagcctgccgatgagtgcacgcaagcgtgtgcacacaccacctgtctgtgtgggttcacgtactgtgttagccatgtcagcaatagacacatcaccttgtacacgcgtgttccatcactaggtacacatgttgatgcgtgtctgtgcagtgtctccttgaacacacatgtatgtgtggtaccagtgtgtgcaggcatgtttgtgcatgaacatgtttgcacatgtgtgcttgattgtgtatgtgtgggtgtgcacgcgcgcgctgggtctcttgggatctgctggcaagtcagcatgtgtgtggaggcacggggagcctctgtatccctggagccctcaccaggaggctcaggagccttggagtgggaggctcagggccagccaggagagtggccgccagccctgggcagaggaactggggccatcctctgctctcccatcttctgttgctgacctgggaaaaggggttgaataacttgagcaccctaggatcctgcattgaggacccgggctgtggggaggtgtgggcatggcctccctgctgggggctggaccctggctgaagcacccaccttctccctggcccctccgtcagaagcctaatggacctcctcctccacgcagacggccctgtactgccctcttccagtcgtgt

SEQ ID NO: 169 - DNA, 1789 bp, Artificial sequence
  DNA replication origin
gtacagcactgacttgaggaataagccgtgggctggggctacacgtgtctggtgcttgcccaggggatcttggctctccagaatcgtcttcacctgggcaggtgccaaagcccccagccccacggccaccagcacagccgtcatcctccgtacctgtgacccagagccacctgtgacccagagccgcccgtgacccaccagcacagccgtcatcctccgtacctgtgacccagagccgcccgtgacccaccagcacagccgtcatcctccgtacctgtgacccagagccgcccacgacccagagccaagactgcacaggggcctgcccaccctcagccccaccccctggggacggccccagaacagagcctacctgtctatacaggaaagactggctctcaaactccaggttccagaaccgcagcttcctggaaaaatacgtacctgtaggtgtctgtggggcagtgtttgccatcctcagcctactatgtggccttggacgggagagtgacagggtgggcctaaagacgagcctggttcccactagcttggccaccaggggccctggctgatctcctgcccccagtgaggcccattggaggggcttaaaaccagagaaacaatgcttgggcaaggaggcagcaggaccctggaggctgggcaggtagcctggccatcccagaggggcttgccctgggccctcacctagggtcctggtgcagggtctgggaacgtggctggtgcgggtgccagagacccccagtcctgtacctgctgctctgccacagaagtctggggctggcagaagttcttccccccttcagggctcaccccaataggggaggttctggtcagaagctgccacctggtgggtggccctcgggacagtgctgggggcagcagaaaccaccccaccagaaccactggcaccagtgagacctttccagtagctgccaacattcttccatcaggcatggcaggggtttttcagagacaagcagccttccctgttctccgctccccagcctggggggagggcacagctggaggctggggggcgtccgggcgaatcccctccagctgtccaggtcctgaggactcccggctgcctgcctcccgcctcaccttgccttaaaactgggggaggtgctggagctaaaatcagcacgtgacttgagggcagggccacagcccaggggcccttcctcacctgctctcctcgggggtgaccaaggggctggcttggcctggggaaacggagacccggcgcagcgttcgcacggggctcggcaccgggctgccagcggactggaaggcgctgaagtcgtgtgtgccgaggaggtgctgggcggcttcctgcatggcgaccatatccaggcagcttcagggaccagggtgaccgtcaggagggtggggccggcctgcccgccccctccccgctgtcagggccacactcactctgccgggagagtccagcataggttgcgttcaaacaccggcagctcatcacgccggtgacagccagtggccaggcggtacaggtaggtccgggacgtggctgcgtgacgagcgtggaagtcgctgggcactcggaaggcccgcaggaccctatggcggcaggtaaagctcaccggaggaacgaccccgcccgcccgcggtgtcacattggctctccttccccctcgagctccgaccagacaaggaagtctgtccagatctccagcctccgcccgcgacagatggagtcgggaaggcacagccccagggctgcttaggtcgcgggctcacc

SEQ ID NO: 170 - DNA, 915 bp, Artificial sequence
  DNA replication origin
gccagccccagacttctgtggcagagcagcaggtacaggactgggggtctctggcacccgcaccagccacgttcccagaccctgcaccaggaccctaggtgagggcccagggcaagcccctctgggatggccaggctacctgcccagcctccagggtcctgctgcctccttgcccaagcattgtttctctggttttaagcccctccaatgggcctcactgggggcaggagatcagccagggcccctggtggccaagctagtgggaaccaggctcgtctttaggcccaccctgtcactctcccgtccaaggccacatagtaggctgaggatggcaaacactgccccacagacacctacaggtacgtatttttccaggaagctgcggttctggaacctggagtttgagagccagtctttcctgtatagacaggtaggctctgttctggggccgtccccagggggtggggctgagggtgggcaggcccctgtgcagtcttggctctgggtcgtgggcggctctgggtcacaggtacggaggatgacggctgtgctggtgggtcacgggcggctctgggtcacaggtacggaggatgacggctgtgctggtgggtcacgggcggctctgggtcacaggtggctctgggtcacaggtacggaggatgacggctgtgctggtggccgtggggctgggggctttggcacctgcccaggtgaagacgattctggagagccaagatcccctgggcaagcaccagacacgtgtagccccagcccacggcttattcctcaagtcagtgctgtacgggaacctcggtaagaaaaacaggcacgagaagctcctgtcatgtgcccagtgactactgtggccgaggcatggggtggggggccaggggccactgacggcagcaactgggg

SEQ ID NO: 171 - DNA, 1624 bp, Artificial sequence
  DNA replication origin
taggggttcctggttctccgctgagcccggctgctgcagggcttaatgggacaagtggtcgcgactggactcaacctggcccgtgcgtgggctgtgcagacacgggtgttgggggtgacccggccgagtcctgccctgcagcattctcccctgtggccactgtgctgactgggccggtggtccccagggagcgcatgaacctgaaggtgcccatctacttctccacggggctgaccgagaaggccaaccactactacaagctgttcatcccctggaccaaccagaagatccgcaagactttcgtgcagaggaacatgtttgagttcaagcacatcaaggccttcgaccgggcttttgctgacaacccaggaccgatggtgaggcccgcggcagggccggccagcacatccacacccgtcggtctcctgtcttccgcaggtgtctgggcttgggcctgcagtgggggtgggggcatctgctgccctgaccccccacctggccctgtgtgtcctgtaggttgtgtttgccacgccaggaatgctgcacgctgggcagtccctgcagatcttccggaaatgggccggaaacgaaaagaacatggtgagggcatggtgaggtgtgggaatctggaagctggaggccgacgggttgtccttccacccatgctgtctctgagctctcactggcttggcctcgtgctggccaagggacgtggctgctgctgctggggaacgggggcgatgtccgcctggagctgctcagtctctgtgacacagcttgtccacctcgggcagaacagccccagcccagccctggacagtcttgtgccaaaacctgagccctttggagtctgcagctaggcttggtcgggcgccgctggcaggtggaaacagcttccaggggttcaggcgggggcatcccgggcaaggccttgaggtgccaaggctggagttccctggctgtgagctctgtgcctgcccccaggtcatcatgcccggctactgcgtgcagggcaccgtcggccacaagatcctcagcgggcagcggaagctcgagatggaggggcggcaggtggtgagtctcgaccccgcactgggctggcagggccgaggggcacctcctggtggtaaccactgtccacgccccgtggcctctgtagctggaggtcaagatgcaggtggagtacatgtcattcagcgcacacgcggacgccaagggcatcatgcagctggtgggccaggcagagccggagagcgtgctgctggtgcatggcgaggccaagaagatggagttcctgaagcagaagatcgagcaggagctccgtaggcagccgggcgggcggcgtggggcccacctcgggtcagcacgggcagcctgggctgaggctctctcttcccccggggtccaggggtcaactgctacatgccggccaatggcgagacggtgacgctgcccacaagccccagcatccccgtaggcatctcgctggggctgctgaagcgggagatggcgcagggtatgcgggctgggcagggcagggcagggtgctcggggcaggcggctgggagcggccctcacattgatggctcctgccacctcctccgcagggctgctccctgaggcc

SEQ ID NO: 172 - DNA, 936 bp, Artificial sequence
  DNA replication origin
tcctagggagccccttttccctcctacctcaggtgcggacgaagccctggccaggctccttctgtctctcatgcagctcccttctgtctctcatgcggctccctcctgtctctcatacggctcccttctgtctctggagagcggctgggacgggactgggagcagatgagaggctaaggtccctatgaggccgcagctcttgggcacctggccgtgccctcactggacgctgcctgctgtgtcgaggggccatgtgcccagggctcctgccttgtgtccccctcaggtgctgatacctgtgttcgcgctgggccgcgcccaggagctctgcatcctcctggagaccttctggtaggtgccgccaggacggctctttaaggagcccctggcccggcctgaacacagtccagttggtgggcagccctgtccagcgtagcggtggcatcttggccctgcttgctgctgtcctggggggccgctcgtgtgctgtgtgaccccaggaagcctgtgacatcccgtcagcgccaccgtgtgcggctcttgtaggggttcctggttctccgctgagcccggctgctgcagggcttaatgggacaagtggtcgcgactggactcaacctggcccgtgcgtgggctgtgcagacacgggtgttgggggtgacccggccgagtcctgccctgcagcattctcccctgtggccactgtgctgactgggccggtggtccccagggagcgcatgaacctgaaggtgcccatctacttctccacggggctgaccgagaaggccaaccactactacaagctgttcatcccctggaccaaccagaagatccgcaagactttcgtgcagaggaacatgtttgagttcaagcacatcaaggccttcgaccgggcttttgctgacaacccaggaccgatggtgaggcccgcggcag

SEQ ID NO: 173 - DNA, 1161 bp, Artificial sequence
  DNA replication origin
gccaggctggtctccaattcctgaccccaagggatccaccttaggcctggccgccaacattctgaaccttgtcttttctctgtcatgtattcaaagtccacgctggaaactccaatttcaggtcccttcagttttttgtccgttgtctttcgttctttgtccacgttgcccgtcccttgtgaactggatgctgtgtgtgagcaacagggactgaaaagctcagtgcagtgccctcgctccccgccccgcctccctccctgcccccgcccccctcactccctgcccctgcctccctcgctgcccgcctccctccctccctccccgcccccacctccctcgctcccgcccccgccccctcgctccccttcccccacgctccccacccccgcctcccgcgcttcccgtcccccgcctccctcactccccgcccctctgctgtgaggacacagcctgagcgcagccctgtcctccacaggtagatgatgagctggagatcaaggcctactatgcaggccacgtgctgggggcagccatgttccagattaaagtgggctcagagtctgtggtctacacggtcagtggaagggcttgaggcttgggaggggctgctggggtgggaggcaccctcctcatggcatccttgatcgttcaccagggtgattataacatgaccccagaccgacacttagggtaagtaggctgaggtgtctttttgtcccgtgggcccccctggagctcaggacccttgcaggtgtcagggtgccagcccttgagtggccagcctggcagtgtctcccatgtcctgtgcggcctggagagcccccttcgttctgggcccaaatgcgcgaaggcacagggtccaggcaggggcctctgtccctccttctctctcttcccaagtctctgggtgggtgcctctgtctcgctcttccgaagtgtctgggtgggtgcctctgtctctcctctctcttcccaagtgtgctgcccacagcattttaccagctggctctttccagccagagtgacctaggaaggcggctgggcgtggtactggggtccagcttgtcacacccagccctgcaaccgtggggacagtgcatcgtggctcacacccccacccccgtgttccagagctgcctggattgacaagtgccgccccaa

SEQ ID NO: 174 - DNA, 1480 bp, Artificial sequence
  DNA replication origin
gcaagggtcctgagctccaggggggcccacgggacaaaaagacacctcagcctacttaccctaagtgtcggtctggggtcatgttataatcaccctggtgaacgatcaaggatgccatgaggagggtgcctcccaccccagcagcccctcccaagcctcaagcccttccactgaccgtgtagaccacagactctgagcccactttaatctggaacatggctgcccccagcacgtggcctgcatagtaggccttgatctccagctcatcatctacctgtggaggacagggctgcgctcaggctgtgtcctcacagcagaggggcggggagtgagggaggcgggggacgggaagcgcgggaggcgggggtggggagcgtgggggaaggggagcgagggggcgggggcgggagcgagggaggtgggggcggggagggagggagggaggcgggcagcgagggaggcaggggcagggagtgaggggggcgggggcagggagggaggcggggcggggagcgagggcactgcactgagcttttcagtccctgttgctcacacacagcatccagttcacaagggacgggcaacgtggacaaagaacgaaagacaacggacaaaaaactgaagggacctgaaattggagtttccagcgtggactttgaatacatgacagagaaaagacaaggttcagaatgttggcggccaggcctaaggtggatcccttggggtcaggaattggagaccagcctggccaacatggtgaaaccccgtctctactaaaaatacaaaagtaagccaggtgtggaagtgcgtgcctgtaatcccaactgctcaggaggctgaggcaggagaatcgcttgaacctgggaagtggaggttgcagtgtactgagatcacgccactgcactctagcctgggcaatggggcgggactccatctcggtaaaaacaaacaaaaaaatactgggctgggcacagtggctcacacctttaatcccagcacttggggagaccaaggtgggcagatcatctgaagtcaggagttcaagaccatcctggccgacacggtgaaaccctgtctctactaaaaatacaaaagttagctgggcatggtggtgggtgcttgtaatcccagctactcagtaggctaaggcagaattacttgaacccgggaggcggagattgcagtgagctgagattgtgccattgcactccagcctgggcaacaagagcgagagtgtcaaaaacaaaaattggcaaaaaactagacttcttttaaatttaatttattcatttaaaacttgccgggtgcggtggctcatgcctgtaatcccagcactttgggaggctgaggcgggtggatcacctgaggttgggaattcaagaccagcctgaccaacacggaaaaagcccgtctctactaaaaatacaaaattagccggatgtggtggtgtgcgcctgtaatcccagctactcgggaggct

SEQ ID NO: 175 - DNA, 1572 bp, Artificial sequence
  DNA replication origin
aggtgcgggaatagagcctggagatacacgaggggacagggctcagaagacaggaggagatatccctgtcagcaaggagacagacggcagacaaacaagacacccaaagcacgccagacgaaggttactatgacagaaaagagcaaggtgagagaatgaggaagcctcaaaacttccagaaccatgacaggagactgctccgagaagccaacttttgagcaggggaggggaggggtagggtgggggagggggagggacggggtggggaagggatggtccaggggaggagaagaagcggggcgggcggagggaggacaggcagcagggagggacaggcaggggggagggaagggaccagcagggggagggacgggcagggtgggtggggggaccggcggtggggagggatgggcagggtgggtagggggaccggcggcggggggggtagccacacacaggccaaggcgtgggagtgaccccaaggacacagcagtggtccagtgagcgcggacacggagcccgaggcagtccctggtgcagggaagcggtgaaacaggacttcggctttgatgataccttggctgaggtgaccttgagaatatacccaggtacagattgcgggtaattgaagccacatgaaagatcagaaagatcagatgtccagagagtgggcagaacaggcagccaagaggccaaatgggaaaggggcaggctgggaggaccccacggaggacccagagagcaggggagggcagtggggcccatgcaaacagctgcaaaatgccatggggtgtgcacaggccaggggtgttcacagcacagtgtccacaccggggcggggggcaccctccgaggaagcgctcacgccatgggggaggacatggaatcccgtcctggtgtctgtgctggaaggtgccctcgaccccctgcccggtggaaggaccaggttccaggacagcacagggcaggcacctgtggaaaacgctaaggacatcaggatgactggccaccaacaccatgtccctccagctgtttctgagaccctggattttgactaattttttccttcttcacatcgttctatactgttacgactttgactttcttttgagacatggttttgctgtcacccaggctggagtgcagtggcacaatcatggctcactgcagcctcaacctcctgggctcaagcaatcctcacaactcagcctcccaagtagcttgaaccacaggcacacaccaccacgccctgccaattttagcattttttttttttggagtgatggggtcttgccatgttggctaggttggtcttgaactcctgggctcaagcgatcctcccacctctgccttccaaagtgctgtgattgcaggcgtgagccacagtgcccagactgtcaggacttttaggagtacatatttgcgttttttgctatttttttcagtgttgcagaaatcaggtagaacaagagctaaagtgagagttgattgtaactcgggcgtgagcacacagagtggtggacagaaagcaagacgtgaggaggcagaagcggggctggggggctgaggggc

SEQ ID NO: 176 - DNA, 887 bp, Artificial sequence
  DNA replication origin
tcccacacagatgggttttaccactcagaagattgccacgaggctcttgtactagccctagggagccttccacgagtggcccaggccctgctttggattctgctggcattcacatagtcactccacagatccacagacatccaggcacccatgctttgtgtgagtgttgccaagcacccttgccctgtctccccgggtgccccacgggcccgcacctgctctggggaacctgagagtcagctgcattccacctcgaccaggaagagggcctgggggttcctaggccggttggtgctgggagccctgtcctggcctccctggctgcagggactccatcggtgggggagggggaagggcacccagccgtggtgagagctcctggccaggagcaggtgggcaggttgctcagcaccctaggactgggcccttcatcactagggatcatgggctgcaagccctgcccagcccgtggcccaggctgctggagcactggtgcctgcagggtgctgaagcctggcgttgcaggccccacaggttgggttgcatgcttggcaccaggcggaggccccagatgtgagctcaccgggcttcaggtgtgggggatggctgctcctgggcctcagaaagatgcagtcccatagacttccagcacgcccctcccctcctcgggccttaattttgtccactgagaagatggtctctgaggctctggggtttccttcttggtcaccagatattctgcgggccttgccttcctgcccagattcgagccagtggcaaacagaagctgccaggagcttctcagagctgtggctggtggctcggtaacaacaggaagggcagtggctgtgcaggaggcaggcagcttgccagcccaggaaggtgac

SEQ ID NO: 177 - DNA, 1668 bp, Artificial sequence
  DNA replication origin
acgttcatggcctccaggaagacctcgcgtgtgggcagcgtgcagaaggccacggtgacggcgcggcgcacgacccaggggtggtaggcggccagcgaggcgttgtaggagtcggcgcagagcgcggaggtgcgtgcgtcctcggggctggtacgcaggccctccaggaacagctgcagccagtgcagggcgcggtgcaggcgcagcaccgtccggcagccagactccgggtggtgggagcggcgctccaggtccaccagccggttgctcagctcgtgggccaccatggcctgcaggctgcggtagtgctcgctctgcgggccgcccctgaggcgctccatgatccgcagcttggagaccacgtccttggagatgaatgagaagatggtgcccaggctgttcagaaacctgtggaagggagcggggctcgagtcctcgcccaggcctggggcagcccgcctggggtgcaggggacgctgcccagcctgcgggggctcacacccatctggaaacgggcagcaaagctggtggggacaggcagtcgggaggcagatgccacatatgggactcgggccaggggagcgcccacctcaggaggcagccctggcacacgcacctgaccaggcccttccagctggcaatgtaggggtccagcaagacctcttccttctcatcgagacactgcttgaaactgaccaggacgactttcagattgaaacctgtctccgagtcatccattttttgataggaacggaaatacagtagggctggggggctgtgtcgctggggtcagcttgctctgtggctcattttctgtgtgtggaggggaacaaaatagctgcgatcccattgccgctcactgaacactcatgcccctcatggagcttcctcccaggagctgcctggctctgctcccagccaagccgcaggctctcaggcacaccaccctgacccacccttcatcaggattgcgcattcagggaccttggcacagcccctcctgtggatcaggccactgactccgtgtcagtccctgaccccgagagtggccccctctggctttatcagaccactaggccccgctgtctgcagcaggtgtctctgctggtgctttcttgtttttgtttctctctctagatgctgtatctgcttttaccagctggagaaatactaagcccctgccgagagccaagcaccatcctagccatctatctgggtgcatggggagtgcgagcagccatctggggtggggtcagatgacaacaaagacaggaagttctgaagtcctagacaagaaaacagacacagcagaaagcagagacaggtggggccgggggtggggggatgctgccgggcaggctgccccatcttcctcactgctacatccccaaaagcagaaaagaggctgtagggctggcacttgctggatggatggacacgtgttttcactcctgttgctgaaactccatgtcccacacagatgggttttaccactcagaagattgccacgaggctcttgtactagccctagggagccttccacgagtggcccaggccctgctttggattctgctggcattcacatagtcactccacagatccacagacatccaggcacccatgctttgtgtgagtgttgccaagcacccttgccctgtctccccgggt

SEQ ID NO: 178 - DNA, 1410 bp, Artificial sequence
  DNA replication origin
ccaccctcactgggtgcccctgtgtccccctgcaggaaatcaggcacccagtgcaccccagcgtctccctcctgggaggctgtgtgatttattaacgttggaagacatcacatagattgcactctggaagctcgcatgtctgctgggccgtgggggccgtccctctgccaccccgaggtgctggggtccactgtgaagagccagtggccaggccccaggcactggatggtggctgggctggttgtggctgtctggtagcctttggctgggccacagggtccagaccctcctgttccgtgccccacgggtctcctgagcactgtggggagggggcatcaaggggcacgggggagaagggacacagcatttcactgggtgtagcagagtcccagctcctgggggccttgggctgggctgggctgtgcagacccacggccgctgcgggaggcggcctgctgcgtccctcggggaactggtgccgtgcaggggctacggaggaggctgtcccaagggcggggacttcctgggcccttctgtgaggagccttggtctcagcttccggctgtcctgcccccagtctgcctggcacgctgaggggcaaacaaggcaggagaggcggggagagccccacagtgcccagactgctgttgagggtttctgccagccagggcatggagggcactgagtcccctgggctcaaggctgcccacctgggcagacacggggtcccaggcacgggcctgagatgaggacacatcggctggcagaaaggagaaaggatggagcctccacaccccgggacctgtgacttcaccctggttcgcagatgcaccccacaggctagggggtggcgacctttcgggctcttgcaggcccggcccccacccctgcctgctctgctctgcaccgcaccctggcgaggcctggctgcgcacgcgtgtaataggccgagggggagccgtggccgaggcgtcttgttccggaccgagagggtgggcctcttctgggctggtcgccaccttctctgtcacagtctgtggttcctaaccagctcagctcacaggggcgacagaggatctcctgttcccgcagcgcccagaaggctctgccacgggactcacggccctggccaccgcagcccagatctgcagcaggaaagccggtgcggccctggcttcccgcccctagggcaggtccagcagggagtgctcggcgtagagcttctgggagacgttgtagacacgctggatgaaggggagggcctcgcctagcatctgcacggcctgctccgggggccccacgttcatggcctccaggaagacctcgcgtgtgggcagcgtgcagaaggccacggtgacggcgcggcgcacgacccaggggtggtaggcggccagcgaggcgttgtaggag

SEQ ID NO: 179 - DNA, 2070 bp, Artificial sequence
  DNA replication origin
aggctaccagacagccacaaccagcccagccaccatccagtgcctggggcctggccactggctcttcacagtggaccccagcacctcggggtggcagagggacggcccccacggcccagcagacatgcgagcttccagagtgcaatctatgtgatgtcttccaacgttaataaatcacacagcctcccaggagggagacgctggggtgcactgggtgcctgatttcctgcagggggacacaggggcacccagtgagggtggggagggccctcaccccagggacacagctgaggtgggtgcacctaactccaagggagctgaggccccactgccaggctcagggggctgtgttagccccagggctcaacaaacaccctgagaaaaggccagccttggaggcagggctgctgtgtgcccattctcccagagaggtcccatcactatgcctgttgtacaggtgagacaagagagagacagagtcacccagaaccaagaggctgggttgggaggacggttgggagggcagacatccgcctctccatgcaaaagaggagaggcctgcgtgggatgtgtgcgtggaggtgggggccactcccagccacaacagtggcctggacagaaaggggatgcaattcagcagagtcttcctggatgtcacccccacctcagggtctgtgggagctgcatatggtgccggcaaaggctgccgactgcagtatgggccgggagaactgcctgggtctgcgtgggccccagggcagggctccctccgggtgttgccttctgtacaagtgccatgcttgtgccgtttgcgtgtcccaagtgcgagtgtgctatttgcgtgtgccgcacgtgtgccgtttgcatgtgctgtttgcatgtaccatgtgcatgtgtgccatctgtgcaatgtgcaggtgccagttgcatgtgccatgcgtgttggccgtgagcgtgtgctgttttcgtgtatgtgccatgcacgtatgtgctgcgtgttggccgtgcacgtgtgccacgtgcatgtgtgccatttgtgtatgccgtgtgtgctgtgagcgtatgctgtgcgcatgtgcgtgccatgtgctttgcgtgtaccatgtgtgtgctgtttgcatgtgccatttgtgtcatgcacgtgccatttgcgtgcgatgcgcgtgtgccacacgtcgtttgcttgcgtgccatgcatgtgtggcatttgtgtatgtgccgtttccgtgtgtattgtgtgtgccgtgtgtgtgccatttgcatgtgccgttttgtgtgtgccatgcgcgtgtgccatgcacttgccgtgcgtgtgccatttgtgtgtaccatgcgcatgtgccattcgtgtgcaccgtacacgtgtgccatttgcatgtatgctgtgcacgtgtggcatgcatgtgtgccgtttgcatgccatgcatgtgttccttgcgtgtgccgtgcgtgtcccatgcacgtgtgccgtgcatgtgccattcgcgtgtaccatgcgcatgtgccgtttgtgtgtgtgccgcattcctgtgctcgtgtgccaggttcgcatgtgcgccatattcacgtgtgctcagcatgtgccatatgcatgtgcggtggtagtgtgtgtccctcacaggtcctcctcacaacaccatggggaagaagcaccagccagggcacacctcctggtatctgctaggtctgccaggccctagctgaagctgagtgccccccagttcccctgggagggcctgcgcctggagtctgctgtgtccccgagggcacccccaaagcaacacagaggcagaggagtcccggccctgcacacctggtgctgctccagctgccgctcatttgcctgtggcccttcctcccttgtttgcgtgcccccctggcaaacaaactctacccccagcaggagccacctgtgtgcctgccacgcaggagtggcccagacgggggtcagcagtgtgagtacagctggccatgcggttcctacagcttccaggcgtcagactctggcagaagggctgagaccctcaaggaactctgctcccaagcagactgggagggcagcaccaccac

SEQ ID NO: 180 - DNA, 1046 bp, Artificial sequence
  DNA replication origin
ccagggcagagcagaaggccgggtcggtggccagggccaggtgcgtcttcacgtactgggggaactcgtgcagctgggcacccctctggaggaagccaagcaccgtgcccatctgggccatgccgggcagccccatgaccaggtcagaggtcagccaggcctcgctggccacccacaccttgggcgagagcctgctgctgatgctgtagttgaagagggcgtgggcggcgtgcacggaggcgaacagcagcaccacctgcacgctgctctggttcacctggtgcaggacgtcctgcaccttccccagccgcgagtcatcggcacggggcagcggcaccaggccctcgtgcgcgatgcagatgccgcgtgccgcggccagggccgagaagatgctcaggccctgccggccgtactcgtcgtcgctgcccagggcggccacccagttccagccgaactcctgcagcagctccgcggcggccgtcagctgcacacggtcgctgggcacggtgcggaagaaggaggggaaggtctcccgggcgctcagcagctccatgctagcaccgtagctgacctgcaagggccaagaggcatctcctgacacaggggctcccacgggcagggctgggtgggggtgggtgatggtggggggcgcccacctggggcatgaggaagaagctgaagaacttgccggtgaccatggcgagctctgacgagtggggcccgatgacagccagcacacggggctggtactgcgtgtagttgcagtaggcggcgatgtcgcggctgcctgccttggccaggaacatgaggctgggcttcatggccaccacaggctccgagcacgtatcaaagaggtcgtagcccaggcgcagcccgggcagcagatccgacttgttgttgatctcctccacggccattttcatggccagtgcccagagcaggccgtttgaggagaacctggggccacacagaaccgcagatggccacctcggccccagctcaggagcaccccagacctggtcaccctgaccccgacccaggccgtc

SEQ ID NO: 181 - DNA, 1927 bp, Artificial sequence
  DNA replication origin
ccccactcgtcagagctcgccatggtcaccggcaagttcttcagcttcttcctcatgccccaggtgggcgccccccaccatcacccacccccacccagccctgcccgtgggagcccctgtgtcaggagatgcctcttggcccttgcaggtcagctacggtgctagcatggagctgctgagcgcccgggagaccttcccctccttcttccgcaccgtgcccagcgaccgtgtgcagctgacggccgccgcggagctgctgcaggagttcggctggaactgggtggccgccctgggcagcgacgacgagtacggccggcagggcctgagcatcttctcggccctggccgcggcacgcggcatctgcatcgcgcacgagggcctggtgccgctgccccgtgccgatgactcgcggctggggaaggtgcaggacgtcctgcaccaggtgaaccagagcagcgtgcaggtggtgctgctgttcgcctccgtgcacgccgcccacgccctcttcaactacagcatcagcagcaggctctcgcccaaggtgtgggtggccagcgaggcctggctgacctctgacctggtcatggggctgcccggcatggcccagatgggcacggtgcttggcttcctccagaggggtgcccagctgcacgagttcccccagtacgtgaagacgcacctggccctggccaccgacccggccttctgctctgccctgggcgagagggagcagggtctggaggaggacgtggtgggccagcgctgcccgcagtgtgactgcatcacgctgcagaacgtgagcgcagggctaaatcaccaccagacgttctctgtctacgcagctgtgtatagcgtggcccaggccctgcacaacactcttcagtgcaacgcctcaggctgccccgcgcaggaccccgtgaagccctggcaggtgagcccgggagatgggggtgtgctgtcctctgcatgtgcccaggccaccaggcacggccaccacgcctgagctggaggtggctggcggctcagccccgtcccccgcccgcagctcctggagaacatgtacaacctgaccttccacgtgggcgggctgccgctgcggttcgacagcagcggaaacgtggacatggagtacgacctgaagctgtgggtgtggcagggctcagtgcccaggctccacgacgtgggcaggttcaacggcagcctcaggacagagcgcctgaagatccgctggcacacgtctgacaaccaggtgaggtgagggtgggtgtgccaggcgtgcccgtggtagcccccgcggcagggcgcagcctgggggtgggggccgttccagtctcccgtgggcatgcccagccgagcagagccagaccccaggcctgtgcgcagaagcccgtgtcccggtgctcgcggcagtgccaggagggccaggtgcgccgggtcaaggggttccactcctgctgctacgactgtgtggactgcgaggcgggcagctaccggcaaaacccaggtgagccgccttcccggcaggcgggggtgggaacgcagcaggggagggtcctgccaagtcctgactctgagaccagagcccacagggtacaagacgaacacccagcgcccttctcctctctcacagacgacatcgcctgcaccttttgtggccaggatgagtggtccccggagcgaagcacacgctgcttccgccgcaggtctcggttcctggcatggggcgagccggctgtgctgctgctgctcctgctgctgagcctggcgctgggccttgtgctggctgctttggggctgttcgttcaccatcgggacagcccactggttcaggcctcgggggggcccctggcctgctttggcctggtgtgcctgggcctggtctgcctcagcgtcctcctgttccctggccagcccagccctgcccgat

SEQ ID NO: 182 - DNA, 1370 bp, Artificial sequence
  DNA replication origin
tactgtatcaaagtcccagcgtttagatggttaacatagagctgcttctgtgtaaatgctgcttattttaaacactaaaaagcgtttaattttatgggacagatgtgtggcctgtgccccttctctccggctgggctgccttggaatgaggcacagggagctggtccagcctcccctaggccctgctgggagctgaccctgggactctgaccggagaccctgtgtgggcctggcggcgtgctggcgtcagatcctggtgggcagttttctgtccatggtgctggctccggggtcctggtggtcggtgctggccgtggtgctggaccccgcccccaccccacctgggctctgtccctggtactggtgacagtcatgatgctgtctacccactgggcaaagggcagagtaggaagctgggtgccacccctacctcggcgggctctgccctgggcatatgcctgtgtgcccccacctggcctcccactgctgtggtgcctggcagggtgcaggatgggggccctggtgggacatggtcaggtcggcagggcctgatttgggcttccagccatctggccggggcctccctgcgtccttttcctgagctcacggtgtgggttgcgggtaccctgggagccctccgggcctctttccagaacagtgggtctgggttacctgggcaggcctggtctgggcacagagggacagggacacagcttggctctggggcccagatggtcacaggggtgtccacgtgctccaggcctagggctcactgtggggtcagggtcaggagacaacctggggtcagaacctagagcgggagggtctctgtagcgagacacgggtcattgctggcttgggggggatcgcagctaagtctgggttcaccggggctgagatcacagggttgggtcactcatgtttcccctgatttcctgtgttcccgtcattctggccttgggcatccccagggccccctcccaggaagaactcgggggtgttgagccctggctgccgcatgagcaggtaacacctgggcaggtggaaggcagccaggatgcccaggacacagagcaggagggcgcccatctgcacggcgggcctgaggaccacctgcacattggccaggaggggcacaaaggagacccaggtgatgaagtaggccagcatggcaaaggtgaggccacgggcacggttgtagcagcccggctggctccgcaccaggaaagtgcccaggaagcagagaaaggccagcgtggcattggtggcgtgcgctaggccgaagctgacccaggagcgtgtgcggcagtgcaccagcgcctccgtgggcagcatgtgccagtccgtcaccacctccggcgggaaggcca

SEQ ID NO: 183 - DNA, 1280 bp, Artificial sequence
  DNA replication origin
cccgggggaccccctgtccgggagctggctgccgtccccccggaattgacaggcagccgccagtccttccagaaggctatggggaacccctgcgagttcttcgtggacatcatgtgactcgtggcgcatgccccagccctgcctgaggtggggagctggcggtcctgccgcatgcagagctcgcgtgggcttgccttcgtgggggccaggacgggaggcagggtggggggcaggctggaccaccaccatctgccctggcagcctggctgctccagctcctgacagcacctgtgtctgagcagccgtgttgggggcgctccctctctgcccctcagcgagagcctcggacctcccaaccccttgtgtctggtggggatccctcctgggatgaggaagaccccctcgggctctcggctgacccccacctcctgcacagctgtgcccaggcccccagggtggtccatgcggggcaaccccctgcggtgcacaggccccctgtctggagtagggatctaatttatttatttattgcctggccggtgactcgggggaggaggcgaccctgtcatctgtcccacctgctgctgccccttggagcagcctgcaccttctctcctcccatccggcaacagtctgaaagtacgtggaggacgggaccggaagacgagagagggctggacatcctgcccaccgtgtcccagccagggcagggagggaccatggcccgcagggtcaaggggccccgatgtgcacagctgccacagggagggaggtcttggggagatgggcagtcaggtggcccgtccttggtgagtgcacacactgcgcgcacacatcgcggccttcctggcttctctggcccccacgtgtctgtgctgtagatactgtatcaaagtcccagcgtttagatggttaacatagagctgcttctgtgtaaatgctgcttattttaaacactaaaaagcgtttaattttatgggacagatgtgtggcctgtgccccttctctccggctgggctgccttggaatgaggcacagggagctggtccagcctcccctaggccctgctgggagctgaccctgggactctgaccggagaccctgtgtgggcctggcggcgtgctggcgtcagatcctggtgggcagttttctgtccatggtgctggctccggggtcctggtggtcggtgctggccgtggtgctggaccccgcccccaccccacctgggctctgtccctggtactggtgacagtcatgatgctgtctacccactgggcaaa

SEQ ID NO: 184 - DNA, 1353 bp, Artificial sequence
  DNA replication origin
cggcacacggtcaacaagatcaccttctccgagcagtgctactacgtcttcggggatctctgcagcagtgagtgggggcttcgggcttcagggcgggggggaggggaacgccggaggcccctccgcggccctcacctaccctcccccgccagatctcgccaccctgaacctcaacagtggctccagtgggacttcggatcaggacacgctggccccgctgccccacccggctgccccctggcctctgggtcagggctacccctaccagtacccgggacccccaccctgcttcccgcctgcctaccaggacccgggctttagctatggcagcggcagcaccgggagtcagcagagtgaaggtgagaacgccgcccctacctgcccttccccggctccgcccccagctccgccccactccactgctgctccgcccccagttccaccccaccccgctgctgctccacccccagctccaccccaccccgctgctgctccgccctgcttctctgctgaccccaatcccatgctcctgctgtgtacttgggccctgggtgggctccttctggaaaaggcaagtgccagggggatccaggagccagtgtgaatggggaggacagggaagcgtctcacacaggggcagcctggaccccacctcatctgggtgggattgggatgaggggcctccaggagcctggcggcctgggcggctgtgcctggtaggggtggcggctggtggttctcctatggtagaggcaggaggccctgagaccatgtggccatgggccatgtgacaaggacagggcaggggtggccaaggagtctgacagggtcactttctaggccccaggacacaggagggtggcagctgcagcccgggtagggagcctgacgtggatggtgccgtgcatcctagccttgtgcccctggctggggtgtgtttaggggccggggatccagagtgttcctgaggtgttgcctggtggagcagaggccccagtgggtggggttggtgaggccagcaggggcgtctgcaggccagggaggggtgcaggtggcttcgtggagggcccaggaaggagggcgagagaggagaggcggccagagggtgtgggaccgcagagaagccacgctgggtgtctactgaccctcgaccggcgcttgcgcccacttcagccccgcccagcccgcggtcagtccccactggtggcgggtgggtgctgggcaggtgccaggcagccgggcgtgtaactcgtgctatcccttgtcttgtgctaaacaagccttagactgaaggactagcggagcggaccttgggccggtaagccagggtcccgcccggggtccctcagcatg

SEQ ID NO: 185 - DNA, 1059 bp, Artificial sequence
  DNA replication origin
ggcacaaggctaggatgcacggcaccatccacgtcaggctccctacccgggctgcagctgccaccctcctgtgtcctggggcctagaaagtgaccctgtcagactccttggccacccctgccctgtccttgtcacatggcccatggccacatggtctcagggcctcctgcctctaccataggagaaccaccagccgccacccctaccaggcacagccgcccaggccgccaggctcctggaggcccctcatcccaatcccacccagatgaggtggggtccaggctgcccctgtgtgagacgcttccctgtcctccccattcacactggctcctggatccccctggcacttgccttttccagaaggagcccacccagggcccaagtacacagcaggagcatgggattggggtcagcagagaagcagggcggagcagcagcggggtggggtggagctgggggtggagcagcagcggggtggggtggaactgggggcggagcagcagtggagtggggcggagctgggggcggagccggggaagggcaggtaggggcggcgttctcaccttcactctgctgactcccggtgctgccgctgccatagctaaagcccgggtcctggtaggcaggcgggaagcagggtgggggtcccgggtactggtaggggtagccctgacccagaggccagggggcagccgggtggggcagcggggccagcgtgtcctgatccgaagtcccactggagccactgttgaggttcagggtggcgagatctggcgggggagggtaggtgagggccgcggaggggcctccggcgttcccctcccccccgccctgaagcccgaagcccccactcactgctgcagagatccccgaagacgtagtagcactgctcggagaaggtgatcttgttgaccgtgtgccgcaggaagccgtgcttcagcaagctgctggcgtacttccgggcctcccgccgctccttgaagccctccacgtgtgtgtacagccagtccaccacgtccgcccctggccggcaccagcggtcagcccgcagcctcgagg

SEQ ID NO: 186 - DNA, 992 bp, Artificial sequence
  DNA replication origin
atgacgtgaactttgagaacatgagcaatgacgatgccgtgcgggtgctgcgggagatcgtttcccagacggggtgagggctgggggcgctggagcgggaggggccaggcagggaggtgggaccatgggggccttgctgtgtgaccaccgttcctgcaggcccatcagcctcactgtggccaagtgctgggacccaacgccccgaagctacttcaccgtcccacggggtgagtggccctcggggcacacggggcgggatggggagggggcgcctacctagcctgaaggcctctctcctctgtgccctgcaccctgccctcccaccctgtccatctgtccgcctgtcatcgccacgtggcggccacccagctgacccggtgcggcccatcgaccccgccgcctggctgtcccacacggcggcactgacaggagccctgccccgctacggtacgagtccctgctccagcgccgtcacgcgcaccagctcctcctcactaaccagctccgtgcctggtgctccacgtaagtggcagctcctgagggccccagcagaaaccgaggcttggagggggcgtctctgccagcctccagcatggccgcctgtggccgtcatggggctgtgacacgtgtgtgttgcctgtccccaactccctgcacagacgtgtgcacaggcacccgtgcccaccttgtgcagcccatcctgctcatggtctgtgtgttgggaacaggggatgtacgtagggcccctatgcggggagcacccacggcgtcagaggcaggggccaggtctccattctgcttcctgccattaacacgactaacagcctgcgctctcgggtggggcatgcggggaggggaaggggcctgccctgttctcattacttcctggtctgcagggtggggtgtcagcccagtttgtgcctaggatcctgatgaaaagtgtctgtagaagtgggagactaaatgtccaacccccctgctcacgccccagc

SEQ ID NO: 187 - DNA, 1483 bp, Artificial sequence
  DNA replication origin
cgtgcgtgtgcaggggtgtgcatgtgtgcctgtgcgcaggggtgcatgtgtgcagggttgcgtgtgtgcaggtgtgtgtgcaggtgtgtgcatgtgtgccttgtgcaggggtgcgtgtgtgcaggtgtgcatgtgtgtgcaggtgtgcatgtgtgcaggtgtgtcagtagtggatctggctacatgtgtctgtgcccagtttgcctgtctctgggattttcgtgtgtgctcatatgcatatcacgtgtgcagggcctggggcgtggacgtcaggcactgagcctgctttggaacaagcctggcctagacccccgattcccactcagtattgggggagcgggttcccacccccctacccatgtctccagctcctctgagctctgacagtctgttcccaggctcagcagctccacggagcagagcacctcatccagactcatccggaagcacaaacgccggcggaggaagcagcgccttcggcaggcggaccgggtaggcagccgggtggagcagggcggggctggggaggcgaagtcagtgtcgggcagccccgtgccttttacacacgccccctctcctccataggcctcctccttcagcagcataaccgactccaccatgtccctcaacatcgtcactgtcacgctcaacatgggtgaggcctcggggcgagggttgggggcaggggcaggggcttggccgcggctcatggctcttcctgcagaaagacatcactttctgggcatcagcatcgtggggcagagcaacgaccgtggagacggcggcatctacattggctccatcatgaagggcggggctgtggccgctgacggccgcatcgagcccggcgacatgttgctgcaggtgtgtctgtgggggctgcggggtgacatgtagctgcgggtgggtccgtggggactttggggtgacgtgcggctgcgggtgggtctgtaggggctgctgggggacatgcggctgcgggtgggtctgcgggggctgctgggggacatgcggctgtgggtgggtctgcgggggcggtggactgagctgcacatcctgcctgcaccaccctaatccccacccctgcaggtgaatgacgtgaactttgagaacatgagcaatgacgatgccgtgcgggtgctgcgggagatcgtttcccagacggggtgagggctgggggcgctggagcgggaggggccaggcagggaggtgggaccatgggggccttgctgtgtgaccaccgttcctgcaggcccatcagcctcactgtggccaagtgctgggacccaacgccccgaagctacttcaccgtcccacggggtgagtggccctcggggcacacggggcgggatggggagggggcgcctacctagcctgaaggcctctctcctctgtgccctgcaccctgccctcccaccctgtccatctgtccgcctgtcatcgccacgtggcggccacccagctgacccggtgcggcccatcg

SEQ ID NO: 188 - DNA, 1119 bp, Artificial sequence
  DNA replication origin
ggaccaatgggcacccaaggggagaccgacggcgggatgtggggctgcccccagacagcgcgtccaccgccctcagcagcgagcttgagtccagcagctttgtggactcggacgaggatggcagcacgagcaggtgtgtgggagtgtctgtgggcgtgtatgcctgtgtgcccacttgcaaatgtctgtacatgatgtgcatgtgtctgcatgaggtgttttcacattgcacgtgtgtgcgtgtgtgtgcatgtgtgtgcctgcaaatgtctgtgtacatgatgcacgtgtgcttgtgcacgtgttccacatgaggtgttttcactgtgcacgtgtgtgcgcgcctgtgtgtgtgcccgcgtgcaaacgtgtacatgatgcacgtgtctgcttgtgcatgtgtgtctgtgtgaggcgttttcacattgcggatgtgtctgtgcatgtacctgtgtgcaaacgtttatgtacatgatgcgcatgtctgtgtgtgcatgtatgtgtgtgtgaggtgcgttttcacagtgtgcacgtgagcgttttcacaatgcacgcgtgtgcgcaggtgtgtgcatgtgtgcgtgtgcgtgtgtgcaggtgtgcgtgtgcagatgtgcgtgtgtgcaggtgtgcttgtacaggtgtatgtgaaggtgtgcgtgcaggtgtgcatgtgcaggcgtgcgtgtgcaggtgtgtgcaggtgtgcctgtgtgcaggggtgcgtgtgtgcaggtgtgcatgtgtgtgcaggggtgcgtgtgtgcaggggtgcattgtgcaggggtgcgtgtgcaggtgagtatgcaggtgtgcatgtgtgcctgtgcaggtgtgtagtgtgcaggggtgcgtgtgtgcaggtgtgcatgcgtgtgcaggtgtgcgtgtgttcatgcgtgcgtgtgcaggggtgtgcatgtgtgcctgtgcgcaggggtgcatgtgtgcagggttgcgtgtgtgcaggtgtgtgtgcaggtgtgtgcatgtgtgccttgtgcaggggtgcgtgtgtgcaggtgtgcatgtgtgtgcaggtgtgcatgtgtgcaggtgtgtcagtagtggatctggctacatgtgtctgtgcccagtttgcctgtctctgggattttc

SEQ ID NO: 189 - DNA, 1189 bp, Artificial sequence
  DNA replication origin
ggcaggcacagggcctgggacctgaggctgctcctgagacgccaggagggtggagtagggccatagggcatggctggcatgatggagaggaggctgctgggggatttgggctcctggttgggaatgacaggtctgagtgcaggggtgggtgcaggtggcctgatgccctggctgttgaggggtgggcggctggtctggagctggctgggaggtggagcggtggacctgaggtctggggcaagggacagggaatagcctggggagccttggggcccggtaggtgcagctgctgctgctgaggaggctggggcctggccctgaggagtcccagtgtgggggaagccctggggggggggggctccaagccccaggaacagatgaggtgggggtggttggagacagcgtctggggccaccacatacatgaaccgagggcagctgggcacgggggctttcccaaggaggcctcaccctagctgtcctcctacctgggggctggggaccaacgctgcaggggactgagagcctttggctgagctgcccctgtgaggatgtccacagccactgtccccatgctgggggggtgggggcccaggatgtgacggagaggaaggacggttcccgagaggagagtgcgttagcaggggtgtccgcagagtgactggccccatgctgggggggtgggggcccaggatgtgacggagaggaaggacggttcccaagaggagaatgcgctagcaggggtgtccacagagtgacattgtgtgggcaggaggagcgcctgctctccaggcctcacctctagaaccgcagggttgggccccccaggtggggcctcacggcagcatatgcccacagggtggtgaaggaggagatctttgatgacaatgccaagcttccctgcttcaacggccgcgtggtctcctgggtgagcccctgtgtcttggccccgaaggctcgcctggggagcattccagggtggggctcttcctgggggaggcggtgggtgtggggaggccctggcaggctgggtgcggatagggcagcttgctggccccctgttccctgggtgccctgaggaggcgtcctgaaggcgggtgggctcccctgagcatgcctgctccctccacagctggtcctggctgagggtgctcactcggatgcggggtcccagggcacggacagccaca

SEQ ID NO: 190 - DNA, 1849 bp, Artificial sequence
  DNA replication origin
ggctgcccagggcagagacagcctgactgttgccctagtgcacttctagcagtggctgcacctgctgggcacatttggaggacgcgtgggtgcccgggcctgggaacagggtgggcaggtctgggtgtcgaggcaggcttggggatgcggccaggaaagagacaggggagcttcagtgtacagctttggaggctgcagacttacagggggctgggagtcagtggggctgcagaggtcagggctgggctgggctgggctgtgggggttggaaagaatggactggggtgatgctggaggtccaagacgagggccttgctctgtagcctcccaggtcctctggctgggatgggggccttgctctgtgtcctccctggtcctctggctggtggcctcaggagcctacggaggaccctcatcaattacttccttcatcccttcccctgagttctacccgcagacctctcagcactgtctgttctgtggaatagaacccccgtgggaggggctggttggtcagtaatactttagcttaagcgactgctgaactagacactgaccctggatgccaagcgaatgtagttggagatggggggaagagaaggcaggtcctcgctggtctggggtggccttcataagagagggagcttcaggctggggacgctgaggaggccctggtgagtcgggggttcctgcgccagcccccgctgcattctcagcccagccctggttccccagcctctgctccagagcatgactgaccaccttgcagtgcagggagcctgtgtcatggccacaaccacgtgccctggtctggaccccactccccacgcacggctttggcccagtgggtgaaggtcccccgcctgtcctccacttttcatgccctggtcacagctattctgacccaagatccccagggctgggaggagggcagaattggggagggtctctgcctggtgctgggtttggtggttggcagggggtctcgcccagccttgggccgaggcagaggagggagggtgtttggctccgggtccccactgctgggtgcgtggcggatgctgggcctgctggacttggcaccgaggctgtctgttgggcacagctcccacagttcatctccgaggtgggggtgacccaggcctgggactgggggatgggtggaggcaaggctgtgggcccaaagccctggtccccagggccgcctgccatgggcctcggtgttgtgacagctccttgtgtcctgggtggtgctgtggggagctatggagttggggaggctctgcctggcctgggctgtggggggagttcccactccgccctccctggctgtgccacttggggtctgtgactcagcctctctgtgccctgagtgcctccctggttttgggagggtccaggcagttcacctactgcactcatagccatggcctagcagggacacttgagcctgtgtgtcctgaaccgggggaggggcacagagagatcccaggactcggcaccacccaggggacaggctggtggagagcccctggctctggggtcaggggttgggaggccacagacccccaaggctgagggccctgacctggggcgtgcacagggggctctgagggcacaggatggctctgcaccgcctgtcctgggccagctacccctgccagcttcctgctccgccttgggagaatggggtgcattcgggaccacgccacgtctagggcagctggctgtggcctctgggagtctggagggttctctgcatcctgtgtggccatgctggctcccagggcgctgcctctgagtggattcctccccggggcgggtctgtgggggcagcacacaggttagc

SEQ ID NO: 191 - DNA, 851 bp, Artificial sequence
  DNA replication origin
ccacgaccaggcaaagcagagagggcagggtgcgtccttggcagcctttgaaggctgggcgctccccactcggctcagcggccctcctgcccgctccggtcaggttgggcaggagggggcggtttgttttctgagtctggtccgggctcctccccagctggggcaccttgcagtccctgcttctctgggcctgggctgctttggccttgagcatggggcatgtgtcaggtacttttgtttttgacttagtttattattctaacgaaagttaccaaagttactaatgctgtttgttgcaaatgtgtgccaccaggaaatgcgtagtgaggaggtgcccagcccccaggttctgctcctggaccatgctctgggatgaagccctgggggagtccgccttctgctcctgacacccaccgggggctgcccagggcagagacagcctgactgttgccctagtgcacttctagcagtggctgcacctgctgggcacatttggaggacgcgtgggtgcccgggcctgggaacagggtgggcaggtctgggtgtcgaggcaggcttggggatgcggccaggaaagagacaggggagcttcagtgtacagctttggaggctgcagacttacagggggctgggagtcagtggggctgcagaggtcagggctgggctgggctgggctgtgggggttggaaagaatggactggggtgatgctggaggtccaagacgagggccttgctctgtagcctcccaggtcctctggctgggatgggggccttgctctgtgtcctccctggtcctctggctggtggcctcaggagcctacggaggaccctcatcaattacttccttcatc

SEQ ID NO: 192 - DNA, 881 bp, Artificial sequence
  DNA replication origin
cgcgccgccgccgcgccatggcggagaccaagattatctaccacatggacgaggaggagacgccgtacctggtcaagctgcccgtggcccccgagcgcgtcacgctggccgacttcaagaacgtgctcagcaaccggcccgtgcacgcctacaaattcttctttaagtccatggaccaggacttcgggtcagtcggccgcgaggcctgcgcgagcctggcgcgggctcgggggtcgcacctgcccgcgcggggacggggcgggggtcctgagccgttcgcgcccccggggacctgcgaccgcgacgcgcctccgctagatgcggcgcgggtggcggcctcggcccgtgtgcggcgcgcgcccacctgtccgtggagcggggcgatggcaggcggggttcccggcgtccctggccccagcttcccggccccgagtcctgccttggcccgtgtcagactcggtcggccgcatcgcttccaccggggctggccgggagcgcctgccgttggtgcgggctggggtcaggggcgtgtcagtgggaaggaagcagggtggggttccctagctgggatggggagacatgggggtacaggttcaccaacctgtctgctagggtttgcagaagcttcccgagggtcaagacaggttctcctggcccccttctgcagggtccttgtgacagggtggaggtcaagggccactggtgaccatgaaactttattcgcctacccgtgtcctgagcttcctgtgggccccgtccccactgagccacaaagcacttgcgttcccggagcagcccagaccatctgctgtttcggggcagcctgggtcagcgtctccctgctgggcctcggtggtggtgtcccaggcgaggagacccct

SEQ ID NO: 193 - DNA, 1879 bp, Artificial sequence
  DNA replication origin
tgccctcagacccttctgggctctgcccgctgggggcctgaagacattcctggaggacactcccatcagaacctggcagccccaaaactggggtcagcctcagggcaggagtcccactcctccagggctctgctcgtcgggggctgggagatgttcctggaggaggacactcccatcagaacttggcagccttgaagttggggtcagcctcggcaggagtcccactcctcctggggtgctgcctgccaccgagagctcccccacctgtaccaccatgtgggactccaggcaccatctgttctccccagggacctgctgacttgaatgccagcccttgctcctctgtgttgctttgggccacctggggctgcaccccttgccctttctctgccccatccctaccctagccttgctctcagccaccttgatagtcactgggctccctgtgacttctgaccctgacacccctcccttggactctgcctgggctggagtctagggctggggctacatttggcttctgtactggctgaggacaggggagggagtgaagttggtttggggtggcctgtgttgccactctcagcaccccacatttgcatctgctggtggacctgccaccatcacaataaagtccccatctgatttttagacttgtcccaggtatgcttctgaaactccgtctcctggggctgggcaaggcatgagtctgggcctgggagtcctcgtctccacctggaacccctgacatcatcccattccttgggctgaaaggtctgggtctgggtcctctgggagtcggtgtcctgggaaggggacctttgagctagttctgtgtggcttctggtcgtggaggagttcagattcccttgagggctgacctggacgtgaggaggggggacgtggtggtggctgtgaggccagagggaaggccgtgggagcacagctcttggagaggcagagggacgaggagcgggagtagtgggatgcgggtcagacacttgcaaagggggcgggagcaaagaggctccagcagagacagcccgggacagcagggtggttccaagagtcttggccaggccagcacggatctggccctagaatcctttcccgctcaggcatcagctggttgggtgcaggatctcagcacaagttcaggcggtgggaggagtggcgggagcaggaaggcccgtggcccggggtcctggcagcacagaccagcgactaactgctgcttcttgaagctggcgtcaccacccaaccccatcctccagtcctcccaggacagtgggggtgggaaagggtgacagttgcccacaaggaccccacacaagcatggatggggagggagggaggctggtctggggaggtgtggcttgaagatgcacccccctcccagcccggttacctctggcctcaccagtggccacacctgtcagggccccagctggaccacatccgcgtcagcaacgggactggcctcaggcctctggcttccagcctctcttgagacctagcctggggtcaggccctcagggcagggacaggcttcctccctccctggggcctcaacagatagcccctcttaggtcttcctgcctggcttctgacctctggggaagagaagggctgcgggaaggtggagggggctggcggctaagctgtccgggcttggctgagcaaacgccacagttctccctctcagagcccgggtgcagggtcaggatcccaggcccaagctgaccgtcaagcactggtgcctgcactgatcggtttctttccgagccggtgcagcccccagcacggtcagggcccgatagatgccagttccatctcgccggcttcctggggacgggaaccaagggaccccaccgcactc

SEQ ID NO: 194 - DNA, 1196 bp, Artificial sequence
  DNA replication origin
cagcgggcagagcccagaagggtctgagggcatgatgggcatcagtgggattttggttgtgccaggggtgggcagggccacccgtgagcaaaggccgcaggggtgggggctatgctgccaccaagcccctgggagaggggtgtggaggcggcctctgcatacgcccaggccaaattccaggaaagcgggaccagccgctggaaggggggtgagccccggagcatcaggagatgccccgaggagcacagacaggagaggtgcagctgctggcccagccaggagcccagggcctccctatttgcagttctccttccggaaccctggaagccaagggcgccaacgggttggcggctgtcctccaccctcatcacagtgggagacacagggcagacccccccgcaggactccccagggatttctgagcctgaggtggcaggggccccgggcctggctggtgcctgccatcgttggtcccaggtgaggtggaatggggacaggcagggctctgagatgggctgaggtcgcccccgccgctcacctttgtctaggtcgatgtacttggcaggcagggggctgtgggccagctccgccctctccttcaggatgttgtttttgtaatctgtgggaggagaggaggctgaggtccccgctcccaggatgcacttcccagcccgggactgggagccgcgcctgtgccctcgtgtcccagcactgcctcacctagctggatgtcctcactcctgtaaagcatctggtcccctgcagccacagcgaactccgccaagttaacatccttcctggatggcgagggtgggaggaggttacagctgggtggggtgaagggggccctggtccccaggagggccgggaggggggcactcacccctttgactttcccgacttctggtccgagtattcgtagcctgggaaggagactcacattgggggcagtgccgccccttccgcaggtcccccagcccagaggaccaccctcccgcccacctcagtctcctggggccgctggctttgccggggcagcctcacctccgcggcgcctgcgggcggccaggaggacagtgaccagtagcaggatgaagagcagcagcgtggccagcacgtagcccagctgctggaagaagtgggctcggctctcggggacgatgacattgatgacgttgtggccgcgcgccagtgtg

SEQ ID NO: 195 - DNA, 707 bp, Artificial sequence
  DNA replication origin
ctggagccgttgcccggagagccccgggggggcggctccgcgtggggttcggcgaccgtcaggtggaagacgcggcgttcgtgcaggccacagtaatggtggtgcaggtggcaggagtaggtgccctcgtcggcgacctccagcggctcgatacgcagtgagaagtcaccgcgctcaaaggcatccgcgcccacagccacgcggtcgcgcagaaaaaggggcccgtaggcgcggcgctcgcccgacgcgtagaggtccagcaggcggtccgcgcggtcgtgcgggaccccgggcggctgccggtcccagtgcaccacctgttgagcctcctccacgtgccggtcggtccacacgtgcccgcggttcacgcaggtcagaagcgcgggtgcgccgcgcgccaccgccagcacctccttctcgccgtcccagtaggcgggggtggccggggctgcggagggggcgcggtcagcggcgcgcgggccggggcggcggtcgagggtcgaggggcgggagctggggggcgggggggaagcactcacggccgtcggtgacctccaggcggacggccaggctctcgtagaggtggcagtagtgatggtgcaggttgcaggtgtacagccccgcgtccgtctcctccaccgctgcgcacccaggaggaagccgcgcgtgagccttgcggtgcccccgaccccgcggccccggacccc

SEQ ID NO: 196 - DNA, 1930 bp, Artificial sequence
  DNA replication origin
gtacaagtccagcaggcgccgcgcggggccacccccggggccgcgcaggtcccagtggagcacgcgctggcggtcgtgcagccggtcctgggtccacaccatgcgcgggctctggcagcgcagcaccgcccgggcgcccgcctcccagctcaccgcggactcggacaccacggagctgccagcagcggcgggtaccgaggaccctggtgggggaggggagtcggtgggggaaggggtgggccccctagggccctggttgggggagtcagtgggggaggggcagggccctggtgggggagggatgtctgtaagggacgggcaggaccagagggccctggtggtggaggggaagtccgtggggtggggcagacccccgagggcctggataggggagggggagtcactgggggaggggcggaccctgatggtcctgatgggggagggtgaatcagtgggggaggggcgggctctgaggaccctggtggaggaggaggagtaactgggggaggggtgtgccccaaggactctggcggggttgggggcatctttgggggggtgtgggcccctgaggcccctcgtggtgggggagattccatgggggaggggcatgccccctagggcccatgtgggggaaggggaatcattgggggagtggtggacccccgagggccctggcaggggagggggagtccatgggggagggcaagtcagtcggggagacatggggcccaaggaccctagtgggggatggggagtccatgggggagtggtgggccccgagggccctggtggggaaggggactcagtaggggaggggcagaccccgaaggccctggttggggaaggggagtcagtgggggcatctgtgggggaggggtgggcccccgagggccctggtgggtgtgcgggagtctgtgggggagggccaggcccccaagggccctggtaggggaagaggagtcattgggggagggggagttattggcaaggggaggtgcccaagggtcctgatgagcaagggggaatcagtgggggaggggcagggcctgaggacccccgggggctgggcctggcaagataggaggggctgagggggagtgggggtgggcagctggggctggggtcactaacctgagtgcaggagaacagcagagcctggaaggagaggagtgagctggagaggccacccacagccccacccagccccgagaccccccacttggcccccagagtccctcctgtagtcccaaagtggatgctgtgacacccacttcagtgcagggaggacgcctctcacacagacctacatagccctccctgccaccgtgctgggctttggatggcacctgcccttgagtggggaagccagggcatgggcgtgggccagggccaggctccaagccagccggttctggggtgtgtgcttgtcaccggggccactccacctggctgcacccaagtcacccagagcaccaaggaggctggatctgtgggttcccccacgctccctccagggctgtgccccagcccccgagggtccttggaccctcagacgctggggaccccacaccacacctaaggctcagcgcagcccctgaggtgcttccgcagggcagaggcctgaaggctgaatgtgggtcgtgaccccggctgccgccccacaggcccgcgttgctgcttgagggactctcattgtcgtaggccgcctcggcatccactctgaatctaggctggactttctctgaccggaagcggggctgccacccgggacagtttccaattcacatcccccgtcctcgagctgatccacccagacgcccgccctacgcactgtcccctggtgaccaccccctgtgtccccacagaccccacgccccacatggactgtgcagctgcaccacggagtccccccacagtcagcgtggcccca

SEQ ID NO: 197 - DNA, 2473 bp, Artificial sequence
  DNA replication origin
ccggcccctgggtggtccggaaacgattctggacctgcgggtatatccagggcccgcaccccctgggattgtgggaaatgtagttttttgcctccgtaagggaccaggcggagctgaggaaccgcgcgaggactgggaccgtgattccactaaccggaaaccgtcgcctttcgggcccggcggggcctgagccaatgcagaatcgggggccgcgaggacgccagcgggcgctgtgcgtaggaaccgccgggtggccgctgccgatcggggccgacttggggacggaccggaagtgcccgagggcggccgcagaacggtcaatttgagccgcgtcgaggtcgggcttgggaagggtcagcgggaggcctgagggcgccgggcgctgcggcaggcgggcccggggtccagccgagagggtccgggcgccaggcaacgcgattcgcgcgggggtgaacccggggagggggccggcctccccgttctgggacctttcggtgcgtccgagcgcgacaccgcccgcgtcgggggcttgggagcctcggggcgcgagctgtgttggaagcaaagtcctccttgtgggttggggtggcggagggagaagggaagcgagggtcgcggcgggaccagacgccccagtcccggcccgcccgcgactactgaaggcgctgccgcctgacctgaacgggcacttgtgttccagctcccctgggacctgtggccgccgcccacagaccatgctcctggggcgcctgacttcccagctgttgagggccgttccttgggcaggtaggaagccgcgcgggggcggatgggaggatgcacacctggttaggagtgcgggtctcagcagctccgctggggcagggccggtggccacacacacactctttcccctctaagcttccgatgctcacagagggaacctcaggggttcaggccaggaatgaggtgcgggggatcctcgctgggacgaacctgctgctcctcaacccgacgggcctgtgtggtctcgcgagcggtgaccgtggcgtctggttttctgcaggcggccgcccgccttggcccgtctctggagtgctgggcagccgggtctgcgggcccctttacagcacatcgccggccggcccaggtagggcggcctctctccctcgcaagggggcccagctggagctggaggagatgctggtccccaggaagatgtccgtcagccccctggagagctggctcacggcccgctgcttcctgcccagactggataccgggaccgcagggactgtggctccaccgcaatcctaccagtgtccgcccagccagataggggaaggggccgagcagggggatgaaggcgtcgcggatgcgcctcaaattcagtgcaaaaacgtgctgaagatccgccggcggaagatgaaccaccacaagtaccggaagctggtgaagaagacgcggttcctgcggaggaaggtccaggagggacgcctgagacgcaagcaggtgagtggccccctgcttggccctgggagggcaaagtgctgagaacacgtttctttgccacgaattacttggcggtccctctctctgcgtcttgcagatcaagttcgagaaagacctgaggcgcatctggctgaaggcggggctaaaggaagcccccgaaggctggcagacccccaagatctacctgcggggcaaatgagtctggcgccgcccttcccgcccgttgctgctgtgatccgtagtaataaattctcagaggactcagcctttcctgcgggtctggagctccatttgccgggtgtgaggtctctcaggattgaggctgctgccagtcccaggtgttgcagaagacccgggcagcagggtggcagattggccgtccctctctctagctggctcttggccgccgtccagagggtgctgggcctgtaggagccccagcctcgctgtgagcaaatgtgtgctgtgtgcagttcaggctaggtgctgtgggatcactgtgaacagatcccacagcccctccctgagcaccacattccctggggaggccgacccggatggcagaagtacagggggacaggactggggtttagggagcacccggaatgcacggggtgattcaggtgtatttcatgagtggagggtcggggagggcctcattgggaaggcaggaaaggttctggtaccactggcagtggtggatggtgcccgccaggctccgtggacgtgatcctccagtggccctccaagctttccggctacagggccagggtgttggccttcccaggcatgtctgccatctcctggggccctgagtggacgtggggactaagcaggaagagttgtcccagaaggggttcggggctggggggtggctgaggaaagggtctcgtttacagggccgaagaatccctgaggcttaggttgagccagaggcccctggtgtctccacgttcctctgggtgaagaggaggaacgcatt

SEQ ID NO: 198 - DNA, 1232 bp, Artificial sequence
  DNA replication origin
gctctgtcgcctgggctggagtgcagtgctgcaatctcagctgattgcaacttcctcctcctgggttcaagagattctcctgcctcagcctcccgagtagctgggattacaggcgtctgccaccatgcctggctaattttggtatttttagtagagatggggtttcaccatgttggccaggctgatcttgaattcctgacctcaggtgatccgcccactttggcctgtgctgggattacaggcgtgagcaactgcacctggccctcagcattccttttattgaactggagctggttctcatggggcaaggataatgcctagacagggggcccagagctgcacttgagggctgttgacaactgtatttatatgcacatttacttacattaaattaaggggtgagttacaggactttctgcgaaagaggtggtaacgtctggattgttactggattgttttgaaaggggtggtaacgtctggattgttactggattgttggaaaagtgtggtgacctctggattgttaccagattgtttggaaaggggtggtgacctctggattgttactggattgttgggaaggggtggtgacctctggattgttactggattgttgggaaggggtggtgacctctggattgttactggattgttgggaaggggtggtgacctctggattgttagtggattgttggaaagggtggtgacctctggattgttactggattgttgggaagggtggtgacctctggattgttactggattgttgggaagggtggtgacctctggattgttagtggattgttgggaagggtggtgacctctggattgttagtggattgttgggaaggggtggtggcctctggattgttactggattgttgggaagggtggtgacctctggattgttactggattgttgggaaggggtggtgacctctggattgttagtggattgttgggaaggggtggtggcctctggattgttagtggattgttgggaagggtggtgacctctggattgttactggattgttgggaaggggtggtggcctctggattgttagtggattgtgggaaggggtggtgacctctcggtcgttgccgtggactctctaaactgtcaaggcacggggggacggcttacaccagtgcgcaatgaggtcccccagggatcaccttcctggccatctgccccttccttctggtttctttgcttcattctgtctgg

SEQ ID NO: 199 - DNA, 1667 bp, Artificial sequence
  DNA replication origin
ggggcggggcggtggcggccgtggagcttcgcgaggagccgccctgagggaagaagccgaaggggagtcggcggcacaaaatggcggcggcggcggcggcggctggtgctgcagggtcggcagctcccgcggcagcggccggcgccccgggatctgggggcgcaccctcagggtcgcagggggtgctgatcggggacaggctgtactccggggtgctcatcaccttggagaactgcctcctgcctgacgacaagctccgtttcacgccgtccatgtcgagcggcctcgacaccgacacagagaccgacctccgcgtggtgggctgcgagctcatccaggcggccggtatcctgctccgcctgccgcaggtgagggcgcggccgcgagcctccggcccaggtaaccgctggggcggcagccgcctttgttggcggcgagtcgggcccgcaccgcccccgcctagaccccgaccccagcccctgccccgaccccagcctcggcgccattccctagccagcccatgcccctgacccggggcctccccgcccgccagtgcgctggatcccgagacggcgggacgcgaagagcctttgtggacgtgggaagcgtttcagtgtttggttctgcgtggggagtcccacgttactcgatgactttcggccgcgaaggctttgaatggtgcgtttgaaaatacggaaactttcttctactctaggtggccatggctaccgggcaggtgttgttccagcggttcttttataccaagtccttcgtgaagcactccatggaggtaaggcttcctcctgcacttcattcccagcgaagtatgttgagggtaaaacggtttgttactttgcccggttactaagggagtgagtacttgccccccagtctgagctctgtgccggagggttctgtttcttgactttttttttcccctgggtgcacctcccttttggtctgaatagccctcaagcctttggcggccgtcaggacgccgtggctggggacaaacatgggcgtgttgcaatgcttccgcttcagcatgtgtcaatggcctgtgtccacctggcttccaagatagaagaggccccaagacgcatacgggacgtcatcaatgtgtttcaccgccttcgacagctgagagacaaaaagtgagtcagtcagagctgtctagtctatcatagatgcctattttctttatttctgattaagttacagtaaggcttgtataacacaatacaggcctgaggctctaaacctgtgggatattcatgagcgcagtctcaagctccaccaacagagcctgctcagaggcatcagtagatgcggtttagtaagggcaggggctccagtgaggacagtgcgctgtggcgggtcgcgctggggctggcttcctgctttacccatgtcagtgcacggccctgctgctgcttctgtcccacaagtttctgagtgctctggagcagggaatcttaatctcagcactattgacattcaggctggataatcttttttttcctcctgagacaggtttcctgttgtccagggcagagtgcggtggtatgatcatggctcactacagcctcaacctcctaggctcaagagtttctcctgcctcagcctcctgagtagctgggactataggagcacgccaaccatgccag

SEQ ID NO: 200 - DNA, 1609 bp, Artificial sequence
  DNA replication origin
ggatgagctcgcagcccaccacgcggaggtcggtctctgtgtcggtgtcgaggccgctcgacatggacggcgtgaaacggagcttgtcgtcaggcaggaggcagttctccaaggtgatgagcaccccggagtacagcctgtccccgatcagcaccccctgcgaccctgagggtgcgcccccagatcccggggcgccggccgctgccgcgggagctgccgaccctgcagcaccagccgccgccgccgccgccgccattttgtgccgccgactccccttcggcttcttccctcagggcggctcctcgcgaagctccacggccgccaccgccccgccccgtcgcgtgccattggttcggcccgcgaccagcgcgacgccgcctagccgcaattggctacataacctgcccgtcagcaacgcgcctaacgccgacgccggaacctggcgcgggtggggcgggctcgttacccaggggactccgcggtgccggccgacccggaagcatgtctgtccctagcggaggcgcgggtgccgtgctgagagcgcctgcctgtgcgccccgagcggggctgggactcttccaagatgcccacgttcgcacagagaccccggatcgcggaagctcgcgtctcgaaaggcctgtgggtcaaggggggccatctcggtgggatctggggcgggacgacccccactgctgaaccctgggcgcggggcagggtcagaggctccgctcggcctccccctggatgagacgcgcatgcccggtgtcccccggccgccgtcggcgtcgtgtcttcagtccttatcgactccagactttggggatgcgtattaacgccagactcctgcaaagtcttgccttcaacactcagcccctggggagagacgggtggagggatgactggaaacgtggcctcgacgtccctacagagcccctccagcgtggggaggcctaagtacctcaaggttcaggcccacggaaggagtcgggggagcgaggcccggtgatctacgtgtgaaggagcttggacaggacctcacaaacgccagggagacggcgagggggttcgtgcgtttgtaacgtcttgacatcgctgatcctcccgcaggcggtctcacgccctgcccgtcctgggttcacggtttttcatcacctgcggctgtcctgcgatcgaccacagctgtgcaggaggggcaggaggtatctgttgctgcagttaccggaacctttgccaggactagtacaggaccacgggtgaggatggtggggaagcctgcgtggggcagggaacggtgaggcaggaagagggaagggcagcagaggcctgagtggttgcaggttcacacactgagctgccagtaactgcccagctcagacgggctcaaattcagaagccaccattgctcctcacccccacccccaggtcagctgtccactagctctgccatgacttgatactgcagctcaaacagtgccaaccaaaacccactctcctcaccgcctgttatgggtaacacggtatggttacagctttactcatgtcctctttccccaggctggtagctcagggatgtctcgtctgtgagttacagctgcacgctctccaggaa

SEQ ID NO: 201 - DNA, 910 bp, Artificial sequence
  DNA replication origin
caccacacagctggtttctcattggtgctgcttgcccattccctgagctgtgactgccagaggagtgggaggttggtggtgcctccagcccatcaggggcaggccctgggaccgcctgggaacaggaggactatggcacaaaccgagtgagtgatgggagcaacccgcagggctctgccacatccctgtcttccttcactgacatgaaacgcagaaaaggcagctttgccacaacacaggagcacgcaccgaatgtggccgcccagggctctgtccttgaccctgttgtccaggactgtttaccaagggctgacaggcactgagtgccccgtgcacctggccagacactgcactcatgcagcggaaaggacagtgaacgagactttgtccctggcctccaaaggcttagggcgtagtggctgtcatgaggcacagtgacaagggccaggagggggacctcttagggggccatgcagtgatggaagccagaaggaatgaaggcctgcagtgaggatggagtggtcggcctgaagccatctctagcaagtggtcaggacgctgattgttctgcgcaggttggaggtaggtggtgagtctgagaaaggggccggaaagactccccagcaactgctggcaaagggtgaagggcacgttcccacaggattcaagccagctgcctttggaggggagacgggcactcagtttaggcgctcctacagcagggtcagcaagacaagcaggttgcggcaagggtctgcgcactgctgtgtaaatgtaggggcatcggggggcagaaagaccaggggagaagtgtgcatcacccttggggttaagggacagttgtctgctaggtgttgcttcctggagatggctgaaaagccagtccagtctgcagggaccaggccaccac

SEQ ID NO: 202 - DNA, 1578 bp, Artificial sequence
  DNA replication origin
gaggacgcgcgcggctggacggcggcgcactgggcggccgcgggcgggcggctggcggtgctggagctgctggcggccggcggcgcgggcctggacggcgccctgctcgtggctgccgctgcggggcgcggggcggcgctgcgcttcctcctggcgcgcggggcgcgggtggacgcccgggatggcgcgggggccacagcgctgggtctggcggccgccctaggccgctcccaggtacgtcccgccctccgcccggcagtgatgggagggggcgcagggccaggatccccagagacgtgccaccggggcagctggagccaggctgggggacggtgtccaggcacgaaggccctgagcgcgcccccggctgtgcccctccggtgtagccccgtcccgtggagaccagggcgggatccgaggcccggggctcggcttcatgctggtggcagcaacagactctccgccagcgccgggcctgtgcctgagacccccgttcctgggcagcgggcagggtgttggctgcagatccttggatttgctctaaggactcttagggggaaaagtggacgtttccaagcaggccagccttgggttcggcctcacaacatgaggaagtggtgtcaggagagacaggccgctgcggggacagaagaggcctgggctgggcaaacgcctggtggctctgcccctcgcctaccgggctgaggccggcccctgcttttctctcctcttctaggacattgaggtgctgctgggccacggggcagacccaggcatcagggacaggcatggccgctctgcgctgcacagggctgccgcccgaggacacctgcttgccgtccagttgctggtcacccagggggccgaggtggatgcgcgggacaccctgggcctcacacccctgcatcacgcctctcgggaaggccacgtggaggttgccggctgcctgctggacaggggtgcccaggtggatgctaccggctggctccgaaagacccccctacacctggctgcagagcgagggcatgggcctaccgtggggcttctgctgagccgaggggccagccccactctgcggacgcagtgggccgaggtggcccagatgcctgagggggacctgccccaggcgctgcctgaacttggagggggggagaaggagtgtgagggcatagagtccacgggctgagccagacagcaggctccaggctccaccgccccagtgatttccaggctctctggctgaggctgcctgcctggaggggacatcagggaagaggcttccggaggaggggatgggagaaagtaggggatgtggcttgagctgcagtcacaggccttggctggaccagggatggcccccagctcccaggagggcccactgaccctgcagctccagccttctccatacttcaacaaagaatgagttgtggcaatgagggaagagagaccctctcatagtgttttatactcagtacctgttttaagaaaaaacaacaaggaagtaaaaccaaagacaggcaggcagcctggcgctaggcccgaaaccaggcctgcgcctgcctggcctaaacccagtag

SEQ ID NO: 203 - DNA, 2306 bp, Artificial sequence
  DNA replication origin
gtccacccgcgccccgcgcgccaggaggaagcgcagcgccgccccgcgccccgcagcggcagccacgagcagggcgccgtccaggcccgcgccgccggccgccagcagctccagcaccgccagccgcccgcccgcggccgcccagtgcgccgccgtccagccgcgcgcgtcctccgcctccgctgccgcgggtcccgggcccggagcctccagcaggcgcgcggccagcagcgtgtggcccagggcagcggcccagtgcagcggcgtgaggcccgtcccggagcgagccgccgccgaggccccgcgctgcagcagcagctcggccacccgcgagtgtccgtgccaggcggcctcgtgcagcgcggtgcgccccgcccggtccaccgcgcccaccggggcccctcgctgcagcaggagacgcaccaggggcgcgtggccccgcagcacggccaggtggagcggggtccggcctgcgtggtccctgaggagggggcaagggcgtcggcgcgggggtggaccactgaccagaaccccgccctgccccaccccgtcctgccgcccacccagcgctgggacccccgtcctaccccatccagagaagggactcctccacccacccagtgctgggacccccatcctgccccacccagagaagggaccccttcaccccccagcgcaggtgcacctctcctccacgctggcaccttgccgcagcagctgcgtcaccaggcctgcagggcccctccacacggcctggagcaggtgcccccagccctggacaacactaggcccctctgtcctggttcccagggcctcttcggagtccagctccatccaccgcagttcctgttcctcctcctcctcctctctgggctcaggcctctgggagtccatctgggggggagcagggatcctacatccactgtggaggcctctggcctgcccccagccgtgtcccaggccaactggagccccccattccagttaccacttagccttcagaggggcttggctctgttacccaagggagctggctcaggagctttctgctctggctgagggtcctctgtagacgggttctggccgaggctcagcctggtgaccctcttcacaaaatcccttctgcaggctttggggtggagtgtctgctgctgaaaagctgaatggtggcagcttcagccttgcagggggtgggagaacacagctggtcccctgggccaggctgaggccacctgacgctgtttactcagccacttaggaaggccctgccttcgggcacagccccctgtccaacatactccctcccctgctggctgccagggccccagttcggctgccctcctggggaacaaaggccaggcggttggggaggacaagcaggaacatgcttgtggacgaaagttgctcagacgccacctcccccaggaagcgcagccttggatgtaccccgatgtgcccctggaaggcctcacagggctctccatggggcccaccctcgggcagccccctcacccactcctgtcccagctggctaagcccacccaggggtgggtgccggcccctcctcccgattccaggctggggaggagggcagggtgaggttctggccttcctttctgtaaatgctggacaggacaaaagattcaccaaggactccaggcaggtggcctggaaaagagggtggcgctggcatgggagggacgaaaaccctttggggactggctggggcaagtctggagccagggaagggacagatgcctgggcaggtgggggcgggggtcggggggcaggcgggagagtggggagaatccctgctagggtgcgtctgcatctggaaaagcagctctgccccagcaaggcctggggcagcgggatcctgggggcctggggcaggatgggtggggctggtgctgagggcatcttcctgtctcccagtacctggggccaggcaggagaagggagcatggctctttggggtggctgcagcagcctggcccctccagcggctgcacgggaaaggtaatgagggctacccattcccaccccagcccccttcagcctcccaggtccccaaggacagggtctcctgagggccctggtctggcctcccccactccctagaggactgcctctccaagggcccaagggaccaggggccccatcccaccaccccccaagccacacagaccctgccctacaaacctcatcaggctactcatccgtcaccttcccagatcctgaccacaggtggatctgaggcaacgtgcgactctaaccctgttttagtttgttcttagcatttatca

SEQ ID NO: 204 - DNA, 814 bp, Artificial sequence
  DNA replication origin
agtgagccgagatcgtgccactgcactccagccctggtgacagagtgagactgtctccaaaaaaaaaaaaaaaatgatggaacacaggttcttgtcctggaaaatctgcctttcctctgctcgggatggctgggttcagacgcgagggtgcctgtggtccctggcagcctgctgagtgcctgccgtgtacgggccccacaccctgcggctcacgcgcatcccaggtcccctctcatccactctgagacgcaggcggaggacaccgacaaggtgttcagatgagggagcagcggggctggggctgggacagggggtggggggctggcctccaggtggcagctactgatggggcagctaccggagtcaagccctttgaaatgaggtctttgtgtgggggagctgcagccccgcccggcacagggagggaggcggccccggtgggaagggccctgcaaggcctgcccagagcaccaggagctggctggggctggagactggcgctgctggagctgcagctgcctggcagaggggaaactgaggtgggggtgtggctctgggacagacatcagggcaggacctccctagccagggtccacggtctggctgggggatgtggactggctgcaacgtggggcggggttaaaggtcttccagggcagccctggagagcaccactctgcattgagcaccgcccgggccacaggcctgcagtggcaggagcatgagtgagcaggggagggagacggaggaggaggaggggggaggtggtgcttccgacacagcgcccatgctgccccggggacctcccgaccac

SEQ ID NO: 205 - DNA, 891 bp, Artificial sequence
  DNA replication origin
ggcctgcccagagcaccaggagctggctggggctggagactggcgctgctggagctgcagctgcctggcagaggggaaactgaggtgggggtgtggctctgggacagacatcagggcaggacctccctagccagggtccacggtctggctgggggatgtggactggctgcaacgtggggcggggttaaaggtcttccagggcagccctggagagcaccactctgcattgagcaccgcccgggccacaggcctgcagtggcaggagcatgagtgagcaggggagggagacggaggaggaggaggggggaggtggtgcttccgacacagcgcccatgctgccccggggacctcccgaccaccaggcctcagccctgacgtgcccagggtggtcggggcccccgctgctgcccggccggctgctggccgggctcctgctgcacctcctgctgcccgccgcagccttcctgctggtgctcctgcccgcggccgccgtcgtctacctgggattcctgtgccactcgagggtgagcctgtgccccgtgggcgggggactagctggggtcctggggagtgggcgtgccctgggtctgaaggcactgtgcccccttccagaattgccccttgtcctcagagacacgtgtgcccctccctggcagccccttctcccaagcacccccaccagccacagccaaagaagagcttttgtttttcacccaagggacagctctgtcccttccctgaggcctcccagccttgtaccaggggccaccagggcctggacagctgggtgggggtggggagagaacggggttccaggaaaagaagatgaaaatgtcgttgaagtttcactaacccacagcccccagcccctccccaaacacacaaggcccc

SEQ ID NO: 206 - DNA, 1114 bp, Artificial sequence
  DNA replication origin
cctcccctctcttcccctcccctgccctccgtggcgggggcggggctgcgggcgggggaggccggggtcgtaagccgggagcgctgcgcgcccagccaggaaggggcagcgggggcgaccctcagttttccgggccgggccacgcgatggggtcgcgcgcgagctcggaggcctcccggggtttcgcagcggccgccgggtcacacccaggcgcagagttgctcgtcctcgtcggggcgccccggggggcggcggggtccgggggtcccagcgggcggaggcagcagcgggcggaggcgccgggctaggcgggcgcggacggccgaggcgagcaccagcagcggcggcagcgagagaagcccgaacacgatgagcgccgcggagccgcggtctgagaacagcgcgcggcaccggggacccggagcggggtggacctgggggccgggcgggccgtcagtggggggcggggcggggtaatggagggctgggggcagggcagggtgatggaggggagggggctgggcagggtgatggaggggaaggggaggggtggagaggggagcgggcgggatgatggagggaagggggagaagaggggagcagggcagggtgatggaggggaaggggcagggcagggtgatggaggggaaggggaggcgcggaggagagggtgtgggtgggtcagggtgatgaaggggcggtgagggccggacggtgagggatggatgggcgggagcagggtggagcggggaggggagagagagcggggtggaggaaaggatgcagggccacggcaaagggagacggaggggtgcagggcgggagagaggagtgggcgatagagatgaaagagcggggcggggcggtagaggggccgtggcgggctgagcagggcgggaagagggaggggggagatggagggatgaaggattagggcctgggcgaaggagaggcagggcggggagaggggagggggcgggccgctgtgggccaggcagtgctgaggggtgaacaggagatccgggacgcagcaggtaaagggctgagcagggtcccttgaggggaggctcagaaaaagcgcccactgccgcgttctgcccgcttctgccctcct

SEQ ID NO: 207 - DNA, 1045 bp, Artificial sequence
  DNA replication origin
ctcacaaacgtactcaagcacacacaggagcagatggacggggcggtgaggggcagcagtggtgaggggcagcggcggtgaggggcagcggcggtgaggggcagcggtgcgggcctgaggcactgctctggggtgtgcctgagcccaccccacaacagtaagtggggcagagcaggggtcaccaagagagcagggcccacgcagctcctagactcaacctgctcactggggtcaaggacaggtcttgggggcctcgggggtcacttttcacttcccaggagcccaggcctgcccctctggccccagagctgacccccctcagtcccccgtgccagcagcagctggggtggcgggtagacacctggcgggtagcagcctgggtaggggtgggagctgcaccatctgcgtctgtccatccatccctcgtctgtgtgctgggcacagccgcgccccagcctcagtgctggggacacacaggcgccgggccagcactgccaggctaggagggtgggcggtgaacagctaggaaagatacggtctacttgttttccctgtgagaacagggggtcactggggactcgcacgcaaggggtacccgaggaagagccttccaggcagagagaaggaaccgcgagtgctgagagcagggtggggtgggcaggaggggcctgcgccaggactgcaggggcagagcaggctgggggccttcgggaggggtggccgggtggagggtgttgccggcctcgacaggggcaggaggttcgtcacagcgaggacagagcccggcccggtgggagccggagagcagcaggcctgaatgacccagggtttcctaatagcagggccccttccttgtgtgggtcccctcactttgcctctctgctgggacatccttccctgaaagggagaggaggaccacatgctgccccttccccagacacagtccagacaggcccaggccacagccctgggcagacgcaaaactcccaggggcctggactgggatagggaggaggcagcagggagggactgacctatgtccaca

SEQ ID NO: 208 - DNA, 1248 bp, Artificial sequence
  DNA replication origin
cgcgagggacggggcgcgctcggcaactcgctcgctcgctcgctcgctcggggctgcagggcgcgtcaccgcgcggaccaggccggccccgcccccgggaggcccctccccgagcggccacacccacgccgaggccacgcccacgccctccggcgcgagcggagggccacgcgcacagaccccggagaggcgcgcacgagcggaccccgacacgcagggacacgcagcaccagccgagatacgaccgaggcacgcacgcgcaggcacgcacacacacacactccagtctccctctcccggccgaggctgtgcggcccacgctctccacccctctccgacccccagccgcgggagccgagcagggaggtaccaggctaggccctccccatgcccaccactgccgtgactctgggtgctggggtcccagcagccaggcccaagagaaccccaggggctggcggtggcaccaaaaaaacacgtccagaccgtggtttcgccttggcctccgcgctggaggcggataggtgtctggagtaacaggacatgtatcccagggactgaccagcagggatgggaaggaccatggggtggaacttacaaggacacagtggcttgaaaggggacagaagacaggaattcgagagagactcgaagcacccacgccacctgggcttcttggaggaagaggcatgggagtgggagatggttggttgaggccctgtccagtgggaccacactgggcctgttacccatataccctacccagtgaggggcccagactccaggacccaggacacacccccagcaggactggagggtcccactggtgagacaggagctcttgagtcttggggtcttggtgaggcccagacgagaggtggctggttgcagggggcgtcctgagggacagtggctcccagggcagatttcccctgcttgggtggggctgggccagcagtgtcccctggacaggagaaccctaccccggccctccctcggagtagccatggccctcttccagggcctcctcagctcagagctgggaggtgggggacgtgggggggtgtctgccaggatgtctcctccttccccaccctctcctggaggatgcgccgcgggagaacggatggggctccacaggcttccttcctccctttcaggcaggtgagacaccgcggggccgtgcggacggccagcactcgactttgcctaaaaaaggaagcagcaggctgaggctgaggagctggc

SEQ ID NO: 209 - DNA, 1394 bp, Artificial sequence
  DNA replication origin
gcgtgtcggggtccgctcgtgcgcgcctctccggggtctgtgcgcgtggccctccgctcgcgccggagggcgtgggcgtggcctcggcgtgggtgtggccgctcggggaggggcctcccgggggcggggccggcctggtccgcgcggtgacgcgccctgcagccccgagcgagcgagcgagcgagcgagttgccgagcgcgccccgtccctcgcgcgcgatgctcccctggacggcgctcggcctggccctgagcttgcggctggcgctggcgcggagcggcgcggagcgcggtgagtgcggcgggcggccgggccggggctggggcttctggtgaccgctctgcgccgctgcccgcgcaaggccgtcgctgtcccctgctccggacgggcgggcgggctgggaggctgcgggagccgggcgggggcgcgggcggagcgtcctgctcacctgaggctggcggcccaggtgctccaggcgacaccgtccgtgagcgccggggcataggggccgtcccggcccgcatctctgcgggatcgcgggcctggacaggaagagggagatgtctgtcaagggggcacccctgcctcagtttccctacccttgcgagggcccttagtggagggatggtagggaagttggagtcgccccaccgcactggggaaaaccgcaaggccgggactagaattgaggcacgctggtgccctggcttggtggggaggggcggtgtagggggcatcagcctccaccccggaggtgcccggaggaagggggaagcctgcgaggggctgttccggctttcaggctgctgggggttatatcttgttgtgtgagtccaggtgggctggaggatggaggccaggggaggggccaccatctagtaagcggggtctgggctccagccaggccatccggcgtggtcattgctgtgcctccgacaccttcccctgctgctgtgtgcatgcccagggtgcctcacctgcaggctgagctgcgtggctgaactccagcctcaggctgctcctctgaaagccatgcctggagggaacagccccacggctcaggcctgtcctgggggcctaggccaggactcttggctccacctgcttgcagggtctgtgaggaatgggaaggtgtgggggcttggagcggagagtcgccctctcacagatgggataacacaagcccagagagagccctagatcccatggccagtgtgcagtgaaacccccaaaagtacaggcctcttgcttagagttcctctttcccccaacctaggacctttgggagaaggcaagcatccacttaaggaaagctggggccctgggggaccctgccttgctgtggggctgtctggggggcccacacctgaggctgagcattcctcctttcccc

SEQ ID NO: 210 - DNA, 1407 bp, Artificial sequence
  DNA replication origin
gccagtgtgcagtgaaacccccaaaagtacaggcctcttgcttagagttcctctttcccccaacctaggacctttgggagaaggcaagcatccacttaaggaaagctggggccctgggggaccctgccttgctgtggggctgtctggggggcccacacctgaggctgagcattcctcctttcccccaggtccaccagcatcagccccccgaggggacctgatgttcctgctggacagctcagccagcgtctctcactacgagttctcccgggttcgggagtttgtggggcagctggtggctccactgcccctgggcaccggggccctgcgtgccagtctggtgcacgtgggcagtcggccatacaccgagttccccttcggccagcacagctcgggtgaggctgcccaggatgcggtgcgtgcttctgcccagcgcatgggtgacacccacactggcctggcgctggtctatgccaaggaacagctgtttgctgaagcatcaggtgcccggccaggggtgcccaaagtgctggtgtgggtgacagatggcggctccagcgaccctgtgggcccccccatgcaggagctcaaggacctgggcgtcaccgtgttcattgtcagcaccggccgaggcaacttcctggagctgtcagccgctgcctcagcccctgccgagaagcacctgcactttgtggacgtggatgacctgcacatcattgtccaagagctgaggggctccattctcggtatgcgggaggaggcagggcccagggagccctagctgggagccgcagaaggagaggctgggttgagactttgggaagatctcatgtccccagagcagcggccagggcctccggggctgtggtacccctagggtgcagggctgagtgatgcagcttgtctatgcacactcttcactgggcgacccgtgtaccctgctgagacgggggcaggcttgagtagccacctccaggtgtagctccctgctgatgtgtccagcccagacctcgaggccccagggagtgcagagcccgggtgtaggcccaggaagaagcttccaagtctggggactctgcagatgggcagcatgtgctcctgagcatgcccaccatacctggagaggggtgagccagaaaggtcagggactgcccccccagagagcacagggcacctctcctgggtggggacagccgccgagggctttgaactagttcggactgcaggcccactgtgagggtttcctgagaggccggaccagggaaggcctgaggcaggagctgagcagctcccattggctttttttctggacctccctgccccagccaagccctgaaggagctggggctggagatgaggaaccggccactggctcagcctgctgcagccactgaaaaatgccaaccc

SEQ ID NO: 211 - DNA, 1459 bp, Artificial sequence
  DNA replication origin
ggcacggggcgtgggcgcgggcgcgggccgtcgggcgtgcaggccttggcggacagcgcgctctcgcggcccgagcggaaggcggcggtcacggtcaccaggtaggcggtgcccggcgccaggccctgcagcgtggtgcagttgcggcccgcgggcacctccacccgctgcgcctccccgccccgcagcggcccgaactgcacgtggtagccgagcgccgcggctgagcccagcgctggggcccaactcacgcggaggctgcgcggccgggcgtgggagatgacgatgcgctctggcccggcctcctctggggcggggagggcggcgagctgcgtgggggccggcccagcccccgactccgggcccgaagcccccggccctgcctcaccgggccgcgtgcgcacccgcaggatctggggcctcaggaggcgcacgttggactcaggcactagcgccacgtcgtagtccgtgtccgggtcgaggccggcccagatccagtccgtggcgttccctggcagctgctggcgtcttgcagcccccggctgggcgctgggcaccagctccagcacatagtagcccgagtctgcggtcagcaggggtggccaggccaggcggaagccgctggacgtgatctccgtggcatggagctgctgcggccgcatcgcgtctgtgggtggtgcagggggtcagggaacagcggtcagttcctcctccgctgctggagggcggccctggctgatggggaagatctggagattggaggccccactaggaaagacggggccccgcggccaaggagctgctggagccatgccccgcagatgctggggattctcagaacgtgccttggctgggggaggacggaggaaagggtgcagccccctcaggccctgtcagaagcgcccctgcctcccttagccccaaacccagtcctttgtggagaggtgcagtggccagatcagtgaccaggacaaaggtcctcaaagacggcagagtccacggtggtgcctgagagcagaggaccagccccagcctgagtggccaggccggggtctgaggtcagcccggctctctgagctgcagctaggagatgggagaccacaggggcaggccctggggttctggaggcgctgcctgccctgggtccccaggagagtgtggggtggggttctccagagggggactcctggacctgtgacaccaagccccacatagccctctgagtgaccctgctgtggcgaggctcataaatgtctgcgctgggttaaagctatcaggatcttcctcctgcagtgctgggtgcctgggccactttcttcccatcccccaccctcagacccggcctctttcccaggagcccccaccctgctgcctggcccctcggcactgcagcctcaggcttttcctttggctgcttaaggcagcctttcctcctggtcccctccaggcgcagctgcac

SEQ ID NO: 212 - DNA, 1406 bp, Artificial sequence
  DNA replication origin
cgggtggaggtgcccgcgggccgcaactgcaccacgctgcagggcctggcgccgggcaccgcctacctggtgaccgtgaccgccgccttccgctcgggccgcgagagcgcgctgtccgccaaggcctgcacgcccgacggcccgcgcccgcgcccacgccccgtgccccgcgccccgaccccggggaccgccagccgtgagccgtaagccggcgtccccgcccagccgagagggccggcgcctacctgagggcccctgtgtcccgaacccggagcggaggcgcccaacccggcagacgggtgcaggcccggcctttccccacgcggactccgcgcgaccccggccctctccctgcggccgcagggcttccccgcctggcgcctgccctccagggctggggcctcgcctggcgggaccccgcagcagccccggccccatccccgcccagagccgggcgtcgtgtgggtccgtgggtgataattgagagcgtcagacccaggactgttcagggaggagccccggtcagactcccacgtgtgaagaccgggccccaagtggcaagggctggcctggggcgggcagcttgggtcctggacgttgataggaagcggaaggggaatcgcgggaagctggcccaggtcaggtccgcaaaggcttctgaagaagaggaagggcgagtaggggcacctggacgctgatggtggccaggatgctcagctggccaggagggcagcacctgctggggacggtggccctgccttcatgcccaggacaccagctgggtccagctagcagccactgggaatcagaggaatggggcagagctgggcattcaggaccttgaggacacgtgaccccacccgcccaccgccactatcaggccccgggaccgcactgacaggaaaccttccgtcgtgagggagcacttcccaggggccgcagggacgacactctccagggaggccccagcaaccacaccatcttcttgctgtgagaggtctcaccccgggctacctcctgtcactactcactgccctggggtccgtgggcaagttgcccagggtgggggtgcctagccaggtgcagtccccgccccgcctagtcctcggcgtcacgcaatgctcacctcgcctcttccccactaacatcccagactttaaaattcagtaaatcagatgtacaccgagcctgcagtctcgctaggatgctttactcctccacaaacagcagccgccgacaggacagcttgtgaacgtctccgccttttggggtgtccggggagaggaggtggagctgtcccctcccagtgtcaggcctccttggtcctcatgtgcaccttttattcagagagcttgggcccccttcctttggagctgggcccagggcaggtggctggaatgcagagg

SEQ ID NO: 213 - DNA, 1253 bp, Artificial sequence
  DNA replication origin
tgagccgagatcgtgccactgcactccagcctgggcaacaaagccagactccatctcaaaaaaagaaaagaaaagaaaagaaaattgacttggtttatcaccgtcactatagaaaattgacttggtttatcaccgtcactatagaaaattgacttggtttattaccgtcactatagaaacaggcgacctgcttccctaggtggctcccagcagcgtggcccacgcttggacaccccactccccagaaatctggactgagaccccaggcctctgtctggcttctcacgaacagctgtctggagagcttcacgtgctggagagctgttgctccgtcatcgctcacagaggcatgggcccgaatttcagccccctctgcctctccgtccagtggccagcaatgggctgtccagcgaagggcctcgcacaacctgtcagggactggtctggcacgcagccagcgtgaaatcctcaggttggttctcttcagatgtgggaggtgaccgcagccctgctcacagagagggtggaaactggcgcaggtgtgggagcagcctcccttcggggtctcctcgaagtacccagggctctccccagcgctgcccgcccccagccttctgaacacctgccacgtggatcacaaccttgtcgctcttctcgtctcaactagaagcaactgcagcatggcccttcccgatttccaggtgcatgtcgaaaagcgtgcagtggccttgtgacgtggccgggcccttggcaaggaagtcctggcgggtatcagcctctgcactgcaccctgggtggactgagtcggggccaggattgtgtcaggggaggtggaggagacgcggggacagccggttcacagcggcctggacggagcactccggggccagagctgttctgagacttggtgcagattcaaagattttaaaatgcctggggctacataaggggcagcacttctcagacgagggcttctgaaaggggcattccttggcactgagatggagacggcagtgccttttcaccctctccgtgaggccttgtgctgtgctcagccttggtgtgcagagatgggcagaggggaggcagagcctctgccagacgggtatgtggggagcagggttgtggccagggcccccgctctgccctctcgggattgcagagctggagctcctcccagcttctcatgtgagtctgagtcgtccacagaagccactgaggccaccaggaatgagcccctggtgccccgctgc

SEQ ID NO: 214 - DNA, 1603 bp, Artificial sequence
  DNA replication origin
tacccgtcccataactgtttttcctgccaaaccactcaccccgccactctggcccatactcctgctctctttaaagccaatgggcattactttagactgcggtctaaccctagccaataggggaaccacacagcagtaggggctacccgcgtcaggaataagaaccccttcccctcccttgtccaagcgcttgccattgctccatctatgagacccccccttctatagaagtaaattatctagctgagaaaactttatattcgagttctacttctttggtggcacagaaaatttacatataacacagctgcagagatctcatcactgcactccagtctgggcgacagtgagactctgtctcaaaaaaaaaaaaaaaaaaaaaagccagaaaatgccagccaggcacaatggctcacacccataatcccagcactttgggaggccgaggtgggcagatcacctgaaaacaggagtttgagaccagcctggccaacatggtgaaacccccgtctctgccaaaaatacaaaaattaacctgggcatggtggcatgcgcctgtaatcccagctactccagacgtttaggcatgaaaattgcttgaaccctgtgtcatgtgcatctgtgtgaagagacaaccaaacaggctttgtgtgagcaacaaggctgtttatttcacctgggtgcaggcgggctgagttcaaaaagagagtcagcaaagggtggtgggattatcactagttcttacaggttttgggataggcggtggagttagggacaatgttttgcgggcaggggatggatctcacaaagtacattctcaagggtggggagaatgacaaagaaccttcttaagggtgggggagattgcaaagtacattgatcagctagggtggggcagaaacaaatcacaatggtggaatgtcatcagttaaggctcttttcacttattttgtggatcttcagttgcttcaggccatctggatgtataagtgcaggtcacaggagatatgatggcttagcttgggcccagaggcctgacaccctgaaggtggaggttgcagtgagccgagatcacaccactgcactccaccctgggcgagcaagactctattgccaaaaaaaaaaaaaaaacagaccaggcacggtggctcaagcctgtaatcccaacactttaggaagccgaggcaggaggattgcttgagcccaggagttggagaccagcctgggcaacaaagggaccctgtctctacccaaaaaaataagagaggagaaaaaccaaatgagttccccagccatagtcagacgcccctgacccccacccccaccccatggctgtaatcaaggttttggttatttagaggtacagtctcactctatcatccaggctggagtgcaatggtgcgatcttggctcactgcaacctctgcctcccatgctcaggcgatcctcctacctcagcctccaagccaagaagctgggaccaccggcatgtgccacctggccctttttttttttttttttttagagggagtttgactcttgttgcccatgctgcagtgcaattccatggtctcagctcagtgcaacctccacttcccgggct

SEQ ID NO: 215 - DNA, 1589 bp, Artificial sequence
  DNA replication origin
taagaactagtgataatcccaccaccctttgctgactctctttttgaactcagcccgcctgcacccaggtgaaataaacagccttgttgctcacacaaagcctgtttggttgtctcttcacacagatgcacatgacacagggttcaagcaattttcatgcctaaacgtctggagtagctgggattacaggcgcatgccaccatgcccaggttaatttttgtatttttggcagagacgggggtttcaccatgttggccaggctggtctcaaactcctgttttcaggtgatctgcccacctcggcctcccaaagtgctgggattatgggtgtgagccattgtgcctggctggcattttctggcttttttttttttttttttttttgagacagagtctcactgtcgcccagactggagtgcagtgatgagatctctgcagctgtgttatatgtaaattttctgtgccaccaaagaagtagaactcgaatataaagttttctcagctagataatttacttctatagaagggggggtctcatagatggagcaatggcaagcgcttggacaagggaggggaaggggttcttattcctgacgcgggtagcccctactgctgtgtggttcccctattggctagggttagaccgcagtctaaagtaatgcccattggctttaaagagagcaggagtatgggccagagtggcggggtgagtggtttggcaggaaaaacagttatgggacgggtaactaaaggtgactcaggtcaaagcagatgaccaggggaacagatgtgaactgtcagtcctctgagcccaagcctgcacgtatacgtccagatggcctgaagcaagtgaagaatcacaaaataagtgaaaatggctggttcctgccttaggtgatggcattccaccattgtgatttgttcttgccccaccttaacttcctggctcagaagctcccccaactgagcaccttgtgacccccgcccctgcctgcaagagaaaaacgccctttgtcattttccattacccacccaaatcctagaaaacggccccacccctatctcccttcgtcgactcttgggactcagcccgcctgcacccaggtgaaataaacagccttactgctcacacaaaacctgtttggtggactctttacatggacgcacatgacatgaactactgattagaactggtggaaaaagttgtttattgcaactgcgaggaagttagactttaaaatgcagaacaaagactgaacatactgacataccggttctttgaagggaaatttagaattcattgtatataacattattcaggcttaaaatagtttccaatccagtgggacgagtcactccatataattctgtgaagtcaaccattcctatcaaggagagagtcggggccgccgcgagcgcgtgaaccgtgggctccggggtggtgccgacgcggctgcgggccgggactgacgttgcgccgggttcgagtactcccctccggagttttgtcccggtgcggctccggtacccagacgcttcaccacgccccccgccctccgcccgctcaccccggttcccgccgccccggag

SEQ ID NO: 216 - DNA, 1311 bp, Artificial sequence
  DNA replication origin
tgtttcgcctgcgcagtggtcctggccaccggctcgcggcgcgtggaggctgctcccagccgcgcccgagtcagactcgggtgggggtcccggcggcggtagcggcggcggcggtgcgagcatgtcgtggctcttcggcgttaacaagggccccaagggtgaaggcgcggggccgccgccgcctttgccgcccgcgcagcccggggccgagggcggcggggaccgcggtttgggagaccggccggcgcccaaggacaaatggagcaacttcgaccccaccggcctggagcgcgccgccaaggcggcgcgcgagctggagcactcgcgtgagtgcggcggggcggggcggggcgggcgggcgggcgggacgggccggggaagcgggagccctggcccttgccgctcctcgctgctgtcggcagccacttcccgggcgagactgcgcccccggagcacccccggccggagccgtctcgcgtgccgggaggatcggactctttccgtcacccgtttgcacctctgcagctgtcaggagcgggtcaggtgcgaaaagcggtgcggaggtggcgctcataggttacaggggtcagggtctggggctggccgtggtcttcagttaccgccgagcgtgcgggatccttctgcgcttgccgcctccacgtggcacaggccaaggcgtggccagatgggtagatgggtttgttgggtggttgctagcagtttccacgtaacaagggaagcgtatttgagagttacttgattctaacgagactagcagatttgcacttcttgttggaagacgttagcatttgcacggcgaggtctgtgaagccacaggccaggccgtgctgctcagcttgagtaaacccctgacccaaggccctcagggtgtgagcactgactgcaccttccctaagctcgggtctcttcccccagccttcctttcccctgtggctttaacgatttgtagcacgatgcagttcaaatggctaggagtctggaacgtagaaggtgctgaattcattgaaagaatacagtggttctcaactcttgtttaagccggggttctttctatttatttatatattgagacacagtatcgccctgtcgccgaggctggagtgcagtggtgcgatttcggctccctgcaacctccgcctccgattctcctgccgcagcctctcgagtagctgggattacagccgcgcagcaccacgcccggctaattttttttgtatctttagtagagacgggtttcaccatgttggccagggtgctctccaactcctgacctcgtgatccgcccgcctt

SEQ ID NO: 217 - DNA, 886 bp, Artificial sequence
  DNA replication origin
gggaacgaggcggcatggggctatagcctcaagggacagaggaggcagtcggtgaggaggagccgcccgtttgcctggagagcagcaaggacaaagcaacgggcgaatctcggcgaccccgctgccaggaaaggggcacggaggaagccaggagcgtcgggaggggccgggcttgcagaggggctaccaggcagaggggcagggcagggggcacccggggaaagggggcagtcaactccggagaaacctctctcacccgccagcagtgaggccaggaaggagagaagggatcaaaatgaaagagcccacacctggaacacaatccacagaaacaaaagcctgatggagggctccccacggtgcacctggagaccctgccccgggccccgctccaccacagagagggcagaccaaggcactggcaacgccggcagagcggactgcgggtcaggagctccggggccgccaggactggagcaactcagaggcacaggtctgcactatggggaggcggcctgaggctgctcaaccaggcctgtaccactgcagggggccgcaggctgatcactacgattcagcttctggaagtgggagaagtttcaatctctaagtgaagttagcgggtgaaaacccccaggaactaggacacaaaggaaccctccaaataagcctgcagcaagaaagtcagtcaccaacatccgctgtcctccgaggtgccctgaagtccagcccttgattcccatcctaacctgatcgttaaaattaccgaggaaggccatgagcagcggctcacgcctgtcatcccagcgctttgggaggccgaggtgggcgaatcacctgaggccagaattcaagaccagcctaaacaacatggtgaaaccccgtc

SEQ ID NO: 218 - DNA, 1481 bp, Artificial sequence
  DNA replication origin
cttccctgacaagggccaccgcgggccgacctcccaacaccactgccctgattcaggctgggcttaaggaagcttctgtcttccgccaattaaacgttaaagctacaatgcccacaacaggcaacatgtgaaccccgcctgcgagctcaggactgaaggtgacggtccctaaggaccagggaacagatgtcacccaagcttttctcatagacccagagacccgcccgccgccactgaccagccctcccaagcagaacctcccagactgccagctgggcgcccgggtgggagacaaggaggcttgtcgtgcctggagagccgctgctgtggaacccacacaaggggtctgtgtgtgggggtgtgcagggcgtgtgtgtgcatgccctcacgtgcagtaatgtgtgtgtgcccatgggtgcgggggtgtgtgggggtggggggtgggggtgtgccctcgtgtgcaggtgcgtgcccgtatgtatgaggcacactgtgagtgggggtgcgtacacgtgcccgtgtgtgtgtttgcggcggtgtgcgcgtgtgcccatgtgtgggactgtgtgcgtgcccgtctgtgcaagggggtgtgtgcctgggttgtgtatgtgtgcctatgtgtgagggggtgtgcgtgtgtccatgcctgtgtgtgtgtgtggtggggtgtgcccgtgtgtgcaggtgggtgtttgtgcatgtccgggtgtgtgcgcgcccgtgtgtgtgggcgtgtgcatgcccgtgtgggggtgtgtgtgcaggcccgtgtgtgcggggcggtgtgtgcctgtgtgaaggggtatgtgtgtgggctgtgtgagcgggcccacgtgtgcgggggggtgtgtaagcccccatgtgtgcagaggggtgtgcatgcctatgtgtgatcgggtgtgtgtgggaggtgcgtgcatgccccatgcgggagtgtgtgcctgaggacccatgtgtgtttgggtgtgtctgcatacctgtgtgtgtgcgggctgtgtgagcatgcccctgtgtgggggtgtatgtgcaggcctgtgtgcaggggtatgtgtgcctgtgttgtggcggggtgtgtgtgtgcgtgcccgtgttgtgtgggggtgtgtttgcgggtgtctgtccatgcccctgtgtaggggtgtgtgcgcacaggggtgtgtgtgtgtgggcccatgtttccccatgtgtgcaggggagtgtgtgggcccgtgtgtgcaggggtgtgtgtgtgcccatgtgtgcaggggtgtgtgtgcctgtctgccgggagtgtgtgtgcgaggagtgtgtgtctgtgtgggcaggtgcctgtgtctccgtgtacatgtgtgcacacatctgcatgtgtgcctgtacacgtgtgctggtgcgtgtctgtccgagtagtttcccctgctctagcacccaccgtcagcaaccccatcgttcttgccccgtggcctctgacccactgactggtcccacaaagccacctacgt

SEQ ID NO: 219 - DNA, 1240 bp, Artificial sequence
  DNA replication origin
cctcaggtgcagcagcccttctgccacggacaggtcgctctccatctcagtgccagcgaagggcgtggagtccccaaggggaggcacccatgggtcagggtgagggtgtggggacccccactaggtgccgtgctcaggagtgcaccaggacacctggaggaagcacagggcaggggacccttcctggacagctgagtgggtccctcgccccgtcccagctgtacctcccagaggcaggattcatctcacggggtgcaggggcagcagcacaccatcctcccacaacactgtcaccatgacagaacctgtcatggggatgaccacgtggtgcccgtcccctctgccagcgcccacccctcgccaagagccactgtgtggggagacaccgaccggagccggaccgccactgtgggtcgggggcccgggagcgcaggagacactgaccagagccggaccgccactgtgggtcgggggcccgggagcgcaggagacactgaccggagccgcaccgccactgtggctcaggggcccaggactgctcaacatcatttttggtcttgagcccacccaagagagggcaaacaggtgcagggaccctcagggtccacccgagtggctgcacgtcacccagggcccagcagaggagaggggctacgcagatgctcacagggccacccctccaggaagcacgggacctggcaggagcccaccagaagtgacagctaaatgtcacgtggcctcctgggtgggattctggggcaaaacctggtcgcgggtgggtccaacagtgacacatgatgttcaccatgtgggaaggccccgggcccgggagctctctgtgctacccttgcaatttttctgggaacctaagatcttcaagctataaaaggtcaaagagaagacctggacctgatttcttcacatgtgaattcacaaaacattaagaagaatcagtaccactcctcaaactcttggacaaattgaagaacatttcctcactcatcctaggaagccagcattaccctcatattaaagccagacaaacacaccacaagagaaatggcaggccaatatccctgatgagcctcactgggaaagtcctcaacaaaatgccagcaaaacgaatttagcagtatagttaaaggactctacaccctaaccaagcaggattcattcctggaatgcaaggatagttcaatatatgaaaatcaatcaatattagcagagtggaggaaggaaa

SEQ ID NO: 220 - DNA, 2038 bp, Artificial sequence
  DNA replication origin
tgacccagccccagggcacccaggaccgaggctgcagtggccgactgcgtgtcttccatggacgatgcctgggcagaagcgtgccctcttacacctgggcgcagtgtggtcatgaagtcaccgctggcccccacatcactctgcagcctcattcttctcggggtgcccctccttcaggagggaggggctggtggggcgcaggcggcagtcccgggcagcattcagaccccaactcggatgtggcgcgaggctgatgtgaagcacaccgctctgtgatcagtaaattctccagaaagctccagcctctgcctcttatgtcacctttgaccccaggaggacgctagggcgcccctgaaaccccgagcagtgtcagtcaatagagagacacggcggtgaggcacctgtgggactttattagataaacacacaccagctccagccacaggcttggaccggccagctgacagggcggcctcagacacccctgccgggttccgtggcccctggccatggctggaagcagggttcaggccgccccacttctgtctagtcctggcaggccccccctcacctggctctgctgtgggagccgagaacaaagaccccgcctgccccactccttctgccccaggggctcagccagcacccaccctcacagtggcctgggcaggggctggggtacaaagcctcaccctccccctgtgagccagacggaaaatgcatctcccaagagtgtctcgaggggcaggaaggaggcctgcccctccctagccagtgcctacaacagggggtgccctggggggcagaacggccgaccgccaccacaagacatcctgggggacagaggccctgggcacagcccagtccccatccaggagcatatcctaaatgtgcaggggccggcaaggcaggggtaggaggggtccgtggccaggctccatgaggtgagggtctcgccttggactccggatagggggtgctcgaccccgcgcccaggcccctccgccttcagccagcgcatcttctgtcggtactgctggacagcatcttgcacacaggcgtccatcatggcctcagtgaggaccccgtccttggaggcatatgccgtggcctagtgaagagagagggagctgagggaggccgctatgggaacccgccacccttaatgcacgccagggccccgaggtggggaggggccaaaccaggggcaccaggacaacctcagggtgaaacacaggcttcccacaccttggcagagcccagcacgcgtgtggacactgggagcggcccctgcagtgcccacagccctgcctgcgtcctcagcactgctgttgctcaatgactttctgataatagaaaacccaaggcggagcaccactgacggctgacccagggcagcttccgagaggcaggtgggaactgcagaccctctgcgagtctcagccgtggccaggcagtgcccccgggtcatagtgcacctcagaccctcagaccctgaccctcacaggcctccagggcagaggcagccactgcccaccttgggacatcaaggccacctctgcctccatttccctgtcctcctgggcacagggcttggcattgagcacacggaggctggagctactggggctgtggcccttggtgtcgccttaggcacctcaggtgcagcagcccttctgccacggacaggtcgctctccatctcagtgccagcgaagggcgtggagtccccaaggggaggcacccatgggtcagggtgagggtgtggggacccccactaggtgccgtgctcaggagtgcaccaggacacctggaggaagcacagggcaggggacccttcctggacagctgagtgggtccctcgccccgtcccagctgtacctcccagaggcaggattcatctcacggggtgcaggggcagcagcacaccatcctcccacaacactgtcaccatgacagaacctgtcatggggatgaccacgtggtgcccgtcccctctgccagcgcccacccctcgccaagagccactgtgtggggag

SEQ ID NO: 221 - DNA, 1234 bp, Artificial sequence
  DNA replication origin
aacgtccccctggggtcaaaggtgacagaaaaggcagaagctggggctttctggaggatttaaccacagaggggtgggctgcacaggaggtgcctgccacggcagggccgggtgcccgtgccccatcctgaggccgtgcatacgcgggtgcccttcgcctccctcccctccgccagagctgcctgtggccagacacacggtggagggaagtgcacgcgaaacagacacagcggcttcaaatagatgccgcccctgcccgcgctttgcagctagtccctgcaaaccttgatgatggggctgggcgcggtggctcacgcctggaatctcagtgaggccaaggagagtggatcacctgaggtcaggagttccagaccagcctggccaacatggtgaaaccccatctctcctaaaaaaaaaaaaaaaaaaattagccggccgtggtggcaagtgcctgaaatcccaggtactcaggaggctgaggcaggagaatcacttgagcctgggaagtggaggttgcactgagctgagaccatggaattgcactgcagcatgggcaacaagagtcaaactccctctaaaaaaaaaaaaaaaaaaaaaaagggccaggtggcacatgccggtggtcccagcttcttggcttggaggctgaggtaggaggatcgcctgagcatgggaggcagaggttgcagtgagctgagatcgcaccattgcactccagcctgggtgacagagtgagaccctctcaataaataaataaccaaaaccttgattacagccatggggtgggggtggggggacgtctggctattgctggggaagtcatttggtttttctcctcctctcctatttttttggtacagacggggtctctctttgttgcccaggctggtctccaactcctgggctcaagcaatcctcctgcctcggcctcccaaactggcggggttacaggcgtgagccaccgcgcctgccctgttttctttttcttttttttttcttttcttttttttttggcgatggagtcgtgctcgcccagggtggagtgcagtggcctgatctcggctcacttcaacctccacctccagggttcaagcagttttcccgcctaagcctccggagtagctgggattacaggcgcacgccaccatgcccaggttaatttttgtatttttgacaggggtttcaccatgttggcccggctggtctcaaactcctgttttcaggtgatctgccc

SEQ ID NO: 222 - DNA, 1111 bp, Artificial sequence
  DNA replication origin
aggctggtctccaactcctgggctcaagcaatcctcctgcctcggcctcccaaactggcggggttacaggcgtgagccaccgcgcctgccctgttttctttttcttttttttttcttttcttttttttttggcgatggagtcgtgctcgcccagggtggagtgcagtggcctgatctcggctcacttcaacctccacctccagggttcaagcagttttcccgcctaagcctccggagtagctgggattacaggcgcacgccaccatgcccaggttaatttttgtatttttgacaggggtttcaccatgttggcccggctggtctcaaactcctgttttcaggtgatctgcccacctcggcctcccaaagtgctgggattacgggtgtgagccaccgcgcctggccggcattttctggcttttttttttttttttgacagagtctgactcagtcgcccagactggagtgcagtgacgagatctcggcagctcactgtgttatatgtaaattttctgtgccgccaaagaagtagaactcgaatataaatttttctcagctagataatttacttctatagaaggggacatctcatagatggagcaatggcgagcgcttggacaagggaggggaaggggttcttattcctgacgcgggtagcccctactgctgtgtggttcccctattggctagggttagaatgcacagtctaaactagtgcccattggctattttaaagggagcaggagtatgggccagagtggcggggtgagtggtttggcgggaaaaatggttatgggacaggtaactaaaggtgactcaggtcaaagcaggagaccgggattagttaggacggagcaggtgaccagggcaacagatgtcaactactgactagaactggtggaaaaggttgtttactgaaactgcgaggaaggtagactttaaaatgcaggacaaagactgaacatactgatatactgattctttgaagggaagtttagaactcattgtatctaacattattcaggcttaaaacagtttccaatccagtgggaaaagtcactccatatattccgtgaagtcaaccagttccatcaaggagaaagtcagggcc

SEQ ID NO: 223 - DNA, 1290 bp, Artificial sequence
  DNA replication origin
ggggctatagcctcaagggacagaggaggcagtcggtgaggaggagccgcccgtttgcctggagagcagcaaggacaaagcaatgggctccggccgaatctcggcgacccgctgccaggaaaggggcacggaggaagccaggagcgtcgggaggggccgggcttgcagaggggctaccaggcagaggggcagggcagggggcacccggggaaagggggcagtcaactctggagaaacctctctcacctgccagcagtgaggccaggaaggagggaagggatcagaatgaaagagcccacacctggaacacaatccacaggaaacaaaagcctgatggagggctccccacggtgcacctggagaccctgccccgggccccgctccaccacagagagggcagaccaaggcactggcaacgccggcagagcggactgcgggtcaggagctccggggccgccaggactggagcaactcagaggcacaggtctgcactatggggaggcggcctgaggctgctcaaccaggcctgtaccactgcagggggccgcaggctgatcactacgattcagcttctggaagtgggagaagtttcaatctctaagtgaagttagcgggtgaaaacccccaggaactaggacacaaaggaaccctccaaataagcctgcagcaagaaagtcagtcaccaacatccgctgtcctccgaggtgccctgaagtccagcccttgattcccatcctaacctgatggttaaaattaccgaggaaggccatgagcagcggctcacgcctgtcatcccagcgctttgggaggccgaggtgggcgaatcacctgaggccagaattcaagaccagcctgaacaacatggtgagtgctcacaccctgagggccttgggtcaggggtttactcaagctgagcagcacggcctggcctgtggcttcacagacctcgccgtgcaaatgctaacgtcttccaacaagaagtgcaaatctgctagtctcgttagaatcaagtaactctcaaatacgcttcccttgttacgtggaaactgctagcaaccacccaacaaacccatctacccatctggccacgccttggcctgtgccacgtggaggcggcaagcgcagaaggatcccgcacgctcggcggtaactgaagaccacggccagccccagaccctgacccctgtaacctatgagcgccacctccgcaccgctttccgcacctgacccgctcctgacagctgcagaggtgcaaacgggtgacggaaagagtccgatcctcccggcacg

SEQ ID NO: 224 - DNA, 1292 bp, Artificial sequence
  DNA replication origin
ccagcaggcctcgcccactgcactggtagctatgaggggccgggcggcagaactcaggctcagagtgcacgccgggtccacaagcagcccccgccacctccgccccagccaggagagcagacagcctacctcgccgcatggcttcctgcttctgcacggactcctcctgcttccgtaaattctcctcattgagaagttgctgagaagaagccgcagaaaaagagaaaagcctttaaaacctgtgactgtgcccatgtgtgcgggggatgactgtgcccgagtgtgcaggggggtgagtgtgcccgtttgcggggtgtgacggtgcccgtttgcggggggtgacggtgcccgaatgtgcaggcgggtgactgtgcccatgtgtgtgggggtgattgtgcccatgtgtgggtgggttgtgcacccgtttgggtgtgtgtgtgtgtgtgtgtgtgtacccgtgcggggggtgggggggttgtgcgtgcctgtgggggggggtgtgtacgcccgtgtgtgggtgtgtgcccatgtgcgggtgtgtgtgtgtgtccctgtgacgggaaggcgtgtgtgcccgtatgtgtgtgtggggtctgtgcgcccatgtgggggggttgtgtgcgtgcccatgtgtgcgggggggctgtgcccatgtgtataggggggtgtacgcgcgcccatgtgtgtgggtgtgtgtgtgtccgtctatgggggggcatgcccatgtgtgtgtgggtgtgcgcctgtgtgtgtggggctgtgtgtgtgcccgagtgcgcgggtgccagtgagcctgtggggggtatgtgtgcgcctgtgtgtgtgtgggggggtacgtacctgtgtgtggtgtgtgtgtgcgtatctgtgtgtgtgtgtgcggggtgtatgtgcgtacctgtctgtatgggggtgtgtttacaggtgtgagtgtccatgtgggtgtgtgcctgcccgtgttgtgtgggggtatgtttgcgggtgtgtgagtgcaggcctctgtgtgggggtgtctgtgtgtgggcccgtgtgtgcaggggtgtgtgtgtgcccgtgtgtgcagaagtgggtgcacctgtctgtgtgtgctgggagtgtgtgtgcgaggagtgtgtgtccgtgtgggtaggtgcctgtgtctccatgtacatgtgtgcacacgtctgcatgtgtgcctgtacacgtgtgctggtgcgtgtctgtccgagtagtttcccctgctctagcacccaccgtcagcaaccccagcgttcttgccccgtggcctctgacccactgactggtcccacaaa

SEQ ID NO: 225 - DNA, 1665 bp, Artificial sequence
  DNA replication origin
gtagcacagagacttcctgggcctgggaccttgccacgtggtgaacatcatgtgtcactgttggacccacctgtgactgggttttgccccagaatcccacccaggacgccacgtgacatttagctgtcacttctggtgggctcctgccaggtcccgtgcttcctggaggggtggccccgtgagcatctgcatagcccctttcctctgctgggccctgggtggggtgcagccactcgggtggaccctgagggtccctgcacctgtttgccctctcttgggtgcgctcaagaccaaaaatgatgttgagcagtcctgggccccggacccacagtggtggtgcggctctggtcagtgtctcctgcgctcccaggcccctgacccacagtggcggtgcggctctggtcagtgtctcctgcactccggggcccctgacccacagtggcggtgcggctccggtcagtgtctcctgcgctcccgggcccccgacccacagtggtggtccggctccggtcagtgtctccccacacagtggctcttggtgaggggtgggcgcttgcagaggggacgggcaccacgtggtcatccccatggcaggttccgtcgtggcgacggtgttgtgggaggatggtgtgctgctgcccctgcaccccgtgagatgaatcctgcctctgggaggtacagctgggacggggcgagggacccactcagctgtccaggaagggtcccctgccctgtgcttcctccaggtgtcctggtgcgctcctgagcacggtgcccagtgggggtccccacaccctgaccctgaccctgacccacgggtgcctccccttggggactccacgcccttcgctggcattgggatggagagtgacccgttcattgcagaagggctggacctgaggctgcctgaagccacaccaagggccacagccccagcagctccagccttcacgtgccagatgccaagccctgtgctcaggaggacagggaggtgggggcagaggtggccttggtgccaccactcatgtgcctcaaggtgggcagtggctgcctctgccctggaggcctgtgagggtcagggtctgagggtctgaggtgcactatgacccgggggcactgcctggccacggctgagactcgcagagggtctgcagttcccacctgcctctcggaagctgccctgggtcggcggtcagtgaggctccgccttgggctttctattattagaaagtcattgagcaacagcagtgctgaggacgcaggcagggctgtgggcactgcaggggctgctcccggtgtccacacacgtgctgggctctgccgaggtgcgggaagcctgtgtttcacgctcaggccatcctggagcccctggtttggtccctccccacctcggggccctggcgtgcatttggggtggggggttcccatggcggcctccctcagctgcctctctccccactaggccacggcgtatgcctccgaggacggggtcctgaccgaggccatgatggacacccgcgtgcaagatgctgtccagcagcaccagcagaagatgtgctggctgaaggcggaagggcctgggcgtggggacgagccctccccatcctgagtccacagggagatccacagctcacggagcctggccgcggacccctcccacccctg

SEQ ID NO: 226 - DNA, 1207 bp, Artificial sequence
  DNA replication origin
gagctgggccggcggccgcacaggcccttcgaggaggccgccgggaacatggtacacgtgaagcagaaactctaccacaatggccaccccagcccgcggcacctgtgagccgcacggggacttaccggggccaccgagccaaccggctgctgtacagatgtaaaagggacctcgtggacgcccgggccggcgggactggacagcagccctgggcccaggttgtccggggctgtggccggccgggagagtccagtggaaggtgctgtctcttctttttataaagggggttggggtgtgggctagggtgggggttgggttaggggagaccctgcagttggggggcaggacacaagggcggactcatccccagcggtgctggggggcagggagggtcctggggggcagggagggtcctggggggcaggtgggggcaggggcggcgaggcgcgcggcccgggccagcatctgtttgaaggcgctgtttcccgtgcgctgcgtccaccgtctgtctggccccagccagcttgggcggaggggaggggggcgaggggagcacccgcgtgtgcacagccacagggtggggtgcaggtggctgggcccaggcagcattcaggcccctggccccgcagtggcgggcactcatgtgaagcccacccctctgtggtcagtaaattctccagaaagcgccagcctccgcctcttctgtcacctttgaccccagggggacgctaggaggcccccaaaaccccaccccgtgccagccaagagacagacagggcaatgaggcacctgtgggactttattaggtaaacagaccccagctccagccacaggcttggaccggccagctgacagtgcggcctcagacacccccgccaggttccctcctccctcctctctcagggtcaccagtgtgtgaaagatcggggcatgccggccacagggggaagcagggttcaggctgccccacctgggtctggccctggcaggcgccccctcacctggctctgctgtgggagccgagaacaaagacatcacctgcctggctcctgctgccccgggggctcagccagcacccaccctcacagtggcctgggcaggggctggggtgcaaagcctcaccctccccctgtgagccagacggaaaatgcatctcccaagagtgtctcgaggggcaggaaggaggcctgcccctccctagccagtg

SEQ ID NO: 227 - DNA, 2040 bp, Artificial sequence
  DNA replication origin
acgtgcctatacgtagacgttgacgtggagaacgtgtatggaaatcaatgctccaaagtctgttggcaggcagcgtccaaactagacatccgtccatgcacgtgacgtggcgccccgtggagagggtggctgcgttttgcaaagccaagcgaacatgcactcgcgtgacacaccgtgcacagggcgggggtgtggcgctcccggggcccatgtccacagtatcacgccatgtcccgtgcatgtggctggtgtgtatacgtgatgtacactgggcctcaggtggacacacctggtgtgtgtggtgcaggcaggacacacgtatgtacatgtcacagacatacgtgtgcagatagcatatctctgcccaggcctatctcctgctttcacttgggagacctgagccctccaggaaggagggccaggtgcagggagaggagctacaggtacccaggccagccatggtgggggacacaggctgtgacctctgacccccaaagttactgagcccctggggtgggtgaggactctctaaggggtcaggaacagcttcctcccctgagggcctctggcagctgcacattctgggcagtggtcagcagctgcccattggtgacgatggacgatggctgtggacaggctcgtcaccaggtgatcggtggccaccaggaatcagccacggtcatggtcactcctcaccgagagccctgccactgaaagcggccactttccggatatgctgaggggactgacctccgggaaccccagaagagcaggagggcttcaaggggagcgtggggcaggggacacctcctccctgttcctgggctcgggccccaggaccccccagatctcactgagggaaggcacctgtgtggtccccgctgggcacagggatggcctggagagggctgcaagaccctgggttggacggacaggctgggctttcagtgtgggaagtacttctggttggggtgtggagggtggggtggtctctgggtctcggctgaaaaccaggctgaggcgctgctacgtcaccgaggggaaggtgggggagaagcaggtctggggagagaggagctatttttaggcacaagtttaaggtgtctgcggatcccacgtggagacacaggcagctggagctcggcggagatgtgggaggcagccaggagtgtggaccgcaaggcgcgtggggcccgcgggctccactcccaggccctcctgttggactagggatcccagagttgactgtctgggatgccagtccgatcggcagagtcaaggcccggagaccttcctgggacagggtgagctgctggggcgagctccttggggagcttgtgttgccccagcagcaagaggccagaggctgttgtggcctgagcctgggcagttcccccaagagcccggggaggggaggccgagggacatggaggcgcgcaggcactgaggacgaaagggccctggagcctggacgccgtccatcctgagaggagcggggcgggtctgtgccaggcaagggcaagggggcgtcccccaggaaggggagaggatggggtgctgggtagagcccccgtggcctccgacagcacctcccagggatagaggagcagaagaaacaccaggggcagtgggcctggcaggcgcggtggcagccgtggaggaaagggcacagcagcggggggaagggtgcatgggagtggctggtctggggccagcagggctccctgtgtccagctctgctccaagtggcctccgcggccccggggcgggcgggtgagctgtgaccctggccgtggggaccgccgtcctgagccccctccgggggaggcctcttccacctgcagcaccttcccgtgagctccaggcctcagggaggaggtgctgagtgagggccgacaccctcgccggcagctggtcccgctgtctgcccggacttcacgctcggcctccacagcccatggccactgacctcccactccctctggcctgtgacctgggcctcgttgagtctggtgcccccttcccgacccgcccgcccaa

SEQ ID NO: 228 - DNA, 1460 bp, Artificial sequence
  DNA replication origin
cttccccctccccggcccgcggtcccctcccgggcctgcgctccccccaccccggcctgcgctcccctccccagcctgcgatccccatacccgctgcgctccccctaccaaggcctacgctcccctcaccccggcctgcgctctcgctccccgcttgcgctgccccgaccccggcctgcgctccccacccccagccccgcttcgtcccgcccgctccttggcgctgaccggtcatgagctcttccaggccatcgcgtgcttgatggacatgaacgcgctgctggaccgattccacaactacatcctcccgcacctgcggggcgaggaccgcgtctgccactgcaactgtggccggtgagtccacaaccggcgccggctcgacacgcgtgagcgcacatgtgtggcggggcccactcggggcgcgggggaaccagccccacgcaggccgcgagccgccttccacccttgagggctgccaggtgcgcagggggaggagctgtctcaaggtgggcgggggtctcctgggggcgcatggctttaggacgccgttcctagaggcctccagggtgatggcggaatgggtcacggggcctcctggtccagcctggaggccggaaagccgcagcccagtgtgatgtccacagtggagacccaagccagcctcatcagggctggggcaggaagcgcctgctggcacagggctgggccctgcactgagtccctgggcaggggaatgcaggtcaaggcgggaagggcctgccttgaggggcactgggcaccacccccgggctggagaggagctgagggatgggctgggggggcagcggggaggtggagcttcctcaaggtcattcagattgaggggagcgcccagaccccccgcacccaccgtgtgaccccctctgtgcacgtgtagcgatgggatcctcttggccatgcatgtttgtacgtccatgtacgaaataaacatcttctcatgagacgcgcatgtgtgtggcgtctgtgcatatacatgtgcgtacacacagcccccgcgcacgcacgcatgcacttccacccctcaggacaccctcacgcagtggccgctgttaaccctgctgaacagatgaggaagtggacggaggatttagaggacaggcttttccaaggtcacacagctagtgaaggacaaagggggcaccagcccagaacccgtgttcgtcatctctgctgcctcctgctccgggggtctctgtgcatacgtgtgggtgtggggcatgtgtgttcaggacagctgcatgtgttgctaagcgtgtgacatgcctatgggtgcagcaggcgtgtcgatgaagaacacgggtgttagagaaggcagagatcggggtgtctgtgaccctcacgtgtgctgggcacagggtagggggtaagagcttgtggggtggccacatgctaccagagagccccgtgtccctggctggcag

SEQ ID NO: 229 - DNA, 1024 bp, Artificial sequence
  DNA replication origin
tgcttgggtcacgttggccagagctgagtcacagacaggccgctccttgcttagaggcactgggtgctggccaaggctggggaccaggggacagtggagatggcgagtaacgagctgccggtgccagggcaggtgtgcctaggagccgggcctgctcactctggggcagcggccctctgccaggggctctggtggatggaggccaggatgctccgatgaccaggctgcccccgctcgcttgttggtggtgtggaagcgctggcggtgagggttggtcggccccgctgtgcatgtgtgggtctgagccctggccgccaggtctccgtgctgggcccctctcagaatccagctccaggctcctcccagctcctcccagcttcaggtcctgtgagggtcggtggggaggtgggggctgcccgggacgctctccccctgcagcctccggccgtccttgtgaggcagcagcggtggggtgagggcctgcctgctgcgctggtttctgctggctcaggcctggcgtttccctggcgatccaggtgttagggggagcagacaggcaggagtgggcaaggccctcaccacggtcctgtccttgcagatccagcacacggaagacatggagaacgagatcgacgagctgctgcaggagttcgaggagaagagtggccgcacctttctgcacaccgtctgcttctactgagcccagcgcccgcatggagccgcctctggagcttcctgttgttcatactttttccttcctgacatttgtttttacttacaggtgttctgctggtgacggtagcattacccaaataaactgtgcatatgaaatgggagaggagatgccaaaacgccagatgaaagcaatcaagtttcttcttttccacttttacttatgagcaggatattgattacaaagtttttcttctttaaccaaaaaggaaagacaacggtttgtgtgcacttcccgacatacctgtgtcttcgtgtgcctgccttccctccctcctccccaccgggccgg

SEQ ID NO: 230 - DNA, 1059 bp, Artificial sequence
  DNA replication origin
ccagcttgtgctgagttggagatttgctcaggtttcctcgaaccatcagccgccttcggtttgaggctcattcattgtgctccccaaactgcagagtccagaaaccactggggctgggctgggcctgcagccggcagagctggggactcagccacattgactgcctgttccctggttttggagcctctgacgtctgtgtcaccttgtcccaatcagatctgaattccagagaacaggagacctgccagcctgtgcacgtggtcaatgtggacatccaggacaaccacgaggaggccaccctgggggcgtttctcatctgtgagctctgccagtgtgtaagtacccggctgggcgccgcgctgggcagaggttgtgacagaggggagtgaccgaggccgtgacagaggggagtggccgaggccgtgacagagggggtggccgaggccgtgacagaggggagtggccgaggccgtgacaggggagtggccgaggccgtgacagtggggagtggccgaggccgtgacagtggggagtggccgaggccgtgacagaggggagtggccgaggccgtgacagtggggagtggccgaggccgtgacagaggggagtggccgagacctgaggccggccctgctgcttggggcaaggtctgctcagctcgcctgtgtcgggggcgcctgctggtagttcagtgagtcactccacagctttggcacaggaggcccccctgcaatgccctttgctcagctgagagacgctgcacagggacctccccaacacaggcttagtccctctcccaggacacggctccagggaacgcctggtaccttgtctcttccccgtggcggacacagccccacctcagtgagcagagcatgcagctctccgggatgcggtgcagtcggaggtgtgccccacgtgagcctggaggctgccaagggctctgtgtccgccgtccacccctggacttggccttctgcacacctgccttccccagtgggccctgcatgtctcccttgcacagaggggccggggcaccccaaggcttctgtagccacc

SEQ ID NO: 231 - DNA, 981 bp, Artificial sequence
  DNA replication origin
agagagtgtatgaccaggtggtggaaggtgaggaggcggctgcgtgctgggctgggctccagcagctctcacagggtctggggatgcctgcagggccccaccatgaccagtacagcccgtctagagtggcgggggccggggagcagacctgagtgtgaagcaccctggaaggcaggcagggccgctggtcgctgaaccacccatgtgctggctgcagcctcatgggcttcaaggggcctcttttctccttggtgtttttttgttttgttttttgagacagagtcgtgctctgtcgccaggctggagtgcagtggtacaatctaggctcactgcaacctctgcctcccgggttcaagtgattctcctgcctcagcctcccgagtagctgggactacaggcgtgtgccaccacacccagctgatttttgtatttttagtagagacggggtttcaccatgttggccaggctggtcttgaactcctgtcctcaagtgatccgcccgcctcagcctcccaaagtgctgggatcacaggcgagagccaccgcgccaggcccatttttcaagcggatggaccctgtgtggagctggcggtggagcagggagggctggtctttagtgacggggaagggtcgcaatgccagtcacggttcaccccaggactggctggtgggtggggagtcccagaccagcttgtgctgagttggagatttgctcaggtttcctcgaaccatcagccgccttcggtttgaggctcattcattgtgctccccaaactgcagagtccagaaaccactggggctgggctgggcctgcagccggcagagctggggactcagccacattgactgcctgttccctggttttggagcctctgacgtctgtgtcaccttgtcccaatcagatctgaattccagagaacaggagacctgccagcctgtgcacgtggtcaatgtggacatccaggacaaccacgaggaggc

SEQ ID NO: 232 - DNA, 869 bp, Artificial sequence
  DNA replication origin
accgccggcgccgtcgtttcgcgtcgcccgcttccggccaccgcggccgccattttgttcgcgcggaagcgccgcggtagggtgggaacccaagcgggagagccgcgggatttgcggccgccgccatgccgtcgtccccgctgcgggtggcggtggtgtgctcgagcaaccagaaccggagcatggaggcgcacaacatcctcaggtagttgggctccaccctgtccccgcgcgctctgctccggcgaccggccctccctcctccccggttccccctggcccgcgccaggacccctgagaggaagccgggccgggccgcgctcgtgggtcggctggttgggatggcagctggacggcagcgcgcgtagtccacacgcgggtgggcatcacagggaaggcaggttccgggacgaggcgcccgctgtccggtggtccttcgagctctccgaggccgggcccggggggcgagggtagcgtccgcggcgaggggctgcgcggcggcggccgatcatggtatttcgtgtgcgtcgttggccaccttccctggaaacggcgcgcaacacaatcacggcataccacgatgttgtaaataacaaagcggtctctttttttaatgccatggatttgtgtgtttgctacttcttcttctttttttttttttgcgaaagatcctctcttcctccctggaacgcctccaaccggtagtttctggaatacaacgtggacttggtttggctctgctagtttatattccctgctaactggccgcctgtgactcttgcgtagcgtatgtctaatgaaagtttattcctgcttgataacaagttttttgttcagtcacatagcaaactgagaaactgaccacttga

SEQ ID NO: 233 - DNA, 1338 bp, Artificial sequence
  DNA replication origin
ggtcgccggagcagagcgcgcggggacagggtggagcccaactacctgaggatgttgtgcgcctccatgctccggttctggttgctcgagcacaccaccgccacccgcagcggggacgacggcatggcggcggccgcaaatcccgcggctctcccgcttgggttcccaccctaccgcggcgcttccgcgcgaacaaaatggcggccgcggtggccggaagcgggcgacgcgaaacgacggcgccggcggtgtagcgtgcggcgactgcgcggcggcctccccgcccaccctgggcgccgggccgcggacggagcgcaggcactggccttcgggcgcgctgcactcggcgaggccgggggcggccaacgccgcgccggcccccggcgtccgcagcagagacccgcactccacaaggcccggctgagcgtcacggcgccaagcggcggcgtcctgacatcagcaccccgcgccggcgcctagtgtgacgcgacgacgtgcggaacaacaggacgtcataaggtgtcgccgccgcctttgggagcgatgcgaaacgccgcgcttgccggagatagcattgagggcccttccgcggcccggcgtttcgtctcttgggacgattttgtgcgttccctcggtccccgtggggcccatagtcctcacttctgccaccccagagtcgtcgcgcttcactagacccgctccctccactgtcccggaggcccacagacattcccgcattctgaggctcgctcccgtcccgtgccgctgttaccggcctccggccccggctcatacaagcaggagcacatcgctcttttatgaaagcccttcaacatttaacgtttaaatgcgagggccgacctgtgacagacctggttgggagtgcacgtcgactaggatcttcctcgcctcgggcttccttggagaggccgccggctggtctgagatttgggtccagttacagtaaatccagtcaacgcgagtgtgtcattccccagctatgcctgtctgcctggatgcagcctcgcggtggacagtgggctgatgttttgccgtgggagcgccacggacgggagagggagtgataatgattgtcaacctaataacaggctaactgaaaatgatatttatttgggaatagggcgttggcgaatatgcgtgccatagtaaacgatttgcgcattcaggaaagtaatggtttttaaagaaaaaatgaagaggaagataatggtttggaaataattaaccttggctacaaagaacagtaacaagtgtactcccggccgggcgcggtggctcacgcctgtaatcccagcactttgggaggccgaggcgggc

SEQ ID NO: 234 - DNA, 3383 bp, Artificial sequence
  DNA replication origin
cccaggacttgctagactggccaaatcttgcacctgccaggtcagggtctccagcagctcctggccattcctgagccccccgtccagtagtcaagacccccatcctaagtgagcatggaaccaccagcctcacagccctctgttcctcccaggagacctagagtccatccctcctggggcacctggggagacagcagggcccggctgcctgcatccagaccatgcagggcctccagctcccgtactcagcatggctgtgggccttgcagttggctaagatggggccatcgctgtgggccaggctctggaggtgagcagggaggcctagggttctgttttggacacaaaaggggtgagaggccccctgagtgatcgaagtgaaaacttcaagaagggcatcttgtctcggcagagtcgggccaggacgcgcccccacgggtctcaggtcttggcagggtcgggccgggacgcggctccaggggtctcggcagggtggggccaggatacacccccaggggtctcagcaggttccggctgggacgcggctccaggggtctcggcccggggcagttcaagctgtagtaacaatagctccagttctcatctctacctggctgtttccattccacaatggaggcactgaaaggctcctgccttctgaagggcaggcacggatgagccaggatgaagccagggcagcttccgagtcagggcaggtcccttccgccccacactggaaaagcgtatagctccaggcaccagcgagaaaggccaggtggagccatctgcgctccagctccatggcacatggcggttgctaggctgagagccacatccacctgcctccccacccagcctgggccaccaagtctgaagaagagcagagagccatggtccagagagagcagggtggggagagacagacagagagagcagaacgggaagagacagagagaggcagacagagagagagagagagacagacagacagacacagagagagcagaacagggagagacagagagagtgagacagagacagagacagagaggcagacacacagagagagagagagagacagacagacacagagagagcagaacagggagagacagagagacagagagagagagtgacagagagaggcagagagagagagagagagacagacacagagagagcagaacagggagaaacagagagacagagagcgagagagacagagacagagagaggcagacagagacagagagagagacagacagacagacacagagagagcagaacggggagagacagagagacagagagaaacagagacagagacagagaggcagacagagagagagacagacagagagcagaacagggagagacaaagagacagagagagagagagacacagagagagagagatagagagaggcagacagagacagagagacagacagacacagagcagaacagggagagacagagagagagagacagagagaggcagacagagagagagagagacagacacagagagagcagaacagggagaaacagagagacagagagcgagagagacagacacagagagaggcagacagagacagagagagacaaacagacagacacagagagagcagaacggggagagacagagagacagagagaaacagagacagagacagagagaggcagacagagagacagacagacagacagagagagcagaacagggagagacagagagacacagagacagagaggcaaacagagacagagagacagacagagagagcagaatggggagagacacagagacagagacagagacagagagaggcagacagagacagagagagagacagacagacacagagcagaacagggagagacagagagagagagacagagagaggcagacagagacagagagagagacagacacagagcagaacagggagagacagagagagagagagacagagagaggcagacagagagagagagagagacagacacagagagagcagaacagggagaaacagagacagagagcgagagagacagacacagagagaggcagacagagacagagagagacagacagacacagagagagcagaacggggagagacagagagacagagagaaacagagacagagacagagagaggcagacagagagacagacagacagagagagcagaacagggagagacagagagagacacagagacagagaggcaaacagagacagagagagagacagacagacacagagagagcagaatggggagagacacagagacagagacagagacagagagaggcagacagagacggagagagagagcagggcggggagagacagagagacagagacagacagagacagagagacaaagacagagatagagaaagacacagagagggacagagagacatggagagagacagaaagagaggcagagacagagatggagagaggcagagacagagacagagtgaggcagagagagatggagagagagaggcagatagagagacagagacagagagaggcagagagagatggagagagagaggcagatagagaggcagagagacaaagagatggagacagagacagacacagagagagggaaagaggcagagagatagggacagagagagatggagagagacagagacagatacagagagaggcagagagatggagacagagaggcagagagagatggagggagatggagacagggacagagagatagggagagagagagatgaagagagacagagaaacagagagagagaaacagagagagagagagagagccagagacagagacagagagatacatgggaaggagagggagagaatggagagagacagagagagggaggggaggctcctccaggtagagcagaaggaaagaaacttcggggcgggactggaaggtgcaccaggtcagaaggaggggttgggggtccccatgcccctgggaggataatggggccagccgggaaggtggccagctagggaacgagcagtctgtgccagtgaccacgagctcagatgcagacgcccctccctggcagggacgcccactcccaggccaaggcttgtcccctgggccttgcaggctgctcaagccacttctgcaaaccctcagctggactccatgcctctgagaagcccccagaactggcaggacaggcctgtggctatagcccgtgtgagcctaagctcacaaacaagccggaatcccaccgcaggccagggagcctccgaaacttcccggctgctccccaaggagccgtgctgccccagctccctggacgctgcctttgctggtagaagacatggaaacacccttgcaggtgaccag

SEQ ID NO: 235 - DNA, 2069 bp, Artificial sequence
  DNA replication origin
ctcctcagagctgggctcctcctccccctccccctccgccccccccccccccgcctgtttttgcttcctcagggtcacccctggctgcaagtgcctcaaggacagcctggaagagcctgtgggggagggagggtggcattcagcacaggatacacacaggagccccaggctgtcctctgcccaccgtccccaccccagctctagctctgccagggaggcccaggcagggaggtgagcccctccggagcagcctaattgccactgtcacagctcaagtgtgtcgccgtgggaatgggctatttctaagcacggcaggtaccgtcttccccttcccccgccaacacagctggcccaggacaagaaggtgcagagacaaacagggggcaccctgcctgtcctgctaggaactgcaaggcagcgtgccgcacacgctgcctgggccaatgccacccaggccaggagagggtttggggccagacaccagcccatacccaagggtcccaggggatgtggggagaaggggaatccaccttttccttccctcccacctcccaaataacacacagacagctctgttggtctgagaatgatggacatttagacactggcgccaggtttgcgcctgaccggcgccacgcaggggtgggcggagcaaagacacacaggtgggctacaggtgtcacacggcaccagccagggcccggggtggctggggtgaggatgggtgtttggccagtgaccaggagtcaggtcaagtccaggtggtcagtgccaggggctccaggaggggagggcagtgccataaccctcctggtgtccagcgtcaccaggcggtcgtcacagaaagcaacctcggcccggggcccgggtctgcagcaggtgggcagggtcagcttttcttccatggcgggtggcattgtctgggccggatactggctctcgacccctgggcatgcaaaggctaggggtggtgctgtcagtcacaccgttgccaccaaggtcccctgggtcggctgaggcttgggatccaggcagcggtggaaggtcgggctgctcaaggccggtatctaagcttctgccctgggacccagtggtgatggccgccatctgccccattcccacagggacctagtcagaggtcgcacacacaaaaggggtacctggccctggagaaccaccagctgcccggggtctgagaacactcaccctggccgctgggccaggcctgccaggctcccggctggtccaacaccctaaacggtacagagcgctgcaggccctcacctcatgcttctgcagcgcttgagggtgaaggtgtctccaaggggacgctggccagatgcatggagaggccggccaatcttagggccacagaccccccctggacagcagagggtgttggctcctgcagtgggcccgagatactaaggcacgaagctaacctaagcccagtggggtggggcggggcaggacaggcttggagagctgcgccccaggcctgcaaagcacagtgaccgagcaatggcgacggtctgtctgggacaattcggcacaggatggaggtgcggggtgagccggagtgcccatggctcttgctggaaggggctccatgccctggccgcctctataaaggcctgcggagagcggggagagccctggatgcggctggcacagcagcgcaagcccaggggccaatccggggccagagtctgggagtctgacgcccggctggaaagggcgtgtgatgatgccaaagtgccggagccgtcgccggcaggtcctcctccgcggggatcttaaggaggcagcaggaatgaggagaggagagcgggcggaggacctgggagctcaggcgccctcaggcaggtggcgcaaagatgggcgggcggcctcgcgcttcaggggtgtctgcgcaggccggggcgcgcgagggccgggcgcatgaggttctcggtgatgtaggccaccagcaggcagatgaccaccagcatgacgcagatggagccgcccaccgccgtcatggccaccacgatgtcctgcatgccggccggctcggcggtgaactccac

SEQ ID NO: 236 - DNA, 2937 bp, Artificial sequence
  DNA replication origin
ccagctcccagggtaaaggggctgcgggtcgtgagggccatgagaagcgggtggctgctgccctggagctctcattcttacagctcctaagcatcggagccattccccaggtccccagggacccacatgctcaagtcccagcagaccccgtgccagctgcaaggttccctcaaggccatggccagcaggacacctcgtctctggaagctcccccgcccccatgtctccactaatgctggagacttccatcgttactggtccagccttcccctgccaggcaaaagcatttccaacctgtcctggagctggggcagttggagagaagaggggttcccagagggcggcctgcctagagggccggcagcttccctgctacagtgaggactgagccctggccagggctgcccacgagcccccgtggcccagtcacctgtgtggggagatcaggagtggctgggtgggacctctgaggggtcccctggacagacacccctccgggggcagaagtagggtctcagaggacaggggaagcactcatcaagcagggaccccgtgggtggggctcaagctgtggcagaggatgggccaacctggggagcagagggacagcatttcagagaccgtctgatgcttccaagcaagacaagaagctgaaaacgtctgatagttatttttctgacactttctatttatggaagtgatacttactattcacgatcatggtctgcttttagaaagcactctaggtgaaaaagtgaactcattcaaagaaaacatttagtgactgtcagaatgctggtgtgtgtacaaacagcattggagacggcgctccaggtggggaagcgtgtgcgcgtgaaaggccaccgctgctcaagtgcaggtgctaagcagaggtcactccctccctctcctcctcacccctccctgtccccttccctccttccttccttagggttggccccagctggacttcgcaatatctgggtccccatggctcagcaggaggccgcgggaaacaatgttttcctctcgcaggctcggtttctgccactctgctagcagcccgaggctccactcttttctctgctggtctctcttccctcaccactggcctctcaccaggagctcagtcccagaactacgtctgcaaccacagtccctagctagaggcccgatgcaaggcaggcaggaccatcttcataggggtctgcagggtctgcagccacgacacgccgggaccctgggttgcaatggtcagaaaccctgtgtttcggtgttgacaatgactttgcagtccaggaggtggctggcttcaggtgaggctggatccagatgctggaagcagctgggccgggctggcgtcctacctctcccaaggctggcttcattctcccgttcttcccaccacccaccttcagggccacagcagctggaatccaacacctgtcaggggcagtcgccccctcacatgagcttcagcaaaggcctcgaggctaaggggtccagtctggctggccgcgcccaggtcatctgccaactcctaggcaggggagtgtcagccccacccaagctccccatgacctgaggatggataaagggggctgcccagagggaaatgcaggtgctgctacaagaagctggaatggtcatggcacagggtgaaggccccagctgtcctcaggccaacatgccaagatagttgggggccgccccaccccatataccatcatccaggctcctgccctgccccactgcccatgccctcacacctgggggctgaggggcttccactgggaactggtggcagtaggtcggctgaacccctggggagttctgggcaaggacatgggggtcccctgagtcaccatcactctctgcttccctggggcagcccctgagtcgcctcacaacgctggggcaagagtcagagcccagggtttgcccttcctaagcagaggtgggagctgggggcagggggcagggagcgcctctcccaaggtctctgcccccaacctctctgcgccaggtgcagaggcctcagcagaccctgccaggggcccaacaggctggtgtagggggtcagggccctccatgccggggacggaggtgcaccgtgaccacagttggtgggggcctgaccgctgggccggggctctggcagagcccctgagatcctgtggggtcctgaccactgcactgggtttttcaagatgaccaggaattcgtgaggctgggtggtgactccgtgggggggcggagacatggccatccagaggtcggggaccaaggacaccgtgagcagaatagccagtctctcctcactctgcccccaggcaaggagagcacaggaaggggttgcaggaactcatggtccagttgccagagagccccccacaacccctgcagacccagagctggctcagcggaggtgccagcccagccttaggtgcgaggcttggcctcctttccagttagggcaggccggccaggcccggccacgtctgcatacacagtccctggctgtagtcctggccctggaggggtgtcctggttgctgggtgatctatgcagggacgggaatgaggggcaggggtcttggggtgtgtcccgccttcccctcccccgtcggtgccacctactcagtgcaccgggtgggctttttggattccctttgtccagccctgacctccccacagccatcgggagggccccccagagcgcatctggaggaggagggggcgcaatgaggcagggaaggtcggcgccctgcagctgcctccgctgcgtgtggagcgaagggagttctcaccttgcgaagtctcatctgtcaggctttcctccgggtgggcgctgtccgtcctgaaaggaacagaagccgcggggtgaaggaaagtctccgtgctggtccccaccccatcggtatgggcaggtaccctg

SEQ ID NO: 237 - DNA, 3038 bp, Artificial sequence
  DNA replication origin
tctttcccagcagctgcccgtttcctgcagtgctggctgcttgttaccgtgagactgacaggtaccccagagctgagcttgtgcctgccagagccttcatccaactaacccccgatcctttgggccctttctttcccttctttcctttgcttctttttttttttttttttttttttttttttgtagaggcagagtctcttgcgttgcccaggctggtcacacactcctggcctcaagtgattttcctgcctcggcctcccaaagtgctgggattactggcatgagcctggcctgcagcgttttgaagcatgtttctagggcaggtggtcagcagaccggaagccacggccccaccacccaggcctctgttttctccctggtagagcagggatgcagcagccccggcttccagggtccccctgaggaagcccaggccacccagttctgagcaatgggggttgggcagtttctccaggtccagtggttccattagacccaagtggactggagcacagtggaccctcagggctcacggtggaccctcggggctcagagtggaccctcaggccctcacagcagacccttagcactcatagtggaccctcgggctcacggcggaccctcaggtgctcagatactttgcacttaggaaaggagctatgcctcttggtgaccaggtcacgtaggaaatgagcctaacctggaacccgccccttgactacctgacctctagtacagacaggcagcgagtcggcaggtgagtggcagcagtcaggcccaaagggccactgaccactggctgtcccctggtgcagagaggaaaactgaggctcagagggcccatgaggccaggaagtagagtcaggtcccaccgaggggcttctgctgacccaagaccctgtggagggaacctggaagtggagggacctgcaggtgccctgtattccccccaggggcttgccatcctcctgccctcccagcgcccaggaggctgagccttggcaagatggcagcttttgcctaaaatgcatcaaagtgagcagaaagagtggtgagcaaagtagaatctgcttgtttccgaggatcagcgagaaggcacatgtgaagctcaccccggttctgtctgtttctgctctcctacgaagaccccatatggagccagtgacaaccggggcccgtggggaaggcaggacgaggactgggccacgctgctcagcacagggtcagctggctggactagggtgggctggccaggcgcggagtgggctggtcaggcgtgggctgggctggtcaggcgtggggtggggtggtcaggcgtggggtggggtggtgaggtgagggattgtctggtcaggtgtggagtgggctggtcaggtgtgggctgggctggtcaggtgtgaggtggggtggtgaggtgaggggttgtctggtcaggtgtggagtgggctggtcaggtgtgggctgggctggtcaggtgtggggtcggctggtcaggtgtgggctgggctgggctggtcaggtgtggggtcggctggtcaggtgtgggctgggctggtcaggtgtggggtgggctggtcaggtgtgggctgggctggtcaggtgtgggctgggctggtcaggtgtgcggtgggctgggctggtcaggtgtgggctgggctggtcaggtgtggggtcggatggtcaggcgtgggctgggctggtcaggcgtggggcgggctggtcaggcgtgggctgggctgggctggtctggtgtggactgggctggtcaggcgtggggtgggctggtcaggcgtggggtcggctggtcaggtgaggggtcggctggtcaggcgtgggctgggctgctcaggcgtgggctggactggtcaggcgtgggctgggctggtcaggcgtgggctgggctggtcagatgtgggctgggctggtcaggtgaggggtcggctggtcaggcgtgggctgggctggtcaggcgtggggtgggctggtcaggcgtgggctgggctggtcaggtgtgggctgggctggtcaggtgtggagtggggtggtgaggtgaggggttgtctggtcaggtgtggagtgggctggtcaggtgtgggctgggctggtcaggtgtggggtcggctggtcaggtgtgggctgggctaggctggtcaggtgtggggtcggctggtcaggtgtgggctgggctggtcaggtgtggggtgggctggtcaggtgtgggacgggctggtcaggtgtgggacaggctggtcaggtgtgggctgggctggtcaggtatgggctgggctggtcaggtgtgcggtgggctgggctggtcaggtgtgcggtgagctgggctggtcaggtgtggggtgggctggtcaggcgtgggctgggctgggctggtcaggcgtgggctgggctggtcaggcatggggccggctggtcaggcgtggggcgggctggtcaggcgtggggcgggctggtcaggcgtgggctgggctggtcaggcgtggggtcagcctggcccctgcccgctggctgctccagcaggctccaccacggcgtcagaatgtccgtggtgctcccgttcccgctgcacgtgtcattatgtcctcttttccaccacaggtaccatatcctgttctctttggaaaagctctactccacctgttccctaatcttcggtgtgcttaagctctgcaggcctgtctattttttttctttttcttaaaacattattttcttttcaggaacctgccagttcagggaggcccacctttctagaaggttaacaggaacttccagcctccagcctacttagtgaccagctgctggaggacagtgagtggcccctgctgtccgcatctccacaggggtcaccaagcgcactcacagggtccccctccacctggagcagagaattcggaggagcccgtcttgctgtcttttctgatgttgttaaactatgcttgggcctgtcctttgctgaaaggagctttctacacagctggacttctgaggtgggacctgccacgtgctaactctggcactcggag

SEQ ID NO: 238 - DNA, 1350 bp, Artificial sequence
  DNA replication origin
aattgtggcatggttttatactgtagcagtgaacagcaggtactcaatcatgaagagctaagcctgatttcatcacgacagctgtgaaagttgcaggtaccaaaatggaactacttccaccaatccctaaacaaatggagtcgggaggccacgaagggggagctctcatgcaggaatacctgcagcaggcctcctcacaagacgctcctgcacgtcctgcacgtttgcctgtaaccggacttactgcagggaaattcctcaggactgcagtattctagataagcagcttgcacaaggacgtcggcctggtaaggctctctccaacaacaagctaacgcccactcctgcagcaagcgcccacagccagtggtttttgttacaaaacaacttttgtgagctcatctgtattttccccttcgcccggccctctcagataggcctatgatctgtcatggcacgaacagcctaggctgcaaccccctgcgattcccagattaactcacttgtcctggagagcctgcctctgggtttcctttcaggttgacagtttgggagctaacaggaccacgtgaggggtgcagcggggaagatcagccaggttctcagggaccttctccggaagtacgcaatgtctacaattaagaaatgagaggccgggcgcggtggctcacgcctataatcccagcacgttgggagccctaggagggcagatcacgaggtcaggagttcgaaatcagcctggccaaaatggtgaaaccccgtcttgactaaaaatgcaaaaattagctgtgcgtggtagcgcatgcctgtagtcccagctgctcgggaggctgaagcaagagaatagtttaagccctggaggcggaggttgcaatgagccgagatcgcgccattgcactccagcctgggcgacagggcgaggctccgtctccaaaaaaaaaaaaagaaagaaagaaagaaatgagaaactagcagtgcattgttcagaaacgcggagacttctctcaggagaaagcgagaagcaagcgtccaactctggggtgcagaacccggggcgggaggacgggcccggactgccgtttctcgctgtgtccaggtctgcgtgactcaaaaccccggatagggcccgcactggtggagtcggaaagaggtggctgcggcgcggcaagtgccgccagtgccagcgagcgcgacgtcgctcccaagcccccgtctctatggcaaccgagtgcgtctctaggaccgccactgcgcaggcgcccggaggctaagccgctcggaacctagctgcgccacgcagggtaggcgacgcagacgctcccgcgtgacgcacttccggtgcttgccctg

SEQ ID NO: 239 - DNA, 2132 bp, Artificial sequence
  DNA replication origin
ggcgcgcggcaggcgctctggcctggcctggccgccgctgagcagtcggggccggtgggtggcctcgaacgccgggacagaccgacagacggactggccggcggtcccgcgcccccgagcggagcgggcgggacggaaacgtccgggcaagttggggtcggcaggtactgcgcggccctggcaaggtctggcagcggacagggccgggcggcctccgcgagccacgggcacgaatgacagggggcggggcgcgctccgggtgggggtgcccgccgtgcccgcccctggcccgcccgttcccctgcgccggcgcccgtgcgcgtcccggagcctcctgacgtctgcgagccgcggccgccagaccccgggcgcacgcaattacgggcccggcgctggcggctcctgcgcgctcagaccccagggagcccatccgggcaggcggcggccctgagtgtcgcggccgtgggcccgagtggacctggagccggcgggcagccccgggggcagacaggcgaccgagccgcgggtcgaggtgctaactgtgcatcttggcatctcccctcggccacagggttggaagcccagcgaggctagaggccagtcccaaagtttccaggcatcagggctgcagcccaggagcctcaaggcggcccggcgggcgactggacggccggacaggtgagctcttgatcgtccgcggcctgatagtttgcacttggctctcccactttggggctccgtggaagccacgtcagagaggctgtgtttgtgtctgagcatgcatgcgagtggaggggagtggtgagtaatcccgcgtctcctctctgagttcggaacccatggaggaagaaagcagaggtgccagacaggcctctgataggcacctgcaggattggggcagagcggccgcagcgcaggagcgccggcaagcctggcccttcccgggaggccccctttgtccggttccaccctggcctgttgcctcacatgcaacaagtgtctgaatgtggcgctctcctggccgagggcagccctgggcggtgagtgggatgacaccccagcctgcagggtgcctgtaggtctccacccagatgggcaggattggaggtggccgcagcgctcgtgggctttccctcagcaggtgtctccatgctggcctccccgcctcagggcttcatcccactccgtgggcctgatctccctggggcacctgggatgtccatctgcgttagctggagctactccatggcctgtggcgtgccacacacagcggcatttcggtgtcattaggcacagctggaggtgcaaggaggagggcagcctcatgtccagttccatgtaacttgcttcttctgaataaaggcaatttgctaactttctcgctaaataggatttggtttctatggcttttaaagcttctccgataaaatacttgcaataagggaactctctcctcctacactctcctgactgatggttcggaagtcctcctgccctctgagagcttgcagtttcttgtgaaaaagagaaactaagcagcaatagaacagacccggtgtctgcttgcgtggttaagacggtaaatgctaaatgtgtgacactgcctttagaaaccattttctccagcctggcttgctggctgcccgtctggtttgctgtgttgtgtctccagtggctttagcttccaacaggaaagcctggtagccgagcgaatctgtgacccaggaagtagcaattaaatgcctgggacgctgcctcgaggctggtgtgtgctctgaggtaagttccgatttgccaaagcacatctgtcgatctgtcgcccgagtcttcacaccctgactgcctccatcattttaaacatcgggagcagttgcctgcagcggggttcagatgccagccaggggcacagcctgtgaactgtgggtagatggcaaagtctagcatttctggcaaaggaaaaaacatttggtaactctctgagtaaatttctgactgagatgaagatacccattgtggggcagcatcctgaagcggaagcctgggctgtatgtttccaagaggaggagcaggagtggccacagccatgtacgccacgatgtacaccaggggctgcgtggccacagctctggtct

SEQ ID NO: 240 - DNA, 1035 bp, Artificial sequence
  DNA replication origin
ccctgcaggggaggccttgaggaggcgccgggtctacaggcccctgtgtgctcacatcccagcccccggggagaggtgggagtgggtgggcgcacccagctcccctgtccaggctcgtcccccttgttggggcagccctcagcaagtggggggctggttccaggcacaagaagtgaggccagggaggaagccctgcctgtgttcagcccagttgtgccccaactcaggtgggcttccatgagggacagcctctgggagggtgggggtttgtgggccagggctggagagctgcctggctgtgctaaaaataccgggcatgctgcagacaggtgccagtctggggcacaggctaccctgtctcaggctgatggccttggcactccaccccactgcccctgtgacgcgggggccgccaaggcttggtcttgattcccagaggccctgctggtgacctccccgacatctctgccctctgcccatccccccaagggcaagatttgccaaagcacaggacacattggctcacacatggggcaccctgcccctgtctttttggaaaggtccaatggcatatggccagcgggtcgggcaggtgtggccgctggcctgggctaagctggctgtggctgagagtctgggcgcagagacagaaggcgccccctgctgcagaaggatcacagtgtgggctcatggcattggcttttttgcggtcccaagtccttcatctccattgccgggcccatctcgggggtcggcagatgcgtgtcccctactagcaaagacctccagtcggttctgcggctgcctgtgatgagccctgctctggctaagtggaggtgtttggcagggaggagtccccggcttagtgtgattccagctgtggccgattctggtgggatcctggcaaggaggaggttgcgtgtggatctggtggaggtggacggcctggcagggggtggggtctgcaaccctaaggagcagtgcccctctcacttgtccccccgccagcagactgctgcgtcggcctccccggcc

SEQ ID NO: 241 - DNA, 2000 bp, Artificial sequence
  DNA replication origin
actcacgggcgcgagtgagcggtctcgtagcggtcgaaggcgtgggcgagctcatgcttgttgtgcatgtagcactgcgtgcagaggtcgtagtccaggcacacacggcacttccagcgcatcccccgcagcccgtgcttcttgcagcagtcacagatgatgttggggtgccggacgcctgggggtggggtggggtcagaggggcgttcccgcccccgggtcctgcccgtcccgcctgcccttggcgcgcaccgatctgggcgttgtcgtacagcagcaggtcgtgcgcgccctggtagccggcgcggtagttggtgcgcgtgccctggtcccactgcacgaccactgtgcggtcgggtgtcgaggggctgccgtggcggccaagctccaccaccgtgcccacgccgccctcgccgccgtcctgctggccccacttccagtccacgccgcgcaccacccgcatgcccacctgcacgcccgcctgggggtctgggtccatgttgggcggggctgctcgggacctgtgggcagaggggtccatggtgggccgggctgctcgggacctgtgggcagagggtattctcaggccaccatgggacactcccggtcagagtgggctccgcgggagagcagagaggcccaacggggcaggcaggctggttcaagccctagggcccaaggaggcccgcagtctggcaccagggaggccggtgggaaaggcgggcgccgtgccagcctggcgcgggaactgcagggtggtctgggcccagggatcagggagcctggccccgggggcttcatgaaaggttcacaaataacgctctcggaagaaaaccaccatctcttcccacagccaattaatgagctggacactggacttcactaaagtaagagctgccgtcccccgagacactcacatggttggacgggcagtggcaagtgagcagacaccgtgacacgcgtccctcagaggactcgtgtccacacagggcgaggaactcctatgatccacacgaaaacgtcagacaacccaacagaaaaacggcaaacacgatgcaggcgccgtacaagaccagcaggcatcggccagcgggaccaggaggcatctgtccccagacactgctcctgggggacaccagctttgggccctgcacgtcagggacagtgcagcgaggccacacagcaccacagagccttctctggaaaagtggccctggccacgcaaggcactcacgacagaggccggatactcgagcagaggcaggttcctgggtcctcagtggccacggggtcctgaagcggggctgagtcccaaccaagcagggacccactcgccacacagagcacaagccagagctcaccagcagatggagggaagtagccaagtgcaaacgccatgccaggcggctccgtttatacaaaggtgcaaatccaggctgccggaggcagggatggagtcagccacagggctcgaggcccaggactgctaatccccagtctgggcgctgacccccgagagctcactctgcagacgtgagtcaccgtgggctgcctctctccaccatgctgggcttcagcacagtctcgttaacaagaagaatggatgtgaacattaagagggaaaatcagaaggtggaggctacagctggctgtgatcgcaccactacactccagcctggcggggaggggagggccaccactcaattttcattaaaccactaggaccccatggccagggaaggaggcagcccaggaacactgcctgaagcagaggtgggggacacggcagtcccaggaggctggagggacccctgagactgggtggatgtggctgaggatgggagggggccctgccaactccaggacacaggccagcctgggcctcacaggccagccctccacctgggcagcactgcaacccagtgctttgcatctcaggccagttcaggagacaccctggcccgggagaggctgcaggtgagcagtgaggaggggccaca

SEQ ID NO: 242 - DNA, 851 bp, Artificial sequence
  DNA replication origin
agagatggtggttttcttccgagagcgttatttgtgaacctttcatgaagcccccggggccaggctccctgatccctgggcccagaccaccctgcagttcccgcgccaggctggcacggcgcccgcctttcccaccggcctccctggtgccagactgcgggcctccttgggccctagggcttgaaccagcctgcctgccccgttgggcctctctgctctcccgcggagcccactctgaccgggagtgtcccatggtggcctgagaataccctctgcccacaggtcccgagcagcccggcccaccatggacccctctgcccacaggtcccgagcagccccgcccaacatggacccagacccccaggcgggcgtgcaggtgggcatgcgggtggtgcgcggcgtggactggaagtggggccagcaggacggcggcgagggcggcgtgggcacggtggtggagcttggccgccacggcagcccctcgacacccgaccgcacagtggtcgtgcagtgggaccagggcacgcgcaccaactaccgcgccggctaccagggcgcgcacgacctgctgctgtacgacaacgcccagatcggtgcgcgccaagggcaggcgggacgggcaggacccgggggcgggaacgcccctctgaccccaccccacccccaggcgtccggcaccccaacatcatctgtgactgctgcaagaagcacgggctgcgggggatgcgctggaagtgccgtgtgtgcctggactacgacctctgcacgcagtgctacatgcacaacaagcatgagctcgcccacgccttcgaccgctacgagaccgctcactcgcgcccgtgagtcccggg

SEQ ID NO: 243 - DNA, 1065 bp, Artificial sequence
  DNA replication origin
ccggagccagcacctgggctgtcttggaggctgctgcgctctggtccgagggcatcagctcggggagaatctagcctgcttggggcaaggacagccagaggtgccaccccgtcccctgcatttgtcacctttgtctctggccctccctgcacgtggagggaggtgtggttgtcttgggagtgctgttggccaggcctgctttcctcattcctcccttcccacatgctgagcccacctctgggcctggctgtgccccagctcactgggaggcagcaggcatgaagcgaccgcacccagaggtcttgccgagggtgggcccgggtgccttcccagcctggcatcagggaagtccctggaggaacgtggtccgcaggttcgctccaggcccctgagcccaggggcatttcctcacagcgtgtggaggatgctgacctgctggaccggccattcccgggcaagagctggggctgcggagcccagcaggctgggtggacagggggcctgctccactgcatcgctctcccaagtggctcaagatgggaagagatggcggttttcttctgagagctttatttgtgaaccctcttgcagtgtcacactgagtccccgccagggcctcccgaggatcccactaaggggcatcttccagggagcgaaggtggtgcgaggccccgactgggagtggggctcacaggatggtgagtggaggcagaggggcggggtcagggctgggctgtggctggctcatggctcagccttagcctgctgggggggcctctttccccaggaggggaagggaaaccgggccgtgtggtggacatccgtggctgggatgtggagacaggccggagtgtggccagcgtgacgtgggctgatggtaccaccaatgtgtaccgtgtgggccacaagggcaaggtggacctcaagtgtgtgggcgaggcagcgggcggcttctactacaaggaccacctcccaaggctcggtatgaggctgtcacactgactccatcagccctcctgccttggctgaagtcccagaggggaggggccgctgcctgaggcctgg

SEQ ID NO: 244 - DNA, 1158 bp, Artificial sequence
  DNA replication origin
cggcggagctgcagcgcagggtgagtgctgacagccagcccttccagcacggggacaaggtcaagtgtctgctggacactgatgtcctgcgggagatgcaggaaggccacggcggctggaaccccaggatggcggaggtgagccgccccgccgtggagccctgtgtgccctgccctcccagccctccgccccctcagccccttcctccccaagcgtccagcccgacccagccacagctccatgacccgccacagtttatcggacagacgggcaccgtgcatcgtatcacggaccgcggggacgtgcgcgtgcagttcaaccacgagacgcgctggaccttccaccccggggcgctcaccaaggtgccgggggggctgggctgcgcctcatctgcttgcttctgtaaccccttccacgtacccccttggccttggggggtcaggcaggactagggtgccagctgcacccacgagtccccagccctgaaggaaggggagggactggtgggtggaggtgggtggggtcaaggagaagagggggttgggtgtgaaggaacccagaggagggtatgtctctgggagctggaatgggcaggttagggcctccctctgttccaggacaccaggaaggcaggacagcttcgtgggcgggagggaggcggctgggctaagatgctcctggttagtgctgtatgggggccgatgggggtggctggttaggacagggaggtggatgcttggcctagagtggtgggggaggtagtgagggctgcctgggaagcaggatggcagggagggggctggaggtggtggcggtggcagcttggatggccctgggaggggcaggcccggggcaaagcgtcagagctcagctctggatctggggtcctggataccaggcacctttgaggaggcgccgaagggagtcatgagacgggcttgtagagtgagttccctgcatatgagggctcaggtggggcagagtgggcccgtcctgcaccccatggtcctggggccccacccccacgctggctcacgggccctggccatgttgcctgctgctggtcagcgtacagcttcccagggccagccacctcggcttcacacctgcccagagctggcttctgtctgcctggacactcctcccatggctctgggg

SEQ ID NO: 245 - DNA, 1170 bp, Artificial sequence
  DNA replication origin
ggctctggacctgctgcggaggcgcccagagcaggcaagctcctgaccccgtcctcccatactggccagtctgagagtgaggggcagagggccagggactcacctgctggcactcttggcaggtggacaccaagaaccaaggcaggaccgctctgcaagtggctgcctacctgggccaggtggagttgatacggctgctgctacaagccagggcgggcgtggacctgccggacgacgagggcaacacggcactgcactacgcggccctggggtgaggcctgggaggggcccggccggcggggctgagcctgtgcgtcctggggtgaggcctgggaggggcccggccggcggggctgagcctgtgcgtcctggggtgaggcctgggaggggcccggcggggctgagcctgtgcgtcctggggtcgggcctggcggggctgagcctgtgcgtccagccaccgggcccggcgccctccctctcccacttcctctcctgtcaggaaccagcccgaggccaccagggtgctcctgagtgctgggtgccgggcggacgccatcaacagcacccagagcacagcactgcacgtggccgtgcagaggggcttcctggaggtggtgcgggccctgtgtgagcgcggctgtgacgtcaacctgcccgtgagtgctgctccctggcctgggtgccccctgcccgtgagtgcttgtccctggcctgggttccctctgcccatgtgtgctgctccctggcctgggtgccccctgcccgtgagtgctgctccctgggtgccctggctcttgacccaagcagaagtcacccccaggtgaccactgactccgccccagcaggacgcccactcggacacgcccctgcactccgccatctcggcgggcactggagccagcggcattgtcgaggtcctcacggaggtgccaaacatcgatgttaccgccaccaacagccagggtttcaccctgctgcaccatgcctccctcaagggtcacgcgctgtgagtgtggggtgggcacacagctgcagccggcctcttgctgtgctgcctgggggcagtcccaggtcccagaccaacctccctgctccacagagctgtgagaaagattctggctcgggcgcggcagctggtggacgccaagaaggaggacggcttcacggcgc

SEQ ID NO: 246 - DNA, 1188 bp, Artificial sequence
  DNA replication origin
ctggacccgagagcctggggcgggcggggcggacccagggaagggccccccccccctcgcccccaggctcgcccgcgtgtcccgaggggaggaccccagaggcgcccggtcccccaggcagacagcagaggcaacgtccgagaatctttctttttataaaacacagggcgggggcacgcgaaggcagctcgggcgcggcggacggcgcggctcacacgaagatctggatgcggtcgcggatgggctggcggcagatggggcaggcgctgagcgcggagccgcagggggcgcatgcgccgtggccgcactggaacacgaggcggatgtggctgtcgatgcagatggggcaggtgatgcgttcctccatctgccggtagcggctctgcagctcctccaccagctggcgcggcgggccgggggcgggggcggcgctcgccacctcagagccgtctgcggggtgggggacgggtgtgagctgggaggccgggtgggggaatgcggggagcagggagctgcgggggggcgaggctgggggcggggtgtcacctgggacgggttgtgacctgcaaggggggctggcggggtgggtgatttggaggcagaggtggggcccgggtgcgggcaggaggtgagccgtggaaatcaggcataaggtggtgtgcgggctggagtcagggctgcaggtgggctgtgagctgggccggggtgtgatgggggggcggtgctctgggtgggctgtgatctggggtggggctatggagggagtgtgatctgggaggggccgtgaaatccagcggggctggggtgtgatgggggaggagggtgttaccttgaggcggggctgtgggccgggtgtgatctggagcaggcggggctgggggctgggggctggggggccgggtgtgagccttgggagggcggggtgtaacctggggaagggccatgggcggaagtgtgggagggaaggggtgggggacggggacccgcgggccaccagctgagcaggaggcgtgttgggggcgcagagcctcacccacctgggcgcagtttcttgctgacgaccacctggcacctgatgcacttcttcatcctgcgcgcgcactctgcgaagaggagagcgcggttggctgcggccctactagccgggcctccccaccccggggccccccactcaccctcacacacggt

SEQ ID NO: 247 - DNA, 930 bp, Artificial sequence
  DNA replication origin
cagtactcgctgtcgtcgaagtggatgccgccgtgcggggggaagaaggcgtgggccagctcccccgtggggccgtcgaagcagtggtgcagcgcggagaccaggcagtccgtgtggttgatcgggtagaagcctggggggagcacggggctgagaggccgggcgcgcagggccgggccggggcgggggcgggcgcccacctatccggaggtcgctgggctgctcgggggccacctcgcggaagctgaagggggacacgtcgctccacatgcggaaggcggcagctagggcccgccgcgtctcccgcgggctcagcaggttccgcgggaaggagaggatcctgcagggagagtgagctcagcgggcgccggccgcgccccctcccccggggcccagccagggcgcacctgtaggtgaggttgaagtggtcccagcgcagcctggctggagtcagcgtgtagcggcgtctgcggggggccagtgggcccgggacccgggtgggggggaccgccgagaggcccagcgcagcgacgtctcccttcagggaagaaagcgtgcgtgggaggcatcggtgacggtccccaggaccaaaaactgccgcggaaaatggactggaaggaaacgggggtgggggtgcccagggctgggagcgggcgtggcgggtcctgtctgcctgtggtttcgggtctcctaacctgagcgccctgttgcacgtccctgggaacgcggcccagtggaggggaaggggctgaacagcagggcgaggcctcccacccctcccaacaactggacacaggggcgtccaaccctccgacctcgggacgcacatccggaccctcaaacaccccgcacaccccgcacacgtcctgcgggccccccgatagaccagacccacagacgtgaggacccccccaacccggcacctggcct

SEQ ID NO: 248 - DNA, 1796 bp, Artificial sequence
  DNA replication origin
cgataggatgcctcgacaggctgttcgtgtgcgcgtcctgggcgcggaggggcttctgcgacgctcgccggcggctcatgaagaggctctgccccagcagctgcgacttctgctacggtgatgcccacggggccgggacagggctgcgtgggagctgggccttggccatggtcggggctgagggggcactgacggggctctttcccccacccggagcagaattccccttccccacggtggccaccaccccaccgccccccaggaccaaaaccaggctggtgcccgagggcaggaacgtgaccttccgctgcggccagaagatcctccacaagaaagggaaagtgtagtgagtgagcgccccgggcggtcctcggggtgggcagcccgcgggcggccttggggcaggggtgcggggcaggcagccggggggggggctgtgcctgcaggagacgccccgcccccctgcagctggtacaaggaccaggagcccctggagttctcctaccccggctacctggccctgggcgaggcgcacctgagcatcatcgccaacgccgtcaatgagggcacctacacctgcgtggtgcgccgccagcagcgcgtgctgaccacctactcctggcgagtccgtgtgcggggctgagcccggctgataaagcactttctctctgatggctcctcgctcattcttgggagggcagcgggcagccagtctgggcaggtggacaccccagcccctggtccaccgagagctgggcgtcctcggggctgggcacccctgcttccccgcacagcggacaacaggtacagcacaggacgggacgggctttgctaaggtggcccctgggaaagtgggataagcggaggccccagtgacaggggcagcacgtggagcagcacctggggtagccccagaagcctgggttctgtctaggacttgctcagagctgggggagggaggcaaagggggcttcctgaaagatgtggctgggatgggcctccaggatcttctgcaaggagatgtgggtgggggctgggaggactggcacagggtgggggaccaccttgccagagtggaggccccccaggaggtaggagctcccctcctgcctggggaagacactggcccacatggggtcagaggccacagccgcccaccccaccctcttcccctagagcccggtggtctgcgactcccctcccacacatggtcccgggtcactcaaaggacgacacggggagctttcctcgaagaatattttaatacattttaaaactcaacaaccttgtataaaaacctgtcgagtctgctggcacagctggggctgggggttgggggccgggggcctgtgtggacagggctggtctggacgagtgggttggggcaagagggcatcgctcatcccaacacagaaacaggtctccagctccgaagattaaacaatccacccggctcccaccagttcctttccaaatcacggcccagccagccccgtgcgtgtcgagagtgggagagggtgtgtggaggtttgtgctgccccacgtgggcacccgaagatgtccaccctctccgccctgggcaagtcacggagaaaacacagctctttcctccacaacaaggaaaatgatttaattctacaaatttacaaaccaaaatacaaaaacaaaacatggagcacaaagtaagacgaggagttccgagtctcatcgcagctccagccgcagtagccacgcctgtggtcccggctgagttctccccatgacggggtccactctgaccttcagaacttgaggct

SEQ ID NO: 249 - DNA, 2003 bp, Artificial sequence
  DNA replication origin
tgtccaccctctccgccctgggcaagtcacggagaaaacacagctctttcctccacaacaaggaaaatgatttaattctacaaatttacaaaccaaaatacaaaaacaaaacatggagcacaaagtaagacgaggagttccgagtctcatcgcagctccagccgcagtagccacgcctgtggtcccggctgagttctccccatgacggggtccactctgaccttcagaacttgaggctgaagccggggcccgcggcagaggccccctggttcgtggtggtaaggtggaagcccgtctccttcaggtcgtcgtcaccctgggacgagtcggctaccgtgagaaccctgcccaagccagccccacctgtgggcacgccccacccgccaggcccctcaccagctggctgtagcccaggcctccctcagggggcctcgggctggtgccccgcttcacacgctgctgctcgctcttggcgggccacgtggggaacatggaggggtcgatggggaggggggtctcgcggaaatactcatgcttgaggccgtcctcagcgctgatcctcctcccggggaagtaggtcaggaacctggggggagagggccagaggcccaggaggtgctcgtgtgctccactgggtcccccaaagatgggctgtgttgggacggggctcagggcatgggacgccaggcaccagagcagttctggaacgtggtgagccagcaggtaggcctgggactgggaagtcaccgctatggctcgggacctcccgccacccggctgcactgggctcacttgttcatgaggtcgaagccctggtctgagagcagagccccgaagcgcttgcggaggttgttgtaggggtgctcgctgaaggtcatcttcttgactgctgggagctcgctgtagccgggccagattttctcactaggggtccccagatcctgaaagacagaggtgcttcaacagccacaccaagtggcccacagtgttggcacctgtgtcccgtcagagaagacaagccaccaggagggctctcagtggccctggtccccatctcaacccagcacctgtgcgccccgcagccccattcctgcaactcctccacaaccccacagcgcacctgcagcagggccagacccaccttgaacaccttgttgatctgatcgatttctgacttcccggggaacagaggcttctgagtcagcagctccccgaagatgcaacccactgaccacatgtccacggccgtggagtattcctaagaggtcaggagaggtgttcaggagggccagtgcccgcgaagctgtgggaggctgcgtgggggacaggggaggcactcagacgcccaggactcaccttggcaccaagcagcagctctggggcgcggtaccacagggtcaccacgaccggggtgtaggccttcagaggggatccgtactcccgcgccagcccgaagtcacccacctgcaacgacagatgggcggctgtgagtgggccccggcaggtctccctgggatgggccactcggaggggggctcaccttgaggatgccggcgtggctcagcagcaggttggacgtcttgaggtcacggtgcaggatccagttgtcgtgcaggtgtttcaccccacgcagcagctggatcatcagggtcttcacctcccctgggagggagggaagctcccatgtggacctggctgcccccagcccagggcactcagggtggcccactcgcctcggcagcaacagaggcttctcagggctttccctgtggatgcagctggccctccctgcagcactgtcaccgcgggggtgaccaggaccctgcccccacttgtacgcagacaggcccctggggcgcggctgtacctggcaggaagggctgtttcatggtctccatcaggctcttgaggtcgtgctccacatagttcatcacgatgtagatcttgtccatgttgctgcccaccacaatctcctgcagggcacggctctgtgggtgctgggc

SEQ ID NO: 250 - DNA, 839 bp, Artificial sequence
  DNA replication origin
atcgcggattaaagatcatccgtttaaaggctcttaactcaggacctgccactcatcaaacactgcttttactgtcagaatctgctagaaagaccgcttggactacgtgaagccactagcacactggacagctgcaccttgagaccggggagatgctccgagatgtgctcgcgaacaaggccacctgacccgggcactgggctatttcctcgggttcagtcccgcacacttgaggttcagcctggcagacgttggctccagacagcgtttggacccgccgcctccaccacccaaagttccgtgcgggatgagactgtccgcggaagcgagggtgtcgctcgcccccgggcccgggtccgccccgctccgaggcctgctcggaagaaagacctcggtgcgcagttctcctcgcgctcccacacctggtccgcccagtcggaactcacccctacgccgccgccgctgccgccgccgccgccgccggtcccggagccagagaagaaacagcaaccggcgcgcgccaaaagtatcgtcacttcctgtattggcgcgtaatgatgatataatagccgacctccggcccagaactcgagacaacgacaggggctcgctctgtgcggcacttcctgtgtctgcgcgggatgataacgcataaaacagcgcttgctcaggtccaggacgccagaagaaacagcccggtgagcgcacttccgacttcggcgcgggctgtgacgcaggaatcgggactccggaggagcgacgcccacttttggagcagtttgcgcctgcgcggaacgcgtggccggcttccggaatcctaccgggacttttccggtagc

SEQ ID NO: 251 - DNA, 1526 bp, Artificial sequence
  DNA replication origin
ccacacctggtccgcccagtcggaactcacccctacgccgccgccgctgccgccgccgccgccgccggtcccggagccagagaagaaacagcaaccggcgcgcgccaaaagtatcgtcacttcctgtattggcgcgtaatgatgatataatagccgacctccggcccagaactcgagacaacgacaggggctcgctctgtgcggcacttcctgtgtctgcgcgggatgataacgcataaaacagcgcttgctcaggtccaggacgccagaagaaacagcccggtgagcgcacttccgacttcggcgcgggctgtgacgcaggaatcgggactccggaggagcgacgcccacttttggagcagtttgcgcctgcgcggaacgcgtggccggcttccggaatcctaccgggacttttccggtagcgaagcccgcgcctgtgccaaggcttgcgagcagaatgccttcgcgatggacgcccgcattccacccccttgaccgctgggacccctagtggcgggtgggtggagcgcgctccatttacctgctggttacctcgtgaggcgcctcaggtctgtgtgtcttgtaaaggccgatctcggaatttaactctgaaccttactcagaaacagggcagggagagctcttacgatgtgattttattttatttattcatgtatttacttttgagtcggagccttgctctgccgcccaggttggagtgcagtggcgtggtcttggctcactgcagcctcctcccgggttcaaggaattttcctgcctcagcctcccgagtagctggaaccacaggcccgcgccaccacgcccggctaatttttatatttttggtagagacgaggtttcgccatattggccaggctggtctcgaactcctgacctcaagtgatccgcccgcttcgtcctcctaaagtgctgggattacaggcgtgagccaccgcgcccggccttttacaatgtgattttgaagctgacactggcagtgggtcctcaaagtgcagactcactgggtatggtgcttcccccaactcccagggccccactccaaacccatggattcagagcattgcaggagaagaggataaaacgagcaattaattccctttccatatgtcaggttttcctcttgacttgaaaagtcacagaaaaatgctttagacatctgaatctcaggaaacaaacaatggaagataaacatccgcatttactgggcctgaaatgggaaaatgaaagatgtggcaagaaactgacaagggcccaagaagggcgatgggtatcggaatttttttcatcccggaatgaaatgctgcttgctttgtgtacccaagctctttttttatttttatttttttgagacggagtctcgctctgttgcccaggctggagtgcagtggcgcgatctcgggtcactggaagctccgccacccgggttcacgccattctcccgcctccactccattcgcccgcattaggctcctgagtacctgtgactacaggcgcctgccaccatg

SEQ ID NO: 252 - DNA, 1431 bp, Artificial sequence
  DNA replication origin
ggcagccttcgaggtgggagggagaggtcaagggccgtgaggcctagtgaggtggggagtgagatccacgcctgccatgagctccacccctgccttgcggagccctgtcgcgagtgctctgtccttttgctctgccgcaccctttgttgttggattttcacctcaggaaagccaggtagctgctccacccccagccagggcccatcagtccgggaaactggcacaaagtctcctagctccctggctcagggcccagccagtcctagctccagggaggctgcagcccatggaggtttagctcccagcttgttgtcaccccaggctaagcagtgggactgtgctgctgaacaggaagaagggaatggtgtctttgtggagatctggcactgtcagtggcccgaggagtggatgagtcctttgttattccgaggctgtgggaactggtggaggggtcggccttctcctcactgaggcctggggtgcccttggaggcagctgtcctggtgcaccgaggggtcagggcacacatgggtggcctgggagcgtctgggtggcactgagctggcggtgtgatgggcagacggggagacctgggtgcacagacacacacagcagggggaggggaggagagagaggaaggctgcagaggccctggcattgccgccactggggagagggcagaagcgcctgttcccgggtatggggaggccaagtttcaggcacctctgagcactgctgggcaggtgagctgggggagaggccggcctgagcacccaggcgaggtcttcatgggggagggggtggcgtgcgtccctcagtgtgaacacagaatatttatgtatacatatggcacgcacgcaagtgcataaacataaacacagaaggaggtcacgaatgaggtgggaaccccagtttcccgggggagaagtgagacgaggaggggtactgggtcgggcagcacggccggcaccacacgctcccagagcgccttggtgagacaggatgggcgccccttcagatgcacagcctcccccgaagcaggaagagaaacccaggtgtgagaaacaggaaatcgggctgcctgagcgctgggattgagacctgggggaggtggggtctcggtgctgcggagtcacagtggcgtctgtgcaaagccccagctggggggatgattcccactggacctcaggaggaaacggctgttctgaccttcctggagctcgtgggaagggagggggtgtctcgccccgaagccacagtcgcctgagcgtgaagcgggtgtaagtgtggttttataccacggagtctgtctagaaagtagcatggaactttaggaggccgaggtgggcggttcacgaggtcaggagatcgagaccatcctggctaacacggtgaaaacccgtctctactaaaaaaaaaaaaattacaaaa

SEQ ID NO: 253 - DNA, 1180 bp, Artificial sequence
  DNA replication origin
gtgctgggtgctgcgtgctcggtgctcggtgctgggtgctgggtgccggtactgatgctgagtgtgcgggcgtccggggtttccctgcccggattcgctcctgggggtcctttcctatggctggcgctgtgcgcggaaaacgctggtggggttttcccagctggctttaagcgttttcacgtccgggagtccacggcgacccccacgccctgaagcctgggaacgcggtgtgcgtggccgcaaaaagaacaacaacaacaaaaaaacacaaaacaaaacacgcaaaaaactaaagcaaaactcccgacagccgagccccgttcggtgccttttctttttttttttctttaatggagtgaaatctactttgctcaggaagcctgcaaatcacattttcaggccaaacgaggcagtattttagaaggggtcgctgaggcaggagtaggaaggctttccactccactcacgcattttcagtgtaggcgaatcgtaaaacggagggcagaacgaaaatgagcggatctgggagtgcaggctgcgcttcgtccacatcgataacagatgtttcctggtgaagatgtgtagggcgcagcgggtcacctggtcgggggagggcacagggcgtccctccacggggtgcctttggcgttgggcacttgtgtggtctccagcttccgggttttggaagcggagtgtcccctgcagcctgagcctcttgcaggtggtttccttgggacgaactcccagggggaggtctgagttctggggcatggtttgaagatttgggacacattttgcctgaaattccctgctggccgtttgaacccacctggacttcctgaccaggggcacggattcttaacctctggtgcaggggcctggctaggagaggtctgcacagttggacgaggtgcaaagtgacgctttgtcagtaacccggcgttgagattcctgtggtgggacgagcagctcctatggctttatcccattttaaatccaagttttcttttccttctagtcctcgggctccacccggggagctgtgcccagacagcagaagggaaggatgtcacttctgagatgaggttcagaaaggtctgggctcctgtcctggctgctctctcccactccctgatgagcttgctggatgaaagctcctgtcaggctgtggggcgtcctg

SEQ ID NO: 254 - DNA, 801 bp, Artificial sequence
  DNA replication origin
gtttctgccctttgacaatttttctgtgaatgttttgtgtcgattatatgagctttgtctgtattgagaacatccacgaattgtattattgcatctgttttgctagttgagaacatcgacctgctgtattattgcaaatgttttcctgcttgcatgtagtcatttgttgtgcatattaatgaatttctatccacatgacgccggaaggggatagagtgggtggggaggaagagggaagggtccccacctggagacccagcctgcaggccactcggccacctgcgcagaggtaggggagcagcagccgctcatgcccctgcaatttgtcctcatcagcaggtggggaaactgaggccggggagttctccaggccaaggtcactcacgggcaagttcccgcagcctttggaccctccatacatgtcagggccgctcatgctttcctgggcccttcactggtttggaggaaccatcctgtttcccagagcgcactgcctgtctctgagtgtatgtgtctcagtggcgtccatgtgtatttttctgtgtgtgtatctgtgtgagtctgtgtgtgtggtgtgtttgtgtctgagtgtgtggtgttagcgtgtgtctcagtggcgtccatgcatatttttctgtgtgatgtgtctgtgtgtgtgtctctgagtgtgtggtgcctgcgtgtgtctcagtggtgtccatgcatatttttctgtgtggtgtgtctgtttgtgtgtgtgtgaatctacgtgggtgtttgtccatctttttgtctggcctcctgtcccctctgcacagagca

SEQ ID NO: 255 - DNA, 1238 bp, Artificial sequence
  DNA replication origin
cagtactcgctgtcgtcgaagtggatgccgccgtgcggggggaagaaggcgtgggccagctcccccgtggggccgtcgaagcagtggtgcagcgcggagaccaggcagtccgtgtggttgatcgggtagaagcctggggggagcacggggctgagaggccgggcgcgcagggccgggccggggcgggggcgggcgcccacctatccggaggtcgctgggctgctcgggggccacctcgcggaagctgaagggggacacgtcgctccacatgcggaaggcggcagctagggcccgccgcgtctcccgcgggctcagcaggttccgcgggaaggagaggatcctgcagggagagtgagctcagcgggcgccggccgcgccccctcccccggggcccagccagggcgcacctgtaggtgaggttgaagtggtcccagcgcagcctggctggagtcagcgtgtagcggcgtctgcggggggccagtgggcccgggacccgggtgggggggaccgccgagaggcccagcgcagcgacgtctcccttcagggaagaaagcgtgcgtgggaggcatcggtgacggtccccaggaccaaaaactgccgcggaaaatggactggaaggaaacgggggtgggggtgcccagggctgggagcgggcgtggcgggtcctgtctgcctgtggtttcgggtctcctaacctgagcgccctgttgcacgtccctgggaacgcggcccagtggaggggaaggggctgaacagcagggcgaggcctcccacccctcccaacaactggacacaggggcgtccaaccctccgacctcgggacgcacatccggaccctcaaacaccccgcacaccccgcacaccctgcacaccccgcacacgtcctgtgggccccttttctgaagtgctgatgtacatactttctcgtacacacttttgtgaagatttcaaggggaagggagtcgtctgccattcaatgtttacatttatgttctgcaagacgctgtcctcagggaccattaggggaccattctgttcagtgcgatcctgatggtccgggagatgagggtttccggggctagtgatcgtgatcccttttatttgcaactgtaatgagaatttttcacactaacacagcgagggactcaacacgctgattctcctcctgcctctcccgtgagtctccagcctgcccagcaccagcagctgtggagcacgtggatgctgcctaccccggc

SEQ ID NO: 256 - DNA, 851 bp, Artificial sequence
  DNA replication origin
ctttgctaaggtggcccctgggaaagtgggataagaggaggccccagtgacaggggcagcacgtggagcagcacctggggtagccccagaagcctgggttctgtctaggacttgctcagagctgggggagggaggcaaagggggcttcctgaaagatgtggctgggatgggcctccaggatcttctgcaaggagatgtgggtgggggctgggaggactggcacagggtgggggaccaccttgccagagtggaggccccccaggaggtaggagctcccctcctgcctggggaagacactggcccacatggggtcagaggccacagccgcccaccccaccctcttcccctagagcccggtggtctgcgactcccctcccacacatggtcccgggtcactcaaaggacgacacggggagctttcctcgaagaatattttaatacattttaaaactcaacaaccttgtataaaaacctgtcgagtctgctggcacagctggggctgggggttgggggccgggggcctgtgtggacagggctggtctggacgagtgggttggggcaagagggcatcgctcatcccaacacagaaacaggtctccagctccgaagattaaacaatccacccggctcccaccagttcctttccaaatcacggcccagccagccccgtgcgtgtcgagagtgggagagggtgtgtggaggtttgtgctgccccacgtgggcacccgaagatgccctggcaagtcacggagaaaacacagctctttcctccacaacaaggaaaatgatttaattctacaaatttacaaaccaaaatacaaaaacaaaacatggagcacaaagtaagacga

SEQ ID NO: 257 - DNA, 1675 bp, Artificial sequence
  DNA replication origin
acccgaagatgccctggcaagtcacggagaaaacacagctctttcctccacaacaaggaaaatgatttaattctacaaatttacaaaccaaaatacaaaaacaaaacatggagcacaaagtaagacgaggagttccgagtctcatcgcagctccagccgcagtagccacgcctgtggtcccggctgagttctccccatgacggggtccactctgaccttcagaacttgaggctgaagccggggcccgcggcagaggccccctggttcgtggtggtaaggtggaagcccgtctccttcaggtcgtcgtcaccctgggacgagtcggctaccgtgagaaccctgcccaagccagccccacctgtgggcacgccccacccgccaggcccctcaccagctggctgtagcccaggcctccctcagggggcctcgggctggtgccccgcttcacacgctgctgctcgctcttggcgggccacgtggggaacatggaggggtcgatggggaggggggtctcgcggaaatactcatgcttgaggccgtcctcagcgctgatcctcctcccggggaagtaggtcaggaacctggggggagagggccagaggcccaggaggtgctcgtgtgctccactgggtcccccaaagatgggctgtgttgggacggggctcagggcatgggacgccaggcaccagagcagttctggaacgtggtgagccagcaggtaggcctgggactgggaagtcaccgctatggctcgggacctcccgccacccggctgcactgggctcacttgttcatgaggtcgaagccctggtctgagagcagagccccgaagcgcttgcggaggttgttgtaggggtgctcgctgaaggtcatctttttgactactgggagctcactgtagccgggccagattttctcactgggggtccccagctcctgaaagacagaggtgcttcaacagccacaccaagtggcccacagtgttggcacctgtgtcccgtcagagaagacaagccaccaggagggctctcagtggccctggtccccatctcaacccagcacctgtgcgccccgcagccccattcctgcaactcctctgaaatccatagcgcacctgcggcagggccagacccaccttgaacactttgttgatctgatcgatttccgaattcccggggaacagaggcttctgagtcagcagctccccgaagatgcagcccactgaccacatgtccacggccgtggagtattcctaagacgccaggagaggtgttcaggaaggccagtgcccgcgaagctgtgggaggctgcatgggggacaggggaggcactcagacgcccaggactcaccttggcaccaagcagcagctctggggcgcggtaccactgggtcaccacgaccggggtgtaggccttcagaggggatccgtactcccgcgccagcccaaaatcacccacctgcaacgacagatgggcggctgtgggtgggcctgggcgggtcaccctgggatgggccactcggaggggggctcaccttgaggatgccggcgtggctcagcagcaggttggacgtcttgaggtcacggtgcaggatccagttgtcgtgcaggtgtttcaccccccgcagcagctggatcatcagggtcttcacctcccctgggagggagggaggctc

SEQ ID NO: 258 - DNA, 1021 bp, Artificial sequence
  DNA replication origin
gcacctgccccgtgctgggtgtgccgtgcctgtggacgcagccgccctccctccagctggcatggccactgagacctcacacaggcgcttccttcccagggctgccggagcgtcgaggagttccagtgcctgaacaggatcgaggagggcacctatggagtggtctacagagcaaaagacaagaaaacaggtgggtggggtcccctcaccccacaaaggcaggggaagtggggcaggggctggctgcccgagagctgcgactgcacctgggcccgcttcacctgagcagctactggaggttggacccctcagcacctctagaagccagaggtcagcctggccctggggctttgccactcccttgcagtagcaggcggcctgccccacagggccgaggcccagcgcgtggagtggtctgtgccggggctggtgtgcaggtttgcgttcccagcgtcccacccaagcaggtgtgtgagccgggaactctgttgggagtcggccactgggatcccaggtgaggccggctctgttggggaagtcgatgtggagtcggcgtggccgctgggatcccaggtggctgtaggtggctgtgagtgtctgtggtgtgttgagtgggaagccgtgggtgttgccgagacctcagctggggcgttctcctggtgcccacgtgcccccacctagaacgagacccccctccgtgaaatgctggcgctttgggcactgcctgcggtcctcactgaacgagtccactgttggtaccgtgactttgagaatgcctctcagtgccgtctgtattttcttcacagatgaaattgtggctctaaagcggctgaagatggagaaggagaaggagggcttcccgatcacgtccctgagggagatcaacaccatcctcaaggcccagcatcccaacattgtcaccgttagagtgagcatggccccaccacgcctggccccgggtggaaggcttttccgacagggccccgtgctgtcctggggccgggtgcttcctacactctcc

SEQ ID NO: 259 - DNA, 841 bp, Artificial sequence
  DNA replication origin
agagtcacggttcgaccgagattccggggagagtgaagaagcagaggaagaagtgggtgagggaacgccgcagagcagcgccctgacagagggcgactatgtgcccgactcccctgccctgttgcccatcgagctcaagcaggagctgcccaagtacctgccggccctgcaggtcaggccctcccctcgccccgggccgctgtccgcattggcagtcggagttaccacaggggctgagcgaagcctggcccccgtgttggcgtctgtcgcctcacagggctgctgggcccactggggcagtgacgggcgggcacagccactggcccctcatgcttctaggtcccgcctctttctcatgctggacggaactgggtggacagggagctgcccgcaggactgctctgcggcttgaaaggcagcctgggcgtgcggccgcgctgctgtcactgctgcccgagttgcgtcctcctccgcactggagagcagtgccttccacttgacccctgcgtgggcgggttatgtaggcaccaaggccttgttaccggcatctgtgcagggcttggatgggggagcggctacgggagtcagtgtagatgtgtgaccagaagccttttgctcaggcagctatcaataaggcaggatattgttgggagtgatttggaagggacaagcctgagaaggtaccagtggcctcgggggcctgggagaccggcagggactcggccccctccttggtgcctgtgggcggagaggttctctctggcgcatgcagcaggcctctgtcgactgccctatgccttgtgagcgcctctgccccttagtgctgctgagcgtaggcgtc

SEQ ID NO: 260 - DNA, 1339 bp, Artificial sequence
  DNA replication origin
cctgtagtcccagctactcggcaggctgaggctcgcaggataatggcgttgaacccgggaggtggggcttgcagtgagccgagattgcgccactgcactccagcctgggcgacagagcaagactccgtctcaaaaaaaaataaaaataaaaaaatagggagatttccccagttaccaagaactcaggaagcaacattaagagcttgggggaggccaggcgcggtggctcacgcctgtaatcccagcactttgggaggcagaggcaggctgatcacgaggtcaggagattgagaccatcctggctaacacggtaaaaccccgtctctaccgaaaataaaaaaaaaattagccgggcatggtggcaggcgcctgtagtcacaggtactcaggagcctaatgcgggcgaatggagtggaggcgggagaatggcgtgaatccgggtggcggagcttccagtgacccgagatcgcgccactgcactccagcctgggcaacagagcgagactccgtctcaaaaaaataaaaataaaaaaagagcttgggtacacaaagcaagcagcatttcattccgggatgaaaagaattccgatacccatcgcccttcttgggcccttgtcagtttcttgccacatctttcattttcccatttcaggcccagtaaatgcggatgtttatcttccattgtttgtttcctgagattcagatgtctaaagcatttttctgtgacttttcaaggcaagaggaaaacctgacatatggaaagggaattaattgctcgttttatcctcttctcctgcaatgctctgaatccatgggtttggagtggggccctgggagttgggggaagcaccatacccagtgagtctgcactttgaggacccactgccagtgtcagcttcaaaatcacattgtaaaaggcccggcgcggtggctcacgcctgtaatcccagcactttaggaggacgaagcaggcggatcacttgaggtcaggagttcgagaccagcctggccaatatggcgaaacctcgtctctaccaaaaatataaaaattagccgggcgtggtggcgcgggcctgtggttccagctactcgggaggctgaggcaggaaaattccttgaacccgggaggaggctgcagtgagccaagaccacgccactgcactccaacctgggcggcagagcaaggctccgactcaaaagtaaatacatgaataaataaaataaaatcacatcgtaagagctctccctgctttgtttctgagtaaggttcagagttaaattccgagatcggcctttacaagacacacagacctgaggcgcctcacgaggtaaccagcag

SEQ ID NO: 261 - DNA, 1741 bp, Artificial sequence
  DNA replication origin
ttaccctagaccttaaaaaaaaaaaaaaaaaaaactgcgtgtttccacccccgtcggcctgcagtggaagggcccgagcagaaccaacggggcaggggacgctgagcgcgccgtgtttctcctcccgtctgcctggagtagaacggctcgggcggaaccaacgggcagccgcgggggcgttgtgggccgcggcgcgtttccccggctccgtggctctggggcactgaggagcggcgcccgcggggcagcgaggagcccgatgcagggttctgcgcgtcatttccggtcccgcgggcgccccgtgaagcccacctggatccgccagcgctgtgccactccccagtgccgagctccgagctgtctccgcggcctcgcgcccggcccctccaccgcgcacctcttaggccccgcccgccagcgtccctttgttgtgaaggcgccggggcctagcgctatgcctgcggcggagactgcatcaggctctcggtgggttctgcgtgcggggtgctctgctcggtgatcggtgcttggtgctgcgtgctcggtgctcggtgctgggtgctgggtgccggtactgatgctgagtgtgcgggcgtccggggtttccctgcccggattcgctcctgggggtcctttcctatggctggcgctgtgcgcggaaaacgctggtggggttttcccagctggctttaagcgttttcacgtccgggagtccacggcgacccccacgccctgaagcctgggaacgcggtgtgcgtggccgcaaaaagaacaacaacaacaaaaaaacacaaaacaaaacacgcaaaaaactaaagcaaaactcccgacagccgagccccgttcggtgccttttctttttttttttctttaatggagtgaaatctactttgctcaggaagcctgcaaatcacattttcaggccaaacgaggcagtattttagaaggggtcgctgaggcaggagtaggaaggctttccactccactcacgcattttcagtgtaggcgaatcgtaaaacggagggcagaacgaaaatgagcggatctgggagtgcaggctgcgcttcgtccacatcgataacagatgtttcctggtgaagatgtgtagggcgcagcgggtcacctggtcgggggagggcacagggcgtccctccacggggtgcctttggcgttgggcacttgtgtggtctccagcttccgggttttggaagcggagtgtcccctgcagcctgagcctcttgcaggtggtttccttgggacgaactcccagggggaggtctgagttctggggcgtggtttgaagatttgggacacattttgcctgaaattccctgctggccgtttgaacccacctggacttcctgaccaggggcacggattcttaacctctggtgcaggggcctggctaggagaggtctgcacagttggacgaggtgcaaagtgacgctttgtcagtaacccggcgttgagattcctgtggtgggacgagcagctcctatggctttatcccattttaaatccaagttttcttttccttctagtcctcgggctccacccggggagctgtgcccagacagcagaagggaaggatgtcacttctgagatgaggttcagaaaggcctgggctcctgtcctggctgctctctcccactccctgatgagcttgctggatgaaagctcctgtcaggctgtggggcgtcctgtggagaagctggcaagaaactggtgggggccctttcca

SEQ ID NO: 262 - DNA, 1819 bp, Artificial sequence
  DNA replication origin
agagcagcagcctgagccagggcttccagaaaggcccacccccggccaagaacccttcctccctccctccctgggaatggccgggactcttttcctgtggggccgggcagcccctccccgaggcaggcttgagcagtgccccatgggtgctgggacagagccatcccaggtcctggaggggacggtgcagggaactgacaaactctgccccagggccctcaggggtgaggtcccaggaggtgggtgggggtgggcagcagtgccaggggggacaccctcaggcctctgctggggccaggcctgcatgtgccaccgtatgcgacccgctgcccccaggacgggtgccccgactgtgatgctgcaagacccagggactcaggccctgtggtgccctaggggacaagctgtgtctacaggccaaccgcaagagggcaggcgctgcctggcccggggaggaggttggcaggcagcgcccagcccggcatgcagcccacacctgtctccatggcggatctcttgtctcttccgtccatcaaaggacacccatgctgtgttccttgcttcaggtgacagcatgatctgagggtcaagcagggagaggtgtgggcccccagctgtggggaggacgcttctaggcacccacccctgagtgctcgccagaggtcgaaggttgggcagctctgaccctgccttgcggacggtgcagtgcacgtcctacaggcaccggcccagctcagcaccgccagagaccaacaatggcagaaagcccctcagacccgggccctgggcaccttgatggacagaactcgggcaccagcaagggaaggcttgcatctgagggggcacaggatggccctaggatgacgaggccgcgtctgaggctggagccagcatggcagagcggggtgctaggtcccggctttgtgttgcacggggtcaaatgactcacaaaccggaaaaggagtgtcgttggctctgaccttcagctcgacccctgcggggaccacgatgggccggaaggacagcgagtgggggcagatgggcgtgatcatgatggccggcacgttggggtggatcatggaggccccggccgcggccgcatacgccgtgctgcccgtcggggtggacacgatcactcctgacagggacaggcgcaggcgtcactcccgcccgagggacgctcagggccccaggacagtgctgcgggccttaccgtcgccctgcaccgtggtgatgaggtgtccgtccaggtagacatccacattggacaggtaggaggaggggcctctgtcaatcaccacctcattcaggacctggaggggcgacagcattgcacactcagggcgggggatgccgcacggctcgcagacaccctccgtctcacccagccgggctctccggaaggtcctcatccctgggaccgaagtcgccccaccctgggcccctcaccgaggccgaggcgcctccactcacctggtactgcatggcctgcttcccgacatccatgtccaggcctgcagcctgcgagccgttctcacccagcccattgtgcacggccgtcttcttcccccggagctccttcaccaccctgaccttcagccgactccggagaacaacagctgcgttccctgaggtccagcaggagtcagagggcatgcatcagggaagtcagtggggtcaggggccccaccccagggaggccagtgggagtcagagggctctttcttctcccaagttgacacacttctgtgcctttttctttttattttgagatggagtctcactctgtcacccaggctggaatgcagtggtgtgatct

SEQ ID NO: 263 - DNA, 836 bp, Artificial sequence
  DNA replication origin
ccgcctcaggcatttggcagcagtgacaggtcacagacactccgggaaccagtggcactgaaagggctgggcctcaaaagcacaagtgcgagtcacttccatcctaaggggctccgtcagcgtctggagcagcaaggccaacccccgtcctgcctgggacgcacgctgccgcggggcccacactttgcagagcagctcctcggatgactcccccgtggctcctgggacctgaacttcggtgacagcccagggctggggcctccgtccctgctgtgcgcccccagcctccatggcaccggtgcctgtcagcaaagggccatgcagtggccgcccccgtatcacacggccgcattgcgctttctggtcaacagtccccagcagcctgcgcgctggaacactcggcccttccgcatggtcctcccttgcagaaagtgaagcatccatgactccgtgaaggaggaggccctgaagagagcccgttctgcacagaggaagagagcccgttctgcacagaggcctgagagctgaggcaccagtcccagaagcaaaggcttctctggggaagaggcaatgaggatgtctaccaggtgcagaatacgactctcagggctggctgggagctcacttttttctctggagacagtcttgctctgtcgcccaggcggaatgcactttgataatcacagctccctgcaatctcaacctcccaggttcaggtgatcctcccgccccagcctccttggcaactgggactacaggtgtgtgcaacgatgcctgctaatttttgtatttttctgagtctgagtcttgctctgtcgcccaggctggagtgcaat

SEQ ID NO: 264 - DNA, 851 bp, Artificial sequence
  DNA replication origin
cgcggggtgtcccggcgccggtgggacccggcagacgcgcgggacgccccacgtgcgcggcagcgcgcatgcgtggcgggtgcgcctgcgcagtgggcgggcgcggcgcattgctgctcggcggcgccggcgccggggtccgggcggccatggggcaacaggcggccagggcgccaagggccaggtagcgacggctggcggcggcgcggcggcggggcctgcgggctcggtccggcatgtagacgcccccgcaggcgcccgcggcagcgaacggtgagtgagcagacccggcctgccgtccgcctggggtcgcccgctgcctggggtcatcgctgcccgcgagcgcgcggccaggcggggagacaccaggccggccctgcccatctggcctgctgaggaggccgtggaagtgctgacgggccaccgctccgtcccgaatggggcaccagcacggcccagggcgaggctcggccttggggacgggtctgagggaggccgctgtccggcctggctctcccgggcggggaaggtggggccgtccagcccggaccgcgcttgtcagtcgcctctgcttgggcggccaggtcctcggtgtccggccttccgtgggtggtttcagcaagcaggaggggtctttgactcgtgaaagcttagaggggcccaaacctagtgggaaagtatgaataaaagattctatacagcagtattggcatggaattctctaaaaacacatctctgatttagtgcccagtacttgccagaaaattccaatagtctatggtgatgttcctacaggcggctgccatccagtaggtcagatgtcagcaccggccttgagctctaggtcgtcg

SEQ ID NO: 265 - DNA, 886 bp, Artificial sequence
  DNA replication origin
ggaggcgggcagcggggacaggggcgggcgtccgcgactcgggtaggcgggggtcggcgccccgaggagggcggcccccggctcccgtccccactcacctgccgcgtccggagggcgcccccgggtccgcccgccacgtctacgcctaggcgcccccgacattgtgatcccagcccggcgtcccgcccccaactcaccgccaccgcgggcgggacctcccggaccacgtgggccggctcaggggagtgcaggtgccccgcgagagctggccccgcccgccgccgcttccctaattaccgggctgtgacacggtgtgggccgagccggatttgggaaccgaaacttagagcagctgcggcagcgctgcgctccctcggggctgtccgtcggggctgggagggcggccctgcgcctgggggaaccgcgatcggcctcacgcccacctctagcggccaggtgcgccttgcacgcccacgaacgtcctcagaggtctacgcttgggatcccaaggctggcagtggagggaggacccggtggcctggggcacctctagggggaccagggagccgtgttttgcgcaccccacaggctggaggactcggggagttgggggaggaggccaaagccacaggagcggactttgtagtgtttgttggaactgcgggtcccacccagcccgcacttgctgaactggtggctgctcatcagcgccttcaggcctcaaatatcccaataatgtgccctatacccagttctcagctctcgagtcactgtcaggtaaactggcaatgcacgaccagctgctctaacctgctggtcccccaggtgccagacattgttttgtttttctgagatagtgtctcattcgtcccccaggccggagtcc

SEQ ID NO: 266 - DNA, 1154 bp, Artificial sequence
  DNA replication origin
acccagaatggtccaagaggcagctttgcttgggctgagaccaaagggaagagatgttcccgcagcaggaacagaagggtccagggctatcatgggggcttctgccagatggtgcacaggaagaggctctgccttcaagggattgggggtcaggaaaggccccctcctgcctgaccaggccccagggatggggcagcagtgggtggcatcccctgccctgaccttcctcagccccagggctgccattgctcaaggtggcagtggactcttcacataatttcgcattgttttttgtattctttaaggatggctcccatgttgtttacttcagaacccccaaaacctggacccatcctcttctgggggtcagcagggatggggagggtggagggagaagggggaacggaggccatgagggatggagcaggatggggtgcactggggtacaggttgctcctggggaggctgaggagagagggaagttggcttcaggtggcctggctccagtaaactgggtgaacgaagtctgcccagaacccacaagggtaagtggcctggagcctggggaaaggatgactgggaaggactgaggctcccagtgaaggacatcagtatggcaggctatctggtcatctcatccagcctccagccagcacccggcacaggccctgcccaggctgaaagccaggataggggcgtctgcaggggccagtgtctggatctgctcacatgacagtcttctgtttggcctggtttggggcgaggggcaacctctttcccaggatgccagccatgtgcagggcatactgaggattcaacagtggaaaccaaagtccatcaggtgttcaccttctagtggggcagacgggcaagaagcagaattggtgggggcaggcaggggttggggtacagttttgaccaaggtacccagggacaagtgtttctctctcaggcagaggcagcagcaaggaccaggaccctgaagtggtgagagcctagagtgggcggggatcatcaacagtaaccacctggcaggactgggactccctgtgtcctcacaagatccttaccaagcagcctagtataagacgaagtctcgctctgtagctcaggctggagtgtagtggcatgatctcagctcactgcaagctccg

SEQ ID NO: 267 - DNA, 915 bp, Artificial sequence
  DNA replication origin
tttataaaaatgttatgtatggtaacatgcagtgggcttattttcaaatgataaacatttttaggacatttcagttttaatttatagcacagtaaatattgatagatcaaaccctcataaacaaaagcccctggggtccttaatagttgaggatgtagagggggtctgagccgaaatatctgagcagcgctggtttagagaatgggccaggcccagggcacctgtggggaccagagaagttctcagctggagacaggcaccctgtccctgcccccatgtgcagtactgtaggattgtgccttttcctggggaggagaactcagagatttgtcagaggtgaagacccgttggtgtagcttgagaagaggcccttgtgttagggatgtgcagaggaagagaaacacttaaaggagtgaccagactttgggagactctcagcactagtgtcgcagaacccacagaaggtattctgagagcagagggaatggtccgaagttggagatggattcgtcagtggtagagattgctgagggccagtgagttccagtggggtgaggagagtcttgtaggaaagtagtcggagagagaagtgtggggctaggggaggctctgtctgcatggattttagatgggaatactgagagggcagcgcccataaaggggaagagaggagagatcttttgtaaaatgcgtattcagggccaaagatgtgccaaggagaggcaggtgatgggcagtgaataagagatgccaacttgccttggtgagaggaatgttacctatgcgacagtggaaaaggctgtgtgctgaaaaagatggcggacgagtctgctgtagggctctaggcattgctggtgcttccatgttgaaaagggtggtccaaacatttgaggagagagtaggaggaggtgagaa

SEQ ID NO: 268 - DNA, 890 bp, Artificial sequence
  DNA replication origin
cgggcggggccgggccctgcgtggggagccggacgtggctctcgggcccgcggcgcgagaacaaaggccgggcgggcctgcaggcggggcggtgtcggcggccggagcccccgcgcgggccgcctatcggggtgactttgagggccgggcggccgcggggcgcgagcgtggggaaggggaacaatgaaatggggaagccgggccgcgcgccgcggtcggagtagggatttaaagcggaagccgggcgcggcgtcgggaaatgggaaaataacggtttcggcccttttcgctgtgtcgagccgctgaggcagtcgcgctgtggcctcgcccttctcctgccgaggcccgggtctgtccggcgctggcgccccgcgcgtgtcgactcgagggttgcgcggaccccggcccggccccgcgaatgaatgggcccggtggccgcgccaagatggcgctcccaccgctgcctttgtggggcggccgccgccgcgccgagtttcggggcccggtttgcgatattccgaaggcccgaaggtgggggagaggacaggaaatagcacaaaggctgggtgtcttcctcttgcctggatcggcttttcggctggaagcggggtgggggtggggagtggggagatctgttgaaaattccacagggctgtcggctgaggcttttgacttttaagaacctgctatattttttcttgtgaatcgatagttgattcaaatgatattttaacatttcttgtgtccgttaaattacatggttagcatgcagaagcagtatcagcttttgtttgcttaattcatcttcatggaagccttttttttttttttttttaagagatgggatctctttgtaaaagagatcctgttaaccaggctggtctcgaact

SEQ ID NO: 269 - DNA, 1294 bp, Artificial sequence
  DNA replication origin
aagaaagaaaaaaaaacccaaaataaataaataaaataaaaattaaaaaaatttcactgggaattcactccttgctcaactgtgctaggcaggcaggcgcccctgtgggggcggggcctcggtggtccagcggaggtcagaggccacgcagggtgaggagcgggtagcatatggtggggtggaagcaaggatgagagactggttacacaggagataatcagagccaggttcctcactcccaaagcaggaggcccctcattccgaacaggttgagccctgtagtgttggcctggcatcagagtaaacacgtggtgcccaagaaaaacagacaaacacgcccatgaaactgtgtgtatacatatgcgtgtgggcatgtacatagatgtgttcccttgctccgccagctgcaatgacaccccagtagcaatgagcacatccggagccagatcccgggctctgcatgacattctcccacaatgaaccaggctgcagcagaaatagctgggttcaggctggggcagggagaatacaacagggccctggagcatctcgtgccagaaagaaagggctccagaaatgatgcggacaggtgaagtgggagggagagagaagggtggcaaggcgtgggttccctgtctggtggaggctcccctaggtagggggaagcgcgtggcacggagggcaggtggcggacgcatctggaagccgcacttactgtgtgtccactttctcacacaagcaccatgcacacaaaacaagaaggaaaacgtcagctgagagaggcgggtggtgtcccagggtgtggagagagtagaaggtgggaaataggtgttggaggtggcatggccccttgaggttgtggccctggttgaggggaggcccagtggatgaggttgggtctctctccccttcagctgtgctggtgcaggcctggaggaaaacggacgccaggtttggtgtggaaggggagctcggaggcgatgaaggcccaggcaggtggaaggtggtggttgaggaccggggagcagggcgctggctggggagaggcagagtgaagaagccgagggtgaggggcagccggaactcagctggaaagacagcaggaggcggtgggcgcaggggcgggttccatggacgttctggaggcttctgaggacaccaagcctggaagccaggacatgtggccttcttgacttcgttccccttcctcacctggaggtctccagtccccgctgtccactgctcagcggcatgggaggagtccgcggccttaccccgacactcccgcccaccg

SEQ ID NO: 270 - DNA, 738 bp, Artificial sequence
  DNA replication origin
gcaaaggcctgaactacacgaggttatggggagaccgtcccaggcagatggagccactgggccaaagcctggaggatggaattcggtggtgtcggggagcatcaggagccagtgtcttgatagtggggaggggaggaggggcctggacactggggagagggcgggtgatgggaactgtcaatggtttcaggcacaggagtgatatgattgacaattcaggctgtgtccgcagtggctcctgcctgtgatctcagcactttgggaggctgaggtgggaggatcgctggagcccaggagtttgagaccagcctgggcaacacagggagacccccatctcaaaaagaaagaaagaaagaaaaaaaaacccaaaataaataaataaaataaaaattaaaaaaatttcactgggaattcactccttgctcaactgtgctaggcaggcaggcgcccctgtgggggcggggcctcggtggtccagcggaggtcagaggccacgcagggtgaggagcgggtagcatatggtggggtggaagcaaggatgagagactggttacacaggagataatcagagccaggttcctcactcccaaagcaggaggcccctcattccgaacaggttgagccctgtagtgttggcctggcatcagagtaaacacgtggtgcccaagaaaaacagacaaacacgcccatgaaactgtgtgtatacatatgcgtgtgggcatgtacatagatgtgttc

SEQ ID NO: 271 - DNA, 1028 bp, Artificial sequence
  DNA replication origin
gggatttcgagcactgcgaacacggcgccgtccgcgccgccctccgtcctcggtcacacacggccctgtgagtttcccttccggactcccaccgtcgccgggaacgaacggaggcgccggctgcggccccgcagggtgccccgaccgcggctcccgagaggcccctcgccagcagccgcccgcgccgcggagggctcggcccgactccctgctccacctcggggcgcagtggcagccaggttccggggctcctccgtccgcgtcctcttcagcctcgttcgaatgtgacagcagctgggtcatgttgtccaaacgtaccaggagccccagatcctccctgcagcgcgtgccccagcgcgcccggtggcccaggagcccctgcacccccgcagccgtcctgtcccgcctccttccagctcccaaaagggaccgcagatggggactgccggagtccgggcctggggcaacacccagcctgagacgggcaggccctgggctcgggcgggcatggatctggcctcagcagggccccaggagtcaggttgactcagcccctcactcctgccaccctctgcagtgatggggggcttcctccccatggtcactcccagaggtcccagctcggtgcccaatcaaggcctgaccccgtggtccccaggggctgctggagaggccgcagggcaggagagacagacccttagaagtatgatgggggccgggccctaggtagctcacacatgtaatcccaacattttgggaggcagaggcaggcggatcacttgaggtcaggagtttaagaccagcctggccaacatggcgaactccccacccacaactctacaaaaaaatacaaaaattagccgggcgtggtggcacatgcctgtaatcccagtaacttgggaaactgaggaaggagaattgcttgtgattgagaggcgaggttgcagtgagcccatgtcgcgctcgccactgcactctagcctgagcaacatagggagaccatctcaaaaaaaaggccgggcgcggtg

SEQ ID NO: 272 - DNA, 843 bp, Artificial sequence
  DNA replication origin
agcaagaagcgagagacggccgcgcgcggtggctcacgcctgtaatcccagcactttgggaggccgaggcgggcggatcacctgaggtcaggagttggagaccagcctggccaacatggcgaaaccccgtctctaccgaaagtacaaaaattagccgggcgtggtggcgggcgcctgtaatcccagctactcgggaggctgaggcaggagaatcgcttgaactcgggaggcggaggttgccgtgagctgagatcgcgccactgcactccagcctgggcgacagggcaagactctgtctcgaaaaaaaaaaaaaaagggcgagaagcctctagtgcagcgctaggccccacctcagggcgcgctgggcttcgctcctcctcccccacttcgcagagggaagctgaggcacagcccggctttatggaacccagctgaggactgcggatggcgggagaagccctggggccgctctcgctgctggtccggggctgctggcagctctgcgcgctggtcccggaaggctttgttccaagacaagcctgcatttcccaaaataatccatggtttttagggctggtaacctgcagcccctccgccggcctgccctttctcagaaacaaccactttcaactatttgagctctttcctctgttttgtttgtttgtttttgtttgttttattgttgtttgtttttgagacagggtctggctctgtcacccaggtcggagtccagtggcacaatcccagttcactgcagcctcaacctccctggctcaagcgatcctctcacctcaggctcttgagcagctgggaccactgaccactcccggctgattttttttt

SEQ ID NO: 273 - DNA, 954 bp, Artificial sequence
  DNA replication origin
catgaacacaactgcacttgcacctgaacgtggctgaggcagcattctaattgttacagggtttttctctttttctgttttcttttcttttcttttttttttttgagatggagtctcgctctgttgcccaggctggagtgcagtggcgcgatctcgcctcactgcaaggtctgcctcctgggttcacgccattctcctgcctcagcctccggagaagctgggactacaggtgtctaccaccacgcctggctaatttttttgtattttttttagtacagtcggggtttcactgtgttagccaggatggtctcgatctcctgacctcgtgatctgcccgcctcagcctcccaaagtgctgggattacaggcgtgagccaccgtgcccagcctctttttctgttttcttatggagaatagcccttcggtgatcagaagagacacaagaaggaaaataaagattggatgagtctcaggtcctagagatacggggtatgtccgaaggccacacagaggctggtcagcatgaggagagagggttagagggcgaggacctgttctgctgcttgtactgggtcttggatatgggtagaagcctagatggagaggagagaggttgatggtggttgtggccatgttgccccttcctacgggcggggcggggggtgtgccctctgctttaagttgggctccaggggtcacagctttgagtttcactcgtaagcccatcaggatgtctggaaccttcagggctgtggcccaggaatgtcagacgctggaagcctgggaacggaggaggcagagcctgctgtccactggctgtgagagttgttggggtggggacttgtccagggccacgaggccagtgcagttctctgtgtctctgtacccagctggcctgtacctggagaccctgagccagaacccaggatgggccctggcctgggtgctgcggct

SEQ ID NO: 274 - DNA, 1935 bp, Artificial sequence
  DNA replication origin
ttgaggccagctcactcttggtggggttgatacccagcaggctcatgagccactccagctcccccgtcttcacctccccgttgccctcttcgtcgaacatctcaaagactcccttgtactccttgatctgctcagccgacaggcgctctgtctgcaggggacacccgcaccggcctgaccaggagccccttctgcccctgtgtccagggaagggtcagaggtaccccctgcacccattcctccattggcagcctttcaaggtgagtggtaagagaggaggcccccagcggagagcaggcttccaggacaaggggtcacacgccaggggtttgcagggccagcagggctctgccaggcagctaacaggggcaagggccagacaggcaggagccagcgtgcgagggaacagcagcagctgcagggccaggcgggccaggcagcggccctggagcctggcaatggacaccaggtgaggcaggtgaaggaagccgagagcagggtggggaggagcccagccctggcccgggaaaggcttccagcccaggattgggatacagcccaggaagcagaaccctgggctccagcctgtgtggcattccggagggagagtccagcaccgggccacacctgcctgccaccactgctgctgcccatctgggagccagctttcagaaagggctgctccaccctggccccggaacaagggctgtgttggtggcagcagggcttggccccctcttctacctcagccccttcctgcccaggctccgtggcaggtcattgcacctccaggttccagctcaacctacccagccagcccaccagagactccatcgggcacagagagcagccttaccatgtcggtggttgtctgacaggattctgcagggtggtgacaccagggctgctgtgggcagagtgctggggcagtggtggcagctgagttttagctgggcctggctgcctggggtccccggggtccagattccaagagccttttatgggtgggaaatcctgccggccctattttgggacaggctctcggccttatccacagggccccttcccggcccgctttggcctgggcttcccctgaccctgaagatgggcaccgaaggctaagtgcgggggccaggaaagggctgagacatggcgggaccctcacacacgctgttccccgtgctgttccctcttcactggaccaagctccaagtctaccttcccagaggtgcggccctccagcaggtcttcatgggaccctggtcccatgctgtcatcacttaccagtgagatttcttgttgaagacccatcctggccagctggtgctcagtggctcagagcctggccaccctcccatcctggtggactcaacattggccccgtgccagcatgtcacaaactctcaggacaggtcgaatgaacaaatgcatgaggcaccgcttgaccatcttgtacaggaggggctgagggtccaccattcagggaggagacagcaggacatgggctgggggtgaagggggaaagggagcaaaacagggcctgggggctgggctgcccgctggaagccaggcacagttgggggctattttggggtttctcagggaaacctgatctcccttccactcagaacagcaaagctggctcccgagggggcctggtgcccaggctggtccgtatcaacatgccaccgtggagcacacgcctgcacacgtgtgttccctcctcagacccgcactgagccctccctgtctgggtctaattacccaccagactcccaaagccagggtccagctcctccctgccccacccaggcaagagtgtgaggattgcagtggcaggtcagggccctcagggtcacactcacacctgccccccgactggccccttgatggcatgaagagtctgagcaggtggggcactcagtgtcccccgcc

SEQ ID NO: 275 - DNA, 1291 bp, Artificial sequence
  DNA replication origin
tgccccctggcccccactcccccggctccgtgtaaaataaatgttccagcccaacctgtgtgtgcctcactgtcccagcctgggttggggggcaacaggcaaaggcgtggggctggagaaggaaaagagttttcctggcccagtcacagaaacagccccagtcatttctgccacgacacctgacaccacccattgcccagctcagggctaggaatgccagcctgaaacctggactgggtacaggccggggaccacacgctcgcccttcctgcttgcactgggggttggctgcccaagggttcctcccagagccctggagtcccagagtccttcccacataggcagagaccacttaaatacaaactttattctctctccaagaagatgcagacgtcacaggtggccctgagctcccacccgaggcttaggcccaaggggcctcttccaggctgagggcctgctggggctgggccaggggctgaggctgaaagcagcagcctgcctagtgggtgacgccaggggccggtgtaacatggcaccgaggttggggccacagcaatgtgtgggacggtggggtgggctggggcccttggctccaagcattagttctccaagctctggtccgttctcctacctccttcaaggggcaccagggctacaaggtggtagttgagtattggggcccgactcctggggcactggagtggtctctaggcccgaggccccaaggagagggctgggtttctgggagagtgctggtccttcctctctgggcttggccatcttgacagcttcatcgtaggagggtggaggctccggggtgtacaggctgtaggcaggaggagccatggagtccaggtccagctccccaaagggcaggggcaaccgcatgcccagtgggtactgcacggagctgtaggctgcagggaaccagagtgggttcgtggaggcgggcttggcatttacccccgccatctccaccctcaactggcgggcccctaggcactcacaggtcacagtgctgtgtacagggctgtcactgtccatagggatgactgccacgtcgcagggctgccgtgctggtggcagatgtggctgggcctgtgcctgcttccggaggcagcagaaccggacacaaccagctgtgacaccacacagcagaagcaggaggaccgccagcaggatgagcctaggagagcaaggctctaccactggactgaccctcggccaccgggcacctgcaccctggggaatgtcgtggcacaaccaccgaagacaggttaacaggata

SEQ ID NO: 276 - DNA, 1059 bp, Artificial sequence
  DNA replication origin
agagagacggtgtgctgttggtcccacggggagcagagggcaccaagagcctaacagggcccctggcctggtggcagagggataagggtctggggtccccctggaagaaatggccccaggcctgcccctgcacagggagcagcagacattgcaggctgagggaagggcactgggctccctgtggccctcgggaatggaggtcacattccccaggtggggcatggcccccaaggccaagtgctttgggaaagtggtctgcacccagcgcctcaacagcccagagccagggccaggctccagccccctgggccagcccccagacagcgcctgcagcgcaggtccacaatcaagtgtccaaacaccaagttcgggatgcccagcatcttggtggcgttaccctacagtccacctggagcccgcctgcgagactggacccgagggaccacacccaaggcagccacgactttccaggccagctcccgagggtccccgggccacgcccagaccagcagcagagcaggccacgctcggccgaggttaaggcgccgtgcccgggctgaggacgagacccaccgtcgcctcacgagtctgggccaggtggagctgcggggtagggcttgtggcggacaagccctctgaacacgttgggcgtggcccagtgggaggggattgcgctgagcggggtatggtgggcgaggcttacgttgggcatggggccagtgggcggggtttgcattgagtggaggcccagcgaatgggggcgtctcgtgggcgagggctcctgtgggcggggcctgcggcgaacaaggcttgcactgggcggggcccagtgggcggggtttatgctgcgtgaggcgtcctgtgggcgaggcctgcgacgaacgcggtttgctctgggcggtgcccggagggcggggtttaccctgcgtggggcgtccagtaggcgtgtgcgcctgtgggcggggcctgcggccagcggggcccggtgggcggggtttactctgagcgggcgttctgtgggcgtgtcatgtggtgggtgtgtcctgtggtgggcggggc

SEQ ID NO: 277 - DNA, 1294 bp, Artificial sequence
  DNA replication origin
gtgcttctgggagctttcctgggcacaggcctcagggacgccggtcttgagctgcctgccctcacccccagccccccagggcccacagtgcctaggaacttgccattgccccaaacttcaagccagtgacattgaccccgcagtggcgttttgcaggatttctgtccaatgggtcccttgctgcccttcctgcggccgacccaccatggctcaagcttgcgccacaccagatgggaggggaaggcaggttccgccaggtccaggccaggccccggccgcaggaggaggtgctactggatggcaatgtttcctgaataggcccctctcttctaaaccctgacccgactctcctgctggcaggcctctggtactgagtggcgaggcccgcccagctcctgcgtgggggccgtgcccacaccttccggaactcggggctgtggcctcaggctgtgctgtgcacatgcactcccattcccactcccgtgctgggcctccacgaccagtgcagtcaatgtggcaggaagaagggccaggggctgggggagctgggcaggcaggaagggcccttgaggaccgtggcacaggccttgggaggtgaaaggcaacttcaggcagagcccaacagtggaaggagtgatgcagtgaaggggcaggtatgggcagaagagccacgcagaggaggccctgccctccagggtcactgcccttgtggtaggggtgggggacactgagcagcgcccacatgtggaacagttctgagcaaggggtgcatgcccctcctgcagtaagatggaccctgccccttgctgtgctgaccacctcccttagcctgaccaccagagagacggtgtgctgttggtcccacggggagcagagggcaccaagagcctaacagggcccctggcctggtggcagagggataagggtctggggtccccctggaagaaatggccccaggcctgcccctgcacagggagcagcagacattgcaggctgagggaagggcactgggctccctgtggccctcgggaatggaggtcacattccccaggtggggcatggcccccaaggccaagtgctttgggaaagtggtctgcacccagcgcctcaacagcccagagccagggccaggctccagccccctgggccagcccccagacagcgcctgcagcgcaggtccacaatcaagtgtccaaacaccaagttcgggatgcccagcatcttggtggcgttaccctacagtccacctggagcccgcctgcgagactggacccgagggaccacacccaaggca

SEQ ID NO: 278 - DNA, 1425 bp, Artificial sequence
  DNA replication origin
ccagggggaccccagacccttatccctctgccaccaggccaggggccctgttaggctcttggtgccctctgctccccgtgggaccaacagcacaccgtctctctggtggtcaggctaagggaggtggtcagcacagcaaggggcagggtccatcttactgcaggaggggcatgcaccccttgctcagaactgttccacatgtgggcgctgctcagtgtcccccacccctaccacaagggcagtgaccctggagggcagggcctcctctgcgtggctcttctgcccatacctgccccttcactgcatcactccttccactgttgggctctgcctgaagttgcctttcacctcccaaggcctgtgccacggtcctcaagggcccttcctgcctgcccagctcccccagcccctggcccttcttcctgccacattgactgcactggtcgtggaggcccagcacgggagtgggaatgggagtgcatgtgcacagcacagcctgaggccacagccccgagttccggaaggtgtgggcacggcccccacgcaggagctgggcgggcctcgccactcagtaccagaggcctgccagcaggagagtcgggtcagggtttagaagagaggggcctattcaggaaacattgccatccagtagcacctcctcctgcggccggggcctggcctggacctggcggaacctgccttcccctcccatctggtgtggcgcaagcttgagccatggtgggtcggccgcaggaagggcagcaagggacccattggacagaaatcctgcaaaacgccactgcggggtcaatgtcactggcttgaagtttggggcaatggcaagttcctaggcactgtgggccctggggggctgggggtgagggcaggcagctcaagaccggcgtccctgaggcctgtgcccaggaaagctcccagaagcaccatctgctcccccgacccggccagggaaggctgcgtacagtctgctggtggctgctggttggggtggcacagtgggtgtgctgcactgacaggagggccaggctgggtgggctctgtggggacagcgtccaacaagccagactccagagggcagggttggggtgcaggcaccactctgagcttcaggagcatctcacgggctgcgaggggtcttctctgttgaagggtgggtcagagcccagaaagccgagcccagacttatctcagacaaatagagacttcagtgcaggagctgggcctcacctggcccctgctgggtggaggggagggcatgagtaggctggggggtccccaccgtctgctcacctttgcttggggtcatccggggtcctggaacttgggaaaagtctggaggttcccggggcctgccctgggctttgcagccctgccctccccaccacccaggcccctcggttctgggtc

SEQ ID NO: 279 - DNA, 759 bp, Artificial sequence
  DNA replication origin
cagctgcagaacaactctctgctccccatcaagttctccatgcacctggacagcctctccagcacccggggccggggccagcagcagctgccgcagttcctcagctcgccctcccagaggacggaggtggtcggtgagcggggggtggggggtgggtggtgagctgcgggggtgggcggtgagctgggggagtaggcagtggcctggagggggacagttggtgagatagggggctgggcaatgagatgggctgcgggcggtgaactggcaggggcgggtggtgagctggaggggggtggtcggtgagctggcgggcacgggcggtgagctgggtggggggcagttggtgaggtggggggtgggcggtgagctgggggggtgggcagtgagctggagggggcggttggtgagatggggggggtgggcgcttggatccatgggaggagtggggggcgcaaggccattggggggaccgggcaggacaggggctctgcaggggggcgggcagggtgtagagctctatgcagcaaggcttggagggcagacagtgattgcaggtggagaaggccaaactgcaccccaccctacccgcagggacgcagaatctcaacggtcagagcgtgttcagcgtggcccccgtcaagggcgtcatggaccccgggaagacacaagacttcactgtcaccttcagccccgaccacgaaagcctctacttctccgacaagctccaggtggtgctctttgaaaaggtgcggctct

SEQ ID NO: 280 - DNA, 1233 bp, Artificial sequence
  DNA replication origin
ataaaatcagggcatttcaagacaaaagcaagtgacccgtattcttgggtttctccttaaggacgtcgaagggaggccctaccttcccagggaggccttcaggaaccgcacggcaaccttgtggttcttccgggcgtcctccagcagcttctggtgcctgagcccgagctccttctgggtgttcagggacttcctgtggggatatggggccgtcagagggaaactcggcatcacacgtcccatctgcccccaagccctgcacggctggagctcgtgtcccagagacgccgtgggccctttcgctcagctctgtcccgcacagcctcccttggggaggagcgagggtccctggagagctgatgccgtgggccacacagatgtcaaactctccacgctactggggctccagtgccagggagccaccaaaggcaaggtttgatcccagctgggcaggggtctgggaagaggacggtgcaggcacagcagtgctgtggggagggaggaggcaggggctggggaccttgtgtctgcagccagggcctggattccacaggggtttgtggcctgggcagctgaagggaaggaatgagatgggggaggggatggaggccagaagggggtcccgaggagagaggctcacggcaggttgggacagctggcctgatggcctgtggagcacttggggactggcctagtaggtggccgggccctggctgagcaggagactcatgacagaagacgtgtggggaatgggcctgagtgctccacagccacgcaggtgggggccgtgggaggggtgcaaaggagcagccagaggtggggatggagcccagagaatggcctggctgggaagaggaaggggctgccggagggaaaggggaggggcagtcttgctggagcgtggctttagtagccagctttagcggctgtatggtggctgcggcatcttgggagggctggggctctgggcaggtgcaggggagtgcctgacacttgggaaggactcaagggcccggtggaggagcaagctgggaggaggcagggaggggtggaggtggatctggacagatgtggagggcgaggctgaatctggagacccctgggggagagggcggaggggctggcagaagctgctgggaagggatggaggtgggcctgggtgtcgcctacctgatcctcagcagtcggttccgctccaccttccccagggcctcctgctctctgcagagctgc

SEQ ID NO: 281 - DNA, 4814 bp, Artificial sequence
  DNA replication origin
ggggatgggtggaaggggtttggggcggtggttaattgattttggggtccctagggctgaagtagatggggaccccactcaagtccagtttatctgaagagccagtgtggtcagtcgcagaggtgatgatgaaggttggaggctggacagatgggacctggctggttttgaagatggaggaggaacgcaggcagctttggagctggaaaaggcgaggacatggattctcctcggaggcttccgtggggaaccagccctgcccacaccttgactttagcccagtgggacccgtgttgggccaatgacctctagaactgcaagctcataaatccgcgtcctgctgagctgttaggtttgtggatttgtcactgcagcgatgggatacgggtgcagtcagggaagcctcagagcaggccgggacacagcaccagcgccctgccgtgggtcccatgtggccaagcggggtgcacacaaagcctcttcttcgtgctgagctgggcgtgggaaggcatcatgtgacgaggctgcacagaacacgtgtgtcgtgctgagctgggcgtgggaaggcgtcacgtgacgaggctgcacagaacacgtgtgtcgtgctgagctgggcgtgggaaggcgtcatgtgacgaggctgcacagaacatgcgtgtggtactgagctgggcgtgggaaggtgtcacgtgacaaggctgcacagaacatgtgtgtggtactgagctgggcgtgggaaggcatcatgtgacaaggctgcacagaacacgtgtgtcgtgctgagctgggcgtgggaaggcgtcatgtgacgaggctgcacagaacacgtgtgtcgtgctgagctgggcgtgggaaggcgtcatgtgacgaggctgcacagaacacgtgtgtcgtgctgagctgggcgtgggaaggcatcatgtgacaaggctgcacagaacatgcgtgtggtactgagctgggcgtgggaaggcgtcacgtgacaaggctgtgcagaacacgcgtgtggtactgagctgggcgtgggaaggcgtcacgtgatgaagctgcacagaacacgcgtgtggtactgagctgggcgtgggaaggcgtcacgtgacgaagctgcgcagaacacgcgtgtggtactgagctgggcgtgggaaggtgtcacgtgacgaggctgcgcagaacatgcgtgtggtactgagctgggtgtgggaaggcatcacgtgacgaggctgcgcagaacacgtgtgtcgtgctgagctgggcgtgggaaggtgtcgcgtgacgaggctgcgcagaacacgcatgtcatgctgagctgggtgtgggaaggcgtcacgtgacgaggctgtgcagaacacgcgtgtggtactgacctgggtgtgggaaggcgtcacatgacgaagctgcgcagaacacgcgtgtggtactgacctgggtgtgggaaggcgtcacatgacgaagctgcgcagaacacacgtgtcgtgctgagctgggcatgggaaggtgtcacgtgacgaggctgcgcagaacacgcgtgtgatcgctcacggcctgcctcccaccaccgaagcagcctccaccaggcagggctctgctgcttcattcatgggagaggcccaaaggcttcggacggcgtctggcacgcagtgggcaccctcttaccgcgtggggaggacgggtgaacgagagtgtatctaagccaccggcacagatcgcagtgggcgccctcttaccgcgtggggaggacgggtgaacgagagactgtatctaagccaccggcacagatcgcagtgggcgccctcttaccgcgtggggaggacgggtgaacgagagactgtatctaagccaccggcacagatcgcagtgggcgccctcttaccgcgtggggaggacgggtgaacgagagactgtatctaagccaccggcacagatcgcagtgggcgccctcttaccgcgtggggaggacgggtgaacgagagactgtatctaagccaccggcacagatcgcagtgggcgccctcttaccgtgtggggaggacgggtgaacgagagactgtatctaagccaccggcacagatcgcagtgggcgcctcacagcagcccccgggcacagggatgggacctgcgcaggcgctgaggaccgggaggtggtgtgagcgggcagggtcgtctctagggccttctttgggggttcctgggacctgctggccaggaaatgcccgtgagtccacagacgcttctgccagcccatggccccttgcgtgcagagatgctggtcctgggagagctgcgggtgagacacatgcagcatcccgtctccaagatgattccaaggaccctcggctgttcatgcctgaagcccctccacggggtctctctcgggctggcctgaacaccccaagcccaaccccctgcccagaccacgaccctcagaaaccgagaccctcagaaaccgagaccatcacgcctgctgccttaggcggctaagggctggggcggcctgttctgtggctgcggatgacgcgcatggtgtggcagcagggacacgtgctggggaaggttcaggtgctgtttccagaacgcggtttgggtcccgaagcagcggccagcctcgtggccgccacctgtcccagagccacaacggaggcctcccgggaccgacgctggaagcggggaccacgctctccaagctgcccctcgcacacacccgtgctatttcgtttctgtgctctctccgttgggctctaccgctggaagcccccgttccagagggaggaggccttgcagagaccctgcaacaatcccactgagtggaagctgaagctgcacccagccgtccagtgcccctgtgcccgcagtgcccagagacgacaaaaggagtcaccacattggccacggagaccttgactgcgagagggagggggcgctgcctccaacgggacccagcgggaaagcgcctggaacccggggaccctcgggggctggcacagccagccgcggacagacacgggggcacgcaggacacccagccgcggacagacacgggggcacgcaggacacccagccgcggtcacacgcgggggcacgcaggacacccaaccacggacagacatgggggcacgcaggacacacagccgcggacagacacggggggcacacaggacacccagccgtggacagacacggggacacgcaggacacacagccgcggacagacacgggggcacgcaggacacacagccgcggacagacacaggggcacgcaggacacccagccgcggacagacacgggggcacgcaggacacccagccgcggacagacacgggggcacgcaggacacccagccgcggtcacacgcgggggcacgcaggacacccagccgcggtcacacgcgggggcacgcaggacacccaaccgcggacagacacgggggcacgcaggacacccagccgcggacagacacgggggcacgcaggacacacagccgcggacagacacgggggcacgcaggacacacagccgcggacagacacgggggcacgcaggacacacagccgcggacagacacggggggcacgcaggacacccagccgtggacagacacggggacacgcaggacacccagccgtggtcacatgcggggacacgcaggacacccagccgtggtcacatgcggggacacgcaggacacccagccacggacagacacggtgacacacaggacacccagccacggacagacacggggacacacaggacacccagccacggacagacacggggacacgcaggacacccagccgtggtcacacgcggggacacgcaggacacccagccgtggtcacacgcggggacacgcaggacacccagccgtggtcacacgcggggacacgcaggacacccagccgtggtcacacgcggggacacgcaggacacccagccgtggtcacacgcggggacatgcaggagtcccagctgtggtcacacgcagggacatgcaggacaccccgccagggacagacacggggacacgcatatgcatgagccccatgcctcaggctgtgcccaggagctccatcggagcaccctgcaaacatctgctggagtgaagtcctagaaaatttaacactgggtggagagcagaccagaggttgcctggtggggtggggctacccactgaagatatgcagggaacgttccagatgctttgtactgcatgcaaattagacccagataaagctgacttaaaggaaagtccacgggcagtccggcagcagccgggcccacaggaggagggcggcaggtgggctccgggcgctcggggccgcctgcgggtagggatggggcaactacctgcccgaaatgagggtggtgggaggcagggttcacaccatcagagaagggggtgaaatagacctgtggctttggttgcaattggaattacagatgtgaacgggtggttttcaatacaggcaggcagagctgcgtgcgtttcccacctctgtctactgacggttaagggtctgggtccaggcaagggcagggaagaagaagggaacctgagcctctcactgtgcccgaaaacgcccacagagcggcagacacgaacgcaggatgcggaaggatgccaccgccaaacgcaaggcggctggagcacccagaccaatcctgatgggccggatcatacccgcagggacacagcacccccagcctacacggagagcgatcacggagggggaacgctcccctaacggtggaaagccaactaataggaagggatggtgcaactggaaactcaccccttagaagccatcacagcagg

SEQ ID NO: 282 - DNA, 1280 bp, Artificial sequence
  DNA replication origin
tctcctgcctcagcctcccgagtagctgggattacaggcatgcaccaccacgcccagttaatttttgtatttttagtagagacagggtttcgctatgttgcctgggctggtcttgaactcctgacctcaggtgatccaccagcctgggcctcccaaagtgttgggattataggcatgagccactgggcccagcccaaaaactttttttttttttttttttaaagaagtggacaatcacatcaacctagtaaagtgaggccttctggggttcattagccctgtgaagcccctcaccctggcgcaggtgctgctgagcagtgagaggggcatgacagagccagttgtcaaaggagtgtcgcaggggacagtgttctccacgctcagccacagctgggttcagcgtcctgtcctcccctgcacccctcccactgcccacacaggtggggccacagtgcagggcactggacaccagcttgggtcgtgactgtatcacagcgagcgtgggtcagagactgggccagaaactacgtcacagcaagtgtgggtcagagactgggtcgtgactacatcacagtgagtgcaggtcagagactgggtcaaagctcagtggtgtcttcagtggagtgaggctgagatgttaggttgcatgagggctggcggcatgggcactcttaggggtggggtggcctgaggcctgcactcagccctctctgtgcctcctgccctgcccaggctggaaagcttaggtcatcccgggcacgtgcagggtcagtgctgtggatgtcatggacctggctgcagctcccggggctgggggctgtgtggttcgggagtcctacttgaggtcagctcagggtcccctcagtcgccctgagaaattcgtgcaccttcccaaaccccttcttgccaaactcgccgaaggcaactcgacgcatccaacccaactccacaggaaagcatttaggacgaggcagctgtctctctcctgggctttgaaaacccagctcgctgttctgtggaagcacaaagcatgagaaacgaggaaagaggaaaaagaacctgattttggagttcctaggaacataaacaaacccagagaaactgaaaaaggcaacgtgaagactaacccttccaaccactgcattcaccgagtcccctttccacttccccgcagtttgccggtcaggtgcaaaaccccccagatcttgctctctgcccccagatgggaaggactcgcaccgttctggggcctgcctgctgccagtcccggctgcacaccg

SEQ ID NO: 283 - DNA, 1185 bp, Artificial sequence
  DNA replication origin
gccggctctcccttgacttcagggtcagcagcttaactctttctctggacaccagccaagcggtgctgtgcccttgctccccgctgtccgtctgcaaagacggatgtccctgactctctctctctctctcaaggcgccagcgccccagtcccactgagtcacccaggctgtttacctctgcctgtgcttgtgtggctgcagtgcagcaggttccttacaccctgtcccaaaaaaagaaaaagatttatcctaaaacttcagatgcaaatgtttgatctgcttttttttttttttaaactcttgccttgatttctagaaagagatgaattagaggatccggagtttgacatcaaatgtcttctacaggaagctgaggatgacgtggacccgggacacagcaggtaactcggaggatcgggggtggaggtgggtgtgggggggtgggggtgggggtgggggtgggggggtgggtgaagggagcggggcggctgcttcctccctcccacaggctgtagctcccgcagctcccgccctgaagcagaactgtcaggcacctaccccggcagccacaccgaggaatgagttctgagcctgcagctggggtggtggcagctgacgtccttttcatcctaagctcagtgaaagaactagatactgatgctgataaattgaagaagaaaacagctgaggacagaacgcaggcatttcacctgcggcagaacctgagcgccctggataagatgcatgaggagcaagagcttttcactgagaagatgaggtgagctggggctgaggccgctgcacctgcacctcttgatgccccccaggccgtgacatgggtgcagcaggggtggtcctgtacctgtcgtcaccctgagggcctgcaagggagggtcgcacagggtctccatggaggagcagttctgcaagccccacccgggagctagtgcccagcgctcccagcccccttcccacagaaaaggcggaaacaagtggccccgctgcccccagcgccacccagagttgccacctgtcaagctttcgttgtagcttctttctgtgtttgtgtgtgtttgtattttatatctatgggattttgtgctaaattatgttaaagcaaatcacagacatgatacgtcactcctaaatatttcagcgtctcctaaaaactaaaaacattcagcg

SEQ ID NO: 284 - DNA, 1540 bp, Artificial sequence
  DNA replication origin
ccacagcttccttaaccaaccagttccatggacacggggctgttctcaggctgtcactgtcctttccttctttcctagacagtatatatatatatatagagagagagagagagagaacgagagagagagagagagagagagttggagtctcgctctgttgcccaggctggagtgcagtagtgtgatcttggctcactgcaaactctgcttcctaggttcaagtgattctcctgtgtcagcctctcgagtagctgggattacaggcatgcgccaccacgcccagctagtttttgtattttagtagacaggggtttcaccatgttggccaggcgggtctcgaactcctgacctcaggtgatccacctgccttggcctcccaaagtgctgggattataggcgtgagccactgtgcccggccctttcctagaaagtatattaacagttcattgggaaaggtccagggaggcaaagttgataaggaagaagccctatcatttccgtggagtcgggaagaagtataatctctcttataaaagcgaacctgggctggtaatggtggcttggttctattcctcagattctgaggaggaaagcgatctggcactgcggaaggtgggtgagtgcagaggtgctgtggtgtcacccagctactttccacagccattctcacgggtgctgggcattctgcaaggtgtcttgcctctgatggatcaggttatgggccaggataaaaccaaaggacctcccaggcctcactgtggcatcaggagccggccaccctgcaagccctacacatggcgggctgaaagactgccagggtaggggacgcgtccaattcactcgtgagcccagttcttggcatagagtggcccggtgagagaccactccctttcctcacactcccatgtctccattgcaaacggcccccacggaccagcggtgcgagaagaggctccggtgtaacaggatgcacagtgagatgggctgggcagcgggggatggggactgtgggaaaggcaatggggaacgtcggaaccggcttggcatgttgggcccatcttccgttttgttttttgtttgtttgtttgtcttgagacagagtctcgctctgtcgttcaggctggagtgcagtggcgcaatcttggctcgctgcaacctccacctcccgggttcaaacgattctcctgcctcagcctctggggtagctgggactgcaggtgtgcgccaccacacccggctaatttttgtatttttagtagagacagggtttcaccatgttgaccaggatagtctcgaactcctgacctcaagtgatctgcccaactcagcctcccaaagtgctgggattacaggcatgagccactgtgcccaaccgggtttttgctgtttttaattttgaaacagggtcttgatttcgctcaggccagagtgtgatggcaccatcatagctcactgactttgctatttacttttacaatttttcagttggagcctttgctggaacataacattcagaagtctttttttttttttttttttt

SEQ ID NO: 285 - DNA, 1709 bp, Artificial sequence
  DNA replication origin
acgcggggctctcagacttggggtccggggcccggggctcgcgccggccgctctcccagccgctatctcgggccgacgcgggccccccaccgcccccgaccccgcgccgcgcggaccccgcccgctcacctggtgccgcggagctgctgcgcgcagaggagcaggagcggggccagcagccgggcgggcgcgtccatggccgcggcgggctcgggacggggtccgcgcaaacttggctcccggcggccgcacaggcggcacaggcgggcgggagctgagcgagcgcggcgcgggcgcgagggggcggacggagcgcggagcccgccccgagcccgccccagcccgccgctccctgcagcccggccccgcccgccgctcccctctcctccccccgccccccgccccatcccgcccccctccgccagccgcgccccctccctcgcgggcagctctccctggccggggtctggctctccgggaccgctgccctcacgcgccgcagacgggaccctccgggtgtcttcatgggaggcgacaccggcacaagccccgcgtggacactgtggcccacgggcgcggcagaacctcgtcccgaggcggtttgtggggggtcgcacgtctgcgtggctgcttctggctgcgccggcggtgggtggggagggggccagtccctgcagctgtcaggagagagacccccaccagcggctgcttccaaaaccctcctgccttcgcgggagctggggccaggcgactttgggagcaagtcctgatccctggggaccctcgacgggggcggggagaggaaaagcaggtgggggctgcgccgcaggccgcagttctgactctccacacctctcatggccccaggcccgccctccacacccctaggatctgggaaagggaaggcctcacactctcctgccttggatcttttgaacataaagttgcgctgccatttcctgaagctgctcacaaactttaatcattgttgtgtcagttattcacttctgggctcgcgatgtcgctgacagcacagtgtcaacccctcgtgaaaacacttaaaaatggcgaagctgtccccgaggctgcgtgcttctggatgaagggccctggccgcacaggggcaggtggaggaaagtgcagagagggatttgcttcggaatttccagcccaatccctactgtgggaagtggaagaatgaggctggttccagtttgcttgctttatttatgttatgttatgttatgttatgttatgttatgttatgttatgttatgttatgttatttttcgagatggaatctggctctgttacccaggctggagcacaatctcggctcactgcaacttctgcctcccaggttcaagcaagtctcctgccacagcttcccgagtaggtgggattacaggcacctgccaccacgctcggttatttttttgtatctttagtacagacggaatttcaccatgttggccaggctggtctcgaactcctgaccccgtgatccgcccgcctcggcctcccaaagtgctgggattacaggcgtgagccactgcacccagccctagcctgctttcttaaatcaaggaacggggctctaacaagcccaacaggtctcaactccaaggcccccttcccggctgctcactggcccctgccgagaggggtcctttgggtacagaagcactgacctccctgtgttcccgggg

SEQ ID NO: 286 - DNA, 865 bp, Artificial sequence
  DNA replication origin
gcctgtgcggccgccgggagccaagtttgcgcggaccccgtcccgagcccgccgcggccatggacgcgcccgcccggctgctggccccgctcctgctcctctgcgcgcagcagctccgcggcaccaggtgagcgggcggggtccgcgcggcgcggggtcgggggcggtggggggcccgcgtcggcccgagatagcggctgggagagcggccggcgcgagccccgggccccggaccccaagtctgagagccccgcgtcctccctccccggggtcttgccccgcgggcccctcgttggactcgcccggacgctgcccttgggctcgggacgcggcgacccccgcgctggccgcccccgcccggtgctgtccgccgtcctggtgctgaacctgggctgggcgagggcgtcggagcctcccggttcccctgctccgcggcgcgcgtggagggtccccgggtccgcggcactcgcgggtccctgcccggcgggtgccttgaggagaggaaagacctgagaactcggtgcggggaggctgctccctttgcgggggagccgttccccgttcccccagtgagcttccccagccggagggtctgggacggacggaggaggctgtctcgctgtggagggtgggcccggcctccggggtctcctttcagagtccgtttcaaatggcgtgggcagaactcctgagtgtgtgcaggtggacggcggccaggtgcccctggccacagaaaagagatggtggatttcttaactattttgggagggactccccagagaaggaagaggctgagaaggaggccccccggggctggagccccctctggcctacagtgcccccccatctcctctctggggatctg

SEQ ID NO: 287 - DNA, 1726 bp, Artificial sequence
  DNA replication origin
ctgctccgcggcgcgcgtggagggtccccgggtccgcggcactcgcgggtccctgcccggcgggtgccttgaggagaggaaagacctgagaactcggtgcggggaggctgctccctttgcgggggagccgttccccgttcccccagtgagcttccccagccggagggtctgggacggacggaggaggctgtctcgctgtggagggtgggcccggcctccggggtctcctttcagagtccgtttcaaatggcgtgggcagaactcctgagtgtgtgcaggtggacggcggccaggtgcccctggccacagaaaagagatggtggatttcttaactattttgggagggactccccagagaaggaagaggctgagaaggaggccccccggggctggagccccctctggcctacagtgcccccccatctcctctctggggatctgaaatgggctcctcagccacccaggcaacttggccccaccacggggcctggctggccgccttccctaggagtcacgagaggacatttaggggcgtctttgaaaatcacctcagtgcaaagactgcagaagaaacagcaaagagccatcccccagcattcaggatctcagagaccgtgaagatgtagatatagaggtggctgaccgtagtagagatggcagcacccaacacggggcggtgtgtcagagttttcccattggaggtgcgggggacagagcccagaaggcctgggtccagctgcagccgtgtgcccatcaggagaccgcggggtcggcactgcccctggctctaagcagcccgtgtcctgggaagagctttgttcttccatcaatcccagtgggcctttctccctttgtccttcccctccttcaaggtgagaggaaggacgaagctcggggcacagttgtggatgctgtgctggagccatggggacagctgccagcccaggcccacggccacttagccaagaggctgaaatccagacggctctgaaaccccaaagttttagcccaagttcgacaccagaattcagttggcagcaagtcccgtcccgcatggacgtgagactcttctcatctttattaatcctacttctgggattatttatatacacttcctgctgggaaattcttcaggccgcccccagccacagcctctgtgtccaccatttccctgctctaaaatctgaagatccttaatcctggcctgcatctggctcctgggctgacggggaagggattctgtgcctgtttccttgggcaggaaagctggaaggccacggcccagccaggagtggggggcctctgggcctgcagtcactcccatccctggaagaggggtgccgttggggaggacaccttgcctggtgagaggtgcactgctttgctcagctcccctttcgctctctagttaaaaacagttaccacctggctgcatgctgcagcctctcctttgaggtcatcctgtccacacacatgtgctgggctcaacctcctgctcttggcgtctaggggcaggcctggagggtctccccagggtggaagcacctgccaactcagccctaggggccaccttcagacttagcggggtgctgtccatgaagggcctctctgtatctgtgcccctacactccagaaaccaggacagccgccctcccttccctcagtctcggggtccttgtcctggagctgtattggacgtcagtgggacccattctggccattaccc

SEQ ID NO: 288 - DNA, 1004 bp, Artificial sequence
  DNA replication origin
cacatgtgctgggctcaacctcctgctcttggcgtctaggggcaggcctggagggtctccccagggtggaagcacctgccaactcagccctaggggccaccttcagacttagcggggtgctgtccatgaagggcctctctgtatctgtgcccctacactccagaaaccaggacagccgccctcccttccctcagtctcggggtccttgtcctggagctgtattggacgtcagtgggacccattctggccattaccccaggtccccattgcagcagctcctcatgggaaaggctgggtgggataggaagggagtgtgctgcgtggcggccgtgggtcggcccggagtgtgaagacccgtgcacgcggcaggcaccgagcttgccgactgcatgcccgcgtgggtggccctcccgggctgccggcacctccgtctccctggagaagctgtgctgcggctcctaccgtgccagctcgcggtgcgctggtggcggtgctcctcttcgccttggtaactgcaatgctgggaggcttgagctgctctaaaagcagggctgtgggatatgtgggctgggtgtgcgccgtggagaagcctgcagggggaggatcccagctacatctaccttccctgtctgtccccagggcgcagacaagtgacagggatgggtttgtttttcagtggggccaggagggcaggaggccaggtgacccatggagagccacccgagggggaagctgccatgtcttcatggtgcccactctgccccctgagtttggagtcctaaatctgagtgtagacttggagcctggtgtgtagccctgagcctctctgtccatccacccacaggaaaccccaagctcaggccaccactgggccccagggccaccaggtgaggcagcagccctctcccgaggtctccgtgacataccagagtcaggacagccccaccctgtgcctatctccgctggtgcaggctgtgttcccccagcccccgctagatctgcct

SEQ ID NO: 289 - DNA, 2140 bp, Artificial sequence
  DNA replication origin
agggaccctcgcaaccaatggggagggctcacccctttctctcctaacactcctgcgggcacagccaggctctggaaggagccagcactgggctcactggctctggatgaccggggacggggtgcgtaggggtgggaaagtggggctgggagacaaggtagccaaggaaagcttggctcctgagccctgcagacctggggctaagagagctccccacaccctctggtttcccataaatctggagtgctgggaagagagaaaggaccaaggagtgagatgggaaggcctgacccacgcccacacaatggcaggcctggaagccctggttcaggtgcagctggtgccaatgagcaagttcctaaggcagcagcgtcccagctgcatccccagaggccctgggggcctgcgggcgcttgactaaaaagcatgaaaaccacaggcgggcgcacgcggaaggggcggtgggcgcgcgcggaaggggcggtgggcgcgcgcggaaggggcggcgggcacatgcggaaggggcggcgggcatatgttaccggacttgaagttcatcagctccgtggtgaagcggtagctggtgatggtgaactgcgccagctgcagcttgtccagcccgtggatgtgctcctggctctccgaccagtagtagacgatgtcctccgatgagtaaccgtctggaggaaaagcacacaggtgggcggcagagcccggccctgccccgggagccctggcaggagcgctccgtccacacaggaagcctgcagggggccgacgccatcgtgatggggaccgagcaggaccccagccaggagcgaggagaccttcggctctgggaccacgtcgggctcctccgggcaggtggatgggacacagatggggtcaccgttgtcaggtgacacacaggggctgctgcactggctcaacaatatcaatccgtgccatgtctgggctccatggcccggctccccaggcagggcacagacccacaagccagactgctccaggctttctggccccttctcctcctgcccaggcttcttgcatgcagaagctggtttggtgctttcctgcatcctgagccgggccagccttgtccaggccccgggctgacagtctgagcccccatccactgctggagaagcccctacccgccttgcacacccactcacagctctccaggtccagcatgcactcctgctcgtccatggggtatttggccaggtccatgtcgcaggccacagtggaggtgattctgccaagacaagcatggcagtgaggccttgggggtgaggccagccctcccgaaagcctggcagttcccctgcagagatgccccctgagcacctgcctggagccccagctacttctcagactgtgtttgcccagaatccaggtaaacctggaaactgctcaacttcatagacgtcaagtattcctttaggaccgtcaagaactggatttcattcattctcttcaaaacgcttgactattgaactaggctgggggcctacggggcaggggacagccttcacacccaggccctggcccgagcgatggctgaggaacacacgggaataggcccagagttgccacgcacttgattttctaggagaggtcaaatatttaaattcctatgtaaaatatcccgatgtttttgtttgtttatgagacagggtctcactctgtcacccaagctggagtgcagtggtgcaatcttgactcactacagcctcaaccccccggggcttgaggtgggtaatcctcccacctcagcctcccgagtagctgagaccacaggtgcacaccaccaagcccagctaatgttttttattatttttgtagaggcaggatctccctatgttgcccaggctggtctcaaactcccaggctcaagtatactctcacctcagcctccaaaaagtgttggggttacaagcgtgagccactgcacccggctgcctcctgatttcttttttttgtttgttttttttttttgagatggagtctcgctcagtccccaggctggagtgcagtggcgcaatctcggctcactgcaagctctgcctcccgggttcacaccattctcctgcctcagcctcttgagtagctgggactacaggcccccaccaccacg

SEQ ID NO: 290 - DNA, 1265 bp, Artificial sequence
  DNA replication origin
aaatgagcaaaggcgtactccaccagggcggcaaacacgaagacatagcagatccagaagtagacgtccagtgccttgatggctgatgcccgtggcagggaggagcgggcactgaccatgagcgtggtcatcgtcagcaccgtggtgatgcctgccgggcacaggtggtgccattgtcgtagccctgccctcacgccgccccatcccagccttgatgcctgtgacccacggatgagggtccgctgccccccacccccatgcccaccccagggagcaggtcctgtttccctgacctggcctggcccggctggccactgccccaggacagctggcatggtccagaggccagtgctgagcccccagccgagggatggggagtcctgttccccagggccgcccttccagctccctcggagcagcggcgaggccccgtacctagagacaccctggcgggcaccgccgcctggctgatccagaaggagacccaggacatggcgaccagcaggacggagggcatgtaggattggatgatgtacacgccgcggttcctccgcaggtggaagtgcaggctgagccgtgggaactggccagctgccaggacagccaccgtcagtgcccccatccctgcccagcccagcccaaccatgggactcaggggctgcagggcttggcagctacggggcccaccagggctcagaagagagacttagacccctgccctccccaccaaccacatggcctgaaatgtcagggggcctccggccctaggtctggccacaggacaggctggtcctgagcagtgtcacccagaggagagggagagaggctgaggttactgctggcctcatgtttgctggactggccctgagggaccctcgcaaccaatggggagggctcacccctttctctcctaacactcctgcgggcacagccaggctctggaaggagccagcactgggctcactggctctggatgaccggggacggggtgcgtaggggtgggaaagtggggctgggagacaaggtagccaaggaaagcttggctcctgagccctgcagacctggggctaagagagctccccacaccctctggtttcccataaatctggagtgctgggaagagagaaaggaccaaggagtgagatgggaaggcctgacccacgcccacacaatggcaggcctggaagccctggttcaggtgcagctggtgccaatgagcaagttcctaaggcagcagcgtcccagctgcatccccagaggccctg

SEQ ID NO: 291 - DNA, 1020 bp, Artificial sequence
  DNA replication origin
tggggagggcaggggtctaagtctctcttctgagccctggtgggccccgtagctgccaagccctgcagcccctgagtcccatggttgggctgggctgggcagggatgggggcactgacggtggctgtcctggcagctggccagttcccacggctcagcctgcacttccacctgcggaggaaccgcggcgtgtacatcatccaatcctacatgccctccgtcctgctggtcgccatgtcctgggtctccttctggatcagccaggcggcggtgcccgccagggtgtctctaggtacggggcctcgccgctgctccgagggagctggaagggcggccctggggaacaggactccccatccctcggctgggggctcagcactggcctctggaccatgccagctgtcctggggcagtggccagccgggccaggccaggtcagggaaacaggacctgctccctggggtgggcatgggggtggggggcagcggaccctcatccgtgggtcacaggcatcaaggctgggatggggcggcgtgagggcagggctacgacaatggcaccacctgtgcccggcaggcatcaccacggtgctgacgatgaccacgctcatggtcagtgcccgctcctccctgccacgggcatcagccatcaaggcactggacgtctacttctggatctgctatgtcttcgtgtttgccgccctggtggagtacgcctttgctcatttcaacgccgactacaggaagaagcagaaggccaaggtcaaggtctccaggccgagggcagaggtgagggcctggggccgagccagggacagcactgctgggggccccaaccaggacccttcagctgccccagcccactgtgggtcccagctgtgctccctgagcgtggggggctggagctgctggtccaggcggggcccccgcatgggaacacctgtggtccagggccctgggagctgcaccccagtgctcagccctgtctcccccaccggccttcgtgcagatggacgtgagga

SEQ ID NO: 292 - DNA, 2000 bp, Artificial sequence
  DNA replication origin
ctggtggagtacgcctttgctcatttcaacgccgactacaggaagaagcagaaggccaaggtcaaggtctccaggccgagggcagaggtgagggcctggggccgagccagggacagcactgctgggggccccaaccaggacccttcagctgccccagcccactgtgggtcccagctgtgctccctgagcgtggggggctggagctgctggtccaggcggggcccccgcatgggaacacctgtggtccagggccctgggagctgcaccccagtgctcagccctgtctcccccaccggccttcgtgcagatggacgtgaggaacgccattgtcctcttctccctctctgctgccggcgtcacgcaggagctggccatctcccgccggcagcgccgcgtcccggggaacctgatgggctcctacaggtcggtgggggtggagacaggggagacgaagaaggagggggcagcccgctcaggaggccaggggggcatccgtgcccggctcaggcccatcgacgcagacaccattgacatttacgcccgcgctgtgttccctgcggcgtttgcggccgtcaatgtcatctactgggcggcatacgccatgtgagcacaggactcaggccaccctcgcttgtcctggcgcccggcggcagctgcccagaaacttcctgggagaaagagccctcgggctgccttcccctctgcgtgtttcgaagtgggatgacagtcggccacggaaaacaagaggaagcctcggcctccctgagctctgaccccagcctcacccgaaaggccagcctggggctctccggcaggcagcccgagacctgcacagatgaaggagcagaggttctgaccgagaggctgagccaggccggggtctgggcccttcagggagccgcggatttttatgttcagaaagtgatcctggtttctaggtctttgctctgcaggatcgggatcagagcgtgggaggaggtgggggtggacgtccatccggtgaacagtgaaggcgtttgtgaggtctttctggtcccagcatgaaataaagccttggcctgggggccgcttcattctccctcactgtgctgcgcttcactcctggggtgcctggagcccaccccagctgcccggaacacccttctccagctgcaggctccctgggcggtgtttgggtgggagctgattgtgaaagtgcagagaacactcagggttgaacatacaccttgcccaggggaaacagtgggtcgaggtcctgggaaggaggctgtccttgtcagcagggcaggcttcgagggaagagcttcaggaagtgatgaaccagtttttgtgatgctggcttcaggcactgggtctcctcatctatgtccccgcgctgtgatgaggccattttctccaggggcgtgaggcaagatcctgcgccgacagtgtgagggagtgagctcagggtcactgtcccaaagccgggagcttttgaagtgtcttcctgagatcctggggctcaacactagacttgggaacagagacttggggacacaggggctcaggggctggatcccagatgagccatgtctggggtactgagggagggctgaggtgcagaggcctggagggggctagaggagctgccactcccttggtccctgaggcctttggtccagtgggtgtccagggctaggtgccaccatggtcccctcttggatgtgaggatagacacatggaggccaccgaggcctcacaaacaccacagccctttcccacctgctgccactgccacggacatggggagaccaccctgcagcccaaggacccccccggccgtcagagcagctgacaggcagctcttaatgaggggtccaggtttcacagggcactgggtcattactcgtggaagaatctgaagggagcagttggaacagctgctggggctctgccatccgctgcaggacccaggtgtctggggcgctaccatcctctgcaggacccaggcatctggggcg

SEQ ID NO: 293 - DNA, 998 bp, Artificial sequence
  DNA replication origin
cgggcgttgggtctgacagctcgagcccgtgaatcgcccccacccacttgtggtacagttcccacctcacacaggaggagcccgaggcccagcaaagtgaggggacgagctcctgaccacagagtgggaagggttccagtctagctggctcagatacccccctacatcctcagccctgcattagggagcttcccctagcgccccccaggccagtccacgccctggtcagcagaagcctctgcaccaggagagccccaccccattgcccctgcagggcactcctgacctggtgacaaggtccccggggtctgctccctgcacaaggggctgggacactttccaaagacagagacgctggtacacggtgcagctgcaaggacttgggtctggagcctccctgctgggcagggccctgtccatccagctgctggcttgttggggccagtgccacctgggagggggcatggctccttctgtcctagcagagctgcttttgcctggggagcactacagtgtgtgcctgcacgtgtgcatgcatgctgtctgtgcatgtgtgtgctgtgtgtgtgcatgtgtgtgcatgcatgctgtgtgtgcatgtgtgtgggcgtgtgcataagtgtgcctgtgtgtgggtgtgtgcgtgtatgctgtgtctgcatgtgtgcatgtgtgccatctgcatgtgtgtggatgtgtgccatctgcgtgtgtgtgtgtgtttgtgtgtgtgtgtatgtgagactctcaatctcaaaggccacagagccaccagccaagcagagttcacagtggaccccattctgctgctggccacagccccccaccttggccctggcagctgatgtggaggaaggcttctggttcacagtggtgcttgcatttccacgtctttccttgagatagatcccagaagtgaagctgtgagaccagatgacgtggacatctttgaggctctgagtgccttctgtcagcctgctttctagaagacggtccca

SEQ ID NO: 294 - DNA, 1178 bp, Artificial sequence
  DNA replication origin
ccctcagccccgggggccgcgtgtccttccccttgcagcccccctcgtcgcagctcagcaatcctgtttttaagtcgtccccgcttaaaatctgcggattgggccgggcgcggtggctcacgcctgcattcccagcacttgggaagaccgaggcgggcgcatcgcttgaggcctggagttggagacaagcctgggcaacatggtgaaaccccgtctctacaacaagtttaagaattagctgggtgcggtggtgtgtgcttgtggtcccagctgctcaggaggctgaggtgagaggatcacctgagcccaggaggtggaggctgcagtgagctgagatgtggcaccactgcactctagcctgggcgacagagtgaagcccagcctctaaaaaaataataataataacttaaaaattaaatattcagatgggacctcacgaatgcagtctctgcatatatgtgtgtagttctccacaggtacccatgtgtggggggccgtgtgtatgtgtgtgtgtgtgtgtgtgtatagctttctgtgtgtatctgtgtgtgtgtctgtagttctgtgtgtacctgtgtgtgtttgtagttctgtgtgtacctgtgtgtgtgtgtagctctgtgtacctgtgtgtgtgtggagctctctgtgtgtacctgtgtgtgtgtctgtagttctgtgtgtaccagtgtgtggagctctctgtgtgtacctgtgtgtaactctctatgtgtacctgtgtgtctgtagctctgtgtgtacctgtgtgtgtgtggagctctctgagtgtgtgtgtgtgcgcgcgcacatactgtcagaggggctgggcactgccactcccagcagagccaacacagtgaggaggaggtggggttgctgtgtccagggtctggagaggccaggggaggaaagaggaggctggcctggaagatagagcagctgggagggcacccaggggaggcagggaagggctggacactgccaggctgagctctgcacacagcttccctggctgagtctcaccagaaggcacagcctcccttcaggcccccaccccgctcaatggtgccttcccctggaggaccgtctgtgtccgacatcgcctctgggaccctcagcccatccctaggacgtgagaatcatgaccctattctgtggatgagacaccagggccgggg

SEQ ID NO: 295 - DNA, 1108 bp, Artificial sequence
  DNA replication origin
ctggggcttggggtagggtgctgaccggcagagggcagtgtggctgcagggtctggctgagggtggcctcccagcagggctggggcacctgggagccgcagctcctgaccccgccaaggtggctctgtgtggctgccgggcctaccctgtgattttccttaggaagagtcctttgatgatactgtcgagtgatgttgagaccttttagaagagaggcagtttacactcagtgtgattcatcggacgtctgggaggggttggctgtggcccgtggggtccccatcaccacacccccaggaggaggcctccctcatcagcctcttaaactgcatttgtgctggcttagtgcttgggactgcccagaaaggtgcccgacaggagcaggcatctcacagagcccaaggggcccgggtgggtcttcctgccagatgtgaggctgccctgtggggtcctgcgaggaccaccgtcacaggaagggccaggcgtttgctcacaggctctgggcacagcagccgtgggagggactggccagatgtttcctttctgtgtcagggatcatgggatttggaaaaactggctcaagagacaatgtcagctgcatgggttcatttgatggacgttggttgagggcctactggacggagggccaggagttgagccaggaatacagcagtgagctggccaggcggggtctcctggtgggacgctgctggagacgggccactgtcagagaaccacaggagtgcagaatggctgagacgggctgaccaggtccccgggggagaggctggccccgggactgatgatgtgtgcagtggggcagctctgtggccccagggagcaagggctctgtgagtgaagggtgcagggagtgtgaagaggccaggctgccccagcgaggagggtcaggggagcctcagacagggtgtggggtgtgagtgcctgtgtgcttatctgagtctatatgtgtttgtgtctgtgtgtattgtgtgaatgcatacatgtgtctgtgtatgtgtgtccacgtgtgtgtatagatatgtctgtgcttgtgtgtctgtgttgacgtatgtgtgtctatgcatgcatagatgtctgtgcgtgtgtc

SEQ ID NO: 296 - DNA, 2317 bp, Artificial sequence
  DNA replication origin
ctcccaaccccagagagaatagagccccgccccccaccttccctcgctgggactggggcactgccacggccctgggactggcttccaggacggaggctcccgcctggcagcacagatctccccagggaggccagtgccgagggcctgacccagcaggggcgtccttggttagaaagggtcctccggggccttgggtggggcaggcccagggagagatgtccagtgacagggaaggacacaaccgagggtccgtcctgcctgctgtgggcagtggtatcaaggaccgggccttgctgcctccttggatcagaacgccagccaggaagtcctgtgggtgcccagtggccccttccaggcaccgccccactaaggtgaaaccctgctctttcctgcccatcaggaagcgcccaggccatgttgccaggccagactccagacaaggccacagccctggccatggggcctggagtgggggagctgggccgacgggtgcctgaatccagggctgctgcaggtgcaggttcccactcatcactgtaccctgccaggctgccccctcaccctctactctctgccccccttcatgcccagctgatgggcatggggctttgtgcctgtgcgagggatagagggggttgccccatggagatgggggtgaggagtagattgctgaaatgggcattaggtatgctagagacttcaaggaagtgtgggtgccagtccagcagatctctgcaggcaggtgctcctggaagagggagtggctgtgcaaagagggagtggccgtgcaaagacggaggccggggcagcaaagaggcctcgaggccggggcagaggagctggccttccctccaggagtgatgggaaccactggggggacttcgatgacccagaaagatggagtgggggaagacgtcagctgagaggctcattaggaggatgcctggggctgggtgagtgttggttgggagctcagggggcccatctgagctggggatgcaaagcgggccaaaggctgaggctggggctccacagttttaaaagctgcagaccaggagggcgagggatgggagatttagggagctggaacccggggccagggatgtgtgagccttcccaggaggggtctgataccaaaggccaagttaagaaaatgtctgaggccgggcacagtggctcacgcctgtaatcccagcactttgggaagccaaggcaggtggatcacctgaggtcaggagttcgagaccagcctggccaatatggaaaaaccccgtctctactaaaaatacaaaaatcagctgggcatggtggtggacacctgtaatcccagctacttgggagactgaggcaggagaatggtttgaacccaggaggcagaagttgcagtgagccgacatcatgccattgcactcagcctgggcagcaagagcgaaactccatctcaaaaaaaagaaaaagaaagaaaaaaagagaaaacgtctgagaaccgacggcttgtatttaaaacgtgtgagtgggtggtggcaggagaggtagacagggagcagggccggcttggcggaagctttgctgtagagaggggcagagatggctcggtgggtggagggaggggcaaacggtgtttaagaagaaaaaacgacagcttctgcgtaggagaggggcctcctgtccatctccagggagaacatgggttctgtggccacaggtctccccagggcctggcatcaaggaggcgccaggcacgacctgcgggatgaaagcacgtggctgaagtcctggtggctgtgtctgggtgaggggtgtgagggcgtggcctgagcaggtccactctcaggggagaggggccgaggccaggaactgggtctgggtgtccacctggtgcctgggtgaggtcctgcaggcagcaggtctgggcttcagtggatgcagccagtaagggatgggctgatcagggaaaaccgtattttcaggggaggagcccaggaggcagggagctgggcggcggtggaggggcctggagggcgattgtccagatcaagcccctcgagtaaggcccgagaggctgtggcttcagaaatgaaggtcatgggcgactcgggccaatgccgcgtccttgacctgggcgaagtgagcggttgcactcacgagtgtggacggcccttccctacaggggaccttggattcgctgggggcggagtgggggctggggcccagagaacccgagtccggacgctcccgtccgtgaccctggccgggttctccgctcctcgcagcttcagtccgcaagtgtgagatgtcaggggacccctggacggcg

SEQ ID NO: 297 - DNA, 2078 bp, Artificial sequence
  DNA replication origin
agcaccaagccctgggctttgcacacagaagctccctgaacacaaacgttgtctgagctgggccaggcgcggtgactcacgcctttcatcccagcgctttgggaggccaaggcgggcggatcacgaggtcagaagttcgagaccagcctggccaacaaagtgaaacctcatctctactaaaactacaaaagttaaccgggcgtggtggcgggcgtctgtagtcctagatactagggaggctgaagcaggagaattgcttgaacctcggaggtgaaggatacagtgggccgagaccacaccactgcagcctgggcaacacagcgagactcaaaaaaaaaaaaaagtctgagctgaaagagggaagagccagcaccagtgtttgtggccctagaagagcgggcatctgagactcagcgtgggagtctggcccaggccacctgggactccctgaaaacacaggtgcctggggacccctcaggcccacagggggcggggtggggtggcgaggattggatctcaagtgtgctcagagggccctgggaggacaggcaaggatgacggggtggccatgccccatgggggtgactgaagtgctcttcctttttctaaagactagtcttccacgtgtccacgctcagctacccccacggacagcagcgtctcaccccagggacagagtttctagggctttcaataacccagtactcatcctggcagccgctttctggaactgtgtcattgccctaaggcctgagtgtcccaccccacagccagtcccctcagagaggcaccgggtgcccagagggacgaggagccagaacggggagaagggtacttcacactctgcagcagagaggaggaggacctgggaggggagagaggagagaaggaatggtaggagcagggaagagccagaggggagacgtgccctagaagggggaggaaggtgaaggaagaggtgtggcagggaagggagagaggggagagcgggaagaggagggaaaacaacagggaaggagggaggaagaggaaggggtggggagagaggggagagagtccgggaagggagggaagaggaaggggtgggagcctggtctctccagcctgggaaaccagagtcaccgggtggaattacacccgccccaccaccaaagtgctcccaggggccaaagcaaggcagagggaggacggggcggcccagaactccagtggcattgcctccgagccttggtcccaggaattggacgccggaatgcaggagggtctgggcccctgcagcccctcgggtgtggacctccctctcgcaggactcccctgagctccgcaccatcacctgttgcccagtgtggtggctccagaatggcaaggagacaggaagcccaggtccctggacaagtccaatagccagaacgtcaaccataccaagttttaacctgctgacctccaggccaaaagacatggctgccctacctcttcaggtagggctggacggtcagtcccccagaaatccctttcttctggttctggcaccaaacccgggccactgcaccccgaaggttccaggtgcttgccacaggggagctgcagaggccccaaccttcccaaagaagagacaattgagcctcctcaacaaacccggggccaagcagccccagatggctgacccgagaccccaagacaaggttcgcaggaagctgaacccgctcagactcgcagggcaccatagagacccccggggcactgtcctgagaggacgtggcccggggaagttgtcacccgcctaaccctgccggccgtccctgcctctggggctcaggttgcccacgctgtagctgaggacgcaccggggcaggagcagcttttcgagatcccaaggaccagccagtgcaagtccggagcccgcattctgctcccctccctctctgcagcagcagccaccctcgcgggagcggaggtcccagttcggggctcctggagacgcgcacaggtggaagaacaaacccacgggtcctcccctccccaccgcccacacttcggggggcagcgacccctccgctgtgcctgtgagcccggccacc

SEQ ID NO: 298 - DNA, 1026 bp, Artificial sequence
  DNA replication origin
agaaatcctagcttgctgatttggagcactaggcagtgtaggttgccagccctcgttccccatagatttgggaagtcgagtgaaacgcatgtgttaggtttatatgtttcacattttacggaatgcccctcatgcagctggtcagccgcctgacgagggaagcttggccctttggagaagtggccgtgcctcgtggtgagctgctgacagagctggaatttgaacccggggctctggcccggagtccactccgtgaatgcagataaacacaggtttatgagcttgatgatttaaatggaggttttattactgttcaggcaggtgtgggaggccagccatcaggagatgatgccgttgagaaggtcgtttattactcagcttctgagaggagacctcctcttgcctcgcggggccatgcgggcaagcgccgggtgggttggaggcagggggatgtgtgggtggggcctttactgtggtttccatgggaaaggtgtggggagcaggcattgggtcggccaggtggagtaacttcagccaggctctggggtgcaggggctgtccctgtgacctggggaggcccctggggcgactgggggcccgtgtaggaggtgggcccaggtgagagttctgggttggtgggtttgcatttgaaaggttcgctgtgggacaagtcctttgctgtctctaggaatcggttggcctctcggggccgtccctccagggtcagcagggccataggtgctggagcatcgagggcacagcacgtatgaatgcagggagcgtgtggtgtgactggtcagagccagaggtctgcaggacactcccctctgtccctctgcacccccagtgcgaagcggcccatgtaggctcagcacgagtgccgagtgcgtttggggaagtgggcagaattcccagctgagcaccccgcgaccccccatgttttttatgattggaggaaaatgccaggtctcacttgccagtgatgaccaggtcccagggtttgtcagggtaccagggtaggggttg

SEQ ID NO: 299 - DNA, 1197 bp, Artificial sequence
  DNA replication origin
ggcccaggtgagagttctgggttggtgggtttgcatttgaaaggttcgctgtgggacaagtcctttgctgtctctaggaatcggttggcctctcggggccgtccctccagggtcagcagggccataggtgctggagcatcgagggcacagcacgtatgaatgcagggagcgtgtggtgtgactggtcagagccagaggtctgcaggacactcccctctgtccctctgcacccccagtgcgaagcggcccatgtaggctcagcacgagtgccgagtgcgtttggggaagtgggcagaattcccagctgagcaccccgcgaccccccatgttttttatgattggaggaaaatgccaggtctcacttgccagtgatgaccaggtcccagggtttgtcagggtaccagggtaggggttggagggtcaggccacccagcggcggtggcggctctgggtctccctaggagcccgggctggccacagccaggcacagcacagcccgtgaggtctggtcttgggaatgcgggtgtctcctgccttaggctgagggtgtgcgtttccaggccagccgggacagttttcagcctggggaagcttggcctttcctgttcctgccccccagtgcccaccgtccccacacacactggtggggtttgtggggtggacacaaccacatcgcaaggcccctatgcctcctctcctcccgctccgttcctgggctgcgggacagtgctcggggcccttggccattggtgtcgagcccattcacagcctctggacgcaggtcagaggtcactcgccacggccacagctgcgctgtcccccactcccagcctggcaggccaacctgcaggaccccgggcttagctgggttctgttctgatgtcgcattttcaaggtccgctgagtccgagccctgcctgggtctggctgctgcccgcccgctctctggactgtgctgatgcagagatgcttgttttcctgtgacgtcagcgtcagctcctgcacatccatgccgtgttttagtttgtgcctcagctgctggctacagcttcccgggggagccgggtaccacccgggcctggagacatgaggaggcagggatgtgaggggcgggggacaggacagccggccttccgttaaatatctgctcctcgcgctcgagcctccctgcctattgtcggggccggaggcgagccg

SEQ ID NO: 300 - DNA, 1193 bp, Artificial sequence
  DNA replication origin
catgccgtgttttagtttgtgcctcagctgctggctacagcttcccgggggagccgggtaccacccgggcctggagacatgaggaggcagggatgtgaggggcgggggacaggacagccggccttccgttaaatatctgctcctcgcgctcgagcctccctgcctattgtcggggccggaggcgagccgacgcagcatcagctcgtcaacgggaaggaagatgcctccctgcacgcccgccgcgcacagagcataaagaatctgcgctgaggaggcaggagaagaaagccggtgagtcgggggcatctcccccgtggattttccgcgcccccggggccgggccagccgtgctgcaggccctgtgcgtgcggaggacggtgcccgagtcagcattttgggtctgagtcccggcgttgccgctgcctgtgcgctgcacagatgctccgggcagcaacacggctggtgccacggcccggggaaggcgtgcggctgcagcagctcccagcaatgtcaggggaaacgcagtgagaggctgttgttttgcgggtgacagatttttagaaaaataaggctgtggagggaccttctgagcgaggcaggggctgctggagggacatgctcaccccgaggacggatggtgtgtggcccaggcctggtggatgtgtggcggtggctgtggagggctgggggccggggggcttggggaaatcgtcttgggctcgtctgcctgcctggccccagggagttgctggctgttgggagtttcactgtggccgatgctttttggttgtgggtctgtgggtctgtcggggccaggacggatggccgcttcgtctccattctgcattgctgcaggtgggcagattgatgagaccacgggtgaagtctggagaccccaggtgccagggctggtagtggtaacagccagcacctgttccaggcctgcggtctttccgtctcgagcctgccctcccgcctgtctgagcccccgttttgcattgacagtgttgggttggagtctgggtggcacagccagggttaatgtgcacggctcactccatcggggtcctcggatggtggcgaggagcggggctgcggcgtcctgttttctattctgaaatggttggaggtagactcggaggggtctgggggctgcatggtgtttggcagggatgtgggaatgtgggtgcttt

SEQ ID NO: 301 - DNA, 1717 bp, Artificial sequence
  DNA replication origin
agcctgccctcccgcctgtctgagcccccgttttgcattgacagtgttgggttggagtctgggtggcacagccagggttaatgtgcacggctcactccatcggggtcctcggatggtggcgaggagcggggctgcggcgtcctgttttctattctgaaatggttggaggtagactcggaggggtctgggggctgcatggtgtttggcagggatgtgggaatgtgggtgcttttctgacgaccattttgcaaggtgttttttttaaaaaaaaaaacaacaaaaaaccaaaacaacaaccagcctccccagtcaggcttgtggggagccgtgggcctggggagactgggctgctgaaggtggggactgggctgctgggggaggcggctttccctctcggggggtgctggctgctggggaggctggcagcgcgcccctcccccaggtgcgaagggacctcagcagacgcagggctgctccgcacagccagcttgggccgcaggggtccttgagtgatgaagattctgtgttgatggggtgagtgggagagagacggagctggggtggttttcacacgtgcgcctgcctgcgaggagaaacgtgctgtgtcatagtttcctcggtgcctgggacggcttggcctctgctttcgtgtgagcccacgctggccatgcacagctggcacgatcccttgcggtgtgaatacactgctggggtgggagcgccgtggccagggtcaggattcgagcggttactggcttttggtctgatggccctcggtgggtgagtcagagctgggatggggacagattggaggggccaccggctgccccccagaagctgtttcgtgttgatgctgccggggccggctgtggtacctgtgtctgtgtctcggccagatcggcacacatcttccgcgttcctgtcccagctgcatcagccatcagtgggggcccttctccgaccgtcttcctagacttcagagccactggtggttatgtaaggagttgtgtgttcctctgcccaactccgagcttggtcccacctcccagactcacctctgggctccgggctctgctgcgatgtttccgaggctcccagttaatcagatctgtcagcccagtgtccacagggtgcctgagagcccagcccatccacactgggtgccccagaccttccacggggtctggtggggacctgccagggctgtcaatggccccagtggagaggcccactgagcatcctgagaagttcccgtgcttgtgacctgctctcgtgtgtgtagcagcgggggctgcgtctcatctgccacacgtttctgatcgccgaggactcagccgggcacatggaggttgaactgttggggggcgggaggaccatccatggggtcaggcaccaacctctgctgaggatcccaaaatgtggggtagccatcctttcttgtgctggcgtggagcttttcccaggagctgggcagggagctgtcacagggccaggcccctgaatgggctgtttggggccggggctgagggggtgcccagtgccatcgaggggaagcctgtgggaaagtgtgatgacatctgaaaaaccaggagcaggtcccttgctgtgctggtcgtggtgctcgagtgtgggctcagcaggtctggtctcctggcgcccactcactccctggccatctccccacctccctcacatggcagggggaagtggaacgtgc

SEQ ID NO: 302 - DNA, 1236 bp, Artificial sequence
  DNA replication origin
cagtggggccaggtggacttgaagctccgtgggtttgtttaaggtataaattcattgagcttgaagacgttgtacgtggaagtgaacagaacacacataatttattcatggattttagctggcctgtttttgtacaaagggagcttttaaatttaattatttttaagcattagaggatggtgtatccgaggcagctggaggccctggtcttcactgtgagcagggagggcccttgggacagggctcgggaggaggggccaggtggacccctgcagggctggaggacactgagggcctcagatcaccacacagtgggcccagctagggggtgaccctgaattccagtcccagcggacacatctcttgccttcagcatagagggccccaggcctcgggccctgcctcagttgcctccacgatgtcagcttccaggtgtggggaccgggtgccacctcaccccccagttacacccacacgaggccgcggtgcccagtagcacagagatgccaatgtgatgggtggttttcaacaggaactcaagagaaaagttcatgcttgtgaggacagagctgcagctttagccctgagagacctggcgggagaggaggcagatggcgagggccccaccggcagagctgctgccctgaaaagcacctcctcctggtggacaccaggtgcatggtgtggtcaggtgtggagtgtgggcccgctggcctcgctgcttcctgcgccctgtttaccacccctcaccccctggccccagccttgctcttggcgggcggctagtgtcctctggccgccctggggcaggtcagaccgccggggtgtggagtggggtgcttgcctttttctgcctgaccctgcttcgtgcggggactctgggacgctgtgacttggctctggcctggtccagcccccagtgtccacttctctggaaggcgaaaggcagggtgggggtctccttgatgtgggactggaagctgctcagccagtctccctggaaaaggtcctggtgacagtcactgctcgctgcagtggctggtgccctcctcaaaggtgagggtgtccgggtggctgttggtgcggggccgctgggacctgtaccctctaagttgggacttcagccccgcctctgcccccaaacgtggtgggctgagatgggggaggcccttggaagggcccagaggaaccccagggcctcacagaggacgtgctgtgtacggtgcctcctccctg

SEQ ID NO: 303 - DNA, 2312 bp, Artificial sequence
  DNA replication origin
gaagccaccaccacccacccagaggccagacgcagggaggaccagccccgggccagtcttggggcagccgaggtccccatctgcttgactgccttcctaggcagctgcctgctccctgggactatgcctgctcctgcaggagaccctgcctggctgccctgatcccagacaggcccggcccccacacccatttactccgcagagtgaggggccagccctgccctggcccctggcacagcagagtcaaacaggtgaggggaggggaaaggaggagaggggaagggaggggagaggaggggagaggaggggaggggaaaggaggggaggggaaaggaaaagaagggaggggaagggaggggaaaagaggagaagggaggggaagggacaggaggggaagggaggagaggggagcagagggcagaggagggaagaggaggggagcggaaaggaggggagaggaggggagcggaaaggtggggagggaaaaggaggggaggggaggggagctgtggcgagtggaggctggacaagcacacggacgtgagcccatgccaggctgcgggagacaggggcagggcatgactttgggcacagccggccggcaccacccatgcaggacgcacgcatctgacgcaaagcgcgaatcctccccctcttctctgaacaactgacagggacttgaaaaggcatccacgggaggagggtctggctcccagctacctcttcagggggtccctcactccctgggccctcggtgggcaccagcgactcaaccactgggcaccggttgtggcctcctccaccaatgctcagctctcacgtgtgccgtgcccacctcaaaggcagaggacagcatggggctctgcccgccactgcccagccacctccaaaaccatggtgagctcaggacgcacacaagggcccctgccaggagggcaggccctcccctacagagggaacctcagggaaaccagccaggccaacgcagacctagaagggtctggaaaggagacaaccagactccaccctgggtaccagaagcacaggtgccccagggagacggcatatctgggacccagtggtgatgttgcttggactcccaggggaccagcaaacccagctgcccaaaccaccaccctgctacggggcctggggtgtggcggagcagcacatggggggctggggtgacagtcagtgtctgcatcacccacaggcatcactcgggcaccagtgtccgtgtcatgccggcgggggcagggagagaactggcatggagcagggaacccagggcagggctttttataggcaggagagagagggccaaaaccaggctctaagagaagtgactctgcagctccagaaatgaatccaaggccaaaagagccagcagagaagccagacggtaagggccacagcagacgcctcagaacgggcagcgcccaaggttcaacgagccgggcacagcgggcgcctcagaacgggcagcgcccaaggttcaacgagccgggcacagcgggcgcctcagaacgggcagcgcccaaggttcaacgagccgggcacagcgggcgcctcagaacgggcagcgcccaaggttcatcgagccgggcacagcgggcgcctcagaacgggcagcgcccaaggttcatcgagccgggcacagagggcgcctcagaacgggcagcgcccaaggttcaacgagccgggcacagagggcgcctcagaacgggcagcgcccaaggttcaacgagccgggcacagcgggtgcctcagaacgggcagcgcccaaggttcaacgagccgggcacagcgggcgcctcagaatgggcagtgcccaaggttcaacgagccggggccactgcctccgccactgcccacgggcaccacacagcatcccaggcaccatcatggtaggagaagagttcaggccgggaggccgagggtaccctcgggtcaccaggcttggcacagcaggactggaaccacgtcccttccagctcccgtccaagacaggtggaagtgggggggctgctcccgggacgggggagggatggcgacggagggctctgaggttgtgcatcaggcagaaggttctagagacaagcaggctcccaagggatgtggctgcgctaggacaggacaaacaggagggtcacccaaagtgggctggcaggtgctgtggacgtgccgcagggagcagacacacgtgtcaggcagcacttcctccacccgggcctggagctgctggcctggctccctctgccctggccccacactcagcccttagtgcccggccaagggctgcaacgctgacg

SEQ ID NO: 304 - DNA, 1392 bp, Artificial sequence
  DNA replication origin
ggtgagaaacagaacggccagggctgaatctgcctccagcgggggccccgggcgtgatcagagcaggcaggacctttcttccctctctgcagctccggcactggcttcctccgttcaggcttcatccccggtcagggggctcctggtcccgtggcagccccgtggctcctgggtcgcagcttcatgggggaaacagagactcctctggtaccagggtcccctgaatctccggagtcccccaagtccattgagtccactgggcccgaagagggaaacagagactcctctggtacgaaggtcccccaagtccctggagtcccctgagtccactgggccctcgacacccttgggtcacttgtccaccctcacaccatcgctggcccagggaatgggggtttggatcggccttggtgactgtgggcctctgcctgaaaccctgtgagtgtgggtggggtgggctgggtcctgagagagctgggagcagcggagtgaagggggctggggtggggctggtgacagtggagtccctgtggggggcagggctggtggacagtagagtccctgtaggggctggtgacagtggactctgtggggccagggtggggctggtggacggtgtagttcctgagagaccgagccggaaggtgagggactggaagcttgcacacgtccctgcggccttcccctcgggtgcgaggcctgccatcctgagctcccccaccctaccccgtgcccgccctgagggcgggacccaggccagttcacacagcatggcgaggtaagggctcaggatggaaggcaggaggaaagttgggcctgctgcacccatgggtattgcggcagggaaggcgaggaggagccgaggtgggtgctgggagctgtggggctggctgtgcgtgttgggcctaactcgggctgagctgaggttactgagccctcaggagggtgctgtgggaaaagaaagaggcagagaaggtgtctttggaccacttaggggacggggagggaaccccacggcaactgtgaaggtctggggcacagccagggagggtcccaggttgacagggacaggcggggtgggggtgcaacatggaggcctggggctgagcctccgagaagtgatgggcaggatgagggggccagaggggatcacgcaacaaggggtgcaccttggtggtctgggtgtctccagagaagctggttgtcaggactcaagaggcggacagggaggggctggggttagggaagagtgtgtggcagggggaggaagggagcctgcttgccgggtcacctggcattgggagctgtcccctgcctgctgcgccccgcctgccattgttggagttctccagtctgggctggtctggatgaggaactggcggggctgctgcc

SEQ ID NO: 305 - DNA, 1657 bp, Artificial sequence
  DNA replication origin
tggttagggtcacggtggtagttagggtcacggtggtggttagggtcacggtggtggttagggtcacggtggtagttagggtcacggtggtggttagggtcacggcggtggttagggtcacggtggtagttagggtcacggtggtggttagggtcacggtggtagggtcgtggtggttagggtcgtggcggtggttaggttcatggtggtggttagggtcgtggtggttagggtcacggtggtagttagggtcacggtggtggttagggtcatggtggtggttagggtcacggtggtggttagggtcgtggtggttagggttgtggtggttagggtcgtggcggtggttagggtcacggtggtggttagggttgtggtggttagggtcgtggcggtggttagggttgtggtggttagggttgtggtggttagggttgtggtggttagggtcgtggcggtggttagggtcgtggcggtggttagggttgtggtggttagggttgtggtggttagggtcacggtggtagttagggtcacggtggtagttagggtcacggtggtggttagggtcacggcggtggttagggtcacggtggtagttagggtcacggtggtggttagggtcacggcggtggttagggtcacggtggtagttagggtggtggtggttagggtcacggtggtggttagggtcacggtggtagttagggtcacggtggtggttagggtcgtggcggtggttagggttgtggtggttagggtcacggcggtggttagggtcacggtggtggttagggttgtggtggttagggtcacggtggcggttagggtcacggcggcggttagggtcacggcggcggttagggtcacggcggtggttagggtcacggcggtggttagggtcacggcggtggttagggtcacggcggtggttagggtcgtggtggttagggtcacggtggcggttagggtcacggcggcggttagggtcacggcggcggttagggtcacggcggcggttagggtcacggcggcggttagggtcacggcgacggttagggtcacggcggtggttagggtcacggtggtggttagggtcacggcggtggttagggtcacggcggtggttagggtcacggctgtagttagggtcacggctgtagttagcgtcacggtggtggttagggtcacggtggtggttagggtcatggcggtagttagggtcacggctgtagttagcgtcacggtggtagttagggtcacggtggtggttagggtcacggtggtggttagggtcacggcggtggttagggtcacggcggcggttagggtcacggcggtggttagggtcacggtggtggttagggtcacagggtagaacccttgtggtgggatttgtgccctttataggatgagaggatgagacacaagagaggttgtgctgcgcctgtgctctctgctccacatgagaacatggtgagcatgaggccgccagcaagcaaggagataccccgccctgcaggttccgtcatcctgactccagcctcggaaacatgagaaagtcaatgcctgtcacttaagccgcccagtctgtggtattttgctgtggtggctgagccgacggagacagttccataggtcttgattgtcctggtgg

SEQ ID NO: 306 - DNA, 1166 bp, Artificial sequence
  DNA replication origin
ctgcccgcctcggcctcccaaagtgctgggattacaggcgggagccaccgtgcctagtattgggtttgtttgtttgttttttgacttacttgtttggttctatagcaatggcaccatgtttctgtcaccctagggtttgatttttggtgtttctaagacacctctgggccactgcacatggctgaggtgggcttcgcactggctctgtcttccgttggacgcccacacatcggtttatttatgcattctcttgtccacagaccttgaggtcatcagacatcttgaatgctcccgagcccaggagcgagcgtttctgagctttgacggagcagcagtggggctgccgggccctagggggagcaaatggtcctcgtttctgagctgcgaggctctcccagagaataagccatttctccggggcactcctgggcctcgaaggtgtttggggctgcgggggattgatttgtgccgaccccgcagtgtaggagacgcctgggcggccttgcgggttgcttcgatggttctcggggctgagatgcttgtgtctctctcgggcgagacgcctgctctgggcttctgttcctattttgactgctttttcctcatggatttttcagtccagcatccctagccacgggccctttgtctctcatgtgtgcaggtgactcacggtgactaaaatcttctgtaattccttctaaaatgttttgccgctttgctgtccacgtttccacccttagtctctgaggggcctagtgtgtgtatggtgggaagcggggtcagcccccgcctggaccgctgtgacagaaccccacagacagggtgacttacacacgacagaaacgtcttttctcaagttctggaggcgtggggaccccatctccaaatacagccacattgggggttagggctccccacgtgaatttaggggacacttcagttcgtcccggcggggactggggacgccgggctgtgtgctgtgtcctgtgggagagtttgttcaccctgctggaggctccctgatgagccctggcgtctgctaggacgtcattctctttactgattgaactcgaaggatgtccagttggcgcattttcagggtttcccaggcgcactgggggtgggtcctgtgtgtccccgctccagccagcttcgacccccagctg

SEQ ID NO: 307 - DNA, 1772 bp, Artificial sequence
  DNA replication origin
cgtcggggggcaggtctgcagctcagggagaggccgggctgggagctctcggcgtggaaagatgagactcgaagccactccattggatctgcctccgaagagaagggagggtggccgaggaccaagcctcgaggaggaggagggcgctgaggaggaatgacacagtctcagaggctaaatagatactcactaatggtttgttgatttgtttccacgaaacttccgggagtgggggcaggcaacacagtaagaccctgcctctacaaaaaataaaattgccaagtgtggcatgtatctgtagtcccagctcctctggaggctgaggtgggaggatcgctggagctccagaggtcgaggctgcagtgagcagtaatcgcacccctgtgatccagcctattttgacgcatttctttcactgtcatttttctaaccccgaagacaaggggttgacctaggaaggcttgagaacttcgtccagctctactttctggggtcaagatgagaccaagctgttggatctttgtcactctaaagttgactttgaccttgcagcattttgctgaactgcagcatgaattgggagggtgacagtcctatggctgaagctagtgctctggtgatgggtgtgggcttatcactcggtagcgctgggaccttggggaatctgcttagccctccacctcaatttccttgtgtcctaactggagataataatacctgcctcctggaactgttagggcaaagcctggaggccagaggccagtataccaccagaggccagcatacaaccagagctggtagctttggtgatcgtggtgaagatgatggtgatgatgatggtgacaatgatggtgacgatgatggtgatgatggtgatgatggtgaggtagtggtgatgacgtggtggtggtgatgaagatgttgatgatggcggtgatgatggtgatggcgatgactgtgatggtggtggtagtgatgacattgaggatgacggtggtggtgatgatgatggtagtggtgatgacaatggtggtgatgacagtgatgatggtagtggtgatgacaatggtggtgatgacggtgatgatggtgatgacagtggtgatgatggagatggtgatgacggtgatgatggcagtggtgatgacagtgacggttgtgatggtgatgatggtggtggtgatggtgatgatgacggtggtgatgaaggtgatggtaacagcgacagtgatggtggtgggggtagatggtgccaatggtgatggtggtggtggtgatggtgatgacagtgatgatgcagatggtgatgacggtggtggtgatgatgacagtgacggtgatgatgacagtggtggtgaaggtgatggtgacagcaacaatgatggtggtgggtggaggtgggagggatggtgacaatgatgacggtaatggtgacagtgacgatgatagtggggggtgggggtagggtgtatggtgacagtggtgtgacggtggtgatgatgacagtgacaatgatgatgatggtggtggtggtggtagaggtggggtggatggtgacaatggtggtaatgcagttcctaatgggtgttttcttttcctgtctgcattgtcttcctgaaagcggaggaaagagactcctcccttgcctcccccttgcccaggatgcctgtgaggagcattcgggagcctcattaccactccctggtttctatttcaggatattgactgggtacagacagagaagcacgtgtttgagcaggcatccagcaacc

SEQ ID NO: 308 - DNA, 1821 bp, Artificial sequence
  DNA replication origin
cttccctcccttgagctccctgctgacccctggagaaggtccccggccccctccacgtgcaccccgccccccccgcccccgtcataccccctccgtgcacaccccacccagccacctcccctctgcgcacacccacccggccccccaactccgcgcgcacccacccgtcatccctctgtgcgcacccacccagccccccaacaccgcacgcacccacccatccccaactccgggcgcacccacccggccccgtccacgcgcacccacctggcgtgctcctcagggagcttcctctgcctctgcatgtggaacatcaggtccccgccgttgacgtactcaatgaccaggaacaacctgcagggagagaggcgccggaggctgcagtcacctcggcagacggcggcctccttagacagaagccccacagaagcggccttcgtgggcccgaaccctcccgcaggttcagtcttgcaaagagcaaagagcagcaggagcaccctggcagcagagaggggctggtggggacgggctgcggggccgctcgtgaagggtgcaggtgagggagtcatgcgggggcctcgccggccttcactcttggccactgtgtgtggacttgggaagtgtgggtgggccccggaatgaaggaggtggcccgtcaccaggtgggagtggaggtggcttggaccagggctgggggctgggacaggatctgctgggggctggagcgaggcagtttcttgcatggggacagcaccgcaggtcacgggtggggtggcctcaaggcctgatttcattgctgcaaggctgaggagtccaccggccctccaagggaacaagctggggtcagggagaagccaggtgggaagtggcatcccggtttcgcagacatgatcgtatgattttaaaagatccgcagatgtcatcaggaccacgcaggcccttcccgtctcagggactgggccacatggtttctcttcctaataagatcttttcctacatttcatgagactcaattttcaaaattaaattctcatacaatctcccagaaataccctgtggcgggtttttttaggtcagcggctcctctggcacctgaattgtttatttgcttccgactggtggctgctcctggctgcccctcgtggagcggggagtgaaggagggaagcgtgtggtgactctgcccgtttccttcgatcccacgcaagctcccacaccaccgccactgttacgcctcaaggcacctgtccctgctcctgccctccacaagctcccagaattaagccagagaggacagaggccagtttacacagggcaggtgaactggctgcaaatcatctgtgaagtttctgattggaaacaaactcctaaaaatcgaaagagccctgggccccaagtgaggagctggagagacgtccacgtggccagtcgggcaccctgaagaataagccgtgcctttggggagcggctggggaaggctcgttcctcggcttttgttgtctcccctgcctccaacggatgtgcctggaaattctctggtaacctggcccttgtccttggggactcgctggtccactgctccctgttttgtaaataaagttttattggaacgaggctatgctcactggtgcatctattttctatgtctgctttccagccaccgtggcagagggagttgctaacagagaccctgtggccgcaaagccaaaaatgtctactcttgggcccttcaagaaaaagtttgccaatccccggtataaacaaaatagcaatgacagaaagagcagctctgagggtgccctcgatgtgcaggaacgtcctc

SEQ ID NO: 309 - DNA, 886 bp, Artificial sequence
  DNA replication origin
cacgagcggccccgcagcccgtccccaccagcccctctctgctgccagggtgctcctgctgctctttgctctttgcaagactgaacctgcgggagggttcgggcccacgaaggccgcttctgtggggcttctgtctaaggaggccgccgtctgccgaggtgactgcagcctccggcgcctctctccctgcaggttgttcctggtcattgagtacgtcaacggcggggacctgatgttccacatgcagaggcagaggaagctccctgaggagcacgccaggtgggtgcgcgtggacggggccgggtgggtgcgcccggagttggggatgggtgggtgcgtgcggtgttggggggctgggtgggtgcgcacagagggatgacgggtgggtgcgcgcggagttggggggccgggtgggtgtgcgcagaggggaggtggctgggtggggtgtgcacggagggggtatgacgggggcggggggggcggggtgcacgtggagggggccggggaccttctccaggggtcagcagggagctcaagggagggaagtccaggtaggatggcagagggcatcatgtcccccacagtgtgacgtcccctgcattgtgacacattccatatttgctccagagtcacaacatttgggaggtctcctgagttatggtgcctcagaccagtcccccaggccccacccctgaagcagcaccatgcctcatccgagagaagtgagagtctcctgggattgtgctgtcttcatggtggctctgccctggttctgctcttcaccctgttagtggcacagcatggccagcatttcctcagcgttaggagcagaacgagagtggtctgtttctagagtgacctgagagactccttcctgcccttccct

SEQ ID NO: 310 - DNA, 797 bp, Artificial sequence
  DNA replication origin
ccagcccctcctgccctgcattttcctgccaagcagcacctgagactctgaagccgatgcctatacaggcagaaacctgccaattccagcttgaacgactggagggtcctgaggatgggggtccctggggtgccatcatgggcagggtgcatctgtttgggtatgctgccccccagctggcggggcaccggggacaggcacagccacactgggggcatttctggtcttggaagccttcttggctcttccggagggaaggcggctgctgggtgccctgtgatccacccgcgagctgggctgttcggcttggtctgcaggggctggggggctgcatttcttttcaccagctgcacccacccggccccatcctggctggcaccgaagggagcagcgcgccgtgacatcctcccctcaagcctggtgaatggtggttccatgaggctggagtcagtgggtgcctgttgtgacagctggatttcagtgttggtacaggagcacacacctaaggggcgggccagtgaatgagtgtgcgagggtgggctagagaacgagcaagggaatgagagagagtgggttagagagtgagtgagccagtgaatgagtgagtgagcaggagtgggttagagagcgagggagtgagtgaatgagtgggctaaagagggccgggcgcggtggctcacgcctgtaatcccagcactttgggaggccgaggagggcagatgatctgaggtcagcagttcgggagcagcctggtcaacatggtgaaaccctgcctctactaaaaatacaaaaacaaa

SEQ ID NO: 311 - DNA, 989 bp, Artificial sequence
  DNA replication origin
caacatggtgaaaccctgcctctactaaaaatacaaaaacaaaattagccaggcgtggtggcgggcgcctgtactcccagctactcagaaggctgaggcgggagaatggtgtgaacctgggaggtggagcttgcagtgagccgagatcgtgccactgcacttcagcctgggagacagagcgagtctcaaaacaaaaacaaaaaacaaaattagctgggcatggtggtgcatgcctgtagtcccggctactcaggagactgaggcaggagaatagcttgaatcggagtcagaggttgcagtgagccgagatcgcgccactgcactccagcctgggcaacagagcaagactccatctcaaaaaaaaagtgggctagagagtgagtgagtgaatgagtgaatgggagtgggttagcgagggagtgagagggtgaatgggagtgggttagagagggagtgagagggtgaatgggagtgggttagagagtgagggagtaagcgagtgaatgtctcttggtgctgctgtaacagaatacctgagcgagcctgggtaatttctagggagcagagttctttcccagctgtggaggttgggagtccagggtcatggtgccagcaggcttggtgtctggtgaggcctgatctctgcttccaagatggcgcccaaacactgcattccccggaggagagaggggaggaaggccacgtgtccacatggcagaaggcagagaggaatccatgcccaagctgtcttgacagctacaggagtttgtctgtgagggcggggctcccatcaggttccacctctctacactgttgctctggggaatgagtttctcactgtgaatctggggggcacattcagaccctattgtgggtgagtgggagagcatggctgtgtcactgggacaagtggccatgagtcgggggaactgaggggttttcagtgtcctcacccgtatgtgttgtggcacctgtgccaggcaccagcg

SEQ ID NO: 312 - DNA, 1117 bp, Artificial sequence
  DNA replication origin
ctctgtcgcccaggctggagtgcagtggcatgatctcggctcactgcaacatctgcctcccgggttcaagcgattctcctgcctcagtctcctgagtagctgggattacaggcgtcaccacacctggctaatttttgtatttttagtagagacagggtttcaccatgttggtcaggctggtcttgaactgatctcaggtgatccgcccgtctcggcctcccaaagtgctgggattacaggcgtgagccaccgcgcccggccggtcgttgggattttaacagccctgaggcccctcacgctgccaggtgccagcccaccctgcagccctgctcccctgcccacacgcagaagccaccagaggcttctggactgagcccccactgtcctgcagccgggctggcctgtccacaccacagggcgtgctcagctactgagcagaagcgtcacggacagggcagatcaggccaggacaaagctcttccgccacaggcgggggtctgaaggcatctcagagggcccccaaacaagggacgctgcctggaaaccccgggacaagatgacctcggttcagatcttagcaccttctggcaaccttagagaaagcttctggagggaggggctggttcccaggatgggcagaagccggaaagtctcagactgagtgaccctcgggggcttcagaaggcactgggtgggctctgccagagtgagaaggcagctgatggctgctggagccagccccgggagtgggggtccagctatggtctggagagggggacttgagggttgcagtggccacacagacggggcacaggagccaaaggaagggacacagcaaagcccaagggtaaaacggcgcgccgtggactggtctgagggcagaggctgtaggggagcgaggggcggtgtggctgacaggtggacacagggacacgtgtcctgtggacttggccgctcagtgggggtgtgtcccccagcagtggcgtgtgagggatggtcactctgatgggacactgaccacttggcctccagcaagatctaggcccaagtctaggctgaagccgcccactcagccccgggacatcgtccccggcagctctgctgagcacgccagctc

SEQ ID NO: 313 - DNA, 1653 bp, Artificial sequence
  DNA replication origin
aggccttctggcggccgcccctggtttctcctggggggtgatgagcgggagcggctctgggccgagctactgcgcacggtgagcccggagctgatcctggatcacgaggtgccttcactgcccgccttcccaggacaggtgtgcccactgggcccatcttagcgatgaaggggtttccagggcgggagccatcgctgggcaaggcccaacaactctgtgttgcaggagcccaggtgcggcccggagcccactgaagtcttcactgtcggacccaagaccttttcctggacaccctttccgccggacctgtggggcccgggccgttcctaccggctgcttcacggggcaggagggcacctggaatcccccgccaggtccctgccccagcgcccggcacctgatccctgcagggcccccagggtggagcagcagccgtctgtggagggtgccgcggccctgcgcagctgccccatgtgccagaaggagttcgcccccaggtgagtaggccacccctgcgcccggcccggttatccatccgtgtttggaaaccacagccgttcagaaggtcaagaggtggccgagctcagcgctggcttttaaagccctgtttcacactggaaaggtggcccagtgctgtggcctggcatgtccaggtggctctctgtcacgggtctggggtccacctgcttgccgtgctctgtgggcagggcaggctgggggcccacagaacagcacagaaggaaggctgggagcactggccccgggtccacctggccatcctggaatctggtggcaccagcgtccccaggcccagagcacaggaacaccttcccgagagtgcgtcatgggttttaaaaatgaagatcgtcttttttgtctggagatgctttttcttatttttgaaacccaacgtatatttttatgtattttttaagtaaaggggaatggaacccagttttgctaacaagataacccaaactgcccagtgcctggccttgtgtctggcgacctctgggcccttggcctccggagcaggtcctggggctggggtggtgtgaatgatgctggttcgtaacttttggttgagttaatgggcggcaggtttcagagcttatggagaccaggtccttcagtcatgcctgatgcccctggtcttccagaagcaaaaacagctcgggaatgcgaaggcaccggagtccaaagttggcagccaacaacaacaacaacaaaagaaaaggccgggcacggtggctcacgcctgtaatcccagccctttgagaggctgaggcaggtgggttgctggagcccaggagtttgagaccagcctgggcaacatggcaagatcccatctttacatgcctgggcgtggtggcgcgtgcctgtggtcctagctactctggaggctgaagtgggaggattcccttgagccaggaattggaggctgtagtgaagtatgattgcaccactgcactccagcctgggtgacagagtaagaccctgaatcacggacagagggtactgttgggagccctggggagaaatccatgctcttggctgaagctctgagatccttgttgctgtcagggtgctgccccccgccccccggggaggggcttttgtctttgcatcgcctgcttttccagatagtctaaa

SEQ ID NO: 314 - DNA, 1199 bp, Artificial sequence
  DNA replication origin
cgggaaggtgttcctgtgctctgggcctggggacgctggtgccaccagattccaggatggccaggtggacccggggccagtgctcccagccttccttctgtgctgttctgtgggcccccagcctgccctgcccacagagcacggcaagcaggtggaccccagacccgtgacagagagccacctggacatgccaggccacagcactgggccacctttccagtgtgaaacagggctttaaaagccagcgctgagctcggccacctcttgaccttctgaacggctgtggtttccaaacacggatggataaccgggccgggcgcaggggtggcctactcacctgggggcgaactccttctggcacatggggcagctgcgcagggccgcggcaccctccacagacggctgctgctccaccctgggggccctgcagggatcaggtgccgggcgctggggcagggacctggcgggggattccaggtgccctcctgccccgtgaagcagccggtaggaacggcccgggccccacaggtccggcggaaagggtgtccaggaaaaggtcttgggtccgacagtgaagacttcagtgggctccgggccgcacctgggctcctgcaacacagagttgttgggccttgcccagcgatggctcccgccctggaaaccccttcatcgctaagatgggcccagtgggcacacctgtcctgggaaggcgggcagtgaaggcacctcgtgatccaggatcagctccgggctcaccgtgcgcagtagctcggcccagagccgctcccgctcatcaccccccaggagaaaccaggggcggccgccagaaggcctggggcagacagagagggcagacagggggtactcagtagcggaaacgctatggtggggagacccgggagggcctggggcagagagagcggggagatggggggtactagagggaaattcgatggtgcgggaggtggccggcagggttgggggaagggctgctggggcagacagtgcggagatgaggggtactgggggtgggggagcggggtgggtgggtggaaatatggggtcctcagcgggatgaggcgatggttggggagattgcggagggcctggggaaggtagagggttagatggggggtgctcaggggagacgcgatgatgggagaggcgcgggagggcctggggcggcgcgggggaagctc

SEQ ID NO: 315 - DNA, 2084 bp, Artificial sequence
  DNA replication origin
tgaggcccactggggtggctaagactcaaggggatgggggccccccagcttcagtgatgcgggctggagccaggctcagccagccctgaggtcccctgcaggcccgtgcctcctacccttggggcacccgcagcgagagcttcccaagcagcctgcgccagccgggcagcgcaggtgtcccgggtctgggtcacttgagaccccgccctgcttctgctcggctctgcccctcttgggcccagtggccagggcacctgcatgggggagccgggaggggctggaaggatgctgaagaccccagcaaagctctagtgtttggctttccaggggtgggggctgggtcctcccgcccagaaaggcccctgttctggggcagcagccacacacaggtgtccctcacatggtcctccaggacagggcaggggcctgagtttcccaggctctgcccaagggacccaggcagggaaggagatgggtcccagggggctcggagcccatccagaggccggccggtcccatggcaggagggcactggaccatgtgggggccatagaggaggaggaggcaggagccacccccgggtccaacagcagaaccctggggttgggagccagagtggggaagggagaggaaggagcaagaacaccccccaccacccccagcacggcacagagagctgagcaaacacttgtcaccaagggcttttctcctctgtctttttttgtttttcgagacagagtcttgctgtgatgcccaagctgttgtgcagtggtgcgatcttggctcaccacaacctatgcctcctaggctcaggtggttttcgtgcctcagccacccaagtagttgggattaaaggtgtgcaccaccatgcccggctaatttttgtatttttagtagagatggggtttctgcatgttggccaggctggtctcaaactcctggcctcaagtgatcctcccgacttggcctcccaaagtgctgggattgcaggcttgagccaccacacctggcctatttttttttttttttgagttggggtctggagtgcagtggcacgatcttgcctcactgcagcccccacctacctgggctcaggtgatcctcccaccttagccacccaagtaggtgggaccacaggcacatgccaccatgcccagctaattttttatttatagagacaaggtcttgccatgttgcccaggctggtctcaaactcctgggctcaagcaatctgcctgcctggacctccccaagtcctagaattgcaggcatgggctgctgggcctggccttttctcctgtcttgggaggctgggaccagtcttcctggaagtacccaaggccctcctgcagaccatggtgacatttccaggaaagacccagaagctcggagctgaagccagggcagccaggactgtcggggagccctggacactggctgtctgagagcgcttggtcagctggcacctgccatgtggtggacgtggggctgcagagaccccacggctgggcttctctcgcctgagagcaggcccagccacaggctacctcccacagggccccctgagaccacacggcctgcagcagctcccccaggccccctccccctgcccgggcagcactcagcgctgcatctccatctgctcactcaagtcgaagggcctgggggttggtgcctccatcttgttctgctgggggcctccagcatctagagcaggaaggtgtgcggaagaaaaccactcatgcagggagagggggacctcccagtccaggccctgctgctgaccctttccctgaacaccaacctatggcctccaggctggggccccttgaaggacggtgggccactcgggtggcctgggttcagggccgggctccacagctgagttctggagggagggcacagacgactgggggctgggaggggccaggtgaggggtaggaacagccagggagccctgcaggaggggtgcccagcatagccccaaagctgctggggctgggcagggcagaaactgccaaggagtcccagagccctgagtggcgtctggcgagggcccctgaccctgatctctgtagacccca

SEQ ID NO: 316 - DNA, 1666 bp, Artificial sequence
  DNA replication origin
ccacgcgacagcacctctgtcacagggctgggtgtggggtgaacaggctggtccctggaggcaagtagtgtggtgccctgaggcctgaggccaggctccaggaccgctcaaggaacaggggatttgaggcaactcagagaggacaggcccagcagccggccccagcctgatatcttccctccgctcaggccccagacgcagctgcatcctggagtccttctgagaaatgtgggacctgccccagctccaccccaggtgaggggcaccagccagctccagagctgcctaccttccctgtcaggtgcacaggtcagcgccaggccaaccccagagcgagaacacctgtgctggactgagctggagcagcagggtggcctgcaccggtgaggctgccaggaacagtcagtgcagctgtgcccaggcctgggcagggcagccatgggtgggccctgactgcggaggggtgtccagagagcctgccccactatggagaagcctggggggaagaaggcggcagaagggagggcggggcttgtctcagcggccactctctggcctgtcgggatcctagctgtgccttggccccacctgggctgcaggcgaagggcctgttctgagattctgctgggcatcaggccactacttccagcggccagatagcttcctggggcctcgggaccctgggctgccctctggccccggggaaggttgccaggccatgggcagggagaaaagcagaagggggatgggagggtgaggagagtctcagccagtgtcccactcggatggacagcactgttgtccagtcaccagctggctgggaggacggctcccactgcaggatggaccccagggaggaggatggagcttcatgtcagacatcatccctcacaccacaaagtcggaaattgctcacccagaagtgggggtatatggcactttgggaggccaaggcaggaggattgcttgaggccaggagtttgacgagaccagcctggacaatattatgagaccctatctttacaaaaaataaaattagccagggcctggtgcagtggctcatgcttgtaatcctagcactttgggaggccgagggaagaggatcgcttgagctcaggagttcaagaccagcctgggcaacatggcaaaatcccatcccgtctctacaaaacaaaacaaaacaaaaaattaaccaggtgtggtggcttgtgcctgtagtcccagctacttgggaggctgaagtgggaggatttcttgagccagggaagcatcagttgcagtgagccgagatcatgccactagactccagcttgggtaacagagggagactctgtctcaataaataaataaaataaaaataaagaggtgttgaggattgcttgaaccgaggaggtggaggttgcagtgaatcgagatttcgccactgcactccagcctgggcaacagtgcaagaccctgtctctaaaacaaaaacagaagtagggttgttggctgtcacttagctggggctcgtggtgatggggtccggtggcacatatggagggcatagctggaaggaacagaggccacctcctcctcgggtacctggtaggggagagcagccctgggccaaggccacacggtgctggggtttgcaggacagcccggagtctgcacaggggcctcc

SEQ ID NO: 317 - DNA, 1813 bp, Artificial sequence
  DNA replication origin
cggaacgtgggcgggaccctgcggggcggggcttgcttgtgtgggtggtgcccatgaggggcggggtgtgggcgctgcctggaaggacggtggcactgggaggggcggggcaagggaagggccagaaggaggagcgggggcggggcgtagggggccggaaagaggggcggggcgtggggggagcccgggggaggggcggggattgaggggtggggcgtggggcgcctggggggcggggcttgaggggcggggcgtgggggagcccgggggaagggcggggcttggggacggggcgtgagggagcctcgtgggaggggcggggcgtggggagcccggagggaggggcggggcttgaggggcggggcgcgtggcgcccggggggcggggcggggcttgaggggcggggtatggggggcccgaagggagggaggggggcttgaggggcggggcttgagggcggggcgtgggaggtgcccgggaggagggtccggcagaggaaccaggctggagagctagctcgggtctgaggtggggtgagccggcggcgggaggaaaccaaaggcggcggctggctgagcctgcagctcactgctgatttacccaggaccctgctccggaggggtcgtagccagtttagcacaagtccatcatccgctagtcctgaaggcgctgggcagtggggtcaggggcagtgggagggaatccacccggctgacgtcctgcgggttctccggctcccgggggctcggcggcgggcggggccctcagagcaggccacagggctgtgagctgtgaggggcgtctgaggtccaagctgacgcccggagccaccgggatcgccaagtcacgccccacgtggcctggcggctttttcctggtcctcccaatccctcagccaaaggctctcattatgtggagaaaggaagtcactatttgggagaactgaccgtccccagggcacgtcccagaagggggcaaatccctctgaggaagcgcaggagattcacaggcagcctctatgcgtgcacctccattcaggatgtgccaggacggcagaccacggctcacgatgctggcaggaccaacagccgggcacctgggcctggggtcaccggagggacactggccgcacacgcgggctgcagagatagtgaccatgggcagtgcagccgctgggtgttggcctgtgaggccgtctgtgagggtctgtggaggccagcaaggggctttcacatctgagaagcgcatggggacccgagatggcaggagctggcctcaccaactgcccagatgtgagctggctctcccaggctggaggggctgccccagggtgctcggagagccaggcacttacttcactccctgaccccgatccccagtgggaggtcagtgggtgccactaagtcctccccaaccccaccgggcggcagcatacaaaaacctgggttcacatccagcttggccgctcactgtcatgacaagtggacagatgccccgggcctcagttgacccatctgtaagtggggccacgcgacagcacctctgtcacagggctgggtgtggggtgaacaggctggtccctggaggcaagtagtgtggtgccctgaggcctgaggccaggctccaggaccgctcaaggaacaggggatttgaggcaactcagagaggacaggcccagcagccggccccagcctgatatcttccctccgctcaggccccagacgcagctgcatcctggagtccttctgagaaatgtgggacctgccccagctccaccccaggtgaggggcaccagccagctccagagctgcct

SEQ ID NO: 318 - DNA, 1211 bp, Artificial sequence
  DNA replication origin
ggcagccgtccccgtgagccccgcgaggggagcctgtcccagccacctcgccgcttcaatttcctccaggtccacaggcccagcccggcgcgcgccgctcgttctgcgacctccagggcgagcgcgcttccggggcggccgtgcaagaggcgtgggaagcgcgcggggggttctgagcgtgcagtcgccgcctgcggacggcgaaggggcgggtgaaacgagtttccagcgtcgagcctgcttcgtttcaaggtggacgccacatgcaagccacgagcgcgtcgccgcacggtgtacgcccacggtccgggccgggcgttctgcgggtgcccccgctgcgccgcaggcctcagtggcgcgcccggggactggaaggctgagccgccctcctcccatgtgcgcgggagtccctccgccactgtgcccagatcgccggcgaagcgcagggggaggctgggaagggcatcgggagacacgggcctgcgccccctacccgggccccggcccacctgtccgcacacctgtccgaagccttaaaaggtcttcattccttttcggtctgatctgagagccgagctctcggcagggatggggacccagggctcggcctgcaggtgccgtgccaattagggcccaggcaggagaggggcgtccctgcactggggctccatcattacgttcgcatggccactctagcatgggaggggggcagggcctttccctgttagttcacttccctgttggtactcacccacctgtctgtggaaaggcagcaatggtcgatttcccccttaagaaacaaagcgtgaaggaggaagagaggctacaggaatctgccatccgggagaccctgtctctaacgggccatacggggtccccctgtgtctcctgcagccctgcacagccccggtctgaggtaccttttggagggagtggcccagctctcccggcctttgccacccggcgtcctgtcccagtttatctgtgtccagtccgattgatgggctcatggattggaaagctgtgacagacgccctgggctgggaggtataaaacgaaactgtttaactccagtgaaaaaacagttgcagggatcccagaagtgggaaaaggtcgctctgagcacctaccgtggggtgggtgtgattctgagactaaggctctgggggccgggcgtggtggctcacgcctgtaatcccagcactttggga

SEQ ID NO: 319 - DNA, 1375 bp, Artificial sequence
  DNA replication origin
tcccagaagtgggaaaaggtcgctctgagcacctaccgtggggtgggtgtgattctgagactaaggctctgggggccgggcgtggtggctcacgcctgtaatcccagcactttgggaggccgaggcgggcggatcacgaggtcaggagatcgagaccatcctggctaacacggtgaaaccctgtctctactaaaaatacaaaaaattagctaggcgtggtggcaggtgcctgtagtcctagctactcgggaggttgaggcaggagaatggtgtgaaccagggaggtggagcttgcagtgagctgagatggcgccactgcactccagcctgggcaacggagcgagactgtctcaaaaaaaaaaaaaaaaaaggctctgggacccctggcccacgagccccaggccacggcctcctgcctgggaggtgtggctccccatgcagccagcttcttccctgcctcagatcggtgacctgcactctgtccaggaggaggggagacttgcccagggacaaacccgaaaacacggcaaggtcaggggaggagggcactgtttcctgtcgaagtccacatttgtgaaaaaacattgattgggcagagagaggtgttgtattctggaatggaggtgagtggggggccagtgagggctgggccggtgaggggtggatgtgatgttttgcctggcccaagggagctggtgccccaggttcccagtctgctggcagagctgggtcctggtgggggcagagctgggcaggcccacatggcctgtgcatccagggtgtcttgtccccttaatccttcagaggatgaacccccacccttcgccggccttcttgggcgtggtctggtagataactggagctgggagaggctgaagacagtcaaagctgctctcctcttttctaggtgagaacagtgagcccgcaaggtcagggagctgcccccaggtcatctgggctgtcggagatggaggcgggagaggagccgtgtgctcctgatccctggcccaacgctctccttccccgtcgcccactcggcatcggccctacccggggcccggactcccactcacgcactggaaactccctgtcttggggccgcgcacaccatgcctggcaggagctggagatgcagcagagcagacgcggctgcaggagcagccgtgtttcctacagtggagaaggggaccctggcaggagcactgcccagccaggcacgtggtgctcaaccctgtgggcactgaccccacaaaaggccggggtttgtgctgcaggaggcctctgtttggggagagctctgtcccggctccagtgcggcggccctcccccagcctgctggaatgggacctcatccctgctccagcgtcatggactt

SEQ ID NO: 320 - DNA, 1280 bp, Artificial sequence
  DNA replication origin
ggagtcctggccccaccctgtgcttcccctccgcctgctgcacaggcgcccacactgtgtggctggcccagcccagtttcattcctggaatgggaccccgggagccgagaggggcaagggcctctgggcggcgcgtggggcctgggtgacagcacgggtcctcagggcagtgcccccagccaagagggagccatccctccaaacacagtgccaaggggcacctggcctggggacctgtgtcccgccagcagtagggcctagcacagctgcacctcaccaggcccaggccagccattggtcagctcacggcctgttgctgggaaggcagccagcccctgacaaggagggggtgaccgggagtcccactaggaggagggggaggccagccctcgggcctgaggagggcagaacactggcaggggtccctggcagcgtcttggactttgccctcaaacccttaagcaggagaacggggtgggtgggggttccctgagggggccaagggtggtgccgggagcccagtgtggggcagatcctgctctcaggaagggtggctgaggggccatggccctagacagcgggaggggctgtatcctgctgctgatggggaggggtgaggatgggggcaaggggcgtccatgcagaggcggagagcaggaggtgaggggttgggcccctgggatggcttggtctgagcctggaggctgcaccccctctgagtagcgggaaggtggctgcgggcaggtgccgtgggtgactgaagggtaggacctgcgtgaaggagcccccgctgcccttgggaccactgggcccccgaggtctggccctcacacacaccctgccctcacctgacctcccgccccgaccagccgcttgccccagtaggtcccaggctgccctgagcctcagcatgctctggtctgcacgtggcggtaatgccacctggctcagcatgttgagggaaaccagtcctggcaccagggtcccacagtgcctgtgatgacttatgaggttctgccattgcaaccaacagtgccacagcttgggcccctggaaagcactgcggggatggtcccccacttcgagaagtgctggctgaaagctttgtgtgggcaaggacagcacccttctgcccccattgggtcccctgtgcccacctcgtggtgctcagtgttgtgtgccgggtaaaggacagcagccagggcctcggaggatgctggtgatgcccaggccgcggctgggtccctggctctcgctctgtccccactgtttgacacaca

SEQ ID NO: 321 - DNA, 1158 bp, Artificial sequence
  DNA replication origin
cacgcacccggggttctcccagggtgggacaccacacagcggggaggccccggacgcctctggggtcccacacactaccgggacgccacacggtgacctggggtcccacacacgagggggacagcggccacgcccagggaccctgcgccgagacgggcaccgcgtcgcgtgaccctggcggcgcagcccggcggcccccgctgcgccgtggccggtggctcggtggccgagtgtccgcggctcccggccgcgccggccccgccccgcccgccggcccctggcggagtgtccctgctgcgcgggccgggggcttcgggcctgggaggggcggcgcccggtgccccagacgcagccggtctgccagccactcctgccaggtggcttatcaggacttcggccccgcggggcccggcgttcgggccggcgagacccctgacctccgccccggggccgtggagcgctgagacgtctttcggggtcggatcggccggccctccacgcctggccacgcagtgggagagactcaagccttggcagggcggggagcgggaagcccggggccccgaagttggacagtcggccgggtggtctccaggggaggcagcttccagcgaggcctgcgggcgcagggacgcaatggtgtgtttggggaggggcagggctcggtctgtgctcgcctgaggcggagggacatgccccacgggccgggggtgcccaagctggcctgggtgctgggcggaggcgagagggccacgccgctgcaacctgagtgaccttcagctgggacctcctgcccctcacttccccagtggaggctggaacctgcctcaaaccagcactcctgggcgcagttcctatcctgggggagccggcccggagtccctgtgcaggtcttggccggacctgcggcagggcaggtgtctagagaggcagccaggacctacctgtaggtgaccccagggcggctccatactccctctctccgctgccttgggggttgtctccttgtcctcacactccacactgtcccccgactcttcccattcactccgttggcccccacaattggaggccaggctttctctgtgtgttcacacaccagaaagctgggtaagaagatcatttccttaaaagtgatatttaacccggcaaggtggc

SEQ ID NO: 322 - DNA, 1737 bp, Artificial sequence
  DNA replication origin
cgtggatgtggcgccgggcccgggcggcggcgggctccagcggcgggaccccttcgccccgcccgccttccccttcgcgcccccgggcgaggccgcggccgtgatcggccgtgagccggcggcggggggcggccggggtcggggccgcgggcgccgccggggcgcgcggggcggcggcgggggccgggggggcccgggcgcgcgggagcgggagcggccgggggagccggagcgcaccatggaggcggcggcaggcggccgcggctgtttccagccgcacccggggctgcagaagacgctggagcagttccacctgagctccatgagctcgctgggcggcccggccgctttctcggcgcgctgggcgcaggaggcctacaagaaggagagcgccaaggaggcgggcgcggccgcggtgccggcgccggtgcccgcagccaccgagccgccgcccgtgctgcacctgcccgccatccagccgccgccgcccgtgctgcccgggcccttcttcatgccgtccgaccgctccaccgagcgctgcgagaccgtactggaaggcgagaccatctcgtgcttcgtggtgggaggcgagaagcgcctgtgtctgccgcagattctcaactcggtgctgcgcgacttctcgctgcagcagatcaacgcggtgtgcgacgagctccacatctactgctcgcgctgcacggccgaccagctggagatcctcaaagtcatgggcatcctgcccttctcggcgccctcgtgcgggctcatcaccaagacggacgccgagcgcctgtgcaacgcgctgctctacggcggcgcctacccgccgccctgcaagaaggagctggccgccagcctggcgctgggcctggagctcagcgagcgcagcgtccgcgtgtaccacgagtgcttcggcaagtgtaaggggctgctggtgcccgagctctacagcagcccgagcgccgcctgcatccagtgcctggactgccgcctcatgtacccgccgcacaagttcgtggtgcactcgcacaaggccctggagaaccggacctgccactggggcttcgactcggccaactggcgggcctacatcctgctgagccaggattacacgggcaaggaggagcaggcgcgcctcggccgctgcctggacgacgtgaaggagaaattcgactatggcaacaagtacaagcggcgggtgccccgggtgagtggccccaggcctgggagctggggaggatgcgcttggggtgggggccccttctggactacaggctctggtctccgaaggctgggacctgtgcttctgccgtgccccatgtctccagtcttcgctttgttttagggaaattcagagtgttccgactggcagggccagagagtttggtaggaaggccctcctgcccgttccccaggacgagcctggagtgcgggctgtggcggtggggtggggggccaggcctggtgtgtggggaaggcccgcaggcccacaggcattgcccagataggaaggcacaggcctcatgctcccgagaaagcggcctgccccaggtcagggaagttaggtccagctgggccacggcccggatgcctcaggcccaggtctttcttggggttggggtgaaggtggctgtcctcgccccgaaggcacccagcctcgaagacggagggctgcctgcctttgggccccaggagacagagcttgggtgaggcgaggcctggttttgttactggctc

SEQ ID NO: 323 - DNA, 753 bp, Artificial sequence
  DNA replication origin
gtcattgtgctgctgggagcacttagccaagactggagcctctgagccttccccactcccacccctctttcttctttccggtcggctcgcctccttcctcgggttctctgatagctgtaggactccattggactacatttttttgtcagtatagacagctgtcagagacggagacaaaatgtggcagttggagctgccgcttggcctgctgcctgggacgcggccccttgtcccgcagaacgtcagccaagcgctttccgtgcaggctgataacagggtggtgccgtgcttcccttgggccgtggcaggatcctgctccaagggggggtcctgctccgagggggccggggtttctgttccaacagggctggtggggggggtcctgttcccagaggtccgggatcctgttctgagggggccagggtcctgttctgggccgggggtcctgctccgagggggccgggcgtcctgttcctaggggcggtgggctgcctgtgtgagagctgttcttcacctgccacgtgcagtctgggcattctggtgactggagaatttgggttgtgttacagtgttgttgctctgtcctgcagatgcctgaattcccaggggtcttgcaggtccccttgcccttgcgctgtgtgggctggcgtgggtctcagtgggctgtgggttgagggtcgcttggttgggaagctctgcgcgcttcccagtggagggtccgcgacgggggttttctgatccctcatgctggct

SEQ ID NO: 324 - DNA, 913 bp, Artificial sequence
  DNA replication origin
cctgcttcagcctcccaaagtgttgggatgacaggtgtgagccaccgtgcctggcccatgtttgattctcgatgcagatccagccctgggaagaaagcaccgctggccatgactgggcagagccagagagtgactaaggggctgttaggacagagacagtgggttttgcagtgatgtgagctttgacggaagtggccacactgcaggcccccacagcgtcactagtaggccaagcggacactgcgggacacgttccccaacgtgggatgtccgtcctcagcagtctgtggccttctgtgaagcaaagccgttttgcaggctgggttcatccccgttccaggcccgcactagtggcgcctggttatcaggtgtggtgaggagctttgctgccctggagcgtcgctttgtgggcagaagccaactttggaatcgcctcatggctggccctggacctctcctccttccttccttgttggttgctgttaagccagccttgggcaccagggacagtggggacgtggctgtgcaccgggcccagggctggcaggaggctgcttcagggctctggaccagagcagtgtgtggctggtggtacctgtggctggcgtgggtctggcgggtctggtggtgcctgtggctggcgtgggtctggcgggtctggtggtgcctgtggctggcgtgggtctggcgggtctcgtggtgcctgtggctggcgtgggtctggcgggtctggtggtgcctgtggctggcgtgggtctggcgggtctcgtggtgcctgtggctggcgtgggtctggcgggtctggtggtgcctgtggctggcgtgggtctggcgggtctggcatgtttggtggtgcctgccatcaggctgccgatggatgagcctgcctgtcccccacggattggagttttgc

SEQ ID NO: 325 - DNA, 4046 bp, Artificial sequence
  DNA replication origin
tttttaggaagtcactgatgccactcaggtgggtgcccagctccccacctgatctctggagtggccccttctgctggaggctgccccaggctggatgccgtggcctgcagaccccccttcttgcagtccctgggcaggcagcacccatgcgcacacgtgcacacaggccgtgagcactgccctgtgagccaggtggtggtggggggtgttggggctaaggtttggttagggcccgagtgcttgcgcacccccccatccaatttcccatggtgctgggatgctgccgcctcctggaccctggcgttgaagtgccaccttcatctccctccccagacagtaagctccagacaagggcaggctgtggccgtcactctggccagctgctcgggggcttggtggctgctgggtggtcgcctggactctgccctcctgtctcctggtgtcccggaggggccttgctgggctgggccctccaccgccccattgggcgcctgactctcagggcgcagtcagttctttggggatggccctgatctctgagcgggactgcctctggcctttcttctgcatcccctacggaacagcagcctgctagacgccctgaggaggcaggctgaggggtggaaggggcgtggccgtgcccagcagagaccaccctctgatgacggtgggcgtcctttccagcccctctcggggcatcgcttcatcccttcccccatttccttcctggccctgctctccaagtcttgtgtgtgtggtggggcctggcttccctcccggcctctcgcctgttcccgcccatccctctctggttctctcaggcctcctctgggcttgccaggaatgtaggggaattagggggagggggacacaggaaatgcctcccctcctctgacaacagctccagctgcagggggaggggggaggggagagcagagtgggtgagacgagggagggctgaaggggggagtcggcttggggggagagtgttctcctgcccacccaggcactgggcgtggcccagccccacagacagaacagttctttcttccttattttattttttattagagacagggtctcactctgtcgcccaggctggagtgcagtcgtgtgattggcctcaagcgattctcccacctcagccttccaaagcactgggattacagcagtgagccagtgtgcccagcctcttcctaagtttacaccagtgtgggcatccagtgaggggaactggcctgtgatgcggtggtccttgtgacatgtcaggcagttttagagtagggtttgttaaaacatgggttaaattgggccccacccccagccctccactcctcagccattcaggagaagcgcgaggcatgggtgcgcgaaaattctgagtctgccttccacctgaaccccctctggaaggtctgaccacgggctgggtgtggtggctcatgcctgtaatcccagcacttttgggaggccgaggcgggtggctaatgaggtcaggagttaaagattagcctggctgatatggtgaaaccacgtatctactaaaaaaaaaaaaatacaaaaattagccggcattgtggcaggtgcctgtagtccccagctacttgggagggcgaggcaggagaatcgcttgaccccgggaggcggaggttgcagtgagctgagatggcaccactgcactccagcctgagtgacagagcaagcgtctgtctcaaaaaaaaaaaaagtctgaccacagccccttctcacaagggggctgccccttctaccctcgttggggaaggcctggtctgctgtaagtgcagtgaccggacattaaaataccccggaatggtcttggaaagagccacttctgggagtcttcccttacccgccacacaccttttaaagagaaacctgaagacacctgagaagacaggcggcggcggcgatcttcagagagaagatgcccgagaagacaggcggcggcggcgatcttcagagagaggacacccgagaagacaggcggcggcggcgatcttcagagagaggacgcccgagaagacaggcggcggcggcgatcttcagagagagagatgcccgagaagacaggcggtggcggagatcttcagagagaggacgcccgagaagacaggcggtggcggagatcttcagagagaggacgcccgagaagacaggcggcggcggcgatcttcagagagaggacgcccgagaagacaggcggcggcggcgatcttcagagagaggacgcccgagaagacaggcggcggcggcgatcttcagagagaggacgcccgagaagacaggcggcggcggcgatcttcagagagaggacgcccgagaagacaggcggcggcggcgatcttcagagagaggacgcccgagaagacaggcggcggcggcgatcttcagagagcggacgcccgagaagacaggcggcggcggagatcttcagagagaggatgcccgagaagacaggcggtggcggagatcttcagagagaggacgcccgagaggacaggcggtggcggagatcttcatagagaggacgcccgagaagacaggcggtggcggagatcttcagagagagagatgcccgagaagacaggcggtggcggagatcttcagagagaggacgcccgagaagacaggcggtggcggagatcttcagagagagagatgcccgagaagacaggcggtggcggagatcttcagagagaggacgcccgagaagacaggcggtggcggagatcttcagagagaggatgcccgagaagacaggcggtggcggagatcttcagagagaggacgcccgagaggacaggcggtggtggagatcttcagagagaggacgcccgagaggacaggcggtggtggagatcttcatagagaggacgcccgagaggacaggcggtggcggagatcttcagagagaggacgcccgagaagacaggcggtggcggagatcttcagagagaggatgcccgagaagacaggcggtggcggagatcttcagagagaggacgcccgagaggacaggcggtggtggagatcttcagagagaggacgcccgagaagacaggcggtggcggagatcttcagagagaggacgcccgagaagacaggcggtggcggagatcttcagagagaggacgcccgagaggacaggcggtggtggagatcttcagagagaggacgcccgagaagacaggcggtggcggagatcttcagagagaggacgcccgagaggacaggcggtggcggagatcttcagagagaggacgcctgagaagacaggcggtggcggagatcttcagagagaggacgcccgagaagacaggcggtggcggagatcttcagagagaggacgcccgagaagacaggcggtggcggagatcttcagagagaggacgcccgagaagacaggcggtggcggagatcttcagagagagagatgcccgagaagacaggcggtggcggagatcttcagagagaggacgcccgagaagacaggcggtggcggagatcttcagagagaggacgcctgagaagacaggcggtggcggagatcttcagagagaggacgcccgagaagacaggcggtggcggagatcttcagagagaggacgcctgagaagacaggcggtggcggagatcttcagagagaggacgcccgagaagacaggcggtggcggagatcttcagagagaggacgcccgagaagacaggcggtggcggagatcttcagagagaggatgcccgagaagacaggcggtggcggagatcttcagagagaggacgcctgagaagacaggcggtggtggagatcttcagagagaggacgcctgagaagacaggcagtggcggagatcttcagaaagaaagcccagagttccatagtgggcgggtgggcagtatttcggcttgtgtggcaccagggcagggcctccgaacccatggaaagccttgcttcccccaagcccgctggctcccagccctccaccctcatgatagggcctgggtaggggctgctggtcaccctttac

SEQ ID NO: 326 - DNA, 1374 bp, Artificial sequence
  DNA replication origin
gcagtggttggtgagaaagcacacagaaggcagaggctagagatgcagctcctctgttatgttgagcctctctaggcagggagctcagagacccggaggtggccctcctgcctcctctctgtcaggacttgacacctgtctcagtggccatggctgtttgtcttcatccctcttcggtgagggtggcaggcggccagatgcccattacaggccacctctcctgccagccagtcttcgagggctggtcaccacgtggccactttgtgaggcccctcctctaagatcaaatgtggcactgcagagctacaccaaccccgagccccgcgcagggcagggcaggagaaccaagatcgtgggggtgggggggtgcagggcagggcaggagaaccaagatcggggtgggggtgcagggcagggcaggagaaccaagatcgtgggggtgggggggtgcagggcagggcaggagaaccaagatcgtgggggtgggggtgcagcacaggtcgtgctcccggggctggctgtagcggctctcccctcccccgagcccaccgtgtgcttcttgtccagccttttgagatgaccacagctctcagtttggccccacagcagcatctgggttgacgtccctgatgaggtttggaaacagcagagaaggggttgtcctcttccaccaagagcctggctggcctggcctccctctgggcagcacctggctgggctgactgggcagagggaaggggtggcctggccagggtgagcatggggtgcttgccactccacagagggggtgcaggaggcgcctccaggccacgttgctccaggacatgccacctccacagccccctccttggagtctttcctcaaggtcttaggatggctgtttgtgccctagcacagagacccttgccctcttgtgtggcgccgggggtccctgttggtcagggatgttcctagagtggggagggagtcggtaaggcaagggtgatgttggttgtaaggggtggagtccttggtcttaagagatcaggcagggcagccctgggctgcccccggcagagcctttgccccaggcaagtcccggggctcctgggaagaggctacttctcagcctcttgagagggcctccagggcacaggcagggagcagctgtgagggtgtggctgtgatggggactcttgactgcagtgtggatgtgagctgattgggggtaggccagccttctgtgcgggacacttgggaactgaggggacacagccgccaccctgcactgctcagcctgagcacctctctggctgtttggtgctgcacgtgtttctgggcatctgagatgaggccccagggcctttgcttccagacaccaggggagagagacca

SEQ ID NO: 327 - DNA, 1852 bp, Artificial sequence
  DNA replication origin
acgtttgcctgaggctggatgtaccggctcaggcccccagcacacaacccacatcactcactggctcttgggggatgtgcctcagcacctgacacacaacacctggttctgagtgggctgggtccaggcaccttcgctaagcttcctccaccagcgggacctggttctgggtgggctgggtctgggcaccttcgctaagcttcctccagcaccggggctggcaaggagcgaggcaaaggtgtgtgtggtgccatcctgtaggagccaggctccttggggatggtgtccttcattttgaaaatgtttccttcccatggggagggggcagccagaatgcccactctttaatgcacctgtgccagtggcccacagggacacggtgtcccctccccgcgaccacccctgtgccgcagctgcccttcccagacgcatccgtcgtgagtggctctcgccgtgctgtggctggttgagctgagtgcccagcgctgggcaccctctgaggacacactcgggttctaggaaaggggtttggcaggagaaggacgagggactcctggccaggctgagccgctgtggaaggggagagtgggtcttggtgctccatcccaaacctgctgcagccgtgggtgaggtcacccggaatggcaggacaaggtccactctgttctctcggagatgacttgtccctcagcacagcctccacgtgcctgttgcgcgtggcctaagggcctttatgcaaagtgaacttggtctcctggggggtgccctggaatctgccttctgcgccactcagggtcgtttgtggccggagtgcatggggctctgactgccatgtgccagccacggggctggtggagggaccctgccctgggaaccacaggtgccaacaaaacctttcattgatcgcaggtctcctctgagcctccggcctccataagacccaaaacagatgacacctcttcccagtcccccgcgccttccgaaaaggacaagccgtccagctggctgcggaccttggccggctcttccaataaggtgctgtggggcctgtcggggtccttggggtggtgggtactgggcccttctccttgggcagacccagcggctggcagctccacctgcccgctactgagggctggcacccggcgcagcctcagggacatgaagtggcttgtttttctcctggtcactcacacagacaactctttctcgacagagcctgggctgtgttcaccctcgccagcgcctctctgctttccgaccctggtcccccgcagtgtcagcgagtgagaaagagctctccccacacctcccggccctcatccgagacaggtgagtgggcgccattcacaggtgtttctgatcacgggggaggctccacgagggctgtgcatgcggacgcgcccatgtttctgcaggctgggtgcccagacctgccgccttttggtcagggcagtctcggtgttggttcctttggctggcatcagggagagcacacctagagcgttccctgtgttctgggtggagtcgtgggtggagccctgtctgctgggcgcagcttcttgatgtgttggcctgtgtctggccttcgcaagagacccagcaagcagaaaacgcttacgggttcttagggaactgtaagcttgacttgaagattcggagctgggaaagtctttcctgtttaacaccttcagagggggtgtgcgccaggatgtgtctgggtggtgcttggggacagaggcaccttcccgacacccgcctgcccctccagcttctactcctacaagagctttgagacagccgtggcgcccaacgtggccctcgcaccgccggcccagcagaaggttgtgag

SEQ ID NO: 328 - DNA, 2191 bp, Artificial sequence
  DNA replication origin
ctcgcgctcccgcagcaggtcggcccgcagctgctcccggtccgcctccgcgtgctgcagcttcacctgcaggtcttcgatctgaaagggagccgagtggtcagcggcgcctgctcgctgccctgccccggcccgacgctgcttcccccacccgaggctcctgcgccgctccctgtccctccccagtgccgcgtgccggcccctcctccacctgctaggacacaggctcacgagacgcagggcccagcaaccacccaccctgtgcccgtcgggggggcacgcacggaacgtggtcccgggcctggcttctgctccaaggcctttccggctgggcaggactggccaccggggcccacggcggctccacgcccaccgtgctgcgtgcctcagtctccccacccgcatacctgggccgagtacttggcgcgcaggcggcccgcctcgcagcccttgtcgcacacccgggcctgccgcgcctgctccagctcccgcttcaggcgcagccgtgactcgttggcctctttcatcttcttctcgttctcggcgcggagacgctcgatctccttccgcaggttacgcttggcctccgtggcctcccgcagcttctccttcttggccacgcgtaggaactccagctcctgggggccggaggcggctcggggtcactgcccagccggtcccagcacacccctcaccatgaccagcagtcctcagcccaccccgtggggtcatctatctgacaatgtgccctggagccccgcccccagcgcgccatcagcccaacccgtgtggtgccccgaccccacaaaggcttttcagacccccatccggagtttccgccaggcctgtggcagctgtgctaaacctgggggcctgagtcagtcacttgaggctgcggcggggcctcccccggtatctagggccacgttccccttgggggcagcaagccaagtaggccctggctcccatcaatgtgaggagggcagcctcagacatcgcaccatctgagggccccgggtctccccacgcagccagatggacacgtccatccgcccggcgcctccgcaagcccccccactctccccattaaaatatccgtgtgactcacaccccacgctgcaaacacaccacatgaatatgtatgtgggaaatcacacctccaaccagaatcaaggacaacagtggcgggggacgtgctggggcgagggactggcacgcgcaggagggcacgtcggcaaccctgcagctctgagggccgacggggttgtgttgtgctaaagcccacgccgcggaagctgccagacgccgccgaggtgtgaatttagcgaggccggggcccggtgaacaacgggccgcctgcacacctctctccccaggcagctctgcctgtgaaccgcacttccctcagtcatgtcagaaagaaacctaaacaacgtaaaaggaggcgcgagaccggagctgcagcgtgagaaccgtgaggcagagcccagagaagcagcgtgtgcaggtgggtgtgtgtgtgtctgtgcgggccgagccctctccttcctactcgggaggcctggcgggagccgccttctggaacaccaggcattagtaagcacgcccctcacgcctgtgttttgcagacgccaggtcttgctggcggagcgcgtgaacacccactcctggagcacacagagcaaggaactgtctccatgcagctgctcccaactctttctgccactaaaaatagcccggcctcccttataccagagaaacatggctacttcctcagtggggccaccacgcagggtgtgtgatcctgatggggaaagctgtggtcaagccaaatgtagtggcctcctgggatgtccatcagcctggggacactgaggggctcaccatacccagggctgcagcttttgggagacggacccccaaggtcccaggcaggcccactgaggtggaggcagagaggagcgcatggggcagccaggaagggaggaggcaccacctgtgcccgttcacctggtgcaggctgtgctcactgcccgtgccctggacctcccagcaccactcgccccgctcacctggtggaggctgcgcttggcctgcagggctgcgctgagcttctcctcctgcttcacgcgcatcttgaccacctcatgcaggaacttctctttggcttccttggtgtccaggccgccct

SEQ ID NO: 329 - DNA, 1519 bp, Artificial sequence
  DNA replication origin
cagtaagagctgccaggcccggccatgggagagaaaggtccgttcccagcccggctggacacctggcccagcacaggacactgcaaagacaagccaggctggccaggctgcccctgccggtcctcacccgcagcggggccacctgctccagggctgggtgccccagccattgaggcccccacccacctggcacaggccaggcacagatggccatgtgcgtcactgagaccggggggtggcagggctgggcgggcatccagtccccaaatgttctgtcctcaccccctccccagggtccgctgtgggtggagtagacagggcagtttctgtggggagggtcgggacccccccggggccaacacatcagggtcacgaccccatcatttctggagggcaggcggccctggcctgggggtgtccctgtgggctccgcacctccttccagcggaggctccgtggggtcagaggccgggtcgcctggagcaggaccagcagctgtgcagaggctacgagaacagagtgggtgggggctgcctcttcctggccagaaggaagtgggggagtcaaagcaggtgctgggacgtgggggtggccaggcctgggccaggatggggtcggggtctgggcctgtgggctggggcaatgggtagagcccctcatgcagccatgagggggtgtccagcttgggggcccctggccatgcccttggagcactgcgctggggcaggagggcgggttgggggtgaagtgagggaggagccgggtccctgcttaggcttagggctggggccggacacgcggggctgaaccagtggctgcagtaactggtcagcagtctccactccccacctaggacgtgctggccgctgcctccccagacaaggtcaggctgctcagccgttgtcggcccccttgaccacaggctggtgggtgaaggctggcaggactgtggctccaggaggagggggagaccagcacagctgagacctaaggacagctgttggtgactgaggcagaaatgggtggggcacagggtggggcagaaactagggaggtgggggagcccccatccccttccctgagctcatcttccccagaccccagctcttgggggcttgggaacaggcactgccaggaacaggggtactgggagctgcccttccagggagctgaggctggagggctaacccgtggtccctgcagaggcccaggcaggtgtgaatgctgggagtcctgagcctgaggatgcagaggtagggtggggagggccatctctctccccccacctctgccctcccctggcatggaggcagggagcttctcccacccaggcctcctctcccccagcactcaggagacccctggatcccttcggaacagctttgggaagagggttctgaccctgggtgacggctggcctagctcagcaggtggccagagccctttaaagctctaagtttatacccaaaggtaaacaccaaagagaagcctggggcagcttggggaacaactgagccca

SEQ ID NO: 330 - DNA, 1809 bp, Artificial sequence
  DNA replication origin
gccccaccccgccggaatccagcgctggccgcgaatctggggggcgccgccccggacggcagggagggtggggtagcggaagaggcggcgggggcgggggggaaactgaggctgcgggggggagcctgaggctgcggggctgcccctccgcgtggggaagtggggcccggcgcgctccgcctgactcggggcccccagtgcccccggactgggaacggaacgggcgtcggggaggccgccccggccctgaggacgcggcgcggggcccgggacgtgcacccctccccacccccccagcgcggcttccggcccgggcgaaggagcgggattgggaaggtttcggagccggcgctggaattcctgggtagttcctccgccaccgcccttcccccgcgaggccggcctccgacggggcctctccagggtgaggggcaggccctggcctggagccagaaacaggatttccccggatgccaggacagcgccagggccggggacaggccggggccccactgcgggttttctgtcctgcgcagcagtgaccccgcagacttcgcgcacggggcgcaggatggggtagggggcccagagccttggtctgtcggaccctcagcggccagcgcaggtcggtggtcatttcggagttccggccactgtcctgtgcaggagtgaccctggaggccgccttggtttggcctgggaggattctaaacacggaggggccaacaccgagacccgagagaccccggcctaaacctgacccagtgccggccacaccagccacggccctcctggcatccctgggatcacagaatgggacagcctccccacccacaatccccccaggccctggcgagggcagctcctccgacgctacagcctttttcctaggactgtttttccttagaaacaggaagctggggcatgggcatcacgtccctcgggtgcaggccccaccaggggcagggcagagtggggctggaccacagggcacacagtaccttgcccagctcctgccccagggtgggcacagcagggcgcagggcggtgtccatctgcaactggtagcctggcctaacctgggcatagcaccgaccagggtcatttcacccagctgggggcatctccatgagggaggacacgcagagctccatcgtctgtccctggttcctgcttgccctccaccaagaccccagcctggccaggcccaccttgcaggaagggccagaaggttccgacagcagagagggggacagggctgtcagggagaatctggcagggccaggccaggggggcagcagctggcactggccagggtacacgggaccctccagggttcggggctggtggcctgcccggcccccaccaaggcctctagacggccctcgaccctccacacccctggtctctcgttctagatctggatggcacccaatcctggtttctgggctgagctgggcagccaggagcccacccttccaagccagccagttgtatctccacggggcctgggcacttggcacccctatacctaagagtgtccttgggacagctgcggggaggggcaggagactgggagacactgctgcctgggctgacccagggagcccctgcctccagcccctacctccccacctccccacggttccctgtccctggaagtttctggaacaggcctcctttgcaggaggagccatggaggccgagcctgggctgcacttcttgccagtaagagctgccaggcccggccatgggagagaaaggtccgttcccagcccggctggacacctggcccagcacaggacactg

SEQ ID NO: 331 - DNA, 1334 bp, Artificial sequence
  DNA replication origin
cgggggcgggggcggcggtgcgacccccagcggtggaagcgggaactgcagctcggccgagctcggggttggggggtccctgccaaccctgccctcccggaaggtcccagcctggcgggttcgggtgcttttctctctggggcgcggcctccctgttctgctcagttgggggtccgttcccgggaagaaccaccacaccccccatcccggcccgcaggccccagccgccaagtcgttgctggggaggtgggcgcaggccgccctctctccgtgagcccactcgccacaacccgcagggacctgggggactcggtggatccaaccacaggagaccatgagacacaggcggtctcgccgaggcctgccgcttagagctgtctctcctcctcacgggccccctggctccctgcaggcctggcctcctatctccctcaggccatcagcccagggacccccagcccaggcaccccacccatgctctgagctgtgggcctgaaacccgccctcctagcagggagcctggctgcgccccaggccgcttctgcttggagctccgtggaaggaaatgccctcaggttcccaggcactgagcctcccctcccgctaaccccatcaggggtatagcagccccgtggtgctcagcctgcctctctctgcctgggcaggaccgtggagcccatgcgtgtcctctctcctgtccccagatggaagccggcaggtggggccctagcaggggacatgctcgacgtgtgggtggatgaggacccagtggggtcaggtctggggcagcgggacagggtctccaggacggggcctggctgcagataggccggagaacggctgctggttccctgaggccactggggagccaagatgcagtccccgaggggtttccagggagcagccactgggctgggcagctgggcgcaggggcagagagagctggggctgagtcctggcctgccccctggggactcctgggctgtaaggcaggggtgggcagggcctggacccttgttggggggccctccctggctgtggtccacctcaggagccaaggaggctggggggctggtgtgggcagctacctctgttccccacgggtcctcaggaaggcggcgccacagactgaggaggccctgctggccctggagctgtgttcggagcccccacagcctggctcctggctctggttgccgtgggcgggaggtggaagtacaaggagaaggagtgtccagcattttcacgagtgccaccgccagaggtcaagctgaggacaagagggcagccaggcaccaccctggccccaggcagactccccagggctcgctgaa

SEQ ID NO: 332 - DNA, 1368 bp, Artificial sequence
  DNA replication origin
gttgccgtgggcgggaggtggaagtacaaggagaaggagtgtccagcattttcacgagtgccaccgccagaggtcaagctgaggacaagagggcagccaggcaccaccctggccccaggcagactccccagggctcgctgaagggccggcagccctgggcctggcagctccccttgcaagccccagctgggggctctgtcatccgggaggccctgggcctgaccttcgccggctgcccctgggcctggaggcaggacacgaaggggctgatgggtctgtggtcagccccgagcgcactttgctgagctgtggtcttgctgagccagcccacaggcccagcgactcctggcttactcagcccaggcctgaggctcccagggaaggccaggccaggctgtgcaggaacctgcctatggggctgggcacctggccctccaggaaggcctgcctgcgaggagctgctctgcacaggggtctcgaccctccgctaggcaccaggagcgaagagggagaggctttgggaaggagacacaggtcaggtgggtcctgtctggttcccggctgtggcctggctacgctgtcctctgctaatgccaaaggggcctgggcatggtctggagggtgtcctggctgaggccctgctgaaggggtgaggcaggcatccccccccatccccaccccgtctctctacctctctgtgtgtctctctctgactctctctgtgtctgcctctctctgtgtatctctgtctttctctggctcacagactccatcttccatggcagcaactggcttgatgctctctttcggtgtcatcttcgcttggtaaccatgggtgggaggaaaggaggaatggccactgctcccttgtttggaggtcaaaggaacaggaggggcacagggaggtaggaggggcacagggaggtgggcggagctgggacctggagctctccccaggactcttcctggggcaggagaaggggctggctggggttgggggctccacctccaacacactgtgtttgtgagcttgccagagagccgccacctggtccctggcctcaggttcccaggggtggcaccagtaggccgtggcctgcaggccagaggcagacacagcccctaccatgcccaccaggtccggaggagcccagcagagcccctgcccagcctgggaggaggcctcagcccagctcatgtcccgctgtgttggcagtcagacggtcacgtggcatggccaccctggccccaaagccggtgtgtttccacctccagcaccaagagctgcccgccctccccctgacacgcagaggaggcccgggaagcctgggagaccatggctgccgtgggcggggctggtggccgtca

SEQ ID NO: 333 - DNA, 1099 bp, Artificial sequence
  DNA replication origin
cctgcaggccagaggcagacacagcccctaccatgcccaccaggtccggaggagcccagcagagcccctgcccagcctgggaggaggcctcagcccagctcatgtcccgctgtgttggcagtcagacggtcacgtggcatggccaccctggccccaaagccggtgtgtttccacctccagcaccaagagctgcccgccctccccctgacacgcagaggaggcccgggaagcctgggagaccatggctgccgtgggcggggctggtggccgtcaccacttgctccaggcctttgggaccacatctgtccccggcccgcgccctcagcgcagggacgctgctcggcggcagcaagtctgtccactcactgaggccccagtgccgggtgtgaggctgctgcccgggaatcagcgcccagtcccggacgcaggcccagtgagcaggggcaggcgagccgaggtcagcccacgggcccccatccttccacttgaccccgtcccgggctcggcactcagggactggttctggcctgcgtggggcaggcgatgggaaaggatctttcacagggggacgggcacaccccggagtgggggcgtgtgctggtgggagacgcgtgtcgggggctctgcgtcctccttccaggatcttcctccccaccccgagagagcaaggggtcctgggactctgcccaggaggtcagctggaccagacagacgggccagtctctgtggcctccccagggccatggggactggcagacccagaagccagggtgaagggacgcgggaggccttgtgttctgtggcgggtcccgaggactctgtccccacggtgggctgcctgaacagagtctgaggggagggtcactgtccctgggtgcagcctggcctgcggccgcctcgccactcctggtctctggatgctgcgccccgcagtccctccctctcccgcccggctcctcaccccacgtccagccctccagagtcgtgtctgtggccacaaggctgtctccacagagcctctctcccgcagtggtttttttttttttaaagaattcaaatttcctgcgtattttaactttgggatgtggtgtgaggagta

SEQ ID NO: 334 - DNA, 1077 bp, Artificial sequence
  DNA replication origin
cagagccccccacatgcactcggcctcccagtggcagagctcagacccagggggccttggggacactctgccctggcagaggaagggtcccctcgctgcagctccagtggcctccagcttgtcacctccaaggatgggggactcggcaccccgcgatccggcctggttcctccctgcaatgcccccccgcccgcccctctgcccccgggcagcaggccgccttcagtgcatccaccacgctgcgcccgacctggccccaaccaggctttccctgagagctcctcagggccccccaccgtggagcatcccagcttctgggtggatcttcaccccatgtgcccaggggctgccccgggttcctgcactgctgtgaacgcagctcctctgtccacggcctccctccgccgagcaggagcagctccctgtgcaggtctggagagatgccccggccgcagctggcctgggagatgggtgtgttcccagggaagcgcgcctggacagtgggagggtgggtctggccgcaacgcaaggaggtcggtgctagttgtgggagggccggggacagcagcatgagggaaacatcagggggcatgggtctggtgtggggctggggctgggccctggacgccccctccccagggctgcaaacggtggtcttctgagagggtgggctgcaaggacgggggtgggtcaagggagagcaaggagagcaagggcctgaggaggctggttccctgcccagcgctgggcgggcagagggtgagaccagccaagctgcacaggccccaggtgggcagggtgaagccaggggccagggcaggtgcggtggggccaggaggcagggtctctgcagtggccgccttctgtgctgaccgagtggctggctgcccatgggccatctcagtgccccctccccaacaaccttctggcccctctctggctgaggggccctccggaggcagctgtaaaatgtccccgaccatcctccctggtcaatgcggggtgggggcgtcaggcaggcaggacacctggtcagcagagctgattgcatgcttcctgcctcttgtcatgggagcc

SEQ ID NO: 335 - DNA, 2061 bp, Artificial sequence
  DNA replication origin
agaggaaagaggagccaaggttccttcacaagctgtgccccaagggaagcccgggtttcatgggcacagaggccatgtctgccctcccagagcccagccaaggccaccaggtccccctcaggcacgctctgaccctgcgaagccctccagggcttggtcacccatgtgcagggtggccagaaaggagggtcctgctgcgagggccctacagacacagccagaggctgaggcccggcatccgcctgccagggcacccccaactgccccagcaggtccaaggatgtcagggagcccctgggagaagcccgcccacccctgtggccacgtggggccaagtccaggcgtggagggccaaggctgccctggcccgtgctgcctctggcaggatgacagggagaggtgctgaccaggagaggggtcccgagtggctctggggaggctgcacgaggggctcctgcgccagccgctgaatctggctgccaagtcgctgcctcaccatgtgccccatgtccacctggggctgaaccccagcttgtgggaggggagacagggtggacgggatggccctccctgtagtgggcggtagacacagaccagacatgagggccccgcacgtgcccgccgcctgctgccctgggaggggccgcgtttctgagagggcctctggctgcgttcctgcagagacattccaggcgtgttacggaattccacaaaaggacaaagccctgtcggttctgaaaagatgtgagattatgtcagctgcagaagaaggactcggtttaatcaacgtggccatgactttgcccagccacacaggagaattccacaggaacggtgggggtggccctggccccagaaatcctcattccatgcttcatgataggaaaacgtggccacccgagccccatcagcccgggacggggtccctcagcccgaccacaggcacgggtgtgcgcggcgaccttgtgtgtcattgctcagtggtggctgtcggcatccaagctcctcctccctcctcggctccgagaaaaatgggcttaattaagacttctgcgattagtcatttaatcagtcattaggccaacacagatggagtcaattaattttttttacttgaaaagatcgtggatgctccacagcccaccgagccccttcctggctctgtcgccagtgaccgcagagtgtcccacacaggccttcatcccctttgaaaggccaccggtggggacaagccagcacctgggctcctcacctgtcccaggcccagaggacgaaggacaccgacccgttcctccctcgtctgccacaaagaggtgacaggagccaggagaatggccttggagccagcagccaccactggtgcctggagacacatggggcgagagcctggccacccactgggcctatcggggttggctgggtctgaacagggacaggactcagggtggcaatgtgtccgttctctgagcgtgagtcctggccagcacgctgtggccagttaggggcaggcctggccagcaaagcagcctgtgactcgcagcccaggtggggaggcctgtgccgctggcttgctcagccgaggggtgcagattaaggaggcacagagaagcccagtaactgctcccaccctggccccaagatgggcaaataggcagttcccatgggcacaggccagggtcccccctcacccggagctcccccctcacccggagctccctctagtcctctcctgggcacgctggtctccgccataaacacacaaacacagtcagcccagcagcccagcctgtcccttggcctgagcctggcctgctcacggctggtgccatctctgagcattcttgctggtgcctcctccacgctgtacctgcacggggcccagcccagtggggccttggggaacactatctgaaatagaccctcgacagacccaaaggggcccacgtgatgcggtggtgactccggcctgctcggctcacctgcccaccctccccaagggctctgcctcctctctgggccttgccacctgctgaccccgtggccaggaggccccactcagcc

SEQ ID NO: 336 - DNA, 1534 bp, Artificial sequence
  DNA replication origin
agggccaaaggagtggaagctcctggcaccgttggggctgccgcttccgacagacatgcttgtgaatggggtggagaagggcaggggcaagggccggctctcagcgcaccctcaggctccagcctcagcagcagcaccttgagccaggatcctgccgctagcaccctggagtcccaggagacccctgaggtccgagacctccctcgggtccccctacagtgtggccctgtgactgacaactttgttctgcaggagccatggcccctaccctggcacggtcctgtattgttccagcgtctccaggcccgaggccactcactgcactcagctgtcactcactcaccagctgtccccagttgccatcgctggggaccccctttccataatggggaggaggcttcgggagctgggcccggggctgacccggctgctgggtcccagctggcatccccactgctgggcacagaggatgtggggcctgtccccggcctgttgcagcggggccagcccaggccctgctagacgtgcccactggctggcataattacgcaccaggagcatctccaggcgggagcccgatgctcactgcacttcctgcctggaacattctggccacccccagtcacgccccccaacacctggtcgcctttttatccttcctaaggaccccaacgatgccagcttcctgggttccgtgtttttatagtcccactctccagttccagagcaagccccttgggggacccgtgggggttggccagaggtcagttgggtgaaggctcggaggcatcctcgtaggcagcctggtgggctgcaccccatggaggtcacggagccccagcccgagccccagtccccgacagagcttggcccctcgaggcgcagcctgggggcccctctgagaccctggggtcctggctccggcttctcccctcgtctccgcacaagccccaaagcctcactcactcatggaggttttcacccctcccaggatcccaacaggagctaacaaagggttctcctggctgctccaaatctcgaggcacagacgagattctgcagtgtggacaacaggagaccaagtgagacgggagtgtgaccccttccatgtccagacgccacgtcgcgccctcctggcccccaacctgggcctgtgccggaggtctgccgtgcccctcacagcactgcccattcccccatcatagaagcccaggtcctagcggcctgcgtggggtcgatgtcaagacagaactgccgagggggacaatgggagaagcagtgagtccggggccaggggtcgcccatcccactggaagaacctgagtgtggaccaaggacagggagcattccttccgatgctggagtccgtgagcaacagtcagggtggccgggctatgctcaccagggtgtgctgagaccggggctctaggggagccccctgtccctcagaacagccacatctgtgtccccttcgtgcagctgcacaacaggagctcctctcagcatccactgggggacgccggtgccctcagga

SEQ ID NO: 337 - DNA, 2213 bp, Artificial sequence
  DNA replication origin
catggggtgcagcccaccaggctgcctacgaggatgcctccgagccttcacccaactgacctctggccaacccccacgggtcccccaaggggcttgctctggaactggagagtgggactataaaaacacggaacccaggaagctggcatcgttggggtccttaggaaggataaaaaggcgaccaggtgttggggggcgtgactgggggtggccagaatgttccaggcaggaagtgcagtgagcatcgggctcccgcctggagatgctcctggtgcgtaattatgccagccagtgggcacgtctagcagggcctgggctggccccgctgcaacaggccggggacaggccccacatcctctgtgcccagcagtggggatgccagctgggacccagcagccgggtcagccccgggcccagctcccgaagcctcctccccattatggaaagggggtccccagcgatggcaactggggacagctggtgagtgagtgacagctgagtgcagtgagtggcctcgggcctggagacgctggaacaatacaggaccgtgccagggtaggggccatggctcctgcagaacaaagttgtcagtcacagggccacactgtagggggacccgagggaggtctcggacctcaggggtctcctgggactccagggtgctagcggcaggatcctggctcaaggtgctgctgctgaggctggagcctgagggtgcgctgagagccggcccttgcccctgcccttctccaccccattcacaagcatgtctgtcggaagcggcagccccaacggtgccaggagcttccactcctttggccctgcctgccgacagtgagccctctcctgtgcctggcacgggctgaggaccctgcctggaaccactcggccacgacacagcgagggttccttgaatgcaaaccagacacagccgactgagtgttggaggcctttggatttgccagagccaggttggctgctggaaagaacagctttcttagaattccgaaaagtgggctctttgggcccagagccaggtctggacgctggttgggggagctgggacccagaccagagggaggggtgcatgggagaccccagagcttcttcctcaccgcagagcagacagaaggcatgggggtcacagctgggggagcctcaggcagggtcccccactctttcctaagagggggccatcacacaaacacccagatgggttgtggggggttttggcggggacagagctggggaggtcctggaagaggtcgtgaggtcgacgccccggtcagccacagttgagggcctctgggtggtgggggggcagcaggtgtaagaacggtaagggatcacgtggctacaaggaactggtggtgggggtcaggctccatggaggacgagaggcacaggcccaggtttgtctctaagtcgctgccgccccatgatccatggcggagaggcctgcaagtgtgcagcccttcacctccatgctgggttctcaacccaggagcgggcagagcttacggagagttcccgatgggaaagactccccagggtttccgcacccagaagacgtagtaaggccagctgcatggagaggcggggctcccttgggggagcaggcctggttttgggctgcctgtcccaacacgacgagagggccctggctgtgtggccgtggagccggcaggaggcaggggaagtggccgctggtcacagatgtgtgccccgaagagacgacatcatttgaacactgaacactccgactccgcggccaggtcgtcctgggattgaaacaatcctagtccaacgacacttaactcgaggacagtgcgagccctttggctgggaggcccaggctgggagcagacgccgacccctccgttctctcaggtggaaaagaacgaaagccttctttctgctgaaataagacgttccaacatcaccctcagcgcggaggttgccacggttctggagcgaagtggaggtgccgccctgggcgttcgggtctgtgtgagtctgtgggagtgacagaatgtctcggcttttggctctcgcagacgctcctgaggccgagtcactgggcaaacagggccccagcacctgcaggatcttggctgttttttagtctctgcttctgaagttatcgtacaaagtgagtttcatatttaattcacaaaccatgactcagagccggacagagggcggcgcctccc

SEQ ID NO: 338 - DNA, 1228 bp, Artificial sequence
  DNA replication origin
ctaggccctcagggcacagtttctgttcctcgaggagaccctgggacacagagcccctatgttgccggctagggtgccttcgtctccgtctctggtcagtagcaatgctgccggcagcctgtgtccactggcgaggggcaggtgctgggactggccctctgagcggcctgagggtccggctggcagggcagggggtcccccggtgcagagcctggcccttgttgttcagagccacgtagggtgagcccgaggctctccaaggaggacggaggcaagacaagtgccccgaattgtcctgtgtcccccaacaaggccggcccatgcctggccgccaacagggagcagtgggggagtgcgtggctgctgccccagcgggtggtaggtggcaggtgtccaggcctggccctggcctggtggaaggaatggcttggaggtgccggggcacagacagaccctgagtgtggcagcctggggaccgcccatgcctgtgcgagggtgcgggcacatgtggccatccatgagcgcaggtgagcacacgtggaccctcgcgggggctgacgttgtcttcggggcacatgtggccatccatgagcgtagagcgtgagcacgcgtggaccctcctggaggctgacactgtcttcggggcacatatggtcatctatgagtgctgtgagcacgcgtggaccctcccggaggctgacgccgttttcagggtgtgtgtggccatccatgagcgcagagtgtgagcatgcgtggaccctcgcgggggctgacgctgtctttgatgctctcgctttgtgccaacagagagacggtcatgctccctctggcagaattctgcattcggggacttggcatttgctgctggaaggtggaggtggcccccaaggtcctccatggccagcttcagccctgcccccaggctctgcaggcagctgttgtggctcgtagagcctgtgagttggcacagcgctccccctttcccttcccactggggcggccgggccccatctgtgcagcgcagggacgaggcccccagggaaggaggccggagcaggccagggtcctcacgcttgccctgagaggccagcagggaccagtgtgtcctttgcacagcccggcccacacgggacccccctccagaggaactgccgtctgtgcggtccccgctcctggcctcctcagcagcatcggccttggggctcctgcaccccacaccccgtccccc

SEQ ID NO: 339 - DNA, 1558 bp, Artificial sequence
  DNA replication origin
gagcggacacagtacccaggtgcgcgtctgaaaagaaccggggttccctggagaagcggcggatccaggctggggcaggatggaggcacttcccccatggagggcagagggaggaggagtcagctccccacggagacgcgccaccagcctcacggtggactccactggttctgggtcagtgaaaatcctgccccacctggcagcgtgggctgagcagagccatccatgaaaggcatgagcgtcgcatccatgcctctcctgccaaagatgcgtaacccgggtctctctgtgatgagacctcagacacggccacacgggggaaccttccctgaaaggcctggcctggaagcttcgaagacgccaggaccatggcagtcagggaaaggcccgggaatgttccagaccgacggagactgaagacacaatgagagctcgctgcaatgtgtggtcccaggctgatctccttcctgcgagggacatcactgggccacggggaagcccaggctggggtctgaccccgaggcgtgccctgccccgggacggctgtgctgggttacgtgaggcgaaaaacttcccggtttgtaaaatgcactcgaggatgtggagtgaggagcaaattcagcagcggactttcagatggcccagcgaaaacattctttgtactctacctgtgacttttctgtaaatgtttgattaaacatttaccccaaaatgtaaaatacctgtgcacccggcacgcagggtggcaggggggtgacgggggcagcgggggccgagcaggagcctcaaggctgcagcagccgtgcagtccacctccctgtcccgcagtcagaacctaaccctgaggccactgggagcatcgcacgggcagccacggtggggaggacacctgcgtggccccgtcccccctgcaccgagactatggggccagcagctggcctggtggttctaagtcatctggggcctgtccagcaatggcctagacccctgaggtcatggggtgtgtgggcctgggggcgcctctgcagatgccagggtctcagccactcgggatcctcctccctggtgtcccctggagacagcctgtgcctgaccagtgccctccatggagtgccccataccctgcttcgggatgggtgatcgggggtagggggcagccgcagccacacagcacacacacgggccatctgccacctgcagctggggatggagccttcgtggcacattagattctttcctttctagaggcgctttggcactggcacacagtcgcagcctctgaacagactcagactggccaccagctgccccaaggggacgtgtcccctgccactctaagtgggaaaccacctcccccagcaaagctgtgtgggggcggcatcccaggtcctggggccatggggccaagagtgcagctgggtagggtgctttgagttccccatctcccaagagctccccatctcccaagaagttccccatctcccaagagtccccatgtcccaagaagctccctatctcccaagaaggacccaggagtccctctcctaggaggaaggga

SEQ ID NO: 340 - DNA, 1378 bp, Artificial sequence
  DNA replication origin
ggaaggagatcagcctgggaccacacattgcagcgagctctcattgtgtcttcagtctccgtcggtctggaacattcccgggcctttccctgactgccatggtcctggcgtcttcgaagcttccaggccaggcctttcagggaaggttcccccgtgtggccgtgtctgaggtctcatcacagagagacccgggttacgcatctttggcaggagaggcatggatgcgacgctcatgcctttcatggatggctctgctcagcccacgctgccaggtggggcaggattttcactgacccagaaccagtggagtccaccgtgaggctggtggcgcgtctccgtggggagctgactcctcctccctctgccctccatgggggaagtgcctccatcctgccccagcctggatccgccgcttctccagggaaccccggttcttttcagacgcgcacctgggtactgtgtccgctcctgcctgctggggagccgctgcccacgggccctgccagagccggagagtgcacacacacgcatgcgcacatacgtgcacctaggcaggcacgcacgcacacacgcacctgcgcaggcacgcacacacgcacgcacacgcacacctgcgcaggcacgcacacacacgcacgcacacgcacacctgcgcgggcacgcacacgcacacctgcgcgggcacgcacacacacgcacacctgcgcaggcacgcacacacacgcacgcacacgcactcctgcgcgggcacgcacacacacgcacgcacacgcacacctgcgcgggcacgcacagtcatgtgcacgcacacacagccatgtgtacgcagacatgcacacaaacgcacaggttcactttctatgatgcaaacccccagtccacacccctgagtgccagcccacgggttccttcttgtccccacttctttgtgtccacaggccctgctgcacccctcagcacagggacaccccatggatgctgcctccatcaccccctcaggccctgtgcttgggggcttccctgctccattgggcccaacgcccagagcaggggctcggagaccccgctggccaccccacttggcaggacttgatggctttgggactgaattgttccaggcgggaaggggagggaagaacaggaaagaacctcagagaagagaaaaggacctgtggaggaggagggaacctgaaagcttaagcttttacccaaaagagcagccacctccaaggaggctgcttaaccccaagggaggggtgctccacccgcctgccgaccaaagagcccctcagcacccacaaggctgcctgaaggcagagaattagccttgctcccagtcccggcccctctgacatccctgcttagttttagccacacg

SEQ ID NO: 341 - DNA, 870 bp, Artificial sequence
  DNA replication origin
cgctgccgctttctcccacttcagccatgtgagtcacggaaccttagggagaactcggggccgagtgaccggccaggagtgctggccgctgagagggactgctgcagacagtgaccaggagggtcacaggccacacagtgcccgggagaaagggccctggcacagcctgccaaccacgcccctcagccctcagccctgtctcactgcaggagagcccagagctgagctgagctcacaaggcagtgtggctggccgggctggggtctgcggcacccttgggacaggcacaccctgggcaggaagatgtgagggaggctttggggcctgctaggctggcttaagggacaggaaaggggggtccaggccaaggctcaccggactccggcttgggaaggggctggccctgcctgcttgccccaggggcctggagggttggagttgggggatcaccccagtgcggcagccaggtcgggggattgtgaggactcaggggcggcaggtggggctcaggtctagagtagagaggccttggcacttggggaggcggcgcgacggccgcctggtggtgccatctgtgcaaatcctggggagaggccttcaggggacttggggctgcatgtggtgggaagggctgggcagggacatggcagggattgagctcgcatcggccaaggcaggtgacaagggctggcatatgaggcgcatttggggatgaccagggacgtctcgtcaaacctgggacatttatctgcatgtggaaggtggtggcacacagcccacccctgctaagttgtggatctgggctcagcacagcctctcagatctgccctgtgctcctcaacccaggaacctgcggcctgtgtcctcccc

SEQ ID NO: 342 - DNA, 1934 bp, Artificial sequence
  DNA replication origin
ctcagctgcgccaccagtcttatccccgtgactggcccccagcacccttcttcctttggtttggctgaagatgggatttaagtcaaaagtgagagccgcctgtgagcttccctgcctctccgcgtacctcctgagtatacacaaggcacacatatgaatacactcctgtttttctcttttcccaacagggaactgtgaggggagagagaaacttatcttcccacacgggatcagggaatcgcagggcctggcacatggagaagctgccagggtgaggctccccatacaccccacgcgccctgcccaccacgaggcctgtaccctctgggcagcaggtgccgcgcgcccccgggtaccttgtaggtggagccgtcggcgcagcgcagcaccccgtgtccctgacgccggtcccggacccagtcgccgtcgtacttgtcaccgttcctgggggacacacgcacggagtccactctcaacagggggagccgggtggtggcagtgactcagaccggctcctcccaccgggctccgcaggcactgcgggaccgaggcaaaaataggcccgagcagatggccccaagagctcctgcctcgccagggccagctgggggccgacgacaggcggtggggacacgtccgcccacccccaccctagatggtaggcctgctcgggacgcactcagcttccgctactcaaaatgggaaatgacccaggagaggcaacgggagggggctgcagtctccacagccagtgaggctgagactccgccgtgggaatttccacacgggctgaagatgcctagcacttgggaggcggaggcgggaggctctgctggccggagagcacccccatcctcatttagacctggagacgctcctgtggtgccactttgccgccagcctgacgttctcaggaggtattttaatcgggggggggggggatgttttatctaaacacacaattggtcaatttcaataaacaaggggaaaattacagaataacaccgaaaccacagaatgtggttcaacaacttggcactgggggggtggcgggtagacagcaggggccggaacaggcccggggtgtcccatggcagtcctgtctacacccccaggccacatggcctcacacctgccctgtgtatctgtcatgcgccaggcagtacccacaagactcatactcactgaaagagcatctgcccagggccgtgcctcttgttgtcatggaaggagccctggtacacttgtccatcccggtccaccagaaacccgtgtcctggagaagggaccgagagacagacttggctttgtgcctcctcctgcatctgagaagggatctgccctccgctccttggagggcgggcaggagcaaagtagcaagtctaggaggcatggggctcagggccccccaggaacatgacagaccctccagacctggctacacagaggcctcagcacggctcggtgaggctctgaacgggaagggcagatgtgctttgggacaggtcggtgagctgacagggcagcaaaaatggccctggggtccagttctgaaaggtgcggttgaggggccctgcggactgccatctgaggctgcacaggctctgcgtgctgctggggtgaggatgggtgcagtttgggcctgtcgtttgttttcacaagaaacttcaagttcacagtgaggagggcagggcttgacctgaacgaggagaaactcaaaagaggatgggggttcgtaaactgcggcattttcagattttggacaactcagaaatttgagagtatttctgcttcttttgttttttttgttgtcgttgctttgcttttgagacggagtcccgctctgtcaccaggctggagtgcagtggcacgatctcggctcactacaacctctgcctcctgggttcaagtgattctcttgcctcagcctcctg

SEQ ID NO: 343 - DNA, 1469 bp, Artificial sequence
  DNA replication origin
agccagttttcagtctggaaaagacaaatgaactcaacctctagggagaatttcaaagtcgcagcttcctttgctaaaggtggccctccaggggggtctcccaggcctctgtttcccctgcccatccagccttaccctgagcagccagggaagcaccagggtacaatgggctcgaaagctacaggaaatgccacttgcccacccaacctcccggggagaaactggtttcgtcagctgtggggcagcagctgcaagaagagaccacagatgcttctcaccgtgcttcctccctgctttccattctccttcatatcgaaagaaggaatttgggtatacgtagacaccataacctgagtattgagaagacacacacaggtaagcacagacacagagatgagggatgctctccagtgctgaaggagggagtgcagctcccttgagggccttcaaggggttggtacacgtcaccttcagcagaccagaggcgacctgtggggctcatgagctctcctgtcgactgttgggccattcatttgctcatttgtttatgtgacaaggatgaggacctacttggtgcagagaagacaggcccagtaagaggagggctggcttgaaacaactgcaggtccttgagagaccagaggtgctcgggaggtggtgaggagcaggttgggagccttgttgcaggagatgagtgagccaggggaaggcagagcggcagtgtcagtgaggcacacaggggaggagcagactctcccatcccctgccgtggcccttcagtggcctcctatcgctggggagaaaatccacactcatacccaaggatggcctggccggcttcatctcctcctagttgctgggtgtgccacccgccaactcctgcagttccaggaatgggcagggctccctccctaccagctcctcaggcacattttgtgggcagggtttatgggaaaatgtcggggaggagggcagggggttactacaggctactgtatctgtcccaaatcagggtcaggttctacctgaagatagtagtgttagctctgagttcattccagacccgtttatttgattctagaaacagttcctatcaaaacctgctcttttttttttttttgagactgagtcttgctctgtcgcccaggctggggtgcagcggcgcgatctcggctctctgcaacctccgcttcctgggttcaagcgattctcctgcctcagcctcccgagtagctggaactacaggaggcaccaccccgggccaatttttgtattttttagtagagaccgggtttcgccatgttggccacactggtctcgaactcctgacctcaggtgatccacccgcctcggcctcccaaagtgctggaagtacaggcaaaaactgcttttgaaacgcgtcctagcgtttctggacagcaccggccaggaagtcaggaggcttggtgctgctcctgcgcctgccctcg

SEQ ID NO: 344 - DNA, 1757 bp, Artificial sequence
  DNA replication origin
cgccgggaggcccgcccgccaacggcctgcgcgtctgcgccggaagcggaaatggttggagcccttggccccgccctcgcgccatcttgggggccctggaggcggcgccgcggaggacggagcggaagtgctcgctgcagcttcccggagccggagcgcagcgcctgcggccgcccgtgccccgccgtcctccttcccgcggccgtgagggagaccgcggctcggccgtagcggagctgcgaggtgccaggaagggctgcgtggcgcgggaacggccgggcagcgccgcctccgcttcttccgggctgtcaaggccgcgggcgggcggggccgcgctgagggccgggcggggagggccgtcggggcccgggtggccgcggggaccgtgttcccgacccgcggccctgaggggtacgggtcgcgcctcggggtcgggcccgggacggggtgctggggggtgcggcggagccctggggcctgcgagggtcgggggagcgggagaggggccgggcgggggctgcagccctcgagccacccgggccgcatctcgtccgcatcccctgcttggcatctgggggaagcgggcagtcgcggcccccacagcgctgcgagttgggctgtattccagagtaatgtgccctgtccccatcctgcgtccaggtcagcgcttatctgtaggatttagtgttaagctctggggtgaaggcgttactgacgggctgaagggaaactagttacatcggttttgatcgtattctaaataggcaataaaatcataaattctccaggctgacttagtactggtctgtggccccactgataaaggtatcgttcgtttctctgccaggtgtctcacagcacagagggctgctttcagcctaagtaccttcagtgggcttttgcccttttccctttatgaagagtagagactggccgctagtcctggaagcactttatttttagttgagttgacatttcccaggaagatgcagttatccccgtaagtggataaagggttctcagtaattcagactctcacatggcttctgccgtatgcctgaggtgacggcgacggcggtaacagtgtgtcagagccaggtggagatataagatggtcaggcccagaggagcggggagcccaggctggaatgtggccttgggaaggaggaagagacggggtctgggagggcatttcagaggactgaacaacaccagaggcgtgaagcttggtgcacggcagccgggggctttcttagtcccggaggaattggggatggggacgtgaagagaaaggtgggagccagactgtcaatgctcccggacgccaggcagaggacttcatcctttccacgtgcagagtgatggaccacagatgtggatgaatgtgacgggcctggaacaaggcacatagagagtcttacactttctggcacgtcctcatggtctctgcttggactggttttatctccctttctgttttgtttgtgaccaggcataaagcagtcaccttcaacaggtaattgatgggctgtctactatgtaatggacttccaggtggcagggcccagccccgaaccagacaagggacccctcaaggagcttcattctagcaggagaaaattgagaagtaaaccagaaaggtatcaggaaacagttgtacacaaaataaaaatagggtgatgtgatgtaagggactgggggtcagtgtgggcggtaacggaggcctgtgaagaggaggtgggcttcaaactgagcag

SEQ ID NO: 345 - DNA, 1263 bp, Artificial sequence
  DNA replication origin
gtggcttccagggcccctgatctttctgtaccacactccatctgcggctgcaaagtcaaggcgtggagccccacgagctcagcaggctccttcagtttactgatctaacagacttgggttcctcctgtgctcccagagtggggtatgagggacaagacaaacggatgcacacgctcccgtccctctgacggctgcaccacccacctctgcctacccgtgcagacacggacacctcggctcaaacccctctcaaaaatgactccaggagaaggctagtccctctgccagccaaaaggagccacaaggctggggatgggagagaggaaggaggaaggagggaggaggagggaggaggagggaggaggagggaggaaggagggaggaggagggaggaaggagggagaaggagggaggaggaggcaggaaggagggaggaggcggcaggaaggagggaggaaggaggagggaggagggagggtggaggagggaggaaggagggaggaaggagggaggaagggaggaggagggaggaggagggaggacagagggcctgccctccccaggccacaaccacagaagccggtgcgcactccatcccagactcaacctccagggcactggtgctgacttgaaaccaagagaatgcggcaaggtagtgagtggccttctacagagagcccctgcgattccccgtgcccagcccagcacagcagtcatctttcaggtgacttgaacaaaaatcagtgtagtctcagtctcagccacccttgagcacaattctcttcaaataccgtgaagaattagctcaccaaaatttaaactctgggagccttcgaatgaaggggcggaattcctcgttctgtttggtgggtagcgaaggaccgtcatctgtaaggcagagcaaccatcagggagggcacctcttttcattcccatcacagttctaccttttcccctcaaggctttggactagcaggcctcacaaatctaaaccgagattcatgtcatttaaccagagaaaacgagaaaacgggggtctgtggtcaactgacacatccaattcactgctttcagaaggtgctatcagaatgtttttagacttccacacgttttcaatgcacgaagaattcaaccacatataaacatccaggaacacgtcagctgcaccacgtaaaggcacagaagaaaacaaaggcaaattaacataaaaagcaagcggcagagaacagggcggggccgaggatgcgctgaccgtggaacccg

SEQ ID NO: 346 - DNA, 1580 bp, Artificial sequence
  DNA replication origin
aggactgagggcagccacacacaccaagtctggggacggtggccagggggctgccaggcagtgtgagaagctcctggagctggcccgggtgaggttgcttcagggaagtgcaggaggtactgctccgagggaggcgaggcatctgctcccagcagggagccgacttttccagcctttgtgtgtccctggggttctttgtttaagactttaccccgggtgccactgagacccatttctcagtggccagccctggtggcaccagtgagtcacagtgctgagccatgtcatagggtgcagtgcccgtgtgacagtgccctggtggagcagtggtgggtctgtggcccaggctggtcaccaccctttagagggagttgttgacagaagctctcaggctcccaaccccagctcagcatgtagcaaggaccaccgagtgccagcctggttccctacgaggggctcgccccgggcatcctgccgccatggagagtgtgctcggtgggcgggagacagatgtggctgcgtcacagagcatcttgggaagtgaggggctctcagagataaagaccacgtcttagggaagagcattttccagaccggcagagcaagcagccgggaaaggccctgagaagaacacgtccttggcggtttgggagaatgaccccggggggctcgtgagttttgtaagcccatagctttccctgtgcgaggcttggggcattccagggacgtgggcaggggagaggccgaccactagctaagaccagacctcaggggacaaagttgggctcagggagactacagaggctgtgacagtcccccacaggatggtggtggtacagagcaggggcggcagcgagggggtggaacacacagggaaggtgcatgcagggtgccccttgggcttgacctcaggaaccggaggcctggcgttgccatccacagagatggaaacggggagcaggcttttctgggtgggggcgctgaaagctgtctcggcaggggtggaattggggtgctcatctgagcatacatggcgatgtcaggtaggtggcggacctgcatggctggcactcacaagtaaggtccaggctgggcataaatcgggtggtgccagctgtgtggttggtggagagccatgggactggatccgagtgcttgggctgggggaggtggcggggacagctagggagaaaggggaaagagcagagactcttggggagaagccaagagagggagggacactggccagccaaggccctgggagccaagggcagccattggccgggcctgtcatgtgctgcctgagctcacagtgggcttagcgacagaaggtcatgttggcctcagccagcacggggtgacagtgggctcaagggcgacaagatggggctgttgacaggagccagcagagggtcggctggcaggggcgccgggagcctgtccccgcggcagcagtctcagggtccacatacccatcctcttcctcgcaggctaccagaccctgggggaggagtacgtcagcatcatccaggtggacccatcgcggatacatgtgccctcctcgctgcgccgtggcgtgc

SEQ ID NO: 347 - DNA, 1390 bp, Artificial sequence
  DNA replication origin
acaacctgggacccggcagtctccttcgcctgccctgcggccattcagggatgtgcggggcacctcctgccctccctggccaggtggccccagaggcacaggccgcagacaccgcgggggacctgcgtgggcctccagttcccgcccaagcccttcccgtccccagctcagggcaggtccagctgacgccagcggctggggaagactctgtcccctccaggtgtgaggccttggcaagtgcttcaagcctccctccgatcctcccctgtgagcagaggggtcagagcgcccgcggcgcgaacgcctcatacctcggtccggttcacactgaccccggcctttcctaggcctgagcagcagcccaggcccctcgccctgctgaccccagtgtaggctcagccaggccctgcctgcctcaccaggccgggagctgagtacagaagccagtgtactcaatgaagcagcacctgtcatcccagcagtttgggaggcagaggcgggaggatcgcttgagcccaggagtttgaaaccagcctgggcaacatggcaagaccccgtctctacaaaaaatctgaaaattagccggacgtggtggcggcgtctgtaatcccagctcttcaggaggctgaggcaagagaatcgcctgagcccgagggatgaggctgcagtgagccatgattgtgccgctgcactccagcctgggcgacggggccagaccccatcaccgattaaaaaacgaaaaaaaaaagatgccgggtgtggtggctcacgcctgtaatcccagcactttgggaggccgaggcgggtggatcacttgaggtcaggagttcgagaccagtctacacaacatggtgaaaccccgtctctactaaaaatacaaaaatcagcagggcgtggtggcgcgtgcgtgtaatcccagctacttgggaggctgagacagaatcacttgaacccgggaggcggaggttgcagtaagccaagatcgtgccactgcactccagtctgggcaacagagtgagactccatctcaaaaaaaaaaaaaaaaaaaaaaaggcaaagccatcaagtctttggggggtggggcaggcagtcgttaaaggcatgaactcccagcagaacgtttcagggagcagtggcactagagcccagtggtgggggtgtcgtggccaaaggaacagtgccatgggacaggaagagcatgggtaaatatcagaggacagccaggctccgtgccgggaggcccatgggtgtcaggtgggcagccattggtggattctgaacaggagagtgacatgatgagaattttttgtgtgtgtacttacttgttttacagtacacttggcacttacccctgtgccagacactgttcccagtgttttacaaatattga

SEQ ID NO: 348 - DNA, 1209 bp, Artificial sequence
  DNA replication origin
gggtgctaagcggcaaacgccccctcccctggcaggacccccatgccccaccccagaaccctggaaccaaccagagctcccaggttgcctggtcagccaggaaggacatggagacctgactcccgccccacctccctgagaccccctccaggcgcttccttccctccgctgtttcgggcagatggtcgctccacttcgccagtggttctgatctagattcgattccctttggggcaaaactcaccgcctaatcccctataactctaccggggagcccggtggagagcagacgggctgacgctgccacctgccggccatcccaggataggaccgccgtattcaagtcgccctcaggaaggaccctcggggcaccagaggccttcgaagccccaatgagtgaggcaactgagggtcgcgggtgccattacaaggcccagccaaggcctagagccaaggcttgaaccgtgggggacccccaagccccacctgcccaggaacagcagacactgggacactttgtttcaggtcctgcccaggcccctcccactgtgaggctgggatttgtcgcccagggtgcagatgagaagagtggggaaagcagtcctgagccaggacagcggtgggggatgcctcctagagcaggccctcccgtcaggggcccatcatagaacccagtgtgaatccaaaggagccgaagcctcctcctcagaatcagacgtggagccatgaacccaggggccagagcggcatctcaaactgttatctaagcattgaccagaacacatgatcacctcagcggctccacgtgggcgatgccgggttgcctggtccacggatgaggggttcagcccaaggtgctcaacccaatcagagggcagcctctgtgtccaggagacacgggtgcacccgcggggtcagaactccaaaggggcgcgggggcgctgggaggtttggtagccagagggcctgcggggcggggccacccaggccatgccccttccctgtaagaggggccattcctgcagtgtggggctctggctttgtgactgggctgtgccagtctggggatgatcccacagctgagctcctgtagatggaaccagaggtgaggcaaggaactggaggccctccccactgaggtcagcggggcgcagacgcccccttgtcgtgccctgccttcctcctgcaatcctgcaggactctccaggg

SEQ ID NO: 349 - DNA, 1234 bp, Artificial sequence
  DNA replication origin
ctgcctggcacccagcggtcgctcaggaccccgaggagggcagggtgggcccaggagctggacgcagcaggtcggggtccctgggtgggcaaagtgggcgctggtgctgcttgaggggagtggctcctgcccagcatggcagttctggcttcaggggtgtggcagtgtcccctcccttctctttagctatacatgggtttggggattgaggaagggccacccacaagctggccccgagtacagggactgtagggtgcggccctcgggaagcccctcgcagtgccagccacaaaccaggagaacgggttcgtctgcctggctggaggccctgggagccgcactccacccgtctgtggcagacccaggacctggaggtacctgcagagtgtgagctggggagggtgggcagcgggcggcactgggcccagggaggggaagtgagccctgggtgggcacagtcaggcagaggccccagagccaagatggggagggcggggcccggcagccagaggcaggaagtgctggtggatgaaggcctcctggagcctccgtgggaaacagtgcctgggccagggtttagcaggtgaggttaggacaggggtgcagagtgcagagggttggtgtgggcatgggctggcctgggaagtgatgttgggtgattttggggctcgggcaggtggtccggggctctgcctgtgtccctgtgttggccggggaccagcaggaatgaattcctggcagaactgtgggtctgacagcagagccagcctgggggggccctggggctctggggctctgggctgctcttaggaccttgagggagctaggacaggaaagagaaatggggaggggtctgtggagagaggggcatgggcctgtggcagagttgagaaactgatggccagagaggccatgcctggtccaaggcaggcacaaggtgaatcccaggtcagtttgcccatacctgtgtcccagtctctacctgtcgctgggattggggaggggtgctgggcaccatgacctcgctgataggaaatgaggggtcctggtgtgcagctgtcatctggggtgaaccggctgataactaggggctggaaaccaagggtcccccaaaaaggagatctgggaggacttcctggaggaagagactttgcactggtaagagtgagggagggctctgtccatgtgagaggcatggccttttctgacaagtggaggctgggattgttgggtt

SEQ ID NO: 350 - DNA, 1184 bp, Artificial sequence
  DNA replication origin
acctctcgaaggaggtggaagctttcagacctgcacctgggaagctttgtcctgaaatcacagggcagggggctgaaagtggaatcgagcagcgggaggaaggacaagaggtaggtgctgcctggatgccccccagacactggctcctttgggatccaagtcttggggaggagttggggtcagctgagagggatgtgaggtaggggctggggcggggggcctgtctgagtccttaactcagcactgatgagctcctgaccaatgaccagagatggcggggagtggggaggcaggttactgttgctgtgcctgcccccacccccatagctgtacccaggctactggggaggcagcacaggagggggtagtggggggagcgcacaaaggggttgcctgggggtgggggggggacttggcctgctatgcttgaactttgagttggcaagagccgactacgggcagcaggtgcagcagttccgaggcagaaagggcctggctggccccagcccagggctggcttgagggtcccagtccagcttctacggacagcttcagattaatcccccaaggatgaatatggtggagcccacaggaagaaggatgagcggcccccaagtctccagagccccatgtcaccacctccaccagagccagcagcgcctcctcaaagctggcccccgggtctgtggatgccagggtcaggcacggggatccctgcattgagctccgggcaagaagagccagtgaggtggtggggtggtagatctggagagccccgggcccctgcctgctccccttccgccctcaccggcctcacatccccaggggagaccctgcaccccactgccatgggaggcgcctctgtcaacaacaagtggaaaacccccccgaccaacggccgaggcccgggcctcagagtgtggaccagctccgcacaggcgccccttcgatcccctctggacaattattgtctcttcacaatcagtgggaaactcaaggaccagcaaataggacctccagggccaaccaggaatggcacggctgagccaggggtgctgagggaaggggctggcaggggatagatggatttacggatggatagacagacagcagcacagcccaaggcctccactgtggattgaagctcgaccgtgcagaccaggccggcagcctgggaggggaca

SEQ ID NO: 351 - DNA, 1203 bp, Artificial sequence
  DNA replication origin
catgccagtgagcctatggctgggcctctgccactctgccaggggccactggctgcccacagtcctccccactctcccagcccaaggcccctctgtgaggccctgctcccacccctggacttagcggatgcagggaacacagacctaaggccccggagaagccacaggccccagcaagctcagccgctgcccccaagctggtggggttgctggagcccgcctggctacgcccacctgctggcctggccgcacagggagacaaagaacccagcagccccgaccccacaaccgtgtcaggaagtgcgaggctgaggccaggcccctccatgctcacagcgggcaggaatgccagcctgcacatctgcgctcaggggccagcttcatggagggagtggagcccgcccagctcgccggcactctggagacagagggaggggtgtttgacaagggaagggaagaccgcgaggggccagccctaggtcagcgtgggagcactgggccgagctcgtgtgtgtaggccggggactccgccactctgacccggagggaaaggcccccaggaccccatggggactcaggaggctgctcacggcagccccgaaccagggactttgggaggccatggggtgggggacaccccggagccccactcagtgttagaagcaagaaggggaagcttagtgccaggtggagaaagtaaagatcagaacggggtgcttggccaaacacggggccatagacactgctccccagagtgtggcccacataaccctggggtcctcagaatcttccaggagcctgcaaggtctaagctgtttttatgtaaaggaggtgtcccttccccgcgctgacatctgcacagatggtgaaaggctctgatgggtgacaccctgggcctcggctcagatacagtgtccttcaccagtgcgtgctcagaattaaagcagagaagaggccatttccctaagaaggtctttgttgaaacagcacaaatgatgaactgtaccaaagctcagttccgtgcagggagccagggagaacagaaagctgccgcagcaaagggcgttttcctgggaggaggctctcgagcgacggggactccagctgaattagccgggggacccacagtatagtggggagcaggactttcctggaaagacagctgagacactgtggtgctgccggccgtgtgctgcataggta

SEQ ID NO: 352 - DNA, 1303 bp, Artificial sequence
  DNA replication origin
gtgggagcagggcctcacagaggggccttgggctgggagagtggggaggactgtgggcagccagtggcccctggcagagtggcagaggcccagccataggctcactggcatggggcctggtctgcctcctatgcccaggacgtcttggccgggggtctccatacctgggacccacgttcagcctggagacggaagtcagggtagcagggaagtagcaggaggtggcctctgtgtgacagcgggtgccggcggctaggggcccaccgggtggagctcctgggggcgttgaggagctgggcagtgggctgcagtggggcgccctggggccaggagggcagctggggcaggcaggctgtcccctcaccctctgggtctctcgtgggggcccggggccgcaggtctgggacgagtcaggtgctgggggcagccgaacccgccccagctcagccgcccctgctggtggtttctccgggatagggtcctgccctctctgggcctcaatctctccctcctgagagtggactctcttgtgggctgggtggccagtggggcctcaggccaggagggagagggagcccctctgtgacatctttcctggagaggctgaggctcccacttctacctgccctcagggggcttcctgagccaggggataccagccaagggtgtggcaccccacttcctgggcactgccgcagaaggtgggagggaggatgggaggatgtcagaggagcaggccggggcttgtgggggcctccggtacctctgctgggagctcgcgatccaagggacacagcgtgaggggccaccgcaggtattgaaacagaagcagccggcgagccctccagaagtgggagccctccagaagtgggagccctccgggggtgggagccctccaggggtgggagccggcttggactcgctggccctgagcaggtacctgggctctccctgtgggtgagagcagtgggcgggcaggctgggaacttagggctgtaggacctgctgagtgggtgacacttcatcctccgggggcttcgagggcagaggtccctgcctagaggaagatctgctggtctgtgtgtggtcgttgcaccctgggcactcggcccggagctgggcctgggcctgggctgtgcttcctgattcaatggggacagggtccaggggacctctccaccctgtccccagcatggcccggtccagcctggccccgagtgacgttgtcagtgagagttgcccaaggcagcaggtccagggtctgagcagaggctgaaggcctggcaccggcaatgtccccttc

SEQ ID NO: 353 - DNA, 1356 bp, Artificial sequence
  DNA replication origin
gaccacggtggctctcagggcaggactgggtgggcaagcgtggactgcatctgtcctgcatggggtcctgcgtctggctcgcccggtgccgtgctgtggggcccacgccaacggctgacctcatggtcctccgtggcctcgcctaggcttgcggcagccgacgtggcgttgttgcctaattaggttggactgtgccagccccagcggagcccacgcccggcccttgcgccggcagacgtgtcggggcacggctcctgcactcccactgccgcaggaactgctcaggaacctgccggtctccggctgggacggtggctggatcagctcaagcctccagggccctgaggctgaggggctgagtgctcattccagccgcctcggggaacccgggctgggagaccccatgcctgggggtgagcctggagccagggcagtgcggtgagaggctccggagagagggctgggcaccaccaggcttgggtgaggagggaggcctctggtcgagagcgagctgggagtcctgggggccccggggtgggtggtggcccaatgccctctccctgccatcttctggggccagggctgccagaggtgccgggccagccaagtctaggtctgtgccgattggagggggtgggtgaggctggagggccagggcctggggtgtgcagggtgaggggacaggtggccaaggggccctccttcctggggattgggtgcgaggagggaggcgaggtcaagggtgggggtcctacctgccagggctccttctagggccctggggagagagacatgccgacaggagcctgcccctcccagccctggctgttcttcccacctggcagagcatggctctgtgtgtttgagggcccaggactcctgatgtccatctgtgctgggcaggctgggaagaatccaggcctaatggccaaggcctccacctggcccctgttaatcccctccccagggagggcactcacctccctgaggggcaggcaccaaggaaaaggtggccagaaaggctctgaaaggagctggcctgagagtgaggagttggcgggtgatgtggtggaaaggcgggttctgggcagggaggctgagcagaggctggtgggacggaacccctgggccaggacgaggaggctgtttggagcctggggccccttcttgggagcagtgagaattaggggtttggagctcagccaagcggggctgcccttggcagacattaccagggagaccaaaggggccttgattcactgcatgggctgcgtgcgtggtgaccaaaagggcttgagaccctggcctcaggagtgacactggtgagaccacagggctggagaaaggagaaagggc

SEQ ID NO: 354 - DNA, 901 bp, Artificial sequence
  DNA replication origin
cactggggccagccccctgccctgctggcccctcatggctgacagcacaccccgtcccctgtgcaatttgccttaccccagttcttgtgtatccgtggtaacgggctttcatttagagcagcttgatccagctcctggggctaacgggtgggggagaatgcaaatgactgctgggcacgtggccgggcccatggcacaggctggggtgtgcacccggcccccacactcagcgccctgggcccgggggcccctgctgggcatgatgagggtctgagctgcccagacagtgcactctccaggctctgggagccttcactcctgatccctgagcctctcagtgcctggggccggatgccagaggtggagggtcagagcccgccgtgcaggcttgcctggacggacaccgccgccctcccacagcagggagggtccccaactcccccgtccggaggggctgtcacaggagctgcccctgggaggcgcctggaggtctttcccgtccgtcaggtggggaggggtctgtggcagtgctcccttctcttcccggtgcacacacgggctgggtggaagaacctgggcaccctgcctgcctgttacccaccagtgcccatggctgagcttcaagtgcccaccctttgccccctcccatccctgaggttggggccgtgtttccctctgggaggatcgaacagcttggatgtggggccccactgaactcagaggtgggagccttcttcaggctgccccctaatactgagccagcaaaggtaaatgggggtcctccttccactcttccccttccagattggctcccggcccccgctgtgtacgtgctcaggtgtccggggaggaccagtgtgctgtggtgtgggtggtggtgctgggagcagaggcaggcagg

SEQ ID NO: 355 - DNA, 1313 bp, Artificial sequence
  DNA replication origin
tggacctcctgctgacctgggctgaccctgggcccctcggcctcacagtcatgccccaggggtgccaaggggcagagactggtgggacccagggacactgggccctgccctttcttcttaccccacgccagccgggcccagtgcacacttccttgtaaaccaactgtcgcctgcacagggccgggcgccagcacacaccgtctgccgagcgccgttcatctccgcgcttgctcatttccacggctgccaacaggcacgctctgagcatccccagggctctgagccaggtggctgggagcgcagtgtgaccctgccctgggggaggcctcagcccagggacctgcaaagccagcacacaaccaagttgccaagaactttactaatgctgaggcagtaggtgccaggcgggcctggagggaccttggcggatgctcagttggggtggggtggcagaggcaggcaagggccagatcgtggaaggccttcgaggccaaagaggaggcggtgagaggcgagttctggaagaccactgagatggacggccacgtgcgtgggtgcatgtactgtgtgtgcacgtgtgtggtttgggtgcatgtgaacatgtgttgtatgtacacatgtgtttccctatgtgtgtgggggtgggtatacatatgtgtgtgcacgtatgtgtgtggtatgcacacgtgtatgtgcatgtctgcacaaatgtgtgtgccttcgtgtgtgcgtgtgcatgtgtgtattgcctgtccctagagagagaggcagggagcaggcgatctggctatggcccctgcttagccaggtatgacttgagggtggttctgaaggggtggaggctgcaggggtggagcaaagagtgggacatgggacaggagagaaacccccaggctgagtcggatggtgggcgggagggtgttcccaggatctgggccccctagttgcggtgggtgctatttgcccagcagggaggcctggagtcagggtctgaggttgagtcctcagggatgatgaatttgagatttgggcagagctgtccagctggccagaggaggtctaagtcagtcttggacaggagtaggagctgggcactgcatggagcaaccctagagaatgtgggggcctctggaacaggagtccgtgctcagagaagaggggctcgcagcccaccaaggcaccgaaattggcagagtgaccccgggccataacccaagcctgctccctcccagccaagccctccatgacccggggacctgctgtggccttgctgctccctcacctgcccactgggccccagggcaacactgagc

SEQ ID NO: 356 - DNA, 887 bp, Artificial sequence
  DNA replication origin
gttcatgggaagccaagccaggggcagctgatcccatcccacccgttcgttgtcttgagttctgattgagaacgggacgtcttcagaccagatgctggtggaaaatgaaacacacactttctaaatttagctgctgaggattgcacgtttacccgattaagcccattgattgagttgcgtgcacgtgctctctctgcagtgctcagctgtgcctctccgggctgtctgtcctccatggtgacctcaggctgcagaagggcctctgagacctcccgcccaggtctctggccctgagccatctgttcacctggggctgacactgccaccctcgggggagagtcccggggtccgtggggagagcccgtcagagtccagctggattcttctccactgaggaaaggcattgcctgagagacaccgcagccaggcctggctggagtgttcgagggcagcgggcacgcggctccctgcctgcagggacctcatgatcttaatgtgaagggcagactcaaaatcagggcaaggtcatgtccgggacactgcgggggacaaggcaaccagggaggcttcccagaggaggtgcctcgttcctgaccttggaaaccaggcaggggtgggcagggggcctgtggagaagggggagtcaggcttggtggagtgtctatgagggaagggcaaacagggtagagaaggcagctgcagccagtccacagggccctgggtgccaggctgaggggtccgatgtagcctgtggtccagctgcaggggtgggtgtattggagtgaggcctgcaggccagatggggtctgtgggtatggcccaggaagtggcccatctgggagcgcccgggaaggaagactggctgggagggctggagctggggagga

SEQ ID NO: 357 - DNA, 1503 bp, Artificial sequence
  DNA replication origin
ggagccagcaccccgggagaggaagccagggtggagtctgggagtcccgtgggccagtgtggccaagggagccaggaactagcctttccttggaggagaagccctggagctgccgcagggttcactgggggaggagcggctctctttgccttccatccacagcccgcattaaggcagccacacctcagggcgcagggctctgtcagcccctcagggtagtgatgacagaggcttcactgcaggctcatggtcctgggcagaggctgctagagcccgcccagcctcagccagatgaaacatccgggaacacacacccggcacagagtctccagggctgtgtggagatggcactgcctggtgctcctggaaagcagaaagcctcgggagcggagctggccctgcaggcggcaggacgtagcctctccgcggtgagctttgcaccaggaggaatcctgaccatgccccaggctctggggcacagccaagcaatagactgcttgggggagtcagaaacctcctgggcttcagcaatcaggaaagaaccatagacaccagcaggtctattcctggggaaactgaggtctggaggggagactgaggcctctcgtgaatctgtggggagccaggacatgcacctgtgtcttctgtctcctcttcagccactacgccagggccagatggtgggcagggtctgctttggagagcaaaatagaaactccggcaacactggtcctgagtgacacgctcccacgcacccctaccccacccctggcctcctccctggctcccagcttggtgcccatctcgggcctcatctcagactcagcctttcctctccctggcaggcagagctgacgggcccagggatgtgtgtgtccttagtggcctgtgcccctttctcagctctggcgaggaccccctctcagtctgaaccactcatattagacccaaagaacaaagtccagggacccttgggtgcagaagcagcatggtgtgggtgcacggggctgccctagggtgaacgctgtggcttccctctaaggctggaggctggccttgtgggtaagctgggggctctgagtgcaggagcccttcttgttccagagtctgccaggagggtctgttgggaaagttctgcctcttggctctgtggccaaggcagacctgggggagctgaggcctctctggacacaggccagagctgggcagtctctcttgacttgtctcccgcctcctccttcatggctgcctgcagcagagcggggaaccgacgaagtgcctggaaacagagaagcctggtgggcagggagggtccccagggtctagggcctgtctctgtggctgctttgggcctccagggtctggaacagtggaagagttgactggtgtggggctagggacctgcccaggggaatggtcatcctggttctccctgggggcacaggaggcagcaccaagctccctccccccagaggtgggtgggctggccgcccgatgggagct

SEQ ID NO: 358 - DNA, 1953 bp, Artificial sequence
  DNA replication origin
cacctgttctgtgcgtcgcgctcgcccggttgcgcccgatctgcctccagcccggtgcccgccgcggagcccgcgcccccggccccctcccggcgcggggcgggcagggggtgtggtgcgggcggcacgagtgacagcgcgctcctcgcgcggcgcctccacggggcgcagtgtcaccgcgcacagcccgccgcgggccgcccgagctggcggggcgatgccgcgggagccggagccccagcccgagcccgagcccggccgctgactgcgcctcccggcccgcagcccccgcccccgccgccctcgctgccctcgctgcagccgccacggagacaatggacgcgggagccgccccgcagaagcacagtaggtgccgctcctgccgctgcgccgctgccaaccgggatgcgcgggtggacgcgcgggggcgccgcagccctggtgcgggtcggggctgagccgcctgggcttcagactcgggagcggaggctcggatcgcggtggcacgggcaggggtgcgggcgcgggactgtgggcgggacgggcggagcggtcttgagctctccggatggcctcaggtgcggggtgagggatctgggggccgcccctcggcaaactttccttccccgggcttctgcggaggtcgcactggggctgtgaccgtgctgagaatgacccctgctgagcccaggccgggcaccccgatccctgccggatggtgccgcagggcaccctgtgtgggtccgggaggtgctgcgtggacttgccgcatggcacatctgcctgggctgcaggtgctcatctggggggagccggcctctccccacactagcaggtggggtgcagcgggcactgcccgggcaggcgggagctccggaggccctggggcggccctgctggatggtctgtaggacacgggagggggaagtgtttgagtgtccactgctgaggggtctcctgggctctggacctgccggcagagctacagggtattctttagggagatgggctctgctggagctggtggaggaagatgccaaggagataagaggcttcccctcccctccgctccccgcctcccacactgtctggtgacactggaggcagccaaggtggccactgatccccactgtgaccactgagaccactggaactgcccttcccccatggccttctccctccaggagaatggacccgatcggtgtccccttcgtcccctgacacgttggtctggggaggcggggtcacggtgccccaacacccctgacttggggagcccatggtgtctgcctgcctgggtgtctgatcctagagactccttcagcgaggtgcagcctcagaggggattcaggcaccatgggaggccggggaggggcaagtcagagggcggaggccactgtcctatctcctgcttggttggtggggacagaagccagcctgttggtctcccctaggaccctgggctgatgggagaagtcgtctctaaattggcccccactatgttccctctgcacttaagccagggccacattctccgcactgccctaggggagggtctggggtctggaaaggatgagggaggcaggtgtgcactgggcaagtgggtgcctgtggctgtgctgagggtccccacaggccccttccctgaggctgaacgcctgatggccctgccctctgggaggtgagagagctgagcctgcagcctcgtctggacgaggcagggagggagactggcgcctgcttggcatgtccccagggaaaccagggcagtgagagaagaggctggaacaggcctgggcagtggtcggggaactggtgggagtgtctgctggacagtgtgtagaagactcggggctcggggcttggtctggtggccttggcctcagatccctgagcatgaggctggggtcaggcctgatgtccagcctctggcagagctggctgtgggtgggg

SEQ ID NO: 359 - DNA, 878 bp, Artificial sequence
  DNA replication origin
cattctccgcactgccctaggggagggtctggggtctggaaaggatgagggaggcaggtgtgcactgggcaagtgggtgcctgtggctgtgctgagggtccccacaggccccttccctgaggctgaacgcctgatggccctgccctctgggaggtgagagagctgagcctgcagcctcgtctggacgaggcagggagggagactggcgcctgcttggcatgtccccagggaaaccagggcagtgagagaagaggctggaacaggcctgggcagtggtcggggaactggtgggagtgtctgctggacagtgtgtagaagactcggggctcggggcttggtctggtggccttggcctcagatccctgagcatgaggctggggtcaggcctgatgtccagcctctggcagagctggctgtgggtggggaacagctgggggtacgggggagggtggggacaggttggcagcggcccctcctgtgggtgaccaggtagggaccctgcccagaggggggaggcagaggagctggtgggcaggagagaccccctacagaccctcctaggtggtggtgggggcctggcagcccggttcccgaggccctcactgctgctgctggagttcaggtgacataatctgcacggcacacacggattgccgtaagccgcagcagccaggtctgacaatacgagttgtaattggattttaatttttaatgtccacaacacatgaagagcttcggaccaatttgtgtatcttctgttactctgcgcctaataggaccgcttcattagctgctgtcgcacccacagtgccgtctgtccgggaacggagggagcctggcccgagccccatgccagagccccaagagctgcctgccac

SEQ ID NO: 360 - DNA, 1402 bp, Artificial sequence
  DNA replication origin
ggccgagtgccctgccaaagtcccgcagccagggagggacggaaagacctcaggccttgccgcagagcacatgcatcctcagggaatacatcctctgtattccccggttcccggtcggctggtccccggtgggctgagggaaagaccccaaagactcagagagcagctgccccgaagtgggcagaccgggccacatcagggaggagtgaggccaggttaccaccgctgaagctccagtcaggcgtctccctgggcccaacctgagagatcaagctggggacatttcagcaacttgcccccacccccaagcctttcctgccttccagtctctccagggtcagcagctcagtcacagtcaagggtcacagtggagctccgggtcagcggcccctccctggagctgcaggccctcaacacggggcctcccctggtggaatctccacccactatgcatgtccctccttgctccccagtgggagggcaccctgggagcacagcagaacctgggggaggggagggggagccctgagaaggctggcttagccgtcttgggagtgactgtacagctgtgtgcaggtgtgtgcggaacacaggtccagcgatccgggagaaggagctgaaggcagagtggtcctggaggatgcgggtgaggtgagcaaatgggcctccccccacagacttggggccccaccctgcagccaccctagccctggaagcccctcaggttgctcgtttctgccatcaagcctggctcctcctggagcctcacgcacagagtctgatctgcactgggagctcagaaggcaggcatgaggagcctgctcccatctgcgggggtggagaccccggaatcgacacccaaaggctgctgggagcacatgagggggtgggagaggaaggcaggaagaggagccctgagggcggctctgaggctggggtgggtaccctctgccacctccacctccaccaggccaccgtgctgcctgaagctggccccggaaaggtgcttgtgcatgggcacagaggtgtgcacacacacacggggctgcaggggcaggaggaggaaggagccccagcccagactcagcccagccctggggagcatgaggcagtgaagggatgatcacattcctgccggctctgacccctctgcaggccccgacccctctgccagccccaacccctctgccagcccaacccctctgcatgggcccaggttggccagctctcagctgggctgggcagccgaggcagcctcctttgtccctttgtgctgggcgagtggaaaggacaaaagctgttctcccggctggctagctgctgccgccggagacatctccaggagcccttcctccctctgcctccaatgtgcgcctgttacacaacagacctaagaataatc

SEQ ID NO: 361 - DNA, 1006 bp, Artificial sequence
  DNA replication origin
cgcgggaaacatcccagacggcccagcccatcttcacttcatgtagagcagaggctctgaaaagtggggcacgtcctggtgagctaacgaggcacccagaggaccggccgcctgtgctggaggcccacggggagggagggaatggctgggtgtttgaaccagctctcgaaggatcacattttgcagacaaaaaccaaactccctcctgggaggaggtgcccgatatctgcccccccgtcgaggcccagccaagaaggggacagcaacggatgaagccacctctgcccagggtgcctgttcctggacaagcctcaggggacgggcccagctgggaggggccggggctccttgaggtggctcaggagaccccaggggagccagggagacactgtatgcagagaaacagcttcattcacccacttccccagggctgagcttggcggcggcagcccagtccgaggccagcctcccacttatgcatcaaagacaactgcagctacagctgcaactcagttctgagggctgttggttccccagagaatgactgagttccagggagcgtcacggagcaggggcaggacggggcgaggctggggcagccactgtccctgagaggtggctaggcagagcttacaggcagccacacagccctgcccataacatactactgctggctcatctcagcagtgagtccattgcccaaggccacacagttgcagatttgggatccaagtctgcccagctccagagccatgtcctccaccccagtgacaccacctgggcagagctgccccacccaggccaggcagaggctgctgcagacctggtcccccacctcacctgacaccactccctcaagtgtgggccttgacaccctggtttgctggttggttggttggttggttggttggttggttggttttgttgagacagagtctcactatgtcacccaggctggagtgcagtagcaccatctcagctcactgcaacctctgccacctcccag

SEQ ID NO: 362 - DNA, 992 bp, Artificial sequence
  DNA replication origin
gtgtcctgggagccgacatccctagcacaggcgggggtcccactgccgagctgtccctccttctctacaagtcacctgctcaccctcacaaccactgtcacccccttttcacagatgaggaaactgagacccagagacacaggtatgtccccaaaacccacagtccagcaactggtgggcggacaggtggggatttgagcccaggctggggtcccacgtgcttggccttgaacgcgcctggtccaagggtctggaacctgggatgcaacagtcagcaggcggggagcggggggtaggcggggagcggggggcaggcggggagcgggggggcaggcggggagaggggggtaggcggggagcaggggggcagacagggagcggggggcagggggggagttggagttggagggcaggccgagtggggggcaggtggggagtgagggggaaggtggggagttagggggcaggtggggaattggggggcaagcggggagtggggccaggcagggagttgggggcaggctgtatagggcgcaggctgaatagggaggcaggccgagttgggggcacttggtaacgagctccttttctgtgttctgaatgccgcgggaaacatcccagacggcccagcccatcttcacttcatgtagagcagaggctctgaaaagtggggcacgtcctggtgagctaacgaggcacccagaggaccggccgcctgtgctggaggcccacggggagggagggaatggctgggtgtttgaaccagctctcgaaggatcacattttgcagacaaaaaccaaactccctcctgggaggaggtgcccgatatctgcccccccgtcgaggcccagccaagaaggggacagcaacggatgaagccacctctgcccagggtgcctgttcctggacaagcctcaggggacgggcccagctgggaggggccggggctccttgaggtggctcaggagaccccaggggagccagggagaca

SEQ ID NO: 363 - DNA, 1431 bp, Artificial sequence
  DNA replication origin
tggtgggcggggcactggccatcggggaactggagggcccaggcccaggtcacctccagtgctgcagggcaggaagggaacaggcagttcctgccctaggagctcagccaggtgagccaggacatgccccggggaggccaaacacccagcccggactgctggagaggccaggtggccctcatggctatgcccacagtgggcacccataggtgggtgacagactcggggtgggggtggcttgcggcacccccggaaccccactaccagccttggctctcagaggcccccacacactcggctctcagaggcccccacacactcggctctcagaggcccccacactggctggggcctgccctctttcccccaccccactcggcaggcgcaggccaggcccctccagcagcccccgccaccgttgcccaaagtcctggggaccctggaagccatagcagccctccccaccgggagacggggacaggcaccaggctggacccagggctggcatctgctggagtcaggagagggtgtccaggggctgcacacaggaacaaggaccccagaaagaggcagcagagagcaggcactggggtgcactttcctctgctgggaggatggggctctgctccacagggggtggaaggaaggggtggtggagggtcctgcccctgccagaggggggtggccctgggcaatggggagggcaaaggccacagggccctgtgaagacactggccctggacacgtgaaggaggtcctgtgagccccgtgtctcagcccagatcactgtcagcattccggggccagtggcccccttctccaggctggggagggcctgcggtgtgcacagacgctcccagtgagccctccagataggacaagggcctcccctgcaccgcctgccatccccagcttcaatgtcctcatctttgcaatgggcgataacagggcggactggaaacatatgcctcaggggtcttcacctcccaagcagcaccacacggggaagggccccagggagcacggcgcccacagaccacatctcgagcacagtgggggcactggcgctgtcggggggcagacttgcgttttggcaaattgtcccggctgccccactggaagatcgggggacaggcaggaggcttgtagcacggtgggggatgggcggcccaggcctgggtggaggtggtgaggagtcccagctctgagagcactgagggggcgccccgaccaggaatggatccacggggaagggcggggtgagccaggactctgagagcactgaggggcgcccccaccgggaatggatccatgggaaggggtggggtgagccgggacttcccgcctgagaagccaggaccaggtgccaacaggcacccttcctccaggctgtcctcctctaggctctgctgagctccgggcaacaaaggc

SEQ ID NO: 364 - DNA, 885 bp, Artificial sequence
  DNA replication origin
gggtccccaaatttggcggttcacccactgttcccagggcctgtgctaggttgggagacacccctcagggagagcacgtaggggcacagggtccccagagaagggcctactgggggcgcagggaggctggcagcccgccttcctgcaggtggagttagactcagtgagtgtgaaggatgctctgtggccaccatagctggagcagctgcctgtgggggatgccgacgcttgttccctggggtcctgggggtcaggcgggggcaggagcagtcagaagcttcagaggagcggccccagggcctttgctgcagatggaggcgggaggctcccaggtggcaaagcgcacctgctgcaggtgtgagagggcccagttcggggagtatggccaccgggagcccctcgggccctccacccccctgcagggcctccctccccggccgtgccccggtcttcaccctccatacctgttgagccgtgccgtgggtggaggtgagcatcccgcgggcgggctgtgtgcgtgtgtgtgcctgtgtgctcgtgtgtttaagtgtatttttaaagcggctttgcagctgtgtttgactcacttccattctctggtaggagctcggcaagtggtgcactgtgggttattttgggcttggcaatattgcaattattagattccgtgtttgtaaggaaacagcgtcgcctggggcagcattggctgtgggtggcggtgttgatgccgtttgggatgcggagcccagaggggaggcccagcttgtcccttgggcctgtcacagggctatcagggttaccaagccgccagcaccagatcacctggtgggcagtttctcccgggcctttgtcggatttaggcctcccctggcttccgagcgcagc

SEQ ID NO: 365 - DNA, 1670 bp, Artificial sequence
  DNA replication origin
cgagacggtgctgacagctctgcggctgggagagacacagcccagaagcccatacctcagacatttcattaattattcaacatcaaagcgaattccgtgttgctttcttgcctggtttaagagttctatggatgttacggcttcggttaggaaactaagcccactgtgggggcctcgaagggccagatccacccccaccaccccgacacacatcttggcaccaggatgggctgagcgacctcctgtcctgggcagtggctagggggtgggagcacagagtaaggcaagggatgcccctctaaggccctgctgtgtccccagcacaaagatcccctactgcctcagcccccagggccccatgtgaaaccaccccagcgatgcccagagcccagagctcggttctggggctctaaggtcacagaggagcacatcgcctggctgaggaggaagacagaccagtgaggacctggccagactgaccacgggccacccagactgaccgtagttgccccggatggaccaagatgccttggggtgaccacctgacagcaggccatggggacaagaccacgcatcaggcagagggggtgtcaggtggaagggtgtcagatggaggggtgtcaggcagaggggtgtcaggtggaggggtgtcaggcagaggggtgtcaggcggagggggtgtcaggtggaggcggtgtcagaggggctgtcaggcagagggggtgtcaggcagaggggtgtcaggcagagggggtgtcaggcagaggggtgtcaggtggagggggtaccaggcagaggggtgtcaggcagagggtatcagaggaggtgtcaggcgggggtgtcaggtggagggggtatcaggtggagggggtgtcaggtggagggggtgtcaggcagaggggtgtcaggtgtaggggtgtcaggcggagggggtatcaggcggaggggtgtcaggcggagggggtgtcaggtggagggttgtcaagcggagtggtgtcaggtggaggaggtgtcaggcagagggggtgtcaggcagaggggctgccgagtggcacagccagtgcaggcagagttccagagagggggcgccaggggaggcagccccaagaaagtgggactcaagcaaacacaagctgatgggacagggggtcccgggtggatggccagggaaggccagatgcagaggccctgggggggatgagtctggcatccccagctgccctgcccaccttccatggtgccattccccaaacaaaggccccagccctgctcctggttcccccaagcctgggggagttgcagacaggttcaaagggaacattgttaatgccaaggcagaggcgcagaagaaacaaagaagacagagcaagaaacagctggatttgaggcccacagaggcgggaggcatggggatggggtgtccagtgggcgtcactgtccccacagtgttccctgttgcgggctggaggggagccgaggccccagggctgggtaacccagcagggagcgaaagctgagccagccacagggaccggagcttcgggaaggctctgccctgaatcatctcagcaggacccacacatcctagcctcccagtgcccaggggccaggtcccacatggaccgagctcagcccgccctgctagcagcatccacagtcacagcaggtgc

SEQ ID NO: 366 - DNA, 2775 bp, Artificial sequence
  DNA replication origin
cccaaggggccttgagcccccatcccagagtgcggcctgggaggcttgtgtggacactgagccccggatgtgggcagggcaggcaggcacgcaggcccgggcaggaggatgtggggccgcctctgggctctctgagccgctgccacctcaaggtgtgaccacctcctgccatgcggggccccaggtgtggagggggaggggagccaccagcagctgcagtcaccacctgggtcctgccaaggaaggcccctgggcgcagctgcctggcaccctcaaaggagctgcctcctgcctttaccaccactcaggtggcctaggaccctcggctggaccagcccctgccctgggctcttgggacctgccctcgtgaatgaacagtctctctcacgacccattcggcacagccagggtcccagggcctgtgtccgcctggctgggcacagctgcgagaagggaggggcggccccctccctctgggccccaggtctcagtgggtcccggtgctgagctgagtggcagggctgaggggaggccaggccacaatgggggctgtccaggcaatgacactgcagtgcacgtgtgccagaggcaaccagtggcccaggagcaacaggcgtcccagcatcccccacacctgggctctgcatgtcccctgggacagtccactcaggaaagggccagcagccccaagtctcagaagggagaaactgaggtggggagaggagacagaaggcgaaagccacagacacgcccaagggtgggaaggagggagaggggtgtgcgggctgcaggtcccgacccagccacgcctccttggagtggacagaggcccctgagcccccttccagaggccggtgaaacccaggttcaggttctaaggaataatccatcctcagggccagccccgcccgccactcagccaggagatgatttccgtcaccgcggcctgcgattaaaggcggtgattaaaagccgcccgctgcacatgttaatttgcttaagattctgatctcctaaatctcttttctgggcatttaagcagaattctgtctttgagagcatttggcccggcgggtggcaggtggcgggcggcaggcggcgggcagcaggtgaggaggcaccatggtggcaggggagccaggccccagggagtttaattttctcctcgtttgaagaaggcgactggaaggaacaagcacatccagggacgcagagccagctgtgagcccgccagagcccctgcccatgggccggcacagctgggaggaccagacccagcttctgccttggccggagggtggagggcagagggcagagggtccccaccctgtaggcccagagctgtgtctcctcagccccgctttctgggactggttcttgccttccgggtctgagaggctgcccctgtccccacagtctaaggctggatttggctgtgagccctggctggatctctccttgggttcacaggcattgccaggacagaggccggaggagaccacaccctgagacagggcgagcctagaccttggcccacagccctaggttctcagctaggcctgtaggtgggcagagctgatcccccttcccctgtgcctcagtttccttgatgtgcaatggaaacactgcacacctgctccccgggccctggctctgcacacaaaggcagccacttcccctgccctcttgggcttcagtgacaccaagcccagcctcagggcctgctgagcccctaacgcctcctgcagagccgagcctgagggtcccgtcttcagtctgtgtgagttgactgagagctggccgtgagcccgaggccacctgaaccaggtgctgccctgacctccatgctgcccaccccagagtccgcagtgtctccatctcatctctttcagctggaggggctttcttgccctgcaggctggacagaggccccaagcaggcagggcaccacccagcatctcacaggggtaggggtgggaggcagctgagtccggacagagcccaggccccggcttccctgcagtgcaccttccattcctgctttctccattggcttgggggagcaggaggtggcccccctcctcagccatcctgcagcaaaagttccttcacgtctcatctccaaagaaaaccatttaggtggcccctgccccagggcacaggttcaggaagacacggccagcccaaagacaggggccactataggccagggttgctccaggctcccaggcacccctgaggacctctgtgcactcgtgtgcatgcccaggggccagataagcactccatgcaccagcctgcgtcaggattgccaattctgagcccgcaggtgaccctgtgtttgagcacaaacagccccagagaaagccaaggatggaaagatggagatgcacatcgggaagaccagagtaagggcagagtggggaggggagaagctcgtgaagcccccctgccaacactcgaaccccatggaaagagactccacccccaggacttcccacagcccagctgcttctgagccccagagccctctcttggacagtgggcagcaccctgtgccgccagggaggccagtgccctggtcacacccgcaaccagctgccgagcgatcccaccgcacagaagcccagcaccatgtcctctggggctgccagcaaggggtgccctgagtgtgttccagaaaatgccactgtagacaggagccgggaagggcagtgctccggccagctcaggagaccccagttcacaccctgactctgcccgactctgtgtgcc

SEQ ID NO: 367 - DNA, 1382 bp, Artificial sequence
  DNA replication origin
ccccacctcagtttctcccttctgagacttggggctgctggccctttcctgagtggactgtcccaggggacatgcagagcccaggtgtgggggatgctgggacgcctgttgctcctgggccactggttgcctctggcacacgtgcactgcagtgtcattgcctggacagcccccattgtggcctggcctcccctcagccctgccactcagctcagcaccgggacccactgagacctggggcccagagggagggggccgcccctcccttctcgcagctgtgcccagccaggcggacacaggccctgggaccctggctgtgccgaatgggtcgtgagagagactgttcattcacgagggcaggtcccaagagcccagggcaggggctggtccagccgagggtcctaggccacctgagtggtggtaaaggcaggaggcagctcctttgagggtgccaggcagctgcgcccaggggccttccttggcaggacccaggtggtgactgcagctgctggtggctcccctccccctccacacctggggccccgcatggcaggaggtggtcacaccttgaggtggcagcggctcagagagcccagaggcggccccacatcctcctgcccgggcctgcgtgcctgcctgccctgcccacatccggggctcagtgtccacacaagcctcccaggccgcactctgggatgggggctcaaggccccttggggcagaggtggtacctttcagaacaccccccatgggtggacgtctcttttgtctggaaaatgttacgtccctcagatgctgggagcagcgcgtgcagggggaggcagaatgctggctcggagagggagaggaccccagcgcgggcagctcagcactggacagacagggcagggaggcgaggggctgggagagcacaggaaggggtgtagcagcacgcagggctgcagccgtcaccgtcaccatcaccaggagctactgctggaactcggcctcccccaacgctggacgccccccagggcagccagtgaaatgtcacctcaatgacccttggcagtgctcagcccttcccagaggccctcctggggtgagtggctcttcttggctgcagcctgcggggcctggggtgtaatgaccagagggtccctgtggtggaggggcagccagccagggagcatttggctctggtcctgggggtgcagccacccctcagtaggaggagccctgccgggagggagggagggagggaggacaggatgaacggtgggtggtcgctcaagctgctatgggaagagccagcagccaacccgcctccccttctggcctctcagcggagccagctcagctcccgccagagaccccagcccaggtgtcctcccttcccactc

SEQ ID NO: 368 - DNA, 2058 bp, Artificial sequence
  DNA replication origin
gggcagccagccagggagcatttggctctggtcctgggggtgcagccacccctcagtaggaggagccctgccgggagggagggagggagggaggacaggatgaacggtgggtggtcgctcaagctgctatgggaagagccagcagccaacccgcctccccttctggcctctcagcggagccagctcagctcccgccagagaccccagcccaggtgtcctcccttcccactccagcagaggctgctgggcccgggctgggcagccaagggttaagtgggcggggctcccacgggaggggcggtcccagcggcggccccgtcccgccttcccctcgccttcctcaccttcctcacgggcgggcgcggcagggcagcgtgtggggctgcgatcggcatgggctctgcgcgcggggtgcccctgctcgggctggggctcaggggacgccgggggccagcacagggcccggtgtccctcgggccgtgccggtaactgggattggcacccgccggccatggaagagcctgggcccccaggtgggctcagccaagaccaaggtaagggggcaggtgggatcccagaagggggttgtgatggtccccgtagggagcccaggaccggacctgttcactggtgacccgcccaggaccggacctgttcactggtgacccactgaccccccgtgggcagtgcagagctcctcccagcagggtctccgggagcacggcccaatgaccccattacctgcacatccctcagactcggtcccagaggagggatgctgcccccaccccttggcgcccccaccctgcctcatctgcccctgtgctgacacgtgaaagcgagagggtctgctccctgcaaagggtccaacacagtccaggtgggcggtgggggaggcgccctcagccatgccagcacgggtcctgacctccagcttgatcccagcggatgcacactgctcgggtggggggcaggtctgggggtgccaggggctggtaggctctggcttttggctctgggggctctcctggcccaaccccaccccagcccctgatcgaggttggcaaaggtggccctgagctgcagtcagcaccatggacaggggcagctgctgctttctctggggggcctgcagttgctgtgcgtcctcagggttccctggagttacactctggtctggcccatcccgctccgctccgggttggagatttcttgctgtgatctgtcacgctttcctgacctgggagccggacattgccctgcgcagacagagcggagcagcaggggtggcggaagccccggggctgttcacagcaggagcttccgaggggcatcctgggcaggccccttcagcactggctggggcagggtctacagctccccaaacacagcgctagctctgggccagaggggcagggtctccagctccccaaacacagcgctagctctgggccaggggcggggagaggaaaacgtgaagggggacagtggccacggctgcagaagaagtggctcaggccagacaccaggaggaactcctgggtttccagggacagtaggagcttgcctcctggtggtttggaacctgcttgttctgccctgtgattggcatggacacgtggggtgggacatggcatcgctgctgggcagactggggacgggttgctggtttttgcctctgataaaccgtgtgacctcacacaagggactgagcctctctgagcctccatgggcaagagggatagcatggggcgctttcacagggtggctgtgggcattcagagcaagcctgtctgcagtggtcatgccgtgcctggcctgtgcagctgctccagggtgcctgtcccctcctctgtcccacccccagtggaggtgccctctctgaatggagaatagtgtggcagatgtaaccagggctgctgggcagacactgtttgtaggatgggctgtatattcaggtcactccaggtgcacccactcgctgaccgcagcccccatcccagggctctcctgggcacgttgtccctggttcctgcctgtctggcctgcagagagctc

SEQ ID NO: 369 - DNA, 1374 bp, Artificial sequence
  DNA replication origin
gtctggcctgcagagagctccctggagtcactgccctgtgctggccactgggctcaggatgcctgcctgctgtggacaggggctggctgctgccgggtggccccaaagccccaggttccaggagacccagcacacttggggtctgcagctggccagggaagggcctagtcttaggagggggcagtggtgggagtggctctgagcccaccctccgtgcctgcgtcctctgggcagagggaggggagccagcagaacagtccttacagactccacgtgccgccgaggacggagcagatgggccagtgtcctgggtccagccctccatctgcacagctaatgagctgatgacgatggcgtcccagttcctggcaccttctcctggagaagccatgggctggccctgcccgggcagtgccctttgctggggcaggtgtgtgtggggtgcctggggccctctcagggacccaggcccagtggctccaccttcattgagggtgggcagggggaggggttggggaaggggatgagtaatccaacgtgcctgtttcttcccgggattttgctcccagcactgcatacgtgggctcccaccggctggacggacttcctgtgtgggaaaggcgagtgggcgcgggcctcccgtgtgggggcagggtggagttggtggacaccatccccaggacaggacgtttcctctggctcctgagaagtcactcaccgtggtggccgcaggcatggctccatgctagctgggtgaagaccccgagagggggccttgtggctgacggtcactggagacaacagtgagccactctggtgggactgtggaaccccctccagctctgccccagagagcagcacctgggtgagggctacaggaggctctttcagcaggcaggtcccaggcaccatgatgcagccctgacttggggacggtggccacactgtcctgggagtaggtcccttccaccgctcagacctggcgacccaggaacacacctctgagggacttgagtggtcttgatttcacattgatcaggcccctggctgctccgactttcaggtccctgttgtggaggtttcgggcggcccagttctcaggggcagccctgtgcccttcctgggtcagctggtgtgtgggtgggggccgacccagggagcacctcactggctcccaaaaggcaggagtgggagacagggcagccagcccagccccagggccagcttgagcagggaggtccagacagggacggaacgactatacaagatcccagaaacttcaggcagggaagctcagagggccagctccatctccaggacaccctctctgtctgagactctctggcagagcattcgtggggctgctccccggcc

SEQ ID NO: 370 - DNA, 1946 bp, Artificial sequence
  DNA replication origin
aattcgaccgctcccaggagccacctgtggccaggggcgggggcaggggcatggggttgctgcctgctaggcccaccccgcccctgacaaggggcctccactgcactatggccccagacagccagcccagccacctcatctgtcttgcctcgtgcccggccttcccattgttgagttctgtgctggctccgtctgagtggtagctctcggggccccaggcccagcgccggttaccagggctgctaggactggtccaggaggtggtgggagtggcaggtggccgagcagggtggggagcagggccctcagttcccaggaccatctggggaggagtggcagggcccagctgagctgtgtgacccaggcaagccggcacctggggtggaggtggccctgggctctggcctttgccctgtcactggcagggcggtgtgggcggggccgggcgaggtgaggagtggccgtgcctccgctgacggccgtgtttctcccgtgaggagtggccgtgcctccgctgacggccgtgtctctcctgcgaggagtggctgtgcctccgctgacagccgtgtctctcccgtgtccagtggagcggtgcatgggtgccatgcaagaggggatgcagatggtgaagctgcgtggcggctccaagggcctggtccgcttctactacctggacgagcaccgctcctgcatccgctggaggccctcacgcaagaacgagaaggccaagagtgagtgggagccctggggtggggacaaatcagagtccctggggggacacgacggtagggaccctcccagggcagccactgatggctgaggagcagcgagaccctaggcctggacacctctgggctcagtggccttggggatctgcagtgacctcgggctgtggggtaggagggatccaggccccctgcccgcctggcagagctccctgggactcagtgaggaccgagtagcactgtgcccagccctgtgctgagtgctgggctggaaggaggggcacagcatagtccatctagctggggaggtcacagctccccataaacagaaacgacccccacagaggtatgctgatggatgggtatgggtgcaaacagtggctcaggcagccactgggcatggctgctggagggagcaggggccacccgagatggaggctctgtgcagggggtgggtggggagagttgaggcacacagggaacgggtagggtcccacggtttggggagagacatggcagtcctcaagggctgggatcagggcgcagccagggtttctgatggctttgctgatggtcaggacccaggcatgccaggcaaggcctcagcccagcagttgccaagcgtgtagccactttgggcccgtggagagagtcgcgctgcggagcccccagggggacctgaggtcacaagagcctcgatgcacctgagcgcggagctgggggtccctggagccgctgtccccacctgcggcgctggagccctggaggtgtccaggggcttccttggaacgtggagacgtgctggttaaacgtggagccccgggccagccgggcactgggggctgcaggtggagggaggtggatgctctccctcgtgggggcgtgtcttttccacaggaaagggaaagggggagggacacgggtcagcagtggggggctgtgcagtctcgcagatcttcacccttggttcttgaactctggaccctgagccctgccgagggtcccgcaaaggtgggcaaggagctcccggctgcttggtctccgcagtgttggggctgccagcagggggacgctgggcccccggggacctgacccgtgctccctccccaccccgcagtctccatcgactccatccaggaggtgagtgaggggcggcagtcggaggtcttccagcgctaccctgacggcagcttcgaccccaactgctgcttcagcatctac

SEQ ID NO: 371 - DNA, 1321 bp, Artificial sequence
  DNA replication origin
gagcccctccagcctggctgcaggctccttctctcggctctgcagggcccagagaggatgcagtacagatgggcggggaggcccagcgctctgaaactggggccgtctccagctgtcttgaccaccaaagaccagggccactgggcctccactacatagggctggagtgccaggccggtaacctgacagcaacagctacctcgccattcctctccagagccagccctgcagactgtccctgcttccgcctgcctggggttcccttagggaggtctggttggaccttcaggccccagaaaccacgcacactcgtgctggattcagtgaggggcatctgtctcctcccactcagaggccactctggagcctgcaccctaagccaccctgctgcccgggccctggcacagcctcaactctgtggagggacctgctggccccagagctgcccctgagcccaaaatgtggctggggatggccccaggcaggcagggagaaggggcgcagacatgcagactcagccacctgccagcccccacagcccaggcagactgtgtccccactggggccttcacaagccccgggcagtccccagagtgtctgcaagcacccagcccctaactcacgcacacaccctgtcctgtgagcaggccagcttcccttgctccagccaggcatgaccagccacctacagtgagaacaggcagcagctggcaggagctggcaggagctggcaggggctggacacggcggagctgtcaggctgtgagcatgtgtatgcgtgtgtgtgtgcatgtgtgtgcctgtgtgcatatgtgtatgtgcacgtgtgtgcgtgtatttatgcacgtgcatgcgtgtgcgtgtgtgtgcgtgtatgtgcgtgtcagagaccccagggcctggcacttgcacccacagaacccgctttccaagctgcagcaaagcagcaaggccccagggcctggtttgctggctcagccagcaccacccggaaccaggacctgctgacgggcagagtttctctcccccggcccagcaggctttccggaaacagaaaccaattacagacaataaaggccgcagctcagctgaaggctgcattttcataactcctaacatcagggtggttgggcgagggcggcatggggaaagtaacgagctgctgcgcatcagactgggccctgccagggctggtgtacccccctcgaggctgcggggctggggcctgggaagggggtgcagcttcatttgggcacctgccctgaatgcccagtccactcacctggcagggcctgtgccaggtgccccgaccactttcccc

SEQ ID NO: 372 - DNA, 1147 bp, Artificial sequence
  DNA replication origin
tgtccagcccctgccagctcctgccagctcctgccagctgctgcctgttctcactgtaggtggctggtcatgcctggctggagcaagggaagctggcctgctcacaggacagggtgtgtgcgtgagttaggggctgggtgcttgcagacactctggggactgcccggggcttgtgaaggccccagtggggacacagtctgcctgggctgtgggggctggcaggtggctgagtctgcatgtctgcgccccttctccctgcctgcctggggccatccccagccacattttgggctcaggggcagctctggggccagcaggtccctccacagagttgaggctgtgccagggcccgggcagcagggtggcttagggtgcaggctccagagtggcctctgagtgggaggagacagatgcccctcactgaatccagcacgagtgtgcgtggtttctggggcctgaaggtccaaccagacctccctaagggaaccccaggcaggcggaagcagggacagtctgcagggctggctctggagaggaatggcgaggtagctgttgctgtcaggttaccggcctggcactccagccctatgtagtggaggcccagtggccctggtctttggtggtcaagacagctggagacggccccagtttcagagcgctgggcctccccgcccatctgtactgcatcctctctgggccctgcagagccgagagaaggagcctgcagccaggctggaggggctctgagaagtggcatcagcttcgctgtagagaaatctggagatggctcccattgcctggcacggcctaatcagagagaactgcatggtggataaacacttggcttgaggctaatttcatcaaacctaagataaggctggaagtgggctggacccagtggggcctaattgccagagtgcgctgggcgggcaccgaggcaggctcagccaaagtgcacgttcaacagcagtggcttccctttgtggaaagaaaagatgccacgtgactgtgtcaggggtgttctagggtggggctcaggccccgagggcctcactgtccgagcatttttgttcctgctcagtggtgagtggctcaccctggcacatagccactctgtggagggggccgcatctctgcccagctcagc

SEQ ID NO: 373 - DNA, 1046 bp, Artificial sequence
  DNA replication origin
acactggggccatgtcacctccaagcaggtcatgctctcaccctgccctgcccagccctgggctcccatacccttgtgaggcaaagtcctcaatccttagggctcaaggatttcaagcatccccttccatggggactttattgctgccatgggattcccatggcccctgtagcaccttgggtttctgctgggatgcccagcctccagcccagagtgtgttgttgacccccgtttgggggggcgctgacccccgtttgggggggcgctgacccccgtgtgggggtggcgctgacccccgtgtgggggtggcgctgacccccgtgtggggtggcgctgacccccgtgtgggtggcgctgactcccgtgtgggggggcgctgactcccgtgtgggggggcgctgactcccgtgtgggtggcgctgactcccgtgtgggggggcgctgactcccgtgtgggggggcgctgactcccgtgtgggggggcgctgactcccgtgtgggtggcgctgactcccgtgtgggtggcgttggctcccgtgtggggggtgttgactgctgtgtgggggaggtgttgactcctgcgtgggtgttgttgactcccgtatgggtgatgttggcttccgtgtgggtagtgttaactgctgtgtggggtgagtatatggaggtggctgtgggttgaaggtgaaaagcatatggcttcaggcaggtgcgtcagttctgcattttcatggggctgtcctcctggtgggtgggcccgtgccctggggagtgattggaggccgtgacaagggcagtggagtagaggagggtgggcttgcatgttggtcttgactggggagtggggtggtcctgaaggacccctgtgcatgcaggccctggtcgaggtgccaatggggacccaaggccttgcattgcaggaagcggacacggatgaccaccaagggacgctgggttttgaagagttctgtgccttctacaagatgatgtccacccgccgggacctctacctgctcatgctgacctacagcaaccacaaggaccacctg

SEQ ID NO: 374 - DNA, 897 bp, Artificial sequence
  DNA replication origin
gccctggggagtgattggaggccgtgacaagggcagtggagtagaggagggtgggcttgcatgttggtcttgactggggagtggggtggtcctgaaggacccctgtgcatgcaggccctggtcgaggtgccaatggggacccaaggccttgcattgcaggaagcggacacggatgaccaccaagggacgctgggttttgaagagttctgtgccttctacaagatgatgtccacccgccgggacctctacctgctcatgctgacctacagcaaccacaaggaccacctggatgccgccagcctgcagcgcttcctgcaggtggagcagaaggtgtgctgcccggggcaggtgttggggggccagccatcaggcctcgccttctgttctgagctttgagcttcagtcaggggacagtggtgatgggggagctgtctgaagctatcccaggccagggatgggctacctgggctcatgcccctgctctgagatggagagattagggtggggcaggtcacagcctggcatttgagagccccccaagttggctttagttttgatattacagggtgcgctctatggggcagccaagcaggtagggaaagtttgtggtttctcctccaggggcccctgaatggcttggtcctgactgtgaacaccctgcgcctcccacagcttgaccatgcctcctgccttggtgttgagcatcttgtggactagggttctgtggcccagcctttgagacctgcccctgtgttccagccacatgggtctggctgactcgctcccctagggtgccaggcccgccacaatatccactcacctgtttgtccagcagacactcagatgcctcctggaatccagaggggcatgctcagccctttatctagaccccaagaa

SEQ ID NO: 375 - DNA, 712 bp, Artificial sequence
  DNA replication origin
cgcccccgagcccaacacctcacaggaccctcccatctctgcagccccccaccctggccctggcggggacacagtgacagcgctctgtggaggtgactgctggtgggacccccatatcagagttgaccttagagatggcactgcttggagatgaggccagcactggccacgggggtggctgggcagtactaccagccacccagcgtccagccagacttggtgaggaaaagggcgggaagctgggaaatcctgtgccagggcctgggtgggccaggtgctggtgggaatggggtggagtctggcgtgggacccagcccccagtgctgcccccacttactgaggggccaagaggacagggcagggggagtggatggtaccccaagagtcagctcaaatgtgggagctgaaactgggaagaggcaggcctgcagctctcatgcagaggggtgggtgggcagggaggaccccccaggccccaggccgctgtgcgaatctgccccaatgtccctctctcccggatgcctccctttctaactcgccccaacagcaaggacggacagctgttcttgggaactgcaggctccacgcgcccccctccacctccagcccgactcacatccccattgaggagcttgcagtcatcgtcaatctcatcagcactgtcctcatcagacacctcgccttcctccgcatcctcgctgatgttggctgg

SEQ ID NO: 376 - DNA, 984 bp, Artificial sequence
  DNA replication origin
cattttggggatgtttaaggagctgtgaagtgtggtggccccgaccggctccaggcgcactgtcagtctggctcctagcgcctctcccggcagccgtggcaccaataaattcagaggaaaccggggctggcttttctggaggtggagagagacgagcatgtctgagagccatgtggacctggacaacctgggagcctcctgctgcagtgcacgtggggcctcgggctccagccagtgcagcctggtgacgggaaggccccttggccactctgggccgtggggagggccgtccaatcccatcctggctccctatgagggtgaaggaggggcagggcacacctctgggccgtggtacccagagcacagggaggctggcgggagctccccggccgcatcaacaggactgagaggcccgtctggcatggggcctgcggacgcgacgtgccctgatttccaacgcgtccagcgaggcagtgtccaggcaggcccaggtccaggctggggagagcgggcagcagtcggagctgtttgctgtggcgtggctgagcgccgagtgtctgtggtcatgagagctacagtggcctctttgcagcagtgtgggagcatccaggggtgtgggagggtgtgtgtgcaggggcgtgctgtgggtgttgcaggggtgtgtgcagaggggtgggcgtgtacaggggcatggccacgggtgggtgatgtgtccgcttctggcggaagccccctcctaacagggaccgctgctgcaggcccacggctttgctgtgtttcaaagaaagtagcccccacccttggtgggggacaggatgtggtatgggagcccctcctgagcacagctgggccatgttttggaggtgtctgtgggaggggctgcaggggtcaggtggtggcacaggctctgctggttccattgggaatgagctttggggtgaatgagcagctcgtgaggcagccctgggttcggcggggggcagg

SEQ ID NO: 377 - DNA, 1584 bp, Artificial sequence
  DNA replication origin
agccccaaccctcccccctcagacttccatcacaggtgtgacggagccacggcccagcctcaccgttgtcgtccaccacgcgggtctgctccctgctgcagtccacagggagcccaatgatctccacctccacaaaggggtcgatgatctgggacacaggagtgggggtggcatcagggcccatcgcgatgcccggcccgcccccaactcccacccctcccgcctgtgtggggctggcccccacctccccacggtcccccagcatggagtcgcgcggcttgggaagctgctggccactgatgatccggagcaccagctgcttcttgagctgcccgggcagggggtcctccgagttggggttgaacacgcctgaggggatgccggggaggtggtcagtggcccagccctcagcaagccccctgcttgctggggcatggctgccaacagccccctccccagcccccacataggagactggagccggtgccagggggagggagggaggcagtggtccaggggggcacctcggggtgcacctggcccagtatggatcacctttgtggctaccgcagcatgtgggacagagcccatgcctcccacagctgagccgaggaggtcacatggcttctgggggtgggtctgggtccctgggggtatgaggggtggggtctctggtgacagtgtccccagggcccactcaggctgagaactctgaggagggcaagccaagggcagaggtggaagtagctggtccacagcaggagtagcctggtctagtgggaggcctgctcgcccagcccctgtcctgccctctcccatggtgatactcctgccagggccacagggggaccaagctggaagtcatccacagcagacaaaacagaggtgtctgagagccgggaggaggttcctccaaacacccagcccagacccaggtcctgagacccacagaggggccaggcacagggggctgggtcgctggcactggggcccctcagacaagtcctgccatgaatctcatgtggggcccaggctccccagttctccatccctggattcctgacggagctgggcccttctttgcaacgctagcaaggagggttcccccacccacctccccagcatcctgggagcttcgtcccaacctgaccctccaggggactctgccaaagccgcccccacccccttgctagcctgtggggctccgatctctgttctggggacacccaggaggcccatccgagccctgagcgtccgagccctgagtgtccgagtgcctcaccctggcacatgcacccaggcttgagtacgtagccgcagccaccgttggcgctgaacttggctcggttcagctgcagcatccgcccctctgactggtagttcagggcaactgcgagggtgacacaaggctgccctggtcagcacctgaccttccaggtgtgtgccccgcccacccaccaccacacgctagcctcccctgcacagctgccgcgtatctgccgtctgcccctcgttcacccaatgtgaatgggactccaaggttcacacctgtgcaggactgaggccagcacatcctggagggac

SEQ ID NO: 378 - DNA, 1200 bp, Artificial sequence
  DNA replication origin
gttggggctacctggtgtgcccgggtgccctgcccaggcctccctcagtgacagtcctgggcgccctcccctctaggtgggcagtcccggaagcagcaccgggagtggcactgggagtggtgtgggccgggggctccaggctggagcggtgctgggccgggccctccccatgggacactcctcctggcgctgcttccccagggttcaaccccacctgggaggagaccctggttttcatggtgcacatgccggagatcgcgctggtccgcttcctcgtctgggaccacgatcccatcgggcgtgacttcattggccagaggacgctggccttcagcagcatgatgccaggtgggcaggagtggacacggtgccccccacactggccgagggccccagggcagggcaggtactctttcccctgtgagtcagtgcctgtgtaggtgggcctgcacctggcaccaaagagacaggagctgaggacgggaggagagccagcctggggatctgcgggtcaggcaggggcatggcctgtgggggaggggccacccccaggaagaggtccctgcaggctggtgcaatgccaatgggcttcctggaggaggtggggtagtgctgggcccacaggaggcagaggccccaggcctgggcttgttgggtgtatctggggtcttgggacctttaagtagaatggggggcagagcaggtgggggccctgggaggctgtgacctcatgaccctgctgacccacactgctccaggctacagacacgtgtacctagaagggatggaagaggcctccatcttcgtgcatgtggctgtcagtgacatcagcggtaaggtgagtgtcaccccctgccaccagccatcatggggaggggccacaccagccccttgtcccatgcccccccatgtgtccccagtgctgggtcctgaactcaggcagtgaggcctagggtcccctccccgggcctctgctcctctatctcaagaggggctgctgtgggggcctggctcctgagccaccagtgcccacctctgatctcagggctggctttgggcatctcgggcaggacaggtcctgagtgctccgggccttgccccgccctgtgtcacccatgcctgtctcagactcttgggggccttgcagcctccacccctacagtgctgccatctggcttctcagcagggaccgagtgatgc

SEQ ID NO: 379 - DNA, 1079 bp, Artificial sequence
  DNA replication origin
gccagatgcccccgagacagcacccaccgcgcccccatgacgagccgtgctcgtgcacagagcggcccaggcccggcaggtgggtcacccccctgcaggggcgcctctgggcagatgcgttcagatggccagcacttgaatcagcttcctgattcaagatcccaaatctacgcatttggtcacagtggctgggaagccatttagaagcagatccgggattctggctcggagcgccggcctcaggggtgccctcatcccatgcactggcatggttggcaaggacagggagggagtgggaggcgaactcagaaccaacagcctgagggtccgagatgggggcaggagagagaaggagggggataggaggggcacagtgggggctccagcgggctgcccgccagggaaggggctgagggaggggagggaggactgagggaggggagggaggactgagggaggggagggaggactgagggaggggagggaggactgagggaggggaggggaggagaggccagtgagaaggcggccacccagctgaaccctggatctgcctcgtaaatgccactatggctggggatggccagggcccccggagccatgtcatgatccacgtcacatgagcgacagtctccaaatgctaccaggaatcatggatgctaatggggtgcggcctgggcatgcaggggcggcgggccgcactgtcccgcgcaccgggtaccttcaaggctcctaacagagctgcacttctaaaagtaggctgtggccatagagaagccgactgcaagaccaaagagacagggggagcaggtgaggcggccacagcagtggcgtggggagccctgcagcctgggggacgaggaacagatgggtggatagacggcaggggctggatggcacctctgggcccgagagcatggcaggagagagtcagcactgggcctgggcaggcccctcctgctgtgtgtgcgggttccccgagggccagctgcagccagcaggacccagagggcactgggccccagctcaaagccagggcagcagggctggcaccaagaccacttcctgcggaagccgag

SEQ ID NO: 380 - DNA, 1930 bp, Artificial sequence
  DNA replication origin
aaggttggggttggatttgctcttggtcacaggtggcaggtctgggcgggcagccgaagccgagtggggcctggggggcaggcgtcccatgtgggctccagcgaggttctcacggctgcggcccaggcccaggctgggcagggagaggtcaatgacagtgtcgctggatgacatgctggaggaggaggaaacgctgtctcggtggccacatggctccagccgctgccacagcgggtcactgcccgtggcatcggagtacacggcaggagctggaaagggagcggccaggggccgccaccctcccaggggctccgtgggcacctgcccctcactcttcacccttctaatcacgggcaggtggcccagggtccggggctggctcctgccgtccgtctggctgccgggggccctctcgtatgccccgccggcgccctcgccgttgcacggccgaggcctgctgtctcggggctcctcagtgtcctctagggggcttgccacattggctccgggtcctgtggggtatgggggccgtccctgagaagagctggtggggacagccgctggtggcgggggaccagggcctggggcgggctcctcagcgatggtttccaggctgcacagtggggggagtggccgctgcgtggagagggggcgggtgtctgtggggaggtgggggagtgagagagagccagagggagaagcagaagagagagagggaggcagggagagaggcggagaggagtcggatcagggtggtgtccccggtgccctgtgccgagggtcgccaggcccagctcccaccccgaggcatcccccgggcgcggcacactcggtgtccccaccctgctgctgctggggcccagtccacgccctgtgccgcacacggggccctccttgggctgggacagcacgggacaccggggctgggccccgttacctgtcactcgccgctctcagttcctaactacggaggcagcgtgggtgggggcagaaaggaaagcttggtcaggggggtctggaggggcagggtggtgtggggcgggctccgtgtatgtccctccctccaggctaaggagacacccttctagtggggtgcttcagcccaaagcagcgaagccctggggcccagggaatctactccacgcagcactcagcaggctccaggcgtcccaggggcgcaggagacgcccagcagctgcactacctgcccacatcagacttcccagtagggacccctggagcctgccctagagggaggtgggaatgggatggtacgtggcccccagtcccaggaaaggcatcaggggccatgcaggtcgccagccgcccaggaggtgagtttggggaagcgcccagccggaggggcccagcatgtcaggccacagtcccggccccagaccctcagcaagagcagctggttcttcccagcctgtcgggcctcaaaccagctccacccaagtcccagggcctcaagctcagacaggagggctggggctatgggccacaggcaagccaagggagcagagtgccacggagacagtgccacggatacagagccacgagcacgagcacacgaggcgacaccgtccacgcagaagcagcagcaggtgacccaggcccagccatgccaggggcgtgcgggaggaccacgcagggcaagaggggcttaccggcggagaacatgggggatttactcctgatctcctccagcttttgagcaaacaaggcactcatctctccctgcagggcccccggttgcctgcaggcaccctcaggccagcggggggacctttcggggatgcccgggctgtctgggctgctggagtccgaggacatggagccgctaccgcctggaccctgcctccaggccccaggacccttgggggcctctctgcttctccccgggatagcgtgagggtccaggccacag

SEQ ID NO: 381 - DNA, 2200 bp, Artificial sequence
  DNA replication origin
tcccgttcgctcagcctcctgtgccacttacttaccaggtgcccgtcggagcctgcgccaggcccagaagacaccccaagaaaagacctggcctgtcctcagagggctgagctggacaggctcccagggtaggctgcaaagcctgctcctcaggacgcaggccctaaccccgggccacaggccccccaacccgggggactgctctgcctgcagagcatggtggttccagaaaggcccctaccctagagaagctggggtgctggtcgggcctctggaagcctgtgctgcagcccgtcctctgctgccccaacagtgggagtgggtgtggcccaccctgtggccaggggagtcaggggatgtcctgccccatgaggctctgtcacctgcggctgcccaaggggcctgcccggcgcaccacccggatgagcactgctctgtcggggtatcccgtctcacccctggctgcgttgtgcccaggcagggcccttgggaaggcgggcctgaggcccggaggccgggatcctggggtgctgggggagctctaagggggctgttctgccctcaccatgttcctgcactgacagggattgtgggcggccacaggaatcgctgtcaccacttccccagctcagccaggcagaggggccactggtgccgcccttcccccagccccaccacgcccctcagagagagcctggcaggacttcgtcatcctcgagccccagaacacttgcgtgtgggcagctgcagccccaccgagagcaggggtgtggtgagctggttgcctggggcccggggcggcacctgaacctgaggagtctcagctctgggacaggggactcacagagcccccggcagtgacactgacagcagcctggtgaccgaggcctcctggcgagcccccaagtggtgccgtgggcagggcagaggttggggagccagctgggggtctgcgggagtcaaggaggggctgagggcctggggccagctcgtgttttgaggaaagcgccgttgaaatggccacatcaagggaacaaggcagaggccagagccctcctgctccagctccggcttcggcgggaaagggctggggaagggctgggaaagggctggggaagggctggggtcacagaggctggggttgcccggaggcacaggggtgcctggctcataggctgggtggccccttgtgcaagaggggagctgaggccgtggccaccggcaggccctgcatgggggtgtgcaggggctgagcctgggctaggccctggtgtctttgtcctggctctgtccttccaggcctctgtgcatcccccacctcctcctcggcatcctgtctgggccaggctcaggccaaacctctgtagtgggtgcgtccccagcacagatggactctccaaccccggggtcaagccctgtgggtgtcaggccaggcagtcacacatccgggtgcccagagcggccaggccactgctgccacccaccaccagtgagggtggggccaggatgggagcaagagctggaggggccgagtggggtcagggaaggctacagagatgcaggctgggagggcttccccatcagagagccgggcctgaggagagggccggaaagtggtgagggcccatggggttccgggggctgggcctctgccctggggacccacaggagggagaagctggagccagggggacagtccacctcaggatagcccagctgcccccgggctcctctgccaggacacgagaccctttggtggccgctgcacgagggctgggactcaggttccacgcagactccaagggcaggtcacgaagagacaccacagtgggggccagaaatggccactgggcacctctgggcaggccaggtctccatgagggaggggtcttagcctctgcaggttccagaccaccaagcaaagctgtctggaaggtgatccatgccaccccacctccttggcctaggacagcctgtgcttgggggtctcagtgaagcctctggatgtgggggaccccagcgggggtgggggtggtggggcaaggtagcagctcagcctcctcagggcctgcccagcagctcagcaccaggaacagctcccaccacatgaagtcaaagctgggggcctgcagccagcccaccccagcagggcctccgcaagccctgtgccctcctgccctctctacgatgctatgtgtgg

SEQ ID NO: 382 - DNA, 2060 bp, Artificial sequence
  DNA replication origin
gggctcctgccgccttctgcactggctttgggaagtcactggctttttccacgtggagcttctgcccggcatgggcttcccacctggaaggcgtcccctttgctctggaggtccctgcccacccagaggctgcttctccagccccaggggttgccagcaggggtgccccagtggagaagggcagagggccagcatgtgacctgtggggtagccaccggagggtgggaagaggcggtcagctacacagttcccctcatagcccctctggtcccagagcagcggctgctgcggtgagcgtgcagagagccgagtactgatgtgtgcgtcggctcagttcagttcacttcctcccggcataaggtagaaaaagccagcagggcccgtgagcgcgcctgtgctgggtgcaggtggccccggggtgccctgggtgcataatggcctggccctgccatagtccttcatggacagaacgtgctgggaggcccggcagccatggaggaagaagggtgcatgtggggcgtggggactccctgcccggcacggagtggaacactgcctggtgcttagtgaggacagaaccccaaacctctgtgtgcagacacggccacctggaggaccagaggtgggaacagtgtgactgcaggggtcacgggaggaggtgaaactgtaggggtgacagggaggggtgactgcagggaggtggtgatgggggagggagttactatagggatggtggaggaggggtgatgggagggtgactgcagcggtgattggggaggtgtggctgcagcggggaggtgctgggggcaggaggcgtgtggtgggagcagacgcaaccccagtgtcaaaccagggggtaagtcaaggtatccggctcaggccgccgggcagctgagggggcccagtgggggtctcgtctgtggcccagagacgtggcggaagaaggcagtacatctcccttcttagagagagagtggaagcttctgagtgtggcttgggtcgttctgaaccatggtgacgtttccaccctgccactgcctgtcttccagtttgacttgctggaaatggaccggctggagaggccactggttgacctgccgctcctcctggacccgccctcctacgtgcccgacacggtggacctcaccgatgacgctctggcccgaaaatactggctcacctgctttgaggaggccctggacggggtgagggctccgggtgccgtctagacgattccaaggccgcagccgggttaaccttccaaggctccgggggcaaagccaaggtggcgaagggggacaggccagtgttgtccagaaaccccttgatctgcgtctgagtgagggggcgattttggtttctcaggcaaaaataccgctcctggccacctggtgggtcagtgaggacgtggcgtctgcgaggcacgttgcttctaagggcagctgatagttctgctagctagcacattccttcaaaaagcaatttaggagacgtctctgctcttttgaggtgtgactgaggtgcgggaggcattgtgggaccctgactctgggggtggggtgagactcagccccagcaagctcccggcgaggccaccttgggactcctgcgtcccaccttctccaaggctgggctggtcccgtggagcaaatgccaggccctgggccacgctgcccctcaggagctcagctcggggccagggagccccggtagcaacacgcactcttcacgaagccctcggagaggccgggtcgtgccagggtttgtcctgagggaggagtcccagccctgcccaggacccggagtgagctctgagtgcccagagcccctcgtccccggcacaggatgggggctcgagtctgaggacgtgggtcttggcctcgggtttcctggggggtgagggaccaaggtcactcctgctcctgcctcccagggcaactgggaggggcgaatggcaaagggaagcctcgggtgaccgtgaactgtcaccgtcagcctttcctgttccagtagaaactgccctgaccacagcccaggcagcccccaccctgcccgagtcc

SEQ ID NO: 383 - DNA, 839 bp, Artificial sequence
  DNA replication origin
tgccacaaaatgtaggctgcccagaatcagtcagaagggaggggtgctgggcttcttggcccccaccctccaggcctccctgggggtgctgcggtgtctaaccagcatgactgattgggaagatcctggggggtctgcgttagaggctggggagggcggcgcatccgttaccttggagaagaagttgatgctataggtgatggtgcgcatggtcacggggtggccccggataaagaagcctccaaagtacacgcggtccaggctgtgcagccgtgcgtggaggcaggccagctgcccaatgtcgttgctgatcatgtgcagcaggctcttcgccatgtcttctttggagaactctgaggaagggaaggaaaaggcactcatctccaagtacagcaagtgcacgacatgagagcgagcaggaggggagggggagagagagctgagtgggaggggagggggagagagagctgagtgggaggggagggggagagagagctgagtgggggaactggagcccaagtgcgggaggctgcgtgtgatgtgtgaatcattcctggacggattaagctttgttttgaaggaggaaaaaacccaatcaggaaactattttttcttccaaaaccaagaccgtggcgtttatctgccgacgttctgagcagtgggcctgagctgcagcgactcggcaggaagaggttacagggctgacacccaagaccccgactctccagggagcagttgtgggaaagcaatggtgggggaagctcctgtccgtgagaccccaagtgtccccaccatcctgctctctggcggcagaggccggggtgagcaccttggtcggc

SEQ ID NO: 384 - DNA, 1642 bp, Artificial sequence
  DNA replication origin
tgcgggggcgggcggggcgccggcggtgggccggcgagcgggggcggcgggaaggacgaagggcgggggcgcgggcctcgcgcacagcctcacgggccttgtagtccgcgggcccgcgcacagcctcacgggccttgtagtccgcagggtcgctgatgcgcgggctcggggcgacggccggactacagctaccggcaggcgccgcagggaccagagcggggcctgccgggcctggtagttcgcgcggccgtcctgggtggctgggggccggggtccagcgttacccgccgcgaggtgggagggtcggcggaattttatgtcttcggccacatcggcatctgggcgccccggctccgccgcttggctggtggctggcctgagatttggggtccttagttctggtcgagacgaggacgagctcggcgggaagcccttggcagagtggccccgaaaaggccgcgcgttcccgcggcgtggccagctgtggcccgcgggccggacagtccgtgcacaggccccgctctctggagagtggacgccgggcgtgagttcaggcggccgtggacgtgggacctgggaactcgtgcctctggtttaaaagccacccgtgccttccgtggcctttaaggcggcctgcacttctgccctggcctctccagggtccgctgcagaccctcctgcctgatggctgtgctctcagtaatgacggcgggccaggctctgttctagacctttttcccacgctcctgactcccggacacctcccagccacctctaggggaggaacgcgaattactcccttttcgcagatgaggataccaagccccagaaaggtgaactaatttgcccagggtcatcgggctagaaagtggcagaaccaggatttgaaccagccactccctgctctcctactctgcccatgtttcaggcatgagggcttcctgggggcagcttcacctggagaaaccccccttgaatagccgctgcggcttcacatacctctccctcttagcactcatctcggtcgtaggctgagtctgcttgtgtgtgaatcccacaagagcagcggtgtgtcttgtagccccagcccccgaaaaggatgcccaacctgtctttgccgcccagtaaatactgggatgaatgggcctgccgctgactgcttcccacctccctggaaaagctgggactcagagagacccaggccattccctctgagctgtgtgctcctggtgcatctgacatgtttgctgctgtggtgtcctcggggttgttggtgtcatcatctctctgagatgtccagccagggaagggtgtcctctagggaagtggggggcgatgagaatggaagtagctataggtcctggctcccacctttcagtgagcttatgggaggcaatgcttcttagggggtgtggcctggtgccaggtatgagaacgtgtgagtagcatctttagggaccgctgataggacttgggactgactggttattgggctgcaggtgctgagcttgcagccctagcctaggggattgtctaccgcaggcctcaccagaggctccccagccatgcttcccagccttctgagaccttgaggcccggtagagcgtgtgctctgcaaggttctgctgcccttacactgggg

SEQ ID NO: 385 - DNA, 1898 bp, Artificial sequence
  DNA replication origin
gcggactacaaggcccgtgaggctgtgcgcgggcccgcggactacaaggcccgtgaggctgtgcgcgaggcccgcgcccccgcccttcgtccttcccgccgcccccgctcgccggcccaccgccggcgccccgcccgcccccgcagcccgcgcccggcgcccggcctgcggctacctatgtcgatggcgaagcgcttggcgttctccaggttgcggaagatctcgtcggggggcagcgtgatgctcttgtccagactgtccccgctgctcccgctgccgctcgctccacactccgccattttgaaagtgcccggccagctcatcagccatggagatatatgcgcatatatttgactgccaaacgccccctcgcatagattatgttaatgaggcgccggccccgccccttccctcccccacccccggcctctgaggtctcggccgctacagggcgagctagggccagtgctgggcaggggtccgagaggcccggggctgcgggcgggcgggcggttatcctccagagatcgcgcatcagcacagaacatctggactgatgttcttttaccgcgctgtccacaggcttaactcaagtgctctgagccctgctgagggaggccgcagaggccgcccacctgcttctaagggggcacgtgggtctgcagactgtcagagagccctgcccttcagcgagtgcctgctgtaagcttggccctgcacgccagggcgaatgtgatgcgctctttgctagggtgactcaatcctggcttcccaggggcgtgggactttcaatgttaaaagtcccatgcaaaccagaggagtggggaaccctgccccacctgggaggagccccagcctggcatgcacctgcgggtagggaagatgtgtgctgtaatggcgatccgtggaaagtgctgtggtcgggggaagccaggcaggctgcctgtgggcaagacaggtgcctgggaggctgcaggaacaagccttggaagcagctggagccaggacaggggtataggtggggcaggccagggttccagggtgagtggctgggaagccctgctggcatgaagagatgcgtcttctccagaggctctgggcgccttgggaaaaagcccagtgttggaagcagacagatcagcccctcccgggtaacccggggtcattactgcatgtctctggccctcagcctctgtctgcacgtggagaatgccaccagctgcctggcagggctcctgggagcacaggcctgtggggcggcacaaactccagggataatgcatctgtgtgcgcagggcaagccttcagggaggaggcatccttgcctgtgtcttccaagggggtgggtgtgtggctctggagggggagcctgccccagggaggcctgggtggaagagtggagcacaccccaggcggcttagacctctggcagctcagacccctggcagcatggtgtgccatgggccaggctggcaggaggtgccctccatgaggggcgcccacctgtgtgcccactgaacatgcgggaaacatgcaggtgaatgggggccttccctgtcctctgcccaccataccccggggctcggtagggaccactggcaggcactgggttggtctggtggggggaccctgtctagactgcctgtggagtagccagaaaggggctgaaggctgagcggagcgagaggggctgagcaggaaggagcaggcagggcaggcccacacacggggctaccattcagcgggggtgggaatgcggcccactccggcccaatccttgctggatggattttgccccttgggagctggtccctgggagccacaggcctcagttcttgcagactcagccaacaccctgtggcctgcctaaaaatacatgccctttctgaggcaaggga

SEQ ID NO: 386 - DNA, 1172 bp, Artificial sequence
  DNA replication origin
acctgcgggcgcgcggcccgacgaccagagggcgagcctgctcctctcgcctgtagggaagcgccttcccgccgtcgtccgccccgggcttggacgcgcccttctccggaaggctctggccccaagctggccggcccgcaggagccccattctcagagaatgtgtgtgcagagtccctgccgttttaggacaatcagggcccatcttctgccaagtgtctgaccccatggggttgttctgtgtttgcatttaagcaagtgacttctgggaagtccccggccgcccggggttctatgatatttgtagtgccggggctcgcacactgctgcccccagcctgtagaggactttcttcagggcccgtagctgctgggcgtacccctggcaggcgggctgtgccgcgggcacatttgccttttgtgaaggccgaactcgagctgtatcctcataggaaacagtgatcaccccggacgggcgtccaggaccctgagggccatggccaaaaggctcctgagtgtgcctggtggtctggctggggctcacggtgggctgtctggggagggtgggtgcctccactatgatccttaaaggattcctctgtgtgggtggatgcgtgtgggcacgactttgtactcagaaattgaactctcagtcacgtggaagccacgggactgctccgaagccgccataataaaatctgattgttcagcccccaacacagtgtcgtctgctgtgcctcacgcctgtccttggcagccatggagcgggtctgcaggggtgaaggggaatgggcagggccatggtagcagttaagcagggagggacccctgccagtggccccctggaccccggaagaagggtggggtccttgctccggaagaacagggggagggagggatggagggaaagcaggtgaggggcaggggcagggggaggtgggctggaggggtggacatggtcggagccctgggtctccccccgcccaggcctttcactagcttccggaaggtaggggtggggcaaggtgacagcgcaggaccttaggctgtgtccactgagaggcgacccagggccacagcccgcagtagatctgttgctacagccaaaggggcttggccctgggccaaacaggagaaaacatttgccccgagttgctgctgcacactcccacgg

SEQ ID NO: 387 - DNA, 915 bp, Artificial sequence
  DNA replication origin
tgtttctgcctgggagcctcccagcctaacccttcacaatggtgtccggctggcctgtgggagagccaccctgcattggcttgaagtcctgtcttcccctgctgtcccagcactgtcctggctgccccctggaccgtccatccttgtgctgaggacctcctggagctaggcccaccaagcgagtcactcagagccgggggtcactgccgagagcctccggggaaggctcctcattggaccctgccagctggccagggaaccccactcctggattcaaactctgcctaaccagccctgatgccagccccagctctgggggctaaggcccttccgctaggacccggcagggtcccaacctgtctctaggagccagcccaggccccgaatcctctcctagtctctgctgcagagcatttgaggaactgtgaccgcaggctagggggtgggggtctcccaagggaccctcccctaaggacccagggtgggattcattgcctcaaagtggctgcgggcactcagctcagttggccaggtaccggggttattagctcatcccatggaccggtggttgggggcggggggctagggctggcatggcctctgatcctcaagtctgccacctggcacccactccctacccactggcaaaatgccagaggaaagcaagccctacaagtgccctggctgccagagagactaggtggagctgtggcatgcataaacagtggccacagcaagcatgccaagagccgaggcctcccgagctgcgtggacactgtagtcagatccctggccagataggggtggggagaggcccctgagggacacctgccagctcgtggagcagccccagtgctgctgtgggttacagtgctcctgggaggacagggtgcaggaagcggggagagctgccgg

SEQ ID NO: 388 - DNA, 1575 bp, Artificial sequence
  DNA replication origin
acccctatctggccagggatctgactacagtgtccacgcagctcgggaggcctcggctcttggcatgcttgctgtggccactgtttatgcatgccacagctccacctagtctctctggcagccagggcacttgtagggcttgctttcctctggcattttgccagtgggtagggagtgggtgccaggtggcagacttgaggatcagaggccatgccagccctagccccccgcccccaaccaccggtccatgggatgagctaataaccccggtacctggccaactgagctgagtgcccgcagccactttgaggcaatgaatcccaccctgggtccttaggggagggtcccttgggagacccccaccccctagcctgcggtcacagttcctcaaatgctctgcagcagagactaggagaggattcggggcctgggctggctcctagagacaggttgggaccctgccgggtcctagcggaagggccttagcccccagagctggggctggcatcagggctggttaggcagagtttgaatccaggagtggggttccctggccagctggcagggtccaatgaggagccttccccggaggctctcggcagtgacccccggctctgagtgactcgcttggtgggcctagctccaggaggtcctcagcacaaggatggacggtccagggggcagccaggacagtgctgggacagcaggggaagacaggacttcaagccaatgcagggtggctctcccacaggccagccggacaccattgtgaagggttaggctgggaggctcccaggcagaaacatcaggtgactttggaggtggcaggaagggagcccctattcaccctcgtacccccgctgtactcccacaacacctcccttgaaggggactcatgctccaggctgtcagagggaggcagtgacactgggggctgggactgctgggggctcatctctgagcaggtggggtcccaccacaacactctggcccttgatggatgcaggagggcaacccgtgtgggggtgtccaggccacgcgctcacgccatggctcccacagctctgggcattgatggcggctggcactggctaggggctctggactcccggctacacaggggatctggttgtgttcagtggagctatttcgcagctgaagtggggttcatgctggcggcagtcacattgtggcatgtcccttgcctgactatgggctccctggggttggactgggggtggggagggcaggacgaggtagtcacccgtgtgcccatgacctatacgctgctggtccagcggccacatcaaggaggtgcttagccaggggctaggggtgcgggagcacgggcaggtggccccagcccaggcaggccctggccagcacctccgccagcaggaaacggaacctgagccacgtgtgccctgaccacccagctgctggcagcggggacagggcctgtgcccagatatgggggtggcactgaggccaggccctgctcccgcaggctttggagcggcaggtggctggggcttgtgtcctgtcctggtcccttcccctgagccagctcctcag

SEQ ID NO: 389 - DNA, 987 bp, Artificial sequence
  DNA replication origin
ggcaggtggctggggcttgtgtcctgtcctggtcccttcccctgagccagctcctcagcccacaggagacacgtgccgccgggagatgtggtccaacctccccacccccacggcccgcccacccgcagtgggccaggatggcggcctgccggaggtgagggtggtgggtgggctgtgtgggggctgctgcctcccgcctcttcctccctccccctggactggagcagctttgatccaattttcagttgtgggaaatatgaaatgaatggtgttgaatcctggccggatgaaaggctggttccctccctgagttcgggccagatggcagctctggcggcctccgaggcacacgcctggcctttgtgggccgtttaacactgtgaatggggccaaagtgtgggaaactcactaggctcccggctcacaccatccacggtgggctgcggagggggctggaggagggagggctggaggctgctccaggctggcaggctctgctccacagaagcactgtgaagtgttggggggctgggatcctccaccttggctgcccccagcagctcagcgtgggatgggggtgttcttgccccagccgggctttgaggagggagggagtttgtcctgcctgcacctccctgagcccccaaccctggagggctcagtaagtctaaggggcttgatagttggggtggggttggcacatctagagttggtaatagtcctcctgcctccacatacacagacattgaggcagggcactttgctgtctcaattcacgatgctgtgccaccatcaccactgtccatctccagaaaatgtccttctctccaagctgaacctctgtccccatgaaacatggactctctattctcctccacagctcagcaactgttgaggcagggggccttcaggcaaaacctacaagttgggcatgattaagctggaatgcacgcgtctagaaccatgacccatttctaaataatccac

SEQ ID NO: 390 - DNA, 931 bp, Artificial sequence
  DNA replication origin
accgccggctctcgtctttaggggtgctctgtgggggtggcgcaccaccatgaggccaagaggaaatcctcggccctttccacgccctggcccctctgctaggccggtggtggcctccctgtggcctcagttccttgcacccctcccctcctaaatgaagaactggaccaaagacctgggtccagaaatggggctggttccagctcctccccacagccagcccccctcagtgggcagcttctctttcgttggtcagcagatgcttgagcacacatgctgagctgggactgaggctcctgcactgggggtaggggacactcttacctgtgggagatgccttgagggtgtagactgggcccggcatggacctgcggtgaagccaggtgcaacagctgagctggagcctgtctgacaccggtggcagagtcgggcagccgcacgccccccagcagagccaacacagttttggggacatagatttggttaatttttcatgtctgtgttttcttgaatgagcatttattacttgtgcagtttttgaaagggcttccccacacacagacacacgcacacacacagacaacacacacatgctcacatacatacatacgtgcatccacatgcataggttcctatgggaggaagtcattgcatcttcagaagggcgagaaagaatccctgaggtggggacaaaggggaaggtgggtgaccaagaggggcttccagagggaacggtgactaaggagggtgttggcgagttctgcttgaggagttctgggaagcaccttccaggcagagggcactacagggacaccagcttggggcaagagagaccaggtgagcaggactgacatctccaagtctggaaggatgctcctgtggttttttttgtttgtttgtttttgagacggagtctcgctcttgttgccca

SEQ ID NO: 391 - DNA, 2130 bp, Artificial sequence
  DNA replication origin
tttttttttttttttttttgagacagggtctctctgtgttgcccaggctggtcttgaactccagggctcaagcgatcctcctgccttggcctcctgagtagctgggattacaggtcggccggtctcagcaccagctgaaacaaataaatagagaagaaagatgtttcactacttgtgaaaaagatgaaattcaagtttcagcgtccataaataacattgtacggagacacagcagggcgccacacccgatgctatccaggaaggccacctcctggcgtgacgccagtggcgtggtaggacagaagcctggccacgtggcctgcagtggttactgctgggccctcttcataagcactggtcccacccgcagtgaaggactacctgccccaggcagagcctcccacgatcgatcgctgtcctcaccgcccccggggggtgccccattcctctcacttctggggctgatgtgggagcctcaggaggggactgagtgagtgtgcacttgagtgtggccacaccgtcctgaggcttcgtcatcgtgcccattggacagggtggcaaactgaggcccatggaaacccagggcccagctgccaggtggaggccgaggccagagagaaccctgggctagggcaggtgggcagcctcacccacccgggtcaggctcctgctttgctcatgtaaccctcacgctggccacaggcacttcctcaggtccctgccgcagagcacgcgcacgggtctgctcttccaccgctgggaaagacctactttgcactgaaaagcgtcccagcttccctcccggctagactggcagctccacatgactcgctggggtcctgggctgacttttggcctttttccccaactgattattgagggggtggcctagctgatctttggggctccacaaacagacacagggtggggtcaacgtgtcttccacagggggcagagtccagggggagcagcagcctggagcagtgctgagggctttgcgggatggcagctcgcttgctcctgaagcagattaggccctgtgaggggctggggtctgggccatactgctgggaggcgggggggtgctgcttgttgtcagttacctgggaagccctgggtggggtccggcagctctgggactctgggtctggaagtccattctcttgtcccactggcctgcaggtgtttggcccttcctgtggccctggccttgttgcactggccctgtgccagcaccccccatctggtgccctagctctgcgagcactatctggccagggtgtgggggaccctctgtctatgagcctctgtcatccacgtgtagggggaccagggagatcacagatgtggggctcaagccccaggccccagtgatcacttctctctgagccttggatcccagcccttcccttgatgtgccgccccaactcttacaggggatgctggcctttatcagcactctatttggggtgtggtaccgagtggggctcccatccccaccaccacccccattacgatgggccagctgtctcaggtaggggcttccagcccagcgtggggaccctcggcagtgaccagcagggaggacccatgcctggggcacccccacagccatggatgggggtctccggggacctgctgcagcacagtggatatggcacccctgtcacagatggagggaagggaggaagaggcctggcgagcttaggcagaggagaggtcaggctgccagcccagccgggcaggaaccaccctttttcattaagtgagcccccgggccgagagttctgctggtcccgtggtgagggaggaggaacgggagggggctctgggagtctgcgcttcctcctctagttgccccctaggtctggcagagaccttcagcctcttgtccccacccccaggactgagatgcatcctggcttcaaccaggggagactctggcttctggagggcagccaccctctggacttgaaggtgcccagggcaggttccagaaggtcctgcttccccccagtaccccggcccagcccctggagcccctgggaatgtgttcagcctcctgctcagtagccctcagcccactgggctccagccccatcaggcagctcccccgccctggagccaccc

SEQ ID NO: 392 - DNA, 1519 bp, Artificial sequence
  DNA replication origin
acgtggcctggggtcgagggggggttactagcaacccccagcaagctcctctgctgagcacgcccttccccagagggctagaggccaggacaacagtgagccggggctccaggacagcctgcctggcgtggcgggcatttctgagtctgggcggttggatgcggtagggggcatggagtggggtgtccgaggggtctttccactcaggagacccttcctggccaagcgacttctggggccacagctcagcagacagggcctctgcagaggcgtccctgcccccaagcatgctgggggcgtccttgagagggtgtcctgcagacccagagataatccgggctttgagaggctgtgagaggctggcccgaggactttcccacagccccacagaaagggccggcagccagctgctcacccacaaaaggctcccggccattcatggcctcaggcaggcggggctgtcggagcggcagccacagcctacctggccacccccagcaggactttcgtgacagggaggcacctcccttctggccatgggggcaggaggtctccagggcataggggtagtcttgtgcagccacccaggccagctgctaccccctctcttttggcccgagactggcacccttcctgggcctgtcatttatcatgggtgcctgggtaaaggatggctcaggaggaccctgcaggcacccactaccatgcctggcgccgtgcctccaccgtcacactacccattgctcgcccccacacgctggccatgagtccccagggctggcaccttccttgcttccaagtctggcctgcacggctctcacaccctttgcaaccatcttcttgcccacccagcagcccaccctgtcagtgtagggggcaggagagggacctggtggggcagtgagctgggtaaggcctcctccctggacctcagtctccttgtctgaggtgtgggacagcactgctgcctcccaaggctgatggaaggacccccaagggcggctggttaacaaataccaggtttggagaagctggggtgtggggctgctgcctggaattaactgcccagagcacctccaaggatgaccttttaatatgagagccagcccaggggagggaagggtcgggggcttcctgggggaggtggccgctggcctggattatcaggaagtgcaggaggagggtgggggcttcctggagcagtggccctggcccccctgtgcagtagctgcggctcagccccttccctggcctgtctccctgttgcttccacagctggagctgcctctgcggcccctgtcctcacccctgaggaggccaggcccgggcaggtgcctgggctggggctgctcctggccaggctggaagactgtcagatggaggacaggtcaggtggtcggaaagctggggacagggagggagcaggtttgacggagggacgtatgggcaggctcctcctcccggtcaggtcccacgtgaccccccagccacgcctacccacatcgccctgctggaggcc

SEQ ID NO: 393 - DNA, 1484 bp, Artificial sequence
  DNA replication origin
gagtgaagagcgtggcggtgcggcggtagcgcagggccctcctgcggggccaggcaggggcgggtgggcgctccttgccacctttctgctctccctgctgtccgagaagttcgtgcggtgccagcccagctcccagctggggacagaacaggaaacgtccccggcgagcctggcgggggtggcggcaggggtgtctgtcgcctgcgctgggcaggacgcgcgtcctaccggcctcccactccgcgggcctcaccagccacctcattcccggagcccgggccgccgagagcgccgcggatggacctcagggaaggcctggcgcgccgcctccgggaagccttccggccttctccctccaccgagtactggggagtctcaggccacggtgaatgaagagcaacgggccggagagacctcggcctctgcccaggagcagcgcccagcaaccccgcccacaggggacccggtggacgccctggtggccactttgccaggctccccatctcccagcgaaccagagaggatttccgttcccctcctgcttggtgcctagcgccagggcggggcgtgggctgagcagcccctcccatggagggagcggccagtctacatattggaggtggggctctggggaaagggtgttgttaggaaggcggtttgaggcagcgggaggtggggatgcgcccggcggggaggggcaggtgtgtggggagggcctggggagcgcctccccagccgggcagcgcttccccagccaggccccgcagctggaccccggctccgtccagcctgggaaaggactccacggtttatgctgaagtggtggtggggtgggtgaacgctgcgcaatggaagggcatggccctgtgctaattgccccggggtgtggggctgtggaggcactgcgggggggatgtgctgtgtcagttgggcaatggcggccaactgtggcgtgcaggccttggagctgcccctccatggagctttaataaaggcactagccctgcaatttctgcctgagtttctggcccacagcttggccgactgcagcccctgagattggaggcttctgctcaagacgtgggcagggagctcggggctccctgggctggggccctgccccgctggcctctaccctggcccctgctggaaagcccgtcagggctgctctgagctggggacagctcctccctgcccacagcaatctgggggagccccggtttgtccagtgcccctgtgagccctgctgtgtaccagccacctgtgggagtgtccgccagtcacctcccaatagctcgggaggcagagcgacatgactccattttagagatgagcaaacggggctcctgcactctgggaccatgacagagacacaggaagtgagagtgggctgaggccctgcagcagtgggggccggccttggaccgtgatccaacccgaccatggctgcccaacccccacgggctcacctggcccctcatcga

SEQ ID NO: 394 - DNA, 976 bp, Artificial sequence
  DNA replication origin
cacgatctggtgaaggatttgagtccagaagccaaacgtctacagtcgtgtggtgcggacactcaggatggactgcccaggccatggggggctctgagggatgaagaggaaactgcgggggcgaggtgggctgcgcgtctctgagaaagtgtgtgagttgagtgctgctgcagagggaagctggggtccaccgctggtgagcggggaggggacgggacacagaaccggccgtggcccaccccgagacggaggcgcagacaccaggcccgttctgtgctctggaggctttgggcagctgtcaggctagtggacggtgtgcagagcagatggaggcgtgaggaggcggctccggggtcacctaggtgggcagccctcacaggggaggccgagggggagggcaggagggcggagcaggcggcggtgcaggaggcccgtggaacttggagggctctgtgtccagctctcatggcccagggcgggggcagctccaaggcctcgggcttggggacagaagggagaggacttgggggttgggggtggtcagagcattgtgggagggatctggggcagctggggcttcccagagggtgaggtgtctgctgggaattggggcagccccaggcgtccccaggcctccagcccagccccggttcctccacgctgcaggccagggtatcaattgcctgctgggaaacctcagggtgcctctgtctcaagtgcctgcccctgacactcctggccctgggctccccccgcctccccgtctgtctgctttccccacctcctcccctcccctggccgtctttctgactcggggatggcgtcacctctcaccccaaatcaggaccctgggccccagctctgttccccacctcaccttccttgtgaccaactcctgacctcccgtgggcttggggtgtctgtggccggaacattcctcagaccctctcctccagccccactctgtcccaccacc

SEQ ID NO: 395 - DNA, 925 bp, Artificial sequence
  DNA replication origin
ctcaccagcggtggaccccagcttccctctgcagcagcactcaactcatgcactttcttgcagacgcgcagcccacctcgcccccgcaggttcctcttcattcagagccccccatggcctgggcagtccatcctgagtgtccgcaccacacgactgtagacgtttggcttctggactcaaatccttcaccagatcgtgaccaggagggcaatggccaggcctcggcctcagccccctgcctggcctgcactggcacagagcaggggaggtgcaggccgaccttgaaggcgcaggagtggagggggagcccttaactgggccccggaccctgccctccatcccttagggtgtggctccagccctcgggtacccacagccgctgtcccatcctctgtgcccaggggctcccatcaacagaaaagggaagcatctttgggggtttctggacagtcccctggagacggccctgccgggaggttggggtgtggggctgaccctgtggggatccatggagacccaggtcggggctgtgtggagggcctcacggagggcagtggggtgatgcggtgctggactcttgggggcctggggctcctcagctgttgcagagtgatggggggaggcccagcctgggggtgagggtctgtgttttgtgcccgtgacactgaccagtctcagcctcagtttccccatctgccccggggggaggtgtgcccagaatgccctctaaatcccctgcctgaagccgggtgtggtggctcacgcctgtaatcccagcaccttgggaggctgaggtgggtggatcacgagatcaggagttctaacccagcctggccaagatggtgaaaccccgtctatactaaaaatacaaaaattagccaggcgcagttataggcgcctgtaatcccagctactcaggcagctg

SEQ ID NO: 396 - DNA, 1408 bp, Artificial sequence
  DNA replication origin
ctcccacctgagcgggcccggcctggcagagtctgtgctgctggcacgggtcctcactccccaggccccaggacagctccaggggcctgggcgggctggagaaggaagggggagcccccacactgtattccaaataaagagaggccccgggggggtgctgctgcttcgcctgtgccctcgccctggggtggtgaaggtccagactgcgaaacggaagtcgtcactatgtcagaaagggcaaaaagcaaaacaaggaaggggaagcactaggagggaggagctgtggcagctccagagcccaggagtgcagcccccagagaccagggctacccctctaccgtctcgggctgtgcaggaggggccctctaccctctggagttgtgcaggagggggcccctctaccatctggggctgggcaggaagggcccccccccaccgtctcaggctgtgcaggagggggcccctctactgtctcgggctgtgcaggagggggcccctctatcttctggggctgtgcaggagggggcccctccactgtctcaggctgtgcaggagagggcccctctgccgtctggggctgtgcaagcagtgagcaagctgccgcctccttgggagctgggatcccagacgggattcagccattttcagagacgttcccagaaacgagaatgcgagatcaattcctcgcctggcatctcccaccaacgccatcgctgcaggagcctcactggaagccaacgggcagaggagagtgggaaaggagcttgcagcctcccagctccagtgatgcagagcagaaggtggctgggaggctgagaagccataagaaaatagcagggccagcccatgtggccgctcagatacatgctatgtgtgtgtttgcatatgtaggggctgaaaaactccacctccatccttttgaggtcctggctgggcccaagagttaaatcaagataagacagatcatcatgccagtgtatttgattaaagttggatgtggctcaggagccctcctaaggaagtgaagacccagtgaagcagactcagtcgtgtgctgagttggacagagaacagtgaggtttgaggaagcagctagatgatgtggggggctgaaaaggtgagaggcattttatcagggactgtacagcatttgctgggtctcagcttctcatccttgaggatcagagctttctagtgtagggagagcatctttcacctgggaatttcatcttctgcttttaagaaacacaagagagatcagaatgatctttttgcacctgttattgttttaactgcctttaattcctaatagtgactatgccagagcagcctattttggggtggcaccttcttaactctgcatactgtacatatctggcacacatcatttaaagtaaatagacaggct

SEQ ID NO: 397 - DNA, 831 bp, Artificial sequence
  DNA replication origin
ctgctccgccccctcggattcgcccctagtcccgccttgtttcccctcctactccaggccaagcctcgagatcgcggcgccaaatcctgggtccgcctgcttcggtccctcccgcctcctcaatccgggccttgcgggacagttgctgtcccgcgtcctggtcccgcccctagccccgcctctccgttgggccgccgacttggaccccgtcggccattggcgcagcaggcggagctgggcggtgcggccctcggtgcgcggtgcgcctgtgcggaatgcggcgggaggcgggcagccggctcggggtcgtcccggggggcgccggggagcggctgggtacggtgggcccaggggtggtccagggagcggcgggggtctccctgcggcctcgcgcgagactgggctggactcagggttgaggggagagggtgagcgcaggggtcgcgggcataggggaccgcgggccggggtctcccgcggggcgggggtcccagcagtggggggcgggggggtgcgagggcttagcctttccacgtggcctggttttcgcttgaaaatccccgcaaatgcggcagcatctcaattatacatggacgcgatgtctttaatcatgaaatactgttcatgtcgtgccggttgcatatcagcttttaacccgccaaaccttggggcgaaatagaccccggggagataagcacagctcccagaagtgcactgcgggtcaggtgcctggcagatgcgtcctgttcctcccccactgcagccctgtgatagcttttgtcaccgagttggggtgagggccgggtcacagcttcacccggcctgggctcc

SEQ ID NO: 398 - DNA, 1543 bp, Artificial sequence
  DNA replication origin
gggtgcggtcgggggcgtggccggggcgcgctgcggccatcttgggggcgggcccggggcggagacgagcccgaaggggcggggcctcggcggcagcaagaaaggcgggaccggggcatctcggggcggggcttggggctggatctatgagccgggagcggggatccaggagcgaggagccgggagcggggaacagggagtcggggagccgggaaccagggctggcagcggccgccatgagcacggtggaccttgctcgcgtgggcgcgtgcatcctgaagcatgcggtgaccggggaggtgaggccgggtggacgcagggcggtgggcgcgtccctggctccttgcccgggcgtcctggcagcgatggggtggtgggggccgcggggcctgggcggggctgggggcaacggggcgcgcccatgacccagccgcccggcaggccgtggagctgcggagcctgtggcgggagcacgcgtgcgtggtggccgggctgcggcgcttcgggtgcgtggtgtgccgctggatcgcccaggacctcagcagccttgctgggctcctggaccaacacggcgtgcgcctggtgggcgtagggcccgaggccctgggtctgcaggagttcctggacggcgactacttcgcgggaggtgcgtcctgttccccgccgcggcggcgcacatacccttccctaagctcagggcgttcggggccctttcctgcccaaccccggcccttctgtctgctggagcggccttgatatgcccacgggtcagcgtccctcatctctccctgcctccccgccccgcagctggtggctgggtggtgccctgcacagacctgggcccagcagcagagtctggacgagctctgccccgccggctccacctgttgcctctgggactcagcccctcttctgaggggaggggggacactcagccccgttttacccctccctgccctgcgggggtgggctgagcacggagggtgggcagaggaacagagggtcggaaggaggagggcgattctttgtggtgagtgggttgggggctggttctgcgcctggggcacacacatgtggcttccgctttccagagctctacctggatgagagcaagcagctttacaaggagctaggcttcaagcggtgagtgggggcgggaacccttgggtagcgtggggtggggggcccaggggttcccaccgctccctgccacctcctctccctgctgccctctgtggtgctgtccactcgggccttcctgggcaaggcggctctggtggcactgttgaccagcccttctgccaggccttctcttgggtgctgggtgactgtaatgagccacctcgtccggggcttactctcggtgtccagaccacctcgtggggtggagcctcgtggcccatcaggggccatcctagctttctggtgtctgtgccacaggctgcttcctttgcttggcagttgccagctgagccagatccctgggcacacccagcctggggccccatccatgctccctgcaccctctgtggaccctcggcta

SEQ ID NO: 399 - DNA, 1225 bp, Artificial sequence
  DNA replication origin
cggtgagtgggggcgggaacccttgggtagcgtggggtggggggcccaggggttcccaccgctccctgccacctcctctccctgctgccctctgtggtgctgtccactcgggccttcctgggcaaggcggctctggtggcactgttgaccagcccttctgccaggccttctcttgggtgctgggtgactgtaatgagccacctcgtccggggcttactctcggtgtccagaccacctcgtggggtggagcctcgtggcccatcaggggccatcctagctttctggtgtctgtgccacaggctgcttcctttgcttggcagttgccagctgagccagatccctgggcacacccagcctggggccccatccatgctccctgcaccctctgtggaccctcggctagcagccactgggctcggtgtccaacctgccggtgggctgggctggctactgatctggtcgcctgtgccatctctgagccctggtgaggcgggtgggtggggtggggcctgacctaggaactggtctcatggacactggagcaggctctggacccaggcttctccggagtttggccaagcgacctggtgtcttcgcaggtacaacagcctgagcatcctcccagcagctctggggaagcccgtgcgtgatgtggctgccaaggtgtgtgcgggtcaagggtgtacaggccggggggtggtgggagctcccaggagcctttcttctaggattgactcaggctgtacccactcctgacaggccaaggctgttggcatccaggggaacttgtctggggacctgctgcagagcggagggctgctggtggtcagcaaaggtgggtcgagggaggggcctcggccactgcctcaaggagggccttgctgaacttggtggcccagcccaggccctctctctggcttgtcagtctcatcacagcccctccgccgcaatgtggcctggttctgcgtgtctgctgggctgagtggggctgtggcagaacagctcactcatctgggtagccgggtgggggatatggctggccagggctgccctaccctccctcctcctggtatgtggctgtgaggtgcaggcggcctccggggtgccgtgactgcctgcccgctgctacaggtggtgataaagtgctcctgcatttcgtccagaagtccccaggcgactacgtccccaaggagcacatcctgcaggtcctgggcatctctgcgga

SEQ ID NO: 400 - DNA, 2061 bp, Artificial sequence
  DNA replication origin
gggccttgctgaacttggtggcccagcccaggccctctctctggcttgtcagtctcatcacagcccctccgccgcaatgtggcctggttctgcgtgtctgctgggctgagtggggctgtggcagaacagctcactcatctgggtagccgggtgggggatatggctggccagggctgccctaccctccctcctcctggtatgtggctgtgaggtgcaggcggcctccggggtgccgtgactgcctgcccgctgctacaggtggtgataaagtgctcctgcatttcgtccagaagtccccaggcgactacgtccccaaggagcacatcctgcaggtcctgggcatctctgcggaggtctgtgccagcgacccgcctcaggtgagctgggccttgggggcgctgcctgccagcccacgccctgcccctaggtcccctgggaggagcactcggcttggctgggagctgagccacagcgctgtgggcatcatgccaattgtgccctgggatatggatgccactgtgaccccacttgcagagtggggcaggctgagaggggccgaagggcagcatggctggatggacaggcaccttgggactgtcctcagaggtgggggcgacacatggggtggcgggcagagaggcgtgtcctctcagccttgggagggctggggattgtccaagggggccctccaggcatttgtctgatccagtgtccagcggccccatgggaccctgctgtccccacagtgtgacagagaggtgtgagggaggcgaaggccctggcctccgaggatctgggtggcgtctgctgccctaggtgtgctggaagtccacttggaagaactgttccggaggcgctgggtcgggatgccgaacctctcctgatccgccggcagcaacgagccattaaaactgcagttcctgaccacgcactgcttcgcaggctccgagccctgcatcctccacagcccccgccttgctcactgttgggccctcagggcgggcagggtggctgtgagtcccaggtgtcatcttcctgctctgcgactttctctggagaccttgggcctttggcctgtggggcactggggatggtaacctcactgccccgtcactcccttcaaaggcgacagacccaagcccacgtcaggagaggagcgtggggtcagctccagcagggtcggggtcagtgcctgtgtctggtgggggccactcaggagagttgggttttcagggcagagatgggcttgattccacctggtggggtgggtggaccctggagactctcaggtgatgggccagcctgccccaaggctctttactgatgtcagaatcattgtttgcacctgctgggtatggcctttggggcggccggcccgggagggtcttagtctaattaggtgtgtccagcttcttggccacctttccctggggaccctaacaggcccagagcagagccccttacctcccaggtcagactacctgctcaggccctcccctcccatgcaggccgatgacaactgcagccctctctgcactccctagtccagacctggggaccactgtgggttcctgtgggtctcccggctcccttcctgcccccaatgccacccttgcagtggccatttaaaaatgcatagcaggtgacccactgcgtccctttgcgttcagcccctcctctggctttcagttacaccaagctaaaatttcaggttcccagctgcagctctctgggtcccccggtgccccagtggggctccccgcatctgaatgtgtggtccctgggggtgggcacttgggggcatcctggtcactgctggccctagcattggaccctaggagacctgactggaactggctccctccccatcagctcccagctgtcactctctcccacccccgggcagctgttttgcccaagaccactgctacctgtttacccaccctggtccctcccagacaagcaaggcctctgatttctttgaagcatttacttagctcaagtctgaagctgtagatactggaagacaatgcaccttggagggtgggcaggacacagttg

SEQ ID NO: 401 - DNA, 1663 bp, Artificial sequence
  DNA replication origin
gtcagggccggggctgccccaatcctgtctcctgtgcgcaggtgaacggattcaacacccttggggaaaacattgctgacaacggaggggtgcggcaagcctataaggtggggcctggcaggggagggggcgtcagcgcggcaggggagggggcgtcagcgcggcaggggagggggtgccagtgcatcaggggagggggcgccagcacggcaggggagggggcatcagcgcggcaggggagggggcgtcagcgcggcaggggagggggcgtcagcgcggcaggggagggggcgccagcacggcaggggagggggcgtcagcatggcaggggagggggcgccagtgcatcaggggagggggcatcagcgcggcaggggagggggtgccagcacagcaggggagggggcgtcagcatggcaggggagggggggcatcagcgctgcaggggaggggggcaccagtgcctcaggggagggggcgtcaggggctcattcgggacaggtggtgtgcagtgggctgtctggccagggatccccccccgagggcccagctcaggggtccctgagtgactgaggtggtgagcgctcatccgtggggtgtgtgaagggcccttgcagcagcaggacccccacaggggtaggtcctggagccagacctctgctctgccctgagatctgagggttctggagtccaggctggcaggcctgagctcagctcctgtctggtgcctgcaggcctacctcaagtggatggcagagggtggcaaggaccagcagctgcccggcctggatctcacccatgagcagctcttcttcatcaactatgcccaggtggcagccgcagtcctggtcccaccatccccatgcttccccactcatctctggagggcccactctggggcacctccagggaccagagcccagcatggaaggccccttgggggaaaagcatgaggggcagggggcgggagctggacaggatttcaatgctgatgggaggaggggagcacctgctgactcccctcaccccaccctagaaggggcagcctggggatagtggagaccctcccccacccctcctggccaccccaccacgccacctgtagccacgcccccaacatgcccacaggtgtggtgcgggtcctaccggcccgagttcgccatccaatccatcaagacagacgtccacagtcccctgaagtacaggcaagtctcccatgctcacaacccccttgccacccacaaccccctcacccccaccccagtggcctgtaaaagaagaaagcacaaaaagtggctcaacagagacaggtttattttgggaataaacctgagaggggcttctggccgatttcggtcagggacattctcttacagactaagggcatttaagggtttaggaagggggagcctaccgcaggctgcgaatgtttctgtgtgaaggagagttttattgcagagttggaatatctctggctggaggggaggttattctcaggattggcatgtttctggtcagatgggggtttatctcatggttgaaatgtttctgctcatactgacatgagccattaggctgatgttttgggctggtttttaatcacggagaacttaaaatggccatgtttgtccaagatggcaatgctcctgctgtcacacccacc

SEQ ID NO: 402 - DNA, 1393 bp, Artificial sequence
  DNA replication origin
gatgatccagctgtgatagacaagccggtctctgggagccgcctctccggggaccctccctctgggctctctctgccttgatggaccagggcctaccctggccacaccagagcaagggcccaggcctatcccaagatctggttccttcctggggtccctgaggaggaggcgacttgggccccagaaagcagagggtgatgggggactctgtccaagataggcccagtgactgcacccctcagctggcactggaccccagccacgcatccagtcccccgcctggcaggcagccctgcacgccttactggccactccctggccccccccgcccatgccgcaccagcgatgccactcacagatttgggtccaccttttcccgaagcttcctgaggctccgctgggcgcccaccttgaggttctgcagactgttctcaaagtacaggtcctctgagaagttcagctacgggagaggggcagtcactgccagatgctggggccgggccctcagaggagcaaggggagaggtcctgggtggttggggaaggacctcaagccttgccaggcgtccgcacgtggacagtcggctgtgggtgcaggtgaacggggcagccctggctgtgggcatttacatgactctgagcaagtccctcgtccctccaggcctcagtttccccatctgtacactgagggtagtgctggagccaccaccctagggcacggtgaggacagctgtgttagcgcctgggaggagggcacagagcttggcacagaggagcccccaggcaatcagggcccatgtccacggtgtggggggcagtttagggctggggttgggggcgcacattggagtactcctcgtccaggcgcctgttcatctcctccaggatgtagtcagggtgcccgatctgctcccggatgctcatggcctgagtggggaggagggactggtcagtgggtgccccactgcggatggagtcagcccgggggccggtcagtgagtgccacactgtgggaggggtcagcccggggcatcctggctgtgctctccctgtcctgtggtgaggggctggggggctccgggatctggcccccaccttgcaggctctggggaggtttaatggggacagaatatggaaggctccgcccacctgacctagagcccaacagcccgccaggggtccgggtgggggcaggggccctggaggggtcactcggctgccgtctgtcacttgggtccagaggagcttctggtgggtctgacccttgctcccgaggccaccgctacccccgctggctcatggggggtgctggggatgtcccaggcctggttcctgcccctgcctgcttttcctcagctccacagtgggcgagtggtcctgtctgcgcctcccgg

SEQ ID NO: 403 - DNA, 2062 bp, Artificial sequence
  DNA replication origin
ctctgcttataatatccttattttggtatcaaggttattcttggcctcataaatcaagttgaaaagcattttctcatctctggaaagttttaataagattggcagttttccttaaatgtcagatagaatccactggtgaagccaaatgggtctggaaatttctttattggaaagtttcaaattaaatattccatttatttaacctagaagactattcatattttctatttctttttttgtcatttttgctaagttgtgtttttctaggaacttgcctgttatacttaggctttcgcatatatctgcatgatcgcttgggtttttacagctgtaggctctgtaataatgtcacccaccctttcctgattctgattacctgcacttctctcttattccttgaacattcttcaacaggggctgggtttcttagattcccaggaactgtttctccctctctctctctccctctttctccccacttcctctatctgcagggatttaactggactctgttcatacaaactgtgctatcctctgtcaaaatcaagctgctgccagatgaggaagtggtggtctatggcatcccctacctgcagaaccttgaaaacatcatcgacacctactcagccaggtgaggcccagggagggtctccaaaggcctcagcatctttgcccctgctctcccatcctccccaacacagcttctgctcccaggaggggaccctatgaagcatctgccctgaggggtgtgggacatgaggggttaagctttagtggccagtggagtcttacattaaaaatgtgtcacatcccaagcacccggggcagatgggctggatcttggaggtggttgtcctggaggttttctccagcacccataactctctggggtggaacgtgctggccaagggccctaagccatatctcctcccttgcaaagacctctcacctgttctcccctcaccctctaccttctgcccccaggaccatacagaactacctggtctggcgcctggtgctggaccgcattggtagcctaagccagagattcaaggacacacgagtgaactaccgcaaggtgagccccttccctgcccagagcctggccgggcactcattcattcaggccacgatgctgagcataagctgtaggcaaacaccgaggtccacaccagggtcacagccatggacgaggcagggcgaggcgcccaccccagtggggagtggaccatgacagtcaacaaggcagaacgtagctctgccaaaaccgcagagtatgatgtggcggggaggcagggagggacgaggacagggagcactgctccggggaggcgacatttgagaccttaaaggcctgaagaggcggcggggtgatttcccgggagcagaaacagccagtgccagtgcagaggccagaggcaggagcaggcaggggccggacccgtggtcagcagcggacaggaaggagaagatggcagggagggaggcgaggtgaccacgggccacagcagccggtttggattgtactccctgtctgaaagccgcaggggtgctaagagcagagacgcggtcagatatgctgctcctgtagtcactgtggctgctccagggctggggtgagggtggagacaaggaaccgcagggaggccctagggggattctggctgttctggggagagtgagttgagtagggggcggggtcagcatggaggccgatgtggtcacccaggtgaggtgacaggcttggccatggtgctggcagacacacagacgcaggggaggtgttgaccgcagcagctgagggattgggtataggggctaagggcagaggggagtcgggactctcaagacctttgttagagtaatgggagggacagaggtccccactgcaatggggagactgaggcagaggcaagctgggggcaagtcaagcctcctgttgccatgggggggtaggtcagagacatctgtgagtcaagcgtcaggggggcactgagtctaggagctttggggaggaagaaagggctgcctccctttcctaaagggcaggaagtcctgcagc

SEQ ID NO: 404 - DNA, 1089 bp, Artificial sequence
  DNA replication origin
ccccagcactgagagccccagcacccacctgtgcaaacccttataggcagccacacagtttaagccctgagcagccctgcagactaggtaccccgtccagtggctcgggcacaggtcacgcgtctgagacgctcccactcggcactctgtgtgcccgagagcctgctggtcaaggtgggtggacacgcattaggggcttccccatgtcctacgcccaccccacccccacagaaaactccctgggggccatggtggctgaggccacccagctctgcccggcgtcctttggcccaggtgcgggaagcctacctgcagttcatggtgtcagtggccacgttgctgcgggaggatgcaaacctgcccagggacagctgcctggtgcaggaggacatggtgcaggtgctggagctggagacacagctggccaaggtaagggggccggggcgggtggggagcgggcagcgagtgggctgggagccccaggcggtgtggctggccaaggtgagggggtgctgggtgggccggtagcaggcagggactgggccaggagccccagggggcatcctggccacccgcccgtgtgactgctatccccggcacaggccacggtaccccaggaggagagacacgacgtcatcgccttgtaccaccggatgggactggaggagctgcaaagccagtttggcctgaaggtgaggccacaccacacaggaggccggcactggccgggtggagactcgtgggggacatggaagcggccctctgagagggcacgttgcctggcatttaagctcagaaacattccccatccccgagcagggagaccctgtacctgatcacccaaacttgctgcagagcagcaccagcacgattactaatgtcactgggacagcagtgccaactgtgccatcctggaacagagtcacccatctgtgcggtgctgtgatggccccggtcttctgagcaggaaacggaggcctcagggggctgctgatgtgtgggggtgtacagggtcccacccagggctctcagaccccaagtcccgctcagaaccttagcagggtgcttcctcccagtcctgcctgccct

SEQ ID NO: 405 - DNA, 1316 bp, Artificial sequence
  DNA replication origin
gcggggaccccgggccccttgcccagggtcacaccttctgtatttccagatagaccagcccaccttgggcatgccctcccgagagtactacttcaacggcggcagcaaccggaaggtgggtgggtcctcaccgcaatgccagatgacccccccatcaccccctaccccgtggtctggccttcccgttgcccacctggccttccctccccgaagctggtgttagtgagcacctgtggaggttgagcccggcactgagggtggcgggtgcagacgtgacctattgcttgccaccatcctgggggacgttccctcaacacccgggccaggcctggggacaagctcagctcagcagcagccccatggggcagaactgtcatccccctcccgtcagtacagacccaggctctgcagcaccggattcccaggagggcccctggagatctgagtgcaggcagctgggccccgagcctgctccatctcaaggggctgtcaagagaggggagggatgaggacccccactgtggacaaggggaccttgaggctggcaggcccagggctagcccagggtgcagggaagggtggggaaggacagggagcaggtgaggagggcaaggcatccagcaccagggcagaggtgaacaggcatgaggcatgaatgccccagagggccagacacaatccagggggcctcctggtggaggtgggctatgaactagactttgaaggatgaccaagcccagaggaagggccgtgtggccaaaggtggagcagtggggctgagagaaccacgccagagcaggagggactggagtgtctcaaaagcgccatgtctggccatgtgttcagaccaggcagctatgggccaagcctggccagagcattggcctgcactggggaagccctgcccagcgcgaggaaggcagctccctgaggagcaaacttcctcaggatcccactccagacactcaggccgggaagcacctgggtagggaagcccaaattagccctggcacccaccaccccggcacccaccaccctggcacccacagccccggcaggcccaagttagccctggcaccccaagcccagcaccccaaccccagcactgagagccccagcacccacctgtgcaaacccttataggcagccacacagtttaagccctgagcagccctgcagactaggtaccccgtccagtggctcgggcacaggtcacgcgtctgagacgctcccactcggcactctgtgtgcccgagagcctgctggtcaaggtgggtggacacgcattaggggcttccccatgtcctacgcccacc

SEQ ID NO: 406 - DNA, 766 bp, Artificial sequence
  DNA replication origin
ggtctcgttccacctgtccatcgccaccggccagcctcccaccacctccaagatgtccagcaggggctgagagcctcgcttctctatcacacctgagaagggacgcagtggtcactctcccagcctccctgtggctcacgtgccacgacacagaactgtgggggcgccgttggccggcgtcacaggtccccacagcccctgcagtgctccgcgagaggcggcctcccagcctctgggcctttacacctgcaccctcccgtcacaggtcagcatcttggcagctctgcagcgcaggaggcggaggctgagactggacacgggcgtgaaaggagacctgggggctgagaaaagcacatgagccccgggggacaaagaggatgatgggaggcagcccctggggcctgggagccggccagcaggcgaggagcctgggagaggagaggaggctctgggatcaggccaagcctcggcgaggactcaggcagcggtgggtgggctgggagggggcgcggggtaggcaggggagccctggggcctgtgtgtgtcctgtgtctcggctcagcacggtggggccccgacaagcagggcttttgcagtcgaagattaggtaaaggtggggacgcggagatagtcactgtgggaataagtgaagaccacccacagggcaaagtgaaggcttcagtgctggcacagcatggcaggtgccccgtcaggtcaaaggcctgcagggagcagcagggcttcctagtggaagaggggaggcccg

SEQ ID NO: 407 - DNA, 966 bp, Artificial sequence
  DNA replication origin
gagacctgggggctgagaaaagcacatgagccccgggggacaaagaggatgatgggaggcagcccctggggcctgggagccggccagcaggcgaggagcctgggagaggagaggaggctctgggatcaggccaagcctcggcgaggactcaggcagcggtgggtgggctgggagggggcgcggggtaggcaggggagccctggggcctgtgtgtgtcctgtgtctcggctcagcacggtggggccccgacaagcagggcttttgcagtcgaagattaggtaaaggtggggacgcggagatagtcactgtgggaataagtgaagaccacccacagggcaaagtgaaggcttcagtgctggcacagcatggcaggtgccccgtcaggtcaaaggcctgcagggagcagcagggcttcctagtggaagaggggaggcccgagtgggctgagtgggggctgctggcctggggaggctgtggcgggctcactagaggccggcctcctctgggcttggctagggtcctatgctggaggaagggacagacattccaggggaggctgcctgtgatgaggcaggccccggctgttaggggccggatgccgtggggagtgccgtctgacctcctgggctgcccactggggataaagggctgggttcccggctgggctgccggtcctgagttgcgttccagttttccacatggtctggcccctgccgtttgtatattcagcctctcaggccaaaaattaagtaaaggcgaggacacaggaagtcatctccagctgggagtattgcccagaatgggggcccagccttctgtttccatggggaggagacaagcccagcgcacccaagcaggggtctcacggagacgccccctaaagccagggtcccagcgagttccacagtcaggcggaggctccacgagaccccctgggcaaaacaaccagccctgaaccctggtgct

SEQ ID NO: 408 - DNA, 1243 bp, Artificial sequence
  DNA replication origin
gaccccagactggccccttcccgccgtggtcccgtgacctgacccggccttgagcggggcgggggcggcaggaccctcaggtctctccgcaggatggcagcgggggagtgaggcagccaggtgagcccgggcggcgggagggacacggacgccggtggtccccagccggggctgcgcggccaggcagggagggggtgggcggaggggcgggcgacgggtctgcgccccccaccctccgggagtccggcggaggcggaggcggaggcggaggcgggcgggtgcggagctgcagaagcagcgcgcgggagtcggggccggggcagagctttctggaagggaccgcgggctccctgcaggtcagtgcccctcccgccgcctctgagtccgcagctcggccccgggagcccctgggtgcccagtgcagacccacctgccccatctgacgggcgggctcgggctgggggcaggcggaccctgcagcaggtgcagcggggcgagcgcggagagcgggcacggggacaggcgggggcggggcacccgcactcacctctgcggtcggcgtagaggacacccaaggccaccagggcagcggtcaccagcagcagcagcagcagcagccccccctccaggaaccccgggcgcttctgccctgcacggccggcgctctccaccatccccactgggccttcggacttccccatcagcagggctctggacgggagagcaccgcggaggaacctgcaggcccagggcaggggagaggggagaggggcgtggagctccccgagcccggcccgaggctggaagggccggatgctggctgggagcgggcgctgggtgcctttggaacactcttcccgtctccctctccaagctcacaaccctgggtgactgggtcccgggactttccacactacccctgggccggaatctctgagtgcatggaggttctaggactgggatgctcccagcttggggtcgcaagctggacccaggaggctcagctcctgtgctgtcaagggactcctgtagtggagccccccccctgggctgctcatgctggttgtcttggagctgtgggcctgagcgctaggtcagggacgctgtcggggaggccacttgggcttctgggctcccagcccacctttcctgttgaagcccagaagccagtgatgggcgacaccagaacagtaggtacccacacaggcggtgactacgtgggccaggaagggatctgcagggc

SEQ ID NO: 409 - DNA, 1685 bp, Artificial sequence
  DNA replication origin
gctcacaaccctgggtgactgggtcccgggactttccacactacccctgggccggaatctctgagtgcatggaggttctaggactgggatgctcccagcttggggtcgcaagctggacccaggaggctcagctcctgtgctgtcaagggactcctgtagtggagccccccccctgggctgctcatgctggttgtcttggagctgtgggcctgagcgctaggtcagggacgctgtcggggaggccacttgggcttctgggctcccagcccacctttcctgttgaagcccagaagccagtgatgggcgacaccagaacagtaggtacccacacaggcggtgactacgtgggccaggaagggatctgcagggccaggcaggcttgagtctcaaccctggcagccacctggctggtgtgcagctctggtcgtcccctgaccctgttactatggaggggacaccttctggagccagcagggcagtgggcagcacttgaagacacacacggctgggcacaggctgctgctgtaggcaggacagggagctgggcaggaagggttggggcacaggacactggactcaggaggctcccaagtctgcgtgctccagtgtgcgtgtatgtgtgggagtgtgaacctgagtgtacacatgtgtgcaaatgagtgtgtgcatgtagttgggcgtgtgcatgtgtatgactgtgcgtgtgtgcatatgttctgatgtatgatcgtgtacacacacgtgtgcacatgttctggtgtgtgcatgtgcatgactgcatgagcgtgaacgtgtgtgtgcgctctggtgtgtgcatgtgtgtgtgtgcacgtgtgtgcgtgtgctctcgtgtgtgcgtgtgcatgattgcgtggatatgcactgtctacgctcatgtgtgcatgtgtgtgactgtgagtgagtgtgcacgtgtgtgtcctcgtgtgtgcatgtgtgtgactgcacgtgtgtgcctgtgctcgcgtgtgtgcgtgtgcatgattatgtgtgcggatatgcacgtgtgtgcgtgtacactcgtgtgtgcacgtgtgtgactgtgtgattgtgcacgtgtgcgtgtgctctcatgtgtgcatgtgcattatgtggatatgcacgtgtgtgcctgagtgtgcacgtgtgtcctctcgtgtgtgcgtgtgcatgattatgtgcgtggatatgcacctgtgtgcgtgtactctcgtgtgtgcatgtgtgtgactgtgcattgtgtgcgtgtgctcttgtgtgtgcatgtgcatgattgtgtgcgtggatatgcacgtgtgtgcgtgtacgctcgtgtgtgcacgtgtgtgactgtgattgtgcacctgtgcgtgtgcgctcatgtgcatgtgcatgattgtgtgtgtgggtgtgcacgtgtgtgcgtgtgctctggtgtgtggctgtgcatgtctgtgtgtgtgtgcacatatgtgagcacatgcatggatgtgcacatccctcgctggcactcggagccctgctgggaagttgcccggtcctagggaagcggctgggtgctttggccttccagcactttcagtcgtcacacgcaatcacacacctgctgtgctgagccccagcttagccctgtaccaggcagggcggataatgtgggagcagcgaaaggaagccaggcccagtcctgcctgtgggtgggtcagggactg

SEQ ID NO: 410 - DNA, 1097 bp, Artificial sequence
  DNA replication origin
tgccccgggtacttggctcaatttgaaggtgtttattttgtgtgtgccgtggggcacatggagccgtctgtggatacctgcaggacagaatgaattcaggacgcaggagcagattcattaattctgaccaaagaaagaagttcgtggaagctgagctcagacttgtccaaatgattgatccattcattcatcattcattcattcattcacccaacagataatgaccgaggtctctggggtgggggtgccagtctaggtgaagcggcccccacagagggtgcccctgcccgtggagctgacgttcccagggggctgcagaagtatcgaggagatgtggaggtggagctgggagtccctggagagacacagagcaggggaggggctggggctccccgagttgaacccgaggccgagccaaggaaggccccactgggaaggggagcttggcaggaatctgggaggcctgcctgggtgggtggggagggtggggggagaaacctggtgggcctgcctgagggtaaggggagggcatagtgagaggggaggagggccaaagagggtcctgacatcagggcaaggcccggctcttcctccaagggtttggctaccaggggccagggagtgacggcctctgattctagttacaggcccctgggcccctgtggtggggatcagtgggtgagacagacccctcagggggaggtgattggtggggcctggaacaggcagcgagtggcaggaatgagaaagggtccgactgagatgggcttggaggctgaggactggcgcggggtgtggacgcaggcaagggaggcagatggctccaaagtccagcttcagccagtggcgggataggggtgtctaggggcacagcagagggcgtcaaaggaagcatctgagggtgtgtggatgcatgaacgctgcggttcacagagccagggactgagagaggtggctgaggggacaggaagggaggagcgagggacctggaggagaggagtgaggtccaggtccccgtccccgctcctcacacagccagaggtcagggatctctggaggagtcgctgaaatgagctggcccagccacctttgcaggg

SEQ ID NO: 411 - DNA, 1185 bp, Artificial sequence
  DNA replication origin
ttctctaagtggggcacctcattcctgcccagagcgtagctgggcagacctgagggagaggccctgctcccaatgggcagaggaaatgcccgttgggcacgtctggggtgcaccaaagcacaggacctgccaccagtagcctggcctgagagtgtggggcagtcacaggcaggcgtctccagggcctgagggcagcccccaaggcagggtggacacggcaacctgggtgagggcagccccacagcagtgtggacaaaggctagtgccctcaaggcccaccctggccccagggctgctgcaggaagcacttccctgacccccgtcccacctgcctccttggacccctgagctggggctgctccttggatctccacatcccacagcaacccagagagtaggaggggcagggaacacccattttcccccaatctccctaggagatgggattaatgtccacctccggggtgctgggctctggctatgcgggtgtctggggggacaatccatgcaggtatttgcgggggatggtctgtgcgggtgtctggggggatggtctgtgtgggtgtctggggggacagtttattctgtgtaggttgtctggggggacagtctgtgtgggtgtttgggggcatggtctatgtgggtgttgggatggtctgtgcgggtgtctggggggacagtctgtgtgggtgtttgggggcatggtctatgtgggtgttggggggatggtctgtgtgggtgtttggggggccagtctgtgtgagtgtttgggggcatggtctatgtgggtgttgggatggtctgtgtgggtgtttggggggacagtctgtgtgggtgtttgggggcatggtctgtgtgggtgttggggggatggtctgtgtaggtatctggggggacagtttattctgtgtaggttgtctggggggatggtctgtgcgggtgtctggggggatggtctgtgtgggtgtctggggggatggtctgtgtgggtgtctggggggatggtctgtgtgggtgtctggggggacggtctgtgcgggtgtctggggagagagtcatctgtgcaggtgtttggggcggctgggttgcactgccctgggcacctgcaaatctgtgagtgtccagtgaccggggtaggtctcggggtctgcagcctccttggcctttagcctcctttcccagttt

SEQ ID NO: 412 - DNA, 1074 bp, Artificial sequence
  DNA replication origin
acctgccgcctgggggccccacttccatgcagggcgaggaatagggcccctccctgcctgaccccctggactggggttcgtcagatgatcccagaagcgaagtgggtggagaggcagggggtctatctgtgggttcaagaccatggaaggaagcggcagagaaggggacagaaatgggacaaatgcaagtgcccaggaggagagagaagccaggagggggggtcgtggccctgtctccccagggtgaagtcaggcagggcttgggggcacgttttgcaccgagtcagctcacccagcatgtctctcgcccatggccatgagagaaagccccgggctgaggcctcagtctgtgacactcacagtgatgggcaaaggctggctgcctctgccccacccagaagtccccaagctcactggcagctgcaaggcctggggacatttaacgcacgtataagaacaagctgttctctcgctctgtggaagcactgatacctcccagcagcttcgggagacaggtctggtgggagcctggggactgtgctcatcagggcccctcggtggtccctctgcttggaagggaggggcctgtggaggagggaggaagtttacccccagcacactggattctcgatgaagggcccccatgaaagcaccctgaaaggtcagcttggggtatgggctggctgggcccatttgggagctctgtctctggagagggctcaggctctactggaggctggcccaaggctcagggtccaagcaaaacgcagcttcacacccagggaggggcttctggggctggtaccatctccccaagggccccaggagtctggcctcaaacctgtccaacctgtaggatcccaggccagggacgagacctggggctgcttcttcaaggtctgagccccaggtgtgggccaagagggccccaactgcagggaccaggttgctggtggtagaagggactgtgaagcttctaggatggtcccttcatgcaagtaggaagctgtcccctgtccttcccaaggcagaggtgtgaggctggctgtccaacactgactcatgctggggcag

SEQ ID NO: 413 - DNA, 752 bp, Artificial sequence
  DNA replication origin
ttctggggctggtaccatctccccaagggccccaggagtctggcctcaaacctgtccaacctgtaggatcccaggccagggacgagacctggggctgcttcttcaaggtctgagccccaggtgtgggccaagagggccccaactgcagggaccaggttgctggtggtagaagggactgtgaagcttctaggatggtcccttcatgcaagtaggaagctgtcccctgtccttcccaaggcagaggtgtgaggctggctgtccaacactgactcatgctggggcagggaagcggggtgtggggagggcagggaaggggggtgtggggagggctgggaagggaggtatggggagggctgggaagggaggtatggggagggctgggaaggtggtgtggggagggctgggaagggggagggctgggaaggggtgtgtggggagggtgggaaggggggctgtggggagggttgggaaggggggttgtggggagggttgggaaggggtgtgtggggagggctgggaagggggtgtggagagggcagggcaggtacctccccgatttagggagctgggtacacccctgggcctggacatcaggtgcagatgctagggtggccccgtgattagggctgggagagggtcaggcccagtcactgtagccagcagcctgaggatgcctccctccggattctggccttcagtctcttcaggccacggtggtcggggtccaccaggaggccgctctctaccgccgt

SEQ ID NO: 414 - DNA, 1139 bp, Artificial sequence
  DNA replication origin
ggggagtctggggtcggattgagcgcccttccccactggggcggcctgggggctcccggggtccgacagctgctcggggcctcgccctcctgctgccatggacccggcccaaatgtgcgggtcctgcgcgggccgaggcttcactaccaccccgggccgtgaactacgggtcggggtcaggtgcctccgcccggagaggggcggtcccgcgggccgcaccgcaggcgagggacggggtttcgagcccctgccctgctcagcgccgctcacagctggcagaagaggccacactgtgccctgcgggagcccagcagcaaagccggggccgtgggaccccctcgctccctgcacggaccccgggcgtgggcctcggcttcgccccgtgcggccaagcctggcggggtcctgggtgcgctgcgccccccgggggaggtagcgtcgaggaccgccgggctgctggaagagaggcagcgccagcgagaaaggcggggcctgcaccttggcgtgttcctcaggcagcggggaacccctgcagattcttgagcggaggaggagcccagcgaggcgagcggatttctggtcgtggttgactctgtgaaaaaactgggtcagagatgaggcgattgggcctgggtgggctcaggaaagtgcccgggaggagtggggggggcaggcaggcctggccagcagcagcccacagcacaggctgtgccctccgtccagcagccccagggagaggggctagggtgcacgtgctcagaggcctggagcagccttcagaaggtgggcagagtggaagggctgggcagcagccccctcagagggcccgatggagaggtgacttggcccagagggaccgagggaggaggccggtgtggtcacccagtcaagggaacctgggcccagccggtggggcggtagggctgccaggaggggaccatgaggaggtaaatccaggtccctgatccgaggcccagggagaagagcagtgggcaaggatgccaggccttgggccaagggtcggaacagcactttggcaggttccagggcagtgggaattgcagggaggggtcctctaccctgggtcccccttcctgcccttgcccatggtcagccagcccctccagaagcagcgggca

SEQ ID NO: 415 - DNA, 1618 bp, Artificial sequence
  DNA replication origin
ggggagctctctctgcagtctgcatttgcccaccaagggcttcaggggccccagggctgctccccacatgccactctgcgccagcaggcccagagtttgcctctagttgcccgggagagaaagcagccccttgtagtgcccacggtgtggtagctcagcatcatggagtggggtcagaggtgagtccctgtgacctgcctggaatcacggtgcacctctgctcccagctccttcttcctgggctgagccatcatcagctccccgcaagccagcacagggcagggaaggagcggccagcgagtctcagctctctcgcacctctgcccaaccccacacactgactgtccctcctgaatccctgacaggcagctacgaggaagctggcacccacctggaaaaagccctgcaccgtgccccaacgtcagaggcagcccgggcccggctgggcctgctccagctcaagaagggagacgtgccaggggctgcaagggacctgcagagcctggccgaggtggatgccccggatctcagctgcctgctgcatctcctggaggcctcggagcggcagagccttgcccaggtgcccaaagaaccccacagatctcccaccccaaccttccccagcacacaggcatgagacccccgggcccaccactggggcagcctttcttcactctctgcggttgggttgatttcagttaggtttggggtggggtgggaggcacccacttctggcccaggaagacggtctctggccaccttagccctacaaccccaccgacctctcagcctctttgtatgggaagtataagccacaggtgacttgggtgcaagagagggaagaggaccttgccctcagggccagactgagccagccaggggcaccttgcccggcaggaagcccaccccaaacccatggcaggccgggagaaggcacgtggggacaaggcaggctgggaggccaagagcacagcaggctttggggtcccagaggcagaactacaccccagtggggcctgggcaggatttcacctccttaatgcttcctgacaccagcgggttctagcactccggggccacttaggaaaacagaaaccacactaggaagaacagggagctcatggcggagtcggggctacaccagtgtaaggggcagttcggtgctgcagagggggcgccgctgccccccccgagctgaagagcaacgctgagattgggttatcgggacctagaggaggcggccgggctgggcggggtggggtctcagagctcccagagggactgggcgtttccaagccaggaggaggggtctgtgctggggtcttcgaggtgggagcagggcctggcagggggcgggaagcctggctggggccatggtcccggagcccagaggaggcggctagatggggtctcctgaacgggggtcaccgagcccggaggcggggctggacgcgggtctccgaggctgcagaatacggctgggctgcggcgccaggaggcggctcccggcacaggcaagaatctgcaggacgcgaaatggttgcctggagacggggacccacccggaaatgagccaacagtggtttcgccccgcttcctgcgccccgcccctcggcag

SEQ ID NO: 416 - DNA, 938 bp, Artificial sequence
  DNA replication origin
ttgtcagatgctcaccttgggctgtgggtgctgctccacgctgtcacatgctcacctgggggtgtgggcactgctccaggctgtcagatgctcgcctgggggtgtgggcgctgctccagactctccgatgctcacctttggttgtgggtgctgctccagaccatcagatgctcacctgggggtgtgggtgccattccaggctgtcagatgctcgtctgggggtgtggttgctgctccaggctgtcggatgctcacctgggggtgcagggtgctgttccagtctgtcagatgctcacctgggggtgtgggtgctcctccaggctgtcagatgctcacctgtgggtgtgggctgctgctccacgatgtcaggttctcacctgggggtgtggatgctgctccaggctgtcggatgctcgcctgggcttctgggtgctgctccaggctgtccaatgctcacctgggggtgtgggtgctgctccaggctttccaatgctcgcctggaggtgtgggtgctgttgcaggccgtcagatgctcgcctgggggtgtgggttctgctccaggctgtcggatgctcacctgggggtgtgggtgctgttccaggctgtcagatgctcactgggggtgtgcgtgctgctccaggctgtcagatgctcacctgggggtgtgcgtgctgttccaggatatcagatgctcacctgggggtgtgggtgctgctccaggctgtcggatgctcacctgggggtgtgggtgctgttccaggctgtcggatgctcacctgggggtgtgggtgctgttccaggccgtcagatgctcacttgggggtgcagggtgctgttccagtctgtcagatgctcacctgggggtgtgggttgtgttccaggctgtcggatgctcacctgggggtgcagggtgctgttccagtctgtcagatgctcac

SEQ ID NO: 417 - DNA, 4468 bp, Artificial sequence
  DNA replication origin
tcaactgggggtgtgggtgctgctccaggctgtcggatgctcacctgggtgtgcagggtgctgttccaggctgtcagagactcacctgagggtgtgggtgcagctccaggctgtcagatgctcacctgtgcgtgtggggttatgctccacgaagtcagatgctcaactgtgggtgtgggtgctgctccaggttgtcggttgcccgcctggggttgtgggtgctgctccaggctgtccaatgctcacctgggggtgtgggtgctgttccaggccgtcagatgctcgcctgtgggtgtcggtgctgttccaggctgtcacgggcgcacctgggggtgcaggctgctgttacaggctgtcagaggctcacctgggcatgtgggtgctgttccagtctgtcacatgctcacctgggggtgtgggttctgttccaggctgtcagatgctcacctgttggtgtgggtgctgctccagaccatcagatgcgcacctgcgtgtgtggttgccgacccaggctgtcagatgctcgcctgggggtgtgggtgctcttccaggctgtcacatgctcacctgggggtgtgggtgctgctccaggctgtcggatgctcacctgggggtgtggggtgctactccaggctgtccgatgctcgcctgggggtgtgggtgccgttccaggccgtcagatgctcgccttggggtgtgggtgctcttccaggctgtcacgtgcgcacctgggggtgcagggtgctgttgcaggctgtcagatgctcacctgggggtgtgggtgctgttacatgctgtcagatgctcacctgtgggtgtgggtgctgttccaggctgtcagatgctcacctgggggtgtgagtgctgttgcatgctgtcagatgctcgcctgggggtgtgggtgctcttccaggctttcagatgctcacctgggtgtgtgtgtgctgttccaggctgtcagatgctcacctgggtgtgcagggtgctgttccaggctgtcagaggctcacctgggcatgtgggtgctgttccagtctgtcagatgctcacctggggctgtgggttctgttccaggctctcagatgctcacctctgtgtgtgggtgctgctccagaccatcagatgcgcacctgggggtgtgggtgctgctccaggctgtcggatgctcgccgggaggtgtgggtgctgctccgtgcgttcagatgctcgcctgggggtgtgggtgctgctcctggttgtcagatgctcaccttgggctgtgggtgctgctccacgctgtcagatgctcacctgggggtttgggcactgctccaggctgtcagatgctcgcctgggggtgtgggcgctgctccagactctccgatgttcacctgtggttgtgggtgctgctccagaccatcagatgctcacctgggtgtgtgggtgccgttccaggctgtcagatgctcgcgtgggggtgtgggtgctgctccaggcttttggatgctcacctgggggtgcagggtgctgttccaggctgtcagatgctcacctgggggtgtggttgctgctccaggctgtcagatgctcacttgggggtgcagcgtgctgttccaggctgtcagatgctaacctggggttgtgagagctgttgcaggctgtcagatgctcactgggggtgtgcgtgctgctccagcctgtcagatgctcacctgggggtgtgggtgctgttccaggatatcagatgctcacctgggggtgtgggtgctgctccaggctgtcggatgctcacctgggggtgtcggtgctgttccaggctgttggatgctcacctgggggtgtggttgctgctccaggctgtcaggtgctcacttgggggtgcagcgtgctgttccgggctgtcagatgctcacctggggttgtgagagctgttgcaggctgtcagatgctcactgggggtgtgcgtgctgctccagcctgtcagatgctcacctgggggtgtgggtgctgttccaggatatcagatgctcacctgggggtgtgggtgctgctccaggctgtcggatgctcacctgggggtgtcggtgctgttccaggctgttggatgctcacctgggggtgtggttgctgctccaggctgtcaggtgctcacttgggggtgcagcgtgctgttccgggctgtcagatgctcacctggggttgtgagagctgttccaggctgtcagatgctcacctgggggtgtgggtgctgttccaggctgtcagatgctcacctgttggtgtgggtgctgcttcaggctgtcagatgctcacctggagtgtgggtgctgctccaggctgtctgatcctcactcgcgggtgcagggttctgttccaggctgtcagatgcttgcctgggggtgtggttgctgttccaggctgtcagatgctcgccccggggtgtggttgctgttccaggctgtcagatgctcacctaggggtgtgggtgctgctccaggctgtccgatgctcacctggaggtgaggatgccattccttgcggtcagatactcacctgggggtgtgggtgctgctccaggctgtcggatgctcacctgggggtgtgggagctgtttcaggatgtcggatgctcacctgggggtgtgggtgccgttccaggccgtcagatgctcgcctgggggtgtggatgctgttccaggctgtcaggtgcgcacctgggggtgcagggtgcttttccaggccgtctgattctcatctgggcgtatgggtgctgttccaggctgtcagatgctcgcctgggtgtgtgggtgctgttccagactgtcagatgctcacctgggggtgcagggtcctgttccaggctgtcagatgctcatctgagcgtatgggtgctgttccagactgtcagatgctcacctgggggtgcagggtgcttttccaggctgtcagatgctcacctggtggtgtgggtgctgctccaggctgtcagatgctcacctgggtgtgtgggtgctgctccaggctgtcggatgctcgcctgggggtgtgggtgctgctccgtgcgttcagatgctcgcctgggggtgtgggtgctgctccaggttgtcagatgctcaccttgggctgtgggtgctgctccacgctgtcagatgctcacctggtggtgtgggcactgctccaggctgtcagatgctcgcctgggggtgtgggcactgctccagactctccgatgctcacctgtggttgtgggtgctgctccagaccatcagatgctcacctgggggtgtgggtgctgctccaggctgtcggatgctcacctgtgggtgtgggtgctgctccagaccatcagatgctcaccttgggctgtgggtgctgctccatgctgtcagatgctcacctgggggtgtgggcactgctccaggctgtcagatgctcgcctgggggtgtgggcgctgctccagactctccgatgctcacttgtggttgtgggtgctgctccagaccatcagatgctcacctgggggtgtgggtgctgttccaggctgtcagatgctcgcctgggggtgtggatgctgctccaggctgtcagatgctcacttgtgggtgtagggtgctgctccacgatgtcagatgctcacctgcgggtgtgggtgctattcctggccgtcagatactcacctgggggtgtgggtgctgttccaggccatcagatgctcgcctgggggtgtgggtgctgttccaggctgtcacgtgcacacctgggggtgcaggctggtgttccaggctgtcagatgctcacctgggggtgtgggtgctgttacatgctgtcagatgctcgcctgggggtgtgggtgctgttccaggctgtcagatgctcacctgggggtgtgtgtgctgttccaggctgtcagatgctcacctgggggtgcagggtgctgttccaggttgtcagaggctcacctgggcatgtgggtgctgttccagtctgtcagatgttcacctgggggtgtgggttctgttccaggctgtcagatgctcacctgtgggtgtgggtgctgctccagaccatcagatgcgcacctgggggtgtgggtgctgctccaggctgtcggatgctcccctaggggttttggtgctgctccgtgcgttcagatactcgcctgggggtgtggttgctgctccaggttgtcagatgctcaccttgggctgtgggtgctgctccacgctgtcacatgctcacctgggggtgtgggcactgctccaggctgtcagatgctcgcctgggggtgtgggcgctgctccagactctccgatgctcacctttggttgtgggtgctgctccagaccatcagatgctcacctgggggtgtgggtgccattccaggctgtcagatgctcgtctgggggtgtggttgctgctccaggctgtcggatgctcacctgggggtgcagggtgctgttccagtctgtcagatgctcacctgggggtg

SEQ ID NO: 418 - DNA, 1774 bp, Artificial sequence
  DNA replication origin
caggctgtcagatgctcacctgggggtgcagggtgctgttccaggctgtcagatgctcatctgggcgtatgggtgctgttccaggttgtcagatgctcgcctgggggtgtgtgtgctgttccaggctgtcagatgctcacctgggggggcagcgtgctgttccaggctgtcagatgatcacctgggtgtgtgggtgctgctccaggctgtcagttgctcacctgggtgtgtgggtgctgctccaggctgtcggatgctcgcctgggggtttgggtgctgctccgtgtgttcagatgctcgcctgggggcgtgggtgctgctccaggttgtcagatgctcaccttgggctgtgggtgctgctccacgctgtcagatgctcacctgggggtgtgggcactgctccaggctgtcagatgctcgcctgggtgtgtgggcactgctcctgactctccgatgctcacctgtggttgtgggtgctgctccagatcatcagatgctcacctgggggtgtgggtgctgctccaggttgtcagatgctcaccatgggctatgggtgctgctccctgttgtcagatgctcaccgggaggtgtggtcactgctccgggctgtcagatgctcgcgtggggctgtgggcgctgctccagactctacgatgctcacctgtggttgtgggtgctgctccagacaatcagatgctcacttggggttgtgggtgctgctccaggttatcggatgctggcctgggagtggtgggtgctgctccaggctgtcggatgctcacctgggggtgcagggtgctgttccaggctgtcagatgctcacctgggggtgtgggtgctgctccaggctgtcagatgctcacctgtgggtgtggggtgcggctccacgatgtcagatgctcacctgggggtgtgggtgctgttccaggccgtcagatgctcacctgagggtgtgggtgccgacccaggctgtcagatgctcgcctgttggtgtgggttctgctgcaggctgccggatgctctcctgggggtgtgggtgctgctccatgcggtcagatgctcccctgggggtgtgggtgctgctctgggctgtcagattctcacttgtgcttgtgggtgctactgcgggctgtcagatgctcacctggagttctgggtgctgtttcatgctgtcagatgctcgcctggggttgtgggtgctgctccgttcggtcagatgctcgcctgggggcgtgggtgctgctccatgagttcagatgctcgcctgggggtactggtactgctccgggaggtcagatgctcacctcggggtgtgggtgctgctccaagttgtcagatgctcaccttgggctatgggtgctgctccatgctgtcagatgctcacctgggtgtttgggcacggctccaggctgtcagatgctcgcctggggttgtgggcgctgctccagactctctgatgttcacctgtggttgtgggtgctgctccagaccatcagatgctcaactgggggtgtgggtgctgctccaggctgtcggatgctcacctgggtgtgcagggtgctgttccaggctgtcagagactcacctgagggtgtgggtgcagctccaggctgtcagatgctcacctgtgcgtgtggggttatgctccacgaagtcagatgctcaactgtgggtgtgggtgctgctccaggttgtcggttgcccgcctggggttgtgggtgctgctccaggctgtccaatgctcacctgggggtgtgggtgctgttccaggccg

SEQ ID NO: 419 - DNA, 1299 bp, Artificial sequence
  DNA replication origin
gctgctccaggctgtcagatgctcacctgtgggtgtggggtgctgctccacgatgtcagatgctcacctgggggtgtgggtgctgttccaggccatcagatgcccacctgggggtgtgggtgccgacccaggctgtcagatgctcgcctgttggtgtgggttctgctgcaggctgccggatgctctcctgggggtgtgggtgctgttccaggctatcagatgctcgcctgggggtgtgggtgctgttccaggctgtcagatgctcacctgggggtgcgcgtgctgttccaagctgtcagaggcacacctgggcctgtgggtgctgttccagtctgtcaggtgctcacctgggggagtgggtgctgttccaggctgtcagatgctcacccggggatatggggtgctcttccaggctgtcagattctcacctgggggtgcgggagctgttccaggctctcagatgctcacctgttgttgtcggtgcagctccaggatttcagatgctcccctgggggtgtgggtgctgctccatgcggtcagatgctcccctgggggtgtgggtgctgctccgggctgtcagattctcacctgtgcgtgtgggtgctgctgcgggctgtcagatgctcacctggggttgtgggtgctgttaaaggctgtcagatgctcgcctgggattgtgggtgctgctccgttcggtcagatgctcgcctgggggcgtgtgtgctgctccatgggttcagatgctcgcctggaggtatgggtcctgctccgggaggacagatgctcacctcgaggtgtgggtgctgctccaggttgtcagatgctcaccttgggatgttggtgctgctccagactctccgatgctcacctgtggttgtgtgtgatgctccagacaatcagattctcacctgggggtgtgggtgctgttccaggctgtcagatgctcacctgggggtgtgggtgctgctccaggctgtcagatgctcacctgtgggtgtggggtgctgctccacgatgtcagatgctcacctgtgggtatgggtgttgttccaggctgtctgatgctcacctgggggtgtgggtgctgttccaggccgtcagatgctcgcctgggggtgttggtgctgttccaggctgtcacatgcgcacctggtggtgcaggctgttgttccaggctgtcagatgctcacctgggcgtgtgggttctgttccaggctgtcagatgctcacctgtgggtgtcggtgttgccgcaaaccatcagatgctcacctgggggtgtgggtgccgacccaggctct

SEQ ID NO: 420 - DNA, 1128 bp, Artificial sequence
  DNA replication origin
gctcacctgtggttgtgtgtgatgctccagaacatcagattctcacctgggggtgtgggtgctgttccaggctgtcagatgctcacctgtgggtgtggggtgctgctcgacgatgtcagaggctcacctggggatgtgggtgctgttccaggctgtcagatgctcacctgggggtgtgggtgctgctccagtctgtcagatgctcacctgtgggtgtggggtgctgctccacgatgtcagatgctcacctgggggtgtgggcactgctccaggctgtcagatgctcgcctgggtgtgtgggcactgctcctgactctccgatgctcacctctggttgtgggtgctgctccagaccatcagatgctcacctgggtgtgtgggtgctgctccaggttgtcaggtgctcaccatgggctatgggtgctgctccctgttgtcagatgctcacctcggtgtgtgggcactgctccgggctgtcagatgctcgcctgtggctgtgggcgctgctccagactctacgatgctcacctgtggttgtgggtgctgctccagacaatcagatgctcacttggggttgtgggtgctgctccaggtcatcggatgctcgcctgggagtgtggttgctgctccaggctgtcggatgctcacctgggggtgcagggtgctgttccaggctgtcagatgctcacctgggggtgtgggtgctgctccaggctgtcagatgctcacctgtgggtgtggggtgctgctccacgatgtcagatgctcacctgggggtgtgggtgctgttccaggccatcagatgcccacctgggggtgtgggtgccgacccaggctgtcagatgctcgcctgttggtgtgggttctgctgcaggctgccggatgctctcctgggggtgtgggtgctgttccaggctatcagatgctcgcctgggggtgtgggtgctgttccaggctgtcagatgctcacctgggggtgcgcgtgctgttccaagctgtcagaggcacacctgggcctgtgggtgctgttccagtctgtcaggtgctcacctgggggagtgggtgctgttccaggctgtcagatgctcacccggggatatggggtgctcttccaggctgtcagattct

SEQ ID NO: 421 - DNA, 1686 bp, Artificial sequence
  DNA replication origin
ggtgtgggtgctgctccaggctgtcggatgctcacctgggtgtgcagggtgctgttccaggctgtcagagactcacctgagggtgtgggtgcagctccaggctgtcagatgctcacctgtgcgtgtggggttatgctccacgaagtcagatgctcaactgtgggtgtgggtgctgctccaggttgtcggttgcccgcctggggttgtgggtgctgctccaggctgtccaatgctcacctgggggtgtgggtgctgttccaggccgtcagatgctcgcctgtgggtgtcggtgctgttccaggctgtcacgggcgcacctgggggtgcaggctgctgttacaggctgtcagaggctcacctgggcatgtgggtgctgttccagtctgtcacatgctcacctgggggtgtgggttctgttccaggctgtcagatgctcacctgttggtgtgggtgctgctccagaccatcagatgcgcacctgcgtgtgtggttgccgacccaggctgtcagatgctcgcctgggggtgtgggtgctcttccaggctgtcacatgctcacctgggggtgtgggtgctgctccaggctgtcggatgctcacctgggggtgtggggtgctactccaggctgtccgatgctcgcctgggggtgtgggtgccgttccaggccgtcagatgctcgccttggggtgtgggtgctcttccaggctgtcacgtgcgcacctgggggtgcagggtgctgttgcaggctgtcagatgctcacctgggggtgtgggtgctgttacatgctgtcagatgctcacctgtgggtgtgggtgctgttccaggctgtcagatgctcacctggggttgcgcgtgctgttccaggctgtcagaggctcacctgggcgtgtgggtgctgttccagtctgtcagatgcttacctgagggtatggttgctgttccaggctgtcagatgctcacccggtgatgtggggtgctcttccaggctgtcagattctcacctggggttgtgggtgctgttccaggctctcagatgctcacctggggttgtcggtgctgctccaggatgtcagatgctcccctgggggtgtgggtgctgctacgggctgtcagattctcacctgtgcgtgtggttgctgctgcgggctgtcagatgctcacctggggttgtgggtgctgttccaggctgtcagatgctcgcatggggttgtgggtgctgctctgttcggtcagatgctcgcctgggggcgtgggtgctgctccatgggttcagatgctcgcctggaggtatgggtcctgctccgggaggtcagatgctcacctcggggtgtgggtgctgctccaggttgtcagatgctcaccttgggttgtgggtgctgctccagactctccgatgctcacctgtggttgtgtgtgatgctccagaacatcagattctcacctgggggtgtgggtgctgttccaggctgtcagatgctcacctgtgggtgtggggtgctgctcgacgatgtcagaggctcacctggggatgtgggtgctgttccaggctgtcagatgctcacctgggggtgtgggtgctgctccagtctgtcagatgctcacctgtgggtgtggggtgctgctccacgatgtcagatgctcacctgggggtgtgggcactgctccaggctgtcagatgctcgcctg

SEQ ID NO: 422 - DNA, 3414 bp, Artificial sequence
  DNA replication origin
gggtgtgggtgctgctccaggctgtcggatgctcacctgggtgtgcagggtgctgttccaggctgtcagagactcacctgagggtgtgggtgcagctccaggctgtcagatgctcacctgtgcgtgtggggttatgctccacgaagtcagatgctcaactgtgggtgtgggtgctgctccaggttgtcggttgcccgcctggggttgtgggtgctgctccaggctgtccaatgctcacctgggggtgtgggtgctgttccaggccgtcagatgctcgcctgtgggtgtcggtgctgttccaggctgtcacgggcgcacctgggggtgcaggctgctgttacaggctgtcagaggctcacctgggcatgtgggtgctgttccagtctgtcacatgctcacctgggggtgtgggttctgttccaggctgtcagatgctcacctgttggtgtgggtgctgctccagaccatcagatgcgcacctgcgtgtgtggttgccgacccaggctgtcagatgctcgcctgggggtgtgggtgctcttccaggctgtcacatgctcacctgggggtgtgggtgctgctccaggctgtcggatgctcacctgggggtgtggggtgctgctccaggctgtccgatgctcgcctgggggtgtgggtgccgttccaggccgtcagatgctcgccttggggtgtgggtgctcttccaggctgtcacgtgcgcacctgggggtgcagggtgctgttgcaggctgtcagatgctcacctgggggtgtgggtgctgttacatgctgtcagatgctcacctgtgggtgtgggtgctgttccaggctgtcagatgctcacctgggtttgcgcgtgctgttccaggctgtcagaggctcacctgggcgtgtgggtgctgttccagtctgtcagatgcttacctgagggtatggttgctgttccaggctgtcagatgctcacccggtgatgtggggtgctcttccaggctgtcagattctcacctggggttgtgggtgctgttccaggctctcatatgctcacctggggttgtcggtgctgctccaggatgtcagatgctcccctgggggtgtgggtgctgctacgggctgtcagattctcacctgtgcgtgtggttgctgctgcgggctgtcagatgctcacctggggttgtgggtgctgttccaggctgtcagatgctcgcatggggttgtgggtgctgctctgttcggtcagatgctcgcctgggggcgtgggtgctgctccatgggttcagatgctcgcctggaggtatgggtcctgctccgggaggtcagatgctcacctcggggtgtgggtgctgctccaggttgtcagatgctcaccttgggttgtgggtgctgctccagactctccgatgctcacctgtggttgtgtgtgatgctccagaacatcagattctcacctgggggtgtgggtgctgttccaggctgtcagatgctcacctgtgggtgtggggtgctgctcgacgatgtcagaggctcacctggggatgtgggtgctgttccaggctgtcagatgctcacctgggggtgtgggtgctgctccaggctgtcagatgctcacctgtgggtgtggggtgctgctccacgatgtcagatgctcacctgggggtgtgggcactgctccaggctgtcagatgctcgcctgggtgtgtgggcactgctcctgactctccgatgctcacctgtggttgtgggtgctgctccagaccatcagatgctcacctgggtgtgtgggtgctgctccaggttgtcaggtgctcaccatgggctatgggtgctgctccctgttgtcagatgctcacctcggggtgtgggcactgctccgggctgtcagatgctcgcctgtggctgtgggcgctgctccagactctacgatgctcacctgtggttgtgggtgctgctccagacaatcagatgctcacttggggttgtgggtgctgctccaggtcatcggatgctcgcctgggagtgtggttgctgctccaggctgtcggatgctcacctgggggtgcagggtgctgttccaggctgtcagatgctcacctgggggtgtgggtgctgctccaggctgtcagatgctcacctgtgggtgtggggtgctgctccacgatgtcagatgctcacctgggggtgtgggtgctgttccaggccgtcagatgctcacctgggggtgtgggtgccgacccaggctgtcagatgctcgcctgttggtgtgggttctgctgcaggctgccggatgctctcctgggggtgtgggtgctgttccaggctatcagatgctcgcctgggggtgtgggtgctgttccaggctgtcagatgctcacctcggggtgcgcgtgctgttccaagctgtcagaggcacacctgggcctgtgggtgctgttccagtctgtcaggtgctcacctgggggagtgggtgctgttccaggctgtcagatgctcacccggggatatggggtgctcttccaggctgtcagattctcacctgggggtgcgggagctgttccaggctctcagatgctcacctggtgttgtcggtgcagctccaggatttcagatgctcccctgggggtgtgggtgctgctccatgcggtcagatgctcccctgggggtgtgggtgctgctccgggctgtcagattctcacctgtgcgtgtgggtgctgctgcgggctgtcagatgctcacctggggttgtgggtgctgttaaaggctgtcagatgctcgcctgggattgtgggtgctgctccgttcggtcagatgctcgcctgggggcgtgtgtgctgctccatgggttcagatgctcgcctggaggtatgggtcctgctccgggaggacagatgctcacctcgaggtgtgggtgctgctccaggttgtcagatgctcaccttgggatgttggtgctgctccagactctccgatgctcacctgtggttgtgtgtgatgctccagacaatcagattctcacctgggggtgtgggtgctgttccaggctgtcagatgctcacctgggggtgtgggtgctgctccaggctgtcagatgctcacctgtgggtgtggggtgctgctccacgatgtcagatgctcacctgtgggtatgggtgttgttccaggctgtctgatgctcacctgggggtgtgggtgctgttccaggccgtcagatgctcgcctgggggtgttggtgctgttccaggctgtcacatgcgcacctggtggtgcaggctgttgttccaggctgtcagatgctcacctgggcgtgtgggttctgttccaggctgtcagatgctcacctgtgggtgtcggtgttgccgcaaaccatcagatgctcacctgggggtgtgggtgccgacccaggctctcagatgctcgcctgtg

SEQ ID NO: 423 - DNA, 1133 bp, Artificial sequence
  DNA replication origin
ggtgccgacccaggctctcagatgctcgcctgtggccgtgggttccgctccaggctgccggatgctctcctgggggtgtgagtgctgttccaggctgtcaaatgctcacctgggggtgtggatgctgctccaggctgtcagatgctcgcctgggggtgtggctgcggttccaggctgtctgatgctcacctgtgggtgtgggtgctgctccagaccatcagatgcgcaactgggggtgaggatgccatgtgatgcggacagatgctcacctgggggtgtgggtgctgttccaggctgtcagatgctcacctgggggtgcagggtgctgttccaggctgtcagatgctcatctgggcgtatgggtgctgttccaggttgtcagatgctcgcctgggggtgtgtgtgctgttccaggctgtcagatgctcacctgggggggcagcgtgctgtaccaggctgtcagatgatcacctgggtgtgtgggtgctgctccaggctgtcagttgctcacctgggtgtgtgggtgctgctccaggctgtcggatgctcgcctgggggtgtgggtgctgttccaggctgtcagaggctcacctgggcgtgtgggtgctgttccagtctgtcagatgcttacctgagggtatggttgctgttccaggctgtcagatgctcacccggtgatgtggggtgctcttccaggctgtcagattctcacctggggttgtgggtgctgttccaggctctcagatgctcacctggggttgtcggtgctgctccaggatgtcagatgctcccctgggggtgtgggtgctgctacgggctgtcagattctcacctgtgcgtgtggttgctgctgcgggctgtcagatgctcacctggggttgtgggtgctgttccaggctgacagatgctcgcatggggttgtgggtgctgctctgttcggtcagatgctcgcctgggggcgtgggtgctgctccatgggttcagatgctcgcctggaggtatgggtcctgctccgggaggtcagatgctcacctcggggtgtgggtgctgctccaggttgtcagatgctcaccttgggctatgggtgctgctccatgctgtcagatgctcacctgggtgtttgggcactgctc

SEQ ID NO: 424 - DNA, 675 bp, Artificial sequence
  DNA replication origin
ggctgtctgatgctcacctgggggtgtgggtgctgttccaggccgtcagatgctcgcctgggggtgttggtgctgttccaggctgtcacatgcgcacctggtggtgcaggctgttgttccaggctgtcagatgctcacctgggcgtgtgggttctgttccaggctgtcagatgctcacctgtgggtgtcggtgttgccgcaaaccatcagatgctcacctgggggtgtgggtgccgacccaggctctcagatgctcgcctgtggccgtgggttccgctccaggctgccggatgctctcctgggggtgtgagtgctgttccaggctgtcaaatgctcacctgggggtgtggatgctgctccaggctgtcagatgctcgcctgggggtgtggctgcggttccaggctgtctgatgctcacctgtgggtgtgggtgctgctccagaccatcagatgcgcaactgggggtgaggatgccatgtgatgcggacagatgctcacctgggggtgtgggtgctgttccaggctgtcagatgctcacctgggggtgcagggtgctgttccaggctgtcagatgctcatctgggcgtatgggtgctgttccaggttgtcagatgctcgcctgggggtgtgtgtgctgttccaggctgtcagatgctcacctgggggggcagcgtg

SEQ ID NO: 425 - DNA, 1647 bp, Artificial sequence
  DNA replication origin
tgctgttccaggctgtcagatgatcacctgggtgtgtgggtgctgctccaggctgtcagttgctcacctgggtgtgtgggtgctgctccaggctgtcggatgctcgcctgggggtgtgggtgctgctccgtgtgttcagatgctcgcctgggggcgtgggtgctgctccaggttgtcagatgctcaccttgggctgtgggtgctgctccacgctgtcagatgctcacctgggggtgtgggcactgctccaggctgtcagatgctcgcctgggtgtgtgggcactgctcctgactctccgatgctcacctgtggttgtgggtgctgctccagatcatcagatgctcacctgggggtgtgggtgctgctccaggttgtcagatgctcaccatgggctatgggtgctgctccctgttgtcagatgctcacctggaggtgtggtcactgctccgggctgtcagatgctcgtgtggggctgtgggcgctgctccagactctacgatgctcacctgtggttgtgggtgctgctccagacaatcagatgctcacttggggttgtgggtgctgctccaggttatcggatgctggcctgggagtggtgggtgctgctccaggctgtcggatgctcacctgggggtgcagggtgctgttccaggctgtcagatgctcacctgggggtgtgggtgctgctccaggctgtcagatgctcacctgtgggtgtggggtgcggctccacgatgtcagatgctcacctgggggtgtgggtgctgttccaggccgtcagatgctcacctgggggtgtgggtgccgacccaggctgtcagatgctcgcctgttggtgtgggttctgctgcaggctgccggatgctctcctgggggtgtgggtgctgctccatgcggtcagatgctcccctgggggtgtgggtgctgctctgggctgtcagattctcacttgtgcttgtgggtgctactgcgggctgtcagatgctcacctggagttctgggtgctgtttcatgctgtcagatgctcgcctggggttgtgggtgctgctccgttcggtcagatgctcgcctgggggtgtgggtgctgctccatgagttcagatgctcgcctgggggtactggtgctgctccgggaggtcagatgctcacctcggtgtgtgggtgctgcttcaggttgtcagatgctcaccttgggctatgggtgctgctccatgctgtcagatgctcacctgggtgtttgggcactgctccaggctgtcagatgctcgcctggggttgtgggcgctgctccagactctctgatgttcacctgtggttgtgggtgctgctccagaccatcagatgctcaactgggggtgtgggtgctgctccaggctgtcggatgctcacctgggtgtgcagggtgctgttccaggctgtcagagactcacctgagggtgtgggtgcagctccaggctgtcagatgctcacctgtgcgtgtggggttatgctccacgaagtcagatgctcaactgtgggtgtgggtgctgctccaggttgtcggttgcccgcctggggttgtgggtgctgctccaggctgtccaatgctcacctgggggtgtgggtgctgttccaggccgtcagatgctcgcctgtgggtgtcggtg

SEQ ID NO: 426 - DNA, 1083 bp, Artificial sequence
  DNA replication origin
cacgatgtcagatgctcacctgtgggtatgggtgttgttccaggctgtctgatgctcacctgggggtgtgggtgctgttccaggccgtcagatgctcgcctgggggtgttggtgctgttccaggctgtcacatgcgcacctggtggtgcaggctgttgttccaggctgtcagatgctcacctgggcgtgtgggttctgttccaggctgtcagatgctcacctgtgggtgtcagtgttgccgcaaaccatcagatgctcacctgggggtgtgggtgccgacccaggccctcagatgctcgcctgtggccgtgggttccgctccaggctgccggatgctctcctgggggtgtgagtgctgttccaggctgtcaaatgctcacctgggggtgtggatgctgctccaggctgtcagatgctcgcctgggggtgtggctgcggttccaggctgtctgatgctcacctgtgggtgtgggtgctgctccagaccatcagatgcgcaactgggggtgaggatgccatgtgatgcggtcagatgctcacctgggggtgtgggtgctgttccaggctgtcagatgctcacctgggggtgcagggtgctgttccaggctgtcagatgctcatctgggcgtatgggtgctgttccaggttgtcagatgctcgcctgggggtgtgtgtgctgttccaggctgtcagatgctcacctgggggggcagcgtgctgttccaggctgtcagatgatcacctgggtgtgtgggtgctgctccaggctgtcagttgctcacctgggtgtgtgggtgctgctccaggctgtcggatgctcgcctgggggtgtgggtgctgctccgtgtgttcagatgctcgcctgggggcgtgggtgctgctccaggttgtcagatgctcaccttgggctgtgggtgctgctccacgctgtcagatgctcacctgggggtgtgggcactgctccaggctgtcagatgctcgcctgggtgtgtgggcactgctcctgactctccgatgctcacctgtggttgtgggtgctgctccagatcatcagatgctcacctgggggtgtgggtgctgctc

SEQ ID NO: 427 - DNA, 1222 bp, Artificial sequence
  DNA replication origin
tgggtgctgctccaggctgtcagatgctcacctgtgggtgtggggtgctgctccacgatgtcagatgctcacctgggggtgtgggtgctgttccaggccgtcagatgctcacctgggggtgtgggtgccgacccaggctgtcagatgctcgcctgttggtgtgggttctgctgcaggctgccggatgctctcctgggggtgtgggtgctgttccaggctatcagatgctcgcctgggggtgtgggtgctgttccaggctgtcagatgctcacctcggggtgcgcgtgctgttccaagctgtcagaggcacacctgggcctgtgggtgctgttccagtctgtcaggtgctcacctgggggagtgggtgctgttccaggctgtcagatgctcacccggggatatggggtgctcttccaggctgtcagattctcacctgggggtgcgggagcttttccaggctctcagatgctcacctggtgttgtcggtgcagctccaggatttcagatgctcccctgggggtgtgggtgctgctccatgcggtcagatgctcccctgggggtgtgggtgctgctccgggctgtcagattctcacctgtgcgtgtgggtgctgctgcgggctgtcagatgctcacctggggttgtgggtgctgttaaaggctgtcagatgctcgcctgggattgtgggtgctgctccgttcggtcagatgctcgcctgggggcgtgtgtgctgctccatgggttcagatgctcgcctggaggtatgggtcctgctccgggaggacagatgctcacctcgaggtgtgggtgctgctccaggttgtcagatgctcaccttgggatgttggtgctgctccagactctccgatgctcacctgtggttgtgtgtgatgctccagacaatcagattctcacctgggggtgtgggtgctgttccaggctgtcagatgctcacctgggggtgtgggtgctgctccaggctgtcagatgctcacctgtgggtgtggggtgctgctccacgatgtcagatgctcacctgtgggtatgggtgttgttccaggctgtctgatgctcacctgggggtgtgggtgctgttccaggccgtcagatgctcgcctgggggtgttggtgctgttccaggctgtcacatgcgcacctggtggtgcaggctgttgttccaggctgtcagatgctcacctgggcgtgtgggttctgttccaggct

SEQ ID NO: 428 - DNA, 1963 bp, Artificial sequence
  DNA replication origin
cacctgggtgtgcagggtgctgttccaggctgtcagagactcacctgagggtgtgggtgcagctccaggctgtcagatgctcacctgtgcgtgtggggttatgctccacgaagtcagatgctcaactgtgggtgtgggtgctgctccaggttgtcggttgcccgcctggggttgtgggtgctgctccaggctgtccaatgctcacctgggggtgtgggtgctgttccaggccgtcagatgctcgcctgtgggtgtcggtgctgttccaggctgtcacgggcgcacctgggggtgcaggctgctgttacaggctgtcagaggctcacctgggcatgtgggtgctgttccagtctgtcacatgctcacctgggggtgtgggttctgttccaggctgtcagatgctcacctgttggtgtgggtgctgctccagaccatcagatgcgcacctgcgtgtgtggttgccgacccaggctgtcagatgctcgcctgggggtgtgggtgctcttccaggctgtcacatgctcacctgggggtgtgggtgctgctccaggctgtcggatgctcacctgggggtgtggggtgctgctccaggctgtccgatgctcgcctggggttgtgggtgccgttccaggccgtcagatgctcgccttggggtgtgggtgctcttccaggctgtcacgtgcgcacctgggggtgcagggtgctgttgcaggctgtcagatgctcacctgggagtgtgggtgctgttacatgctgtcagatgctcacctgtgggtgtgggtgctgttccaggctgtcagatgctcacctggggttgcgcgtgctgttccaggctgtcagaggctcacctgggcgtgtgggtgctgttccagtctgtcagatgcttacctgagggtatggttgctgttccaggctgtcagatgctcacccggtgatgtggggtgctcttccaggctgtcagattctcacctggggttgtgggtgctgttccaggctctcagatgctcacctggggttgtcggtgctgctccaggatgtcagatgctcccctgggggtgtgggtgctgctacgggctgtcagattctcacctgggggtgtgggcactgctccaggctgtcagatgctcgcctgggtgtgtgggcactgctcctgactctccgatgctcacctgtggttgtgggtgctgctccagaccatcagatgctcacctgggtgtgtgggtgctgctccaggttgtcaggtgctcaccatgggctatgggtgctgctccctgttgtcagatgctcacctcggggtgtgggcactgctccgggctgtcagatgctcgcctgtggctgtgggcgctgctccagactctacgatgctcacctgtggttgtgggtgctgctccagacaatcagatgctcacttggggttgtgggtgctgctccaggtcatcggatgctcgcctgggagtgtggttgctgctccaggctgtcggatgctcacctgggggtgcagggtgctgttccaggctgtcagatgctcacctgggggtgtgggtgctgctccaggctgtcagatgctcacctgtgggtgtggggtgctgctccacgatgtcagatgctcacctgggggtgtgggtgctgttccaggccgtcagatgctcacctgggggtgtgggtgccgacccaggctgtcagatgctcgcctgttggtgtgggttctgctgcaggctgccggatgctctcctgggggtgtgggtgctgttccaggctatcagatgctcgcctgggggtgtgggtgctgttccaggctgtcagatgctcacctcggggtgcgcgtgctgttccaagctgtcagaggcacacctgggcctgtgggtgctgttccagtctgtcaggtgctcacctgggggagtgggtgctgttccaggctgtcagatgctcacccggggatatggggtgctcttccaggctgtca

SEQ ID NO: 429 - DNA, 2308 bp, Artificial sequence
  DNA replication origin
gggcactgctcctgactctccgatgctcacctgtggttgtgggtgctgctccagaccatcagatgctcacctgggtgtgtgggtgctgctccaggttgtcaggtgctcaccatgggctatgggtgctgctccctgttgtcagatgctcacctcggggtgtgggcactgctccgggctgtcagatgctcgcctgtggctgtgggcgctgctccagactctacgatgctcacctgtggttgtgggtgctgctccagacaatcagatgctcacttggggttgtgggtgctgctccaggtcatcggatgctcgcctgggagtgtggttgctgctccaggctgtcggatgctcacctgggggtgcagggtgctgctccaggctgtcagatgctcgcctgggggtgtggctgcggttccaggctgtctgatgctcacctgtgggtgtgggtgctgctccagaccatcagatgcgcaactgggtgtgaggatgccatgtgatgcggtcagatgctcacctgggggtgtgggtgctgttccaggctgtcagatgctcacctgggggtgcagggtgctgttccaggctgtcagatgctcatctgggcgtatgggtgctgttccaggctgtcagatgctcgcctgggggtgtgtgtgctgttccaggctgtcagatgctcacctgggggggcagcgtgctgttccaggctgtcagatgatcacctgggtgtgtgggtgctgctccaggctgtcagttgctcacctgggtgtgtgggtgctgctccaggctgtcggatgctcgcctgggggtgtgggtgctgctccgtgtgttcagatgctcgcctgggggcgtgggtgctgctccaggttgtcagatgctcaccttgggctgtgggtgctgctccacgctgtcagatgctcacctgggggtgtgggcactgctccaggctgtcagatgctcgcctgggtgtgtgggcactgctcctgactctccgatgctcacctgtggttgtgggtgctgctccagatcatcagatgctcacctgggggtgtgggtgctgctccaggttgtcagatgctcaccatgggctatgggtgctgctccctgttgtcagatgctcacctggaggtgtggtcactgctccgggctgtcagatgctcgcgtggggctgtgggcgctgctccagactctacgatgctcacctgtggttgtgggtgctgctccagacaatcagatgctcacttggggttgtgggtgctgctccaggttatcggatgctggcctgggagtggtgggtgctgctccaggctgtcggatgctcacctgggggtgcagggtgctgttccatgctgtcagatgctcacctgggggtgtgggtgctgctccaggctgtcagatgctcacctgtgggtgtggggtgcggctccacgatgtcagatgctcacctgggggtgtgggtgctgttccaggccgtcagatgctcacctggtggtgtgggtgccgacccaggctgtcagatgctcgcctgttggtgtgggttctgctgcaggctgccggatgctctcctgggggtgtgggtgctgctccatgcggtcagatgctcccctgggggtgtgggtgctgctctgggctgtcagattctcacttgtgcttgtgggtgctactgcgggctgtcagatgctcacctggagttctgggtgctgtttcatgctgtcagatgctcgcctgggtttgtgggtgctgctccgttcggtcagatgctcgcctgggggtgtgggtgctgctccatgagttcagatgctcgcctgggggtactggtgctgctccgggaggtcagatgctcacctcggggtgtgggtgctgctccaggttgtcagatgctcaccttgggctatgggtgctgctccatgctgtcagatgctcacctgggtgtttgggcactgctccaggctgtcagatgctcgcctggggttgtgggcgctgctccagactctctgatgttcacctgtggttgtgggtgctgctccagaccatcagatgctcaactgggggtgtgggtgctgctccaggctgtcggatgctcacctgggtgtgcagggtgctgttccaggctgtcagagactcacctgagggtgtgggtgcagctccaggctgtcagatgctcacctgtgcgtgtggggttatgctccacgaagtcagatgctcaactgtgggtgtgggtgctgctccaggttgtcggttgcccgcctggggttgtgggtgctgctccaggctgtccaatgctcacctgggggtgtgggtgctgttccaggccgtc

SEQ ID NO: 430 - DNA, 2098 bp, Artificial sequence
  DNA replication origin
tgctcaactgggggtgtgggtgctgctccaggctgtcggatgctcacctgggtgtgcagggtgctgttccaggctgtcagagactcacctgagggtgtgggtgcagctccaggctgtcagatgctcacctgtgcgtgtggggttatgctccacgaagtcagatgctcaactgtgggtgtgggtgctgctccaggttgtcggttgcccgcctggggttgtgggtgctgctccaggctgtccaatgctcacctgggggtgtgggtgctgttccaggccgtcagatgctcgcctgtgggtgtcggtgctgttccaggctgtcacgggcgcacctgggggtgcaggctgctgttacaggctgtcagaggctcacctgggcatgtgggtgctgttccagtctgtcacatgctcacctgggggtgtgggttctgttccaggctgtcagatgctcacctgttggtgtgggtgctgctccagaccatcagatgcgcacctgcgtgtgtggttgccgacccaggctgtcagatgctcgcctgggggtgtgggtgctcttccaggctgtcacatgctcacctgggggtgtgggtgctgctccaggctgtcggatgctcacctgggggtgtggggtgctgctccaggctgtccgatgctcgcctgggggtgtgggtgccgttccaggccgtcagatgctcgccttggggtgtgggtgctcttccaggctgtcacgtgcgcacctgggggtgcagggtgctgttgcaggctgtcagatgctcacctgggggtgtgggtgctgttacatgctgtcagatgctcacctgtgggtgtgggtgctgttccaggctgtcagatgctcacctggggttgcgcgtgctgttccaggctgtcagaggctcacctgggcgtgtgggtgctgttccagtctgtcagatgcttacctgagggtatggttgctgttccaggctgtcagatgctcacccggtgatgtggggtgctcttccaggctgtcagattctcacctggggttgtgggtgctgttccaggctctcagatgctcacctggggttgtcggtgctgctccaggatgtcagatgctcccctgggggtgtgggtgctgctacgggctgtcagattctcacctgtgcgtgtggttgctgctgcgggctgtcagatgctcacctggggttgtgggtgctgttccaggctgtcagatgctcgcatggggttgtgggtgctgctctgttcggtcagatgctcgcctgggggcgtgggtgctgctccatgggttcagatgctcgcctggaggtatgggtcctgctccgggaggtcagatgctcacctcggggtgtgggtgctgctccaggttgtcagatgctcaccttgggttgtgggtgctgctccagactctccgatgctcacctgtggttgtgtgtgatgctccagaacatcagattctcacctgggggtgtgggtgctgttccaggctgtcagatgctcacctgtgggtgtggggtgctgctcgacgatgtcagaggctcacctggggatgtgggtgctgttccaggctgtcagatgctcacctgggggtgtgggtgctgctccaggctgtcagatgctcacctgtgggtgtggggtgctgctccacgatgtcagatgctcacctgggggtgtgggcactgctccaggctgtcagatgctcgcctgggtgtgtgggcactgctcctgactctccgatgctcacctgtggttgtgggtgctgctccagaccatcagatgctcacctgggtgtgtgggtgctgctccaggttgtcaggtgctcaccatgggctatgggtgctgctccctgttgtcagatgctcacctcggggtgtgggcactgctccgggctgtcagatgctcgcctgtggctgtgggcgctgctccagactctacgatgctcacctgtggttgtgggtgctgctccagacaatcagatgctcacttggggttgtgggtgctgctccaggtcatcggatgctcgcctgggagtgtggttgctgctccaggctgtcggatgctcacctgggggtgcagggtgctgctccaggctgtcagatgctcgcct

SEQ ID NO: 431 - DNA, 1699 bp, Artificial sequence
  DNA replication origin
gatgctcgcctgggggtgtgtgtgctgttccaggctgtcagatgctcacctgggggggcagcgtgctgttccaggctgtcagatgatcacctgggtgtgtgggtgctgctccaggctgtcagttgctcacctgggtgtgtgggtgctgctccaggctgtcggatgctcgcctgggggtgtgggtgctgctccgtgtgttcagatgctcgcctgtgggcgtgggtgctgctccaggttgtcagatgctcaccttgggctgtgggtgctgctccacgctgtcagatgctcacctgggggtgtgggcactgctctaggctgtcagatgctcgcctgggtgtgtgggcactgctcctgactctccgatgctcacctgtggttgtgggtgctgctccagatcatcagatgctcacctgggggtgtgggtgctgctccaggttgtcagatgctcaccatgggctatgggtgctgctccctgttgtcagatgctcacctggaggtgtggtcactgctccgggctgtcagatgctcgcgtggggctgtgggcgctgctccagactctacgatgctcacctgtggttgtgggtgctgctccagacaatcagatgctcacttggggttgtgggtgctactccaggttatcggatgctggcctgggagtggtgggtgctgctccaggctgtcggatgctcacctgggggtgcagggtgctgttccaggctgtcagatgctcacctgggggtgtgggtgctgctccaggctgtcagatgctcacctgtgggtgtggggtgcggctccacgatgtcagatgctcacctgggggtgtgggtgctgttccaggccgtcagatgctcacctgggggtgtgggtgccgacccaggctgtcagatgctcgcctgttggtgtgggttctgctgcaggctgccggatgctctcctgggggtgtgggtgctgctccatgcggtcagatgctcccctgggggtgtgggtgctgctctgggctgtcagattctcacttgtgcttgtgggtgctactgcgggctgtcagatgctcacctggagttctgggtgctgtttcatgctgtcagatgctcgcctgggtttgtgggtgctgctccgttcggtcagatgctcgcctgggggtgtgggtgctgctccatgagttcagatgctcgcctgggggtactggtgctgctccgggaggtcagatgctcacctcggggtgtgggtgctgctccaggttgtcagatgctcaccttgggctatgggtgctgctccatgctgtcagatgctcacctgggtgtttgggcactgctccaggctgtcagatgctcgcctggggttgtgggcgctgctccagactctctgatgttcacctgtggttgtgggtgctgctccagaccatcagatgctcaactgggggtgtgggtgctgctccaggctgtcggatgctcacctgggtgtgcagggtgctgttccaggctgtcagagactcacctgagggtgtgggtgcagctccaggctgtcagatgctcacctgtgcgtgtggggttatgctccacgaagtcagatgctcaactgtgggtgtgggtgctgctccaggttgtcggttgcccgcctggggttgtgggtgctgctccaggctgtccaatgctcacctgggggtgtgggtgctgttccaggccgtcagatgctcgcctgt

SEQ ID NO: 432 - DNA, 997 bp, Artificial sequence
  DNA replication origin
tgtcagatgctcacctgtgggtatgggtgttgttccaggctgtctgatgctcacctgggggtgtgggtgctgttccaggccgtcagatgctcgccttggggtgttggtgctgttccaggctgtcacatgcgcacctggtggtgcaggctgttgttccaggctgtcagatgctcacctgggcgtgtgggttctgttccaggctgtcagatgctcacctgtgggtgtcggtgttgccgcaaaccatcagatgctcacctgggggtgtgggtgccgacccaggctctcagatgctcgcctgtggccgtgggttccgctccaggctgccggatgctctcctgggggtgtgagtgctgttccaggctgtcaaatgctcacctgggggtgtggatgctgctccaggctgtcaggtgctcgctgggggtgtggctgcggttccaggctgtctgatgctcacctgtgggtgtggatgctgctccagaccatcagatgcgcaactgggggtgaggatgccatgcgatgcggtcagatgctcacctgggggtgtgggtgctgttccaggctgtcagatgctcacctgggggtgcagggtgctgttccaggctgtcagatgctcatctgggcgtatgggtgctgttccaggttgtcagatgctcgcctgggggtgtgtgtgctgttccaggctgtcagatgctcacctgggggggcagcgtgctgttccaggctgtcagatgatcacctgggtgtgtgggtgctgctccaggctgtcagttgctcacctgggtgtgtgggtgctgctccaggctgtcggatgctcgcctgggggtgtgggtgctgctccgtgtgttcagatgctcgcctgtgggcgtgggtgctgctccaggttgtcagatgctcaccttgggctgtgggtgctgctccacgctgtcagatgctcacctgggggtgtgggcactgctctaggctgtcagatgctcgcctgggtgtgtgggcactgctc

SEQ ID NO: 433 - DNA, 1113 bp, Artificial sequence
  DNA replication origin
ctgggggtgtgtgtgctgttccaggctgtcagatgctcacctgggggggcagcgtgctgttccaggctgtcagatgatcacctgggtgtgtgggtgctgctccaggctgtcagttgctcacctgggtgtgtgggtgctgctccaggctgtcggatgctcgcctgggggtgtgggtgctgctccgtgtgttcagatgctcgcctgggggcgtgggtgctgctccaggttgtcagatgctcaccttgggctgtgggtgctgctccacgctgtcagatgctcacctgggggtgtgggcactgctccaggctgtcagatgctcgcctgggtgtgtgggcactgctcctgactctccgatgctcacctgtggttgtgggtgctgctccagatcatcagatgctcacctgggggtgtgggtgctgctccaggttgtcagatgctcaccatgggctatgggtgctgctccctgttgtcagatgctcacctggaggtgtggtcactgctccgggctgtcagatgctcgcgtggggctgtgggcgctgctccagactctacgatgctcacctgtggttgtgggtgctgctccagacaatcagatgctcacttggggttgtgggtgctgctccaggttatcggatgctggcctgggagtggtgggtgctgctccaggctgtcggatgctcacctgggggtgcagggtgctgttccaggctgtcagatgctcacctgggggtgtgggtgctgctccaggctgtcagatgctcacctgtgggtgtggggtgctgctccacaatgtcagatgctcacctgtgggtatgggtgttgttccaggctgtctgatgctcacctgggggtgtgggtgctgttccaggccgtcagatgctcgccttggggtgttggtgctgttccaggctgtcacatgcgcacctggtggtgcaggctgttgttccaggctgtcagatgctcacctgggcgtgtgggttctgttccaggctgtcagatgctcacctgtgggtgtcggtgttgccgcaaaccatcagatgctcacctgggggtgtgggtgccgacccaggctctcagatgctcgcctgtggccgtgggttccgctccaggctg

SEQ ID NO: 434 - DNA, 1096 bp, Artificial sequence
  DNA replication origin
cacctggtggtgtgggtgccgttccaggctgtcagatgctcgcctggtggtgtgggtgctgctccaggctgtcggatgctcacctgggggtgaagggtggtgttccaggctatcggatgctcacctgggcgtgtgggtgctgttccaagccatcagatgctcacctgggggtgcagggtggtgttccagtctgtcagatgctcacctgggggtgtggattctgttccaggctgtcagatgctcacctgtgggtgtgggtgctgctgcaaaccatcagatgctcacttgggggtgtgggtgccgacccaggctctcagatgctcgcctgtggccgtgggttccgctccaggctgccggatgctctcctggggctgtgcgtgctgttccaggctgtcaaatgctcacctgggggtgtggatgctgctccaggctgtcagatgctcgcctgggggtgtggctgcggttccaggctgtctgatgctcacctgtgggtgtgggtgctgctccagaccatcagatgcgcaactgggggtgaggatgccatgcgatgcggtcagatgctcacctgggggtgtgggtgctgttccaggctgtcagatgctcacctgggggtgcagggtgctgttccaggctgtcagatgctcatctgggcgtatgggtgctgttccaggttgtcagatgctcgcctgggggtgtgtgtgctgttccaggctgtcagatgctcacctgggggggcagcgtgctgttccaggctgtcagatgatcacctgggtgtgtgggtgctgctccaggctgtcagttgctcacctgggtgtgtgggtgctgctccaggctgtcggatgctcgcctgggggtgtgggtgctgctccgtgtgttcagatgctcgcctgggggcgtgggtgctgctccaggttgtcagatgctcaccttgggctgtgggtgctgctccacgctgtcagatgctcacctgggggtgtgggcactgctccaggctgtcagatgctcgcctgggtgtgtgggcactgctcctgactctccgatgctcacctgtggttgtgggtgctgctccagatcatcagatgctcacctgggggtg

SEQ ID NO: 435 - DNA, 872 bp, Artificial sequence
  DNA replication origin
cagatgctcgcctgggggtgtgtgtgctgttccaggcggtcagatgctcacctgggtgtgtgcgtgctgttccaggctgtcagatgctcccctgggggtgcagggtgctgttcgaggctgtcacaggctcagctgggcatgtgggtgctgttccagtctgtcagatgctcacctgggggtgtgggttctgttccaggctgtcagatgctcacctgtgggtgtgggtgctgctccagaccatcacatgcgcacctgggggtgtgggtgctgctccaggctgtcggatgctcgcctggaggtgtgggtgctgctccgtgcgttcagatgctcgcctgggggtgtgggtgctcctccacgctgtcagatgctcacctgggggtgtgggcactgctccaggctgtcagatgctcgcctgggggtgtgggcgctgctccagactctccgatgttcacctgtggttatgcgtgctgctccagaccatcagatgctcacctgcgggtgtgggtgccgttccaggctgtcagatgctcgcctgggggtgtgggtgcttctccaggctgtcggatgctcacttgggggtgcagggtgctgttccaggctgtcagatgctcacctgggggtgtgggtgctgatacatgcagtcagatgctcgcctgtgggtgtgggtgctgttcccggctgtcacatgctcacctgggggtgtgcgtgctgttccaggctgtcagatgctcacctgggggtgcagggtgctgttccaggctgtcagaggctcacctgggcatgggggtgccgttccagtctgtcagatgctcacctgggggtgtgggttctgttccaggctgtcagatgctcacctgtgggtgtgggttctg

SEQ ID NO: 436 - DNA, 797 bp, Artificial sequence
  DNA replication origin
atgctcgcctggcagtgtgggtgctgctccaggctgtccgatgctcgtctgggagtgtgggtgctgttccaggctgtcagatgctcatcagggggtgtgggtgctgctccaggctgtccgatgctcacctgggggtgtggggtgctgctccaggctgtcagatgctcgcctgggggtgtgggtgctgatccaggctgtcacatgctcacctgggggtgtgggtgccgttccaggctgtcagatgctcgcctgggggtgtgtgtgctgttccaggctgtcacgtgcgcacctgggggtgcagggtgctgttccaggctgtcagatgctcacctgggtgtgtgggtgctgttacatgctgtcagatgctcgcctgggggtgtgtgtgctgttccaggcggtcagatgctcacctgggtgtgtgcgtgctgttccaggctgtcagatgctcccctgggggtgcagggtgctgttcgaggctgtcacaggctcagctgggcatgtgggtgctgttccagtctgtcagatgctcacctgggggtgtgggttctgttccaggctgtcagatgctcacctgtgggtgtgggtgctgctccagaccatcacatgcgcacctgggggtgtgggtgctgctccaggctgtcggatgctcgcctggaggtgtgggtgctgctccgtgcgttcagatgctcgcctgggggtgtgggtgctcctccacgctgtcagatgctcacctgggggtgtgggcactgctccaggctgtcagatgctcgcctgggggtgtgggcgctgctccagac

SEQ ID NO: 437 - DNA, 2500 bp, Artificial sequence
  DNA replication origin
ggggtgtgtgtgcagttccagggtgtcagatgctcgcctgggggtgtgtgtgctgttccagggtgtccgatgctcacctgggggtgcagggtgctgttccaggctgtcagatgctcacctggggatgtgggtgctgctccaggctgtcagatgctcacctgggtgtgtgggtgctgttccacgctgtcacgtgcgcacctgggggtgcagggtgctgttccaggctgtcagatgctcacctgggggtatgggtgctgttacatgctgtcagatgctcgcctggggatgtgggtgctgttccaggcggtcagatcctcacctgggggtgtgcccgctgttccaggctgtcagatgctctcctgggggtgcagggtgctgttccaggctgtcagaggctcacctgtggttgtgggtgctactccagaccatcagatgcgcacctgggggtgtgggtgctgctccaggctgtcggatgcgcgccggaaggtgtgggtgctgctccgtgggttcaggtgctcgcctgtgggtgtgggtactgttacaggctgtcagatgctcacctgtgggtgtggggtgctgctccacaatgtcggatgttcacctaggggtgtgggtcctgctccaggctgtcggatgctcacctgggggtgtgggtgctgttccaggctgtcagatgctcacctgggcgtgtgggtgctgctccaggctgtccgatgctcacctgggggtgtggggttctgctccaggctgtcagatgctcgcctgggagtgtgggtgctgatccaggctgtcacatgctcccctgggggtgtgggtgctgctccaggctgtcggatgctcccctgggggtgtggggtgctgctccaggctgtccgatgctcgcctgggggtgtgggtgcccttccaggccgtcagatgctcgcctgggggtgtgggtgctgttccaggctgtcacgtgcgcacctgggggtgcagggtgctgttccaggctgtcagatgcttacctgggggtgtgggtgctgttacatgcagtcagatgctcgcctgggggtgtgggtcctgttccaggctgtcagatgctctcctgggggtgcgcgtgctgttccaggctgtcagaggctcacctgggcgtgtgggtgctgttccagtctgtcagatgctcacctggggatgtgggttctgttccaggctgtcagatgctcaactgtgggtgtgggtaatgctccagaccatcagatgctcacctggaggtgtgggtgccgacccaggctgtcagatgctcgcctcagggtgtgggttctgctccaggctgtcggatgttcacctgggggtgtgggtgctgttcccggctgtcagatgctcaactgggggtgtgcgtgctgctccagcctgtcagatgctcacctgggggtgtgggtgctgttccaggatatcagctgctcacctgggggtgtgggtgctgttccaggctgtcagatcgtcacctggcggtgcagcgtgctgctccatgctgtcagatgctcacctgggggtgtgggtgctgctcaaggatgtcagatgctcgcctgagtgtgtgggtgctgttccaggctgtcggatgctcacctgtggttgtgggtgctgctccagaccatcagatgctcacctgggggtgtgggtgccgttccaggctgtcagatgctcgcctgggggtgggggtgctgctccaggctgtcggatgctcacctgtgggtttggggtgctgttccacgatgtcagatgctcacctgtggttgtgggtgctgctccagaccatcagatgcgcacctgggggtgtgggtgctgctccaggctgtcggatgctcgccgggaggtgtgggtgctgctccgtgggttcagatgctcgcctgtgtgtgtgggtactgttccaggctgtcagatgctcacctgtgggtgtggggtgctactccacgatgtcggatgttcacctgggggtgtgggtcctgctccaggctgtcggatgcacgcctggggttgtgggtgctgctccaggctgtcgaatgctcacctgggggtgtgggtgcttttccaggctggcggatgctcgcctggcagtgtgggtgctgctccaggctgtccgatgctcgtctgggagtgtgggtgctgttccaggctgtcagatgctcatcagggggtgtgggtgctgctccaggctgtccgatgctcacctgggggtgtggggtgctgctccaggctgtcagatgctcgcctgggggtgtgggtgctgatccaggctgtcacatgctcacctgggggtgtgggtgccgttccaggctgtcagatgctcgcctgggggtgtgtgtgctgttccaggctgtcacgtgcgcacctgggggtgcagggtgctgttccaggctgtcagatgctcacctgggtgtgtgggtgctgttacatgctgtcagatgctcgcctgggggtgtgtgtgctgttccaggcggtcagatgctcacctgggtgtgtg

SEQ ID NO: 438 - DNA, 1217 bp, Artificial sequence
  DNA replication origin
tgggggtgtgggtgctgctccaggctgtcggatgctcgcctggaggtgtgggtgctgctccttgcgttcagatgcttgcctgggggtgtgggtgctcctccacgctgtcagatgctcacctgggggtgtgggcactgctccaggctgtcagatgctcgcctgggggtgtgggcgctgctccagactctccgatgttcacctgtggttatgcgtgctgctccagaccatcagatgctcacctgggggtgtgggtgccgttccaggctgtcagatgctcgcctgggggtgtgggtgcttctccaggctgtcggatgctcacttgggggtgcagggtgctgttccaggctgtcagatgctcacctgggggtgtgggtgctgatacatgcagtcagatgctcgcctgtgggtgtgggtgctgttcccggctgtcacatgctcacctgggggtgtgcgtgctgttccaggctgtcagaggctcacctgggcatgggggtgcagttccagtctgtcagatgctcacctgggggtgtgggttctgttccaggctgtcagatgctcacctgtgggtgtgggttctgctccagaccatcagatgcgcacctgggggtgtgggtgcggacccaggctgtcagatgctcgcctgggggtgtgggttctgctccaggctgtcagatgctcacctgagggtgtgggtgctgctccaggctgtcggatgctcgcctggggttgtgggtgctgctctgtgcgtacagatactcgcctgggagtgtgggtgctgctccaggttgtcagatgctcaccttggtctgtgggtgctgctccatggtgtcagatgctcacctgggggtgtgggcactgctccaggctgtcagatgctcgccctgcagtgtgggcgctgctccagactctccgatgctcacctgtggttgtgggtgatgctccagaccatcagatgctcacctaggggtgtgggtgccgttccaggctgtcagatgctcgcttgtgggtgtgtgtgctgctccaggctgtgggatgctcacctgggggtgcagggtgctgttccaggctctcagatgctcacctggggtgtgggtgctgctccaggctgtcagaagctcacctgtgggtgtggggtgctgctccacgatgtcagatgctcacctgggggtgtgggtgctgttccaggcagtcagatgctcacatgggggtgtgggtgc

SEQ ID NO: 439 - DNA, 823 bp, Artificial sequence
  DNA replication origin
ctgggggtgtgggtgccgttccaggccgtcagatgctcgcctgggggtgtgtgtgctgttccaggctgtcacgtgcgcacctgggggtgcagggtgctgttccaggctgtcagatgctcacctgggtgtgtgggtgctgttacgtgctgtgagatgctcgcctgggggtgtgggtgctgttccaggcggtcagatgctcacctgggtgtgtgcgtgctgttccaggctgtcagatgctcccctgggggtgcagggtgctgttcgaggctgtcacaggctcagctgggcatgtgggtgctgttccagtctgtcagatgctcacctgggggtgtgggttctgttccaggctgtcagatgctcacctgtgggtgtgggtgctgctccagaccatcacatgcgcacctgggggtgtgggtgctgctccaggctgtcggatgctcgcctggaggtgtgggtgctgctccttgcgttcagatgcttgcctgggggtgtgggtgctcctccacgctgtcagatgctcacctgggggtgtgggcactgctccaggctgtcagatgctcgcctgggggtgtgggcgctgctccagactctccgatgttcacctgtggttatgcgtgctgctccagaccatcagatgctcacctgggggtgtgggtgccgttccaggctgtcagatgctcgcctgggggtgtgggtgcttctccaggctgtcggatgctcacttgggggtgcagggtgctgttccaggctgtcagatgctcacctgggggtgtgggtgctgatacatgcagtcagatgctcgcctgtgggtgtgggtgctgtt

SEQ ID NO: 440 - DNA, 1587 bp, Artificial sequence
  DNA replication origin
ctcacctggagtgtgggtgctgctccaggctgtctgatcctcaccctggggtgcaggatgctgttccaggctgtcagatactcgcctgggggtgtggttgctcttccaggctgtcagatgctcacctgggggtgtgggtgctactccaggctgtcggatgctcacctggaggtgaggatgccattccatgcgatcagatgctcacctgggggtatgggtgctgctccaggctgtcggatgctcacctgggggtgtgggagctgtttcaggatgtcggatgctcacctgggcgtctgggtgcagttccaggccatcagatgctcgcctgggtgtgtgggtgctgttgcaggctgtcaggtgcgcacctgggggtgcagggacctattccaggctgtcagatgctcatctgggcgtatgggtgctgttccatgctgtcagatgctctcctgggggtgcagggtgctgttccacgctgtcagatgctcatcttggcgtatgggtgctgttccaggttgtcagatgctcgcctgggggtgtgtgtgctgtttcagtgtgtcagatgctcacctgggggtgcagggtgctgttccaggctgtcagatcctcacctgggggtgcagggtgctgctccaggctgtcagatgctcacctgggggtgtgggtgctgctcaaggatgtcaggtgctcgcgtgagtgtgtgggtgctgttccaggctgtcggatgctcacctgtggttgtgggtgctgctccagaccatcagatgctcacctgggggtgtgggtgtcgttccaggctgtcagatgctcgcctgggtgtgtgggtgctgctccaggctgtcggatgctcacctgtgggtttggggtgctgctccacgatgtcagatgctcacctgtggttgtgggtgctgctccagggtgtccaatggtcacctggcggtgtgtgtgctgttccaggccgtcagatgctcgccgggaggtgtgggtgctgctccgtggtttcagatgctcgcctgtgggtgtgggtactgttccaggctgtcagatgctcacctgtgggtgtggggtgctactccacgatgtcggatgttcacctgggggtgtgggtcctgctccaggctgtcggatgcacgcctggggttgtgggtgctgctccaggctgtcgaatgctcacctgggggtgtgggtgcttttccaggctggcggatgctcgcctggcagtgtgggtgctgctccaggctgtccgatgctcgtctgggagtgtgggtgctgttccaggctgtcagatgctcatcagggggtgtgggtgctgctccaggctgtccgatgctcacctgggggtgtggggtgctgctccaggctgtcagatgctcgcctgggggtgtgggtgctgatccaggctgtcacatgctcacctgggggtgtgggtgccgttccaggccgtcagatgctcgcctgggggtgtgtgtgctgttccaggctgtcacgtgcgcacctgggggtgcagggtgctgttccaggctgtcagatgctcacctgggtgtgtgggtgctgttacgtgctgtgagatgctcgcctgggggtgtgggt

SEQ ID NO: 441 - DNA, 1131 bp, Artificial sequence
  DNA replication origin
gcggatgctcgcctggcgatgtgggtgctgctccaggctgtcctatgctcgtctgggagtgtgggtgctgttccaggctgtcagatgctcacctgggggtgtgggtgctgatccaggctgtccgatgctcacctgggggtgtggggtgctgctccaggctgtcagatgctcgcctgggagtgtgggtgcagatccaggctgtcacatgctcacctgggggtgtgggtgctgctccaggctgtcggatgctcccctgggggtgtagggtgctgctccaggctgtccgatcctcgcctgggggtgtgggtgctgttccaggctgtcacgtgcacacctgggggtgcagggtgctgttccaggctgtcagatgcttacctgggggtgtgggtgctgttacatgcagtcagatgctctcctgggggtgtgggtgttgttccaggctgtcacgtgcacacctgggggtgcagggtgctgttccaggctgtcagatgcttacctgggggtgtgggtgctgttacatgcagtcagatgctcgcctgggggtgtgggtcctgttccaggctgtcagatgctcacctgggggtgcgcgtgctgttccaggctgtcagaggctcacctgggcgtgtgggtgctgttccagtctgtcagatgctcacctgggggtgtgggttctgttccaggctatcagatgctcaactgtgggtgtgggtactgctccagaccatcagatgctcacctggaggtgtgggtgccgacccaggctgtcagatgctcgcctcggggtgtgggttctgctccaggctgtcggatgttcacctgggggtgtggatgctgttccaggctgtcagatgctcaactgggggtgtgcgtgctgctccagcctgtcagatgctcacctgggggtgtgggtgctgttccaggatttcagctgctcacctgggggtgtgggtgctgttccaggctgtcagatgctcacctgggggtgtgggtgctgttccaggcggtcagatgctcacctgttggtgtgggtgctgcttcaggctgtcagatgctcacctggagtgtgggtgctgctccaggctgtctgatcctcaccctggggtgcaggatgctgttccaggctgtcagata

SEQ ID NO: 442 - DNA, 2964 bp, Artificial sequence
  DNA replication origin
cagatactcaccttggggtgtggggtgctgttccaggctgtcagatgctcacctgcgggtgtgcggtgctgttccaggctgtcagatgctcgcctggagttgtggctgctgctccatgcggtcagatgctcgcctgggggtgtgggtgctgctccatgacttcagatgctcgccttggggtatgggtgctgctccgggcggtcagatgctcacctgggggtgtgggtgctgctccaggttgtcagatgctcaccttgggctgtgggtgctgctccacactatcagatgctaacctgggggtgtgggcactgctccaggctgtcagatgctcacttgggtgtgtgggcgctgctccggactctccgatgctcacctgtggttgtgggtgcttctccagaccatcagatgctcacctggtggtgtgggtgcctttccaggctgtcagatgctcacctgggggggcagggtgatgttccaggctgtcagatgctcacctgagggtgcaggatactactccaggctgtcagatgctcacctgggggtgtgggtgctgctccaggatgtcagatgctcgcctgggagtgtgggtactgttgcaggctgtgagatgctcacctgtgggtgtggggtgctgctccacgatgtcggatgttcacctgggggtgtgggtcctgctccaggctgtcggatgcaagcctggggttgttggtgctgctccaggctgtcgaatgctcacctgggggtgtgggtgctgttccaggctggcggatgctggcctggcggtgtgggtgctgttccaggctgtccgatgctcgtctgggagtgtgggtgctgttccaggctgtcagatgctcatctgggggtgtgggtgctgctccaggctgcccgatgctcacctgggggtgtggggtgctgcttcaggctgtcagatgctcgcctgggagtgtgggtgctgatccaggctgtcacatgcccacctgggggtgtgggtgctgctccaggctgtcggatactcacctgggtgtgtggggtgctgctccaggctgtccgatgctcgcctgtgggtgtgggtgctgttccaggacgtcagatgctcgcctgggggtgtgggtgctgttccaggctgtcacgtgcgcaccgggggtgcagggttctgtttcaggctgtcagatgcttacctgggggtgtgggtgctgttacatgctgtcagatgctcgcctgggggtgtgggtgctgttctaggctgtcagaggctcacctgagcgtgtgggtgctgttccagtctgtcagatgctcacctgggggtgtgggttctgctccaggctgtcggatgttcacctgggggtgtgggtgctgttccaggctgtcagatgctcaactggcggtgtgcgtgctgctccagcccgtcagaggctaacctggaggtgtgggtgctgttccaggatataagatgctcacctgggggtgtgggtgatgttccaggcggtcagctgctcacctgggggtgtgggtgctgttccaggttgtcagatgctcacctgttggtgtgggtgctgcttcaggctgtcagatgctcacctggagtgtgggtgctgctccaggctgtctgatcctcacccgggggtgcagggtgctgttccaggctgtcagatgctcgcctgggggtgtggttgctcttccaggctgtcagatgctcacctgggggtgtgggtgctgctccaggctgtcggatgctcacctggaggtgaggatgccattccatgcggtcagatgctcacctgggggtatgggtgctgctccaggctgtcggatgctcacctggggttgtgggagctgtttcaggatgtcggatgctcacctgggggtgtgggtgcggttccaggccatcagatgctcgcctgggtgtgtgggtgctgttccaggctgtcatgtgcgcacctgggggtgcagggagctgttccaggctgtcagatgctcatctgggcgtatgggtgctgttccaggctgtcagatgctctccttggggtgcagggtgctgttccacgctgtcagatgctcatctgggcgtatgggtgctgttccaggttgtcagatgctcgcctgggggtgtgtgtgctgttccagggtgtcagatgctcgcctgggggtgtgtgtgctgttccagggtgtcacttgctcacctgggggtgcagggtgctgttccaggctgtcagatgctcacctggggatgtgggtgctgctccaggatgtcagatgctcacctgggtgtgtgggtgctgttccacgctgtcacgtgcgcacctgggggtgcagggtgctgttccaggctgtcagatgctcacctgggggtgtgggtgctgttacatgctgtcagatgctcgcctgggggtgtgggtgctgttccaggcggtcagatcctcacctgggggtgtgcgcgctgttccaggctgtcagatgctctcctgggggtgcagggtgctgttccaggctgtcagaggctcacctgtggttgtgggtgctgctccagaccatcagatgcgcatctgggggtgtgggtgctgctccaggctgtcggatgctcgccggaaggtgtgggtgctgctccgtgggttcagatgctcgcctgtgggtgtgggtactgttacaggctgtcagatgctcacctatgggtgtggggtgctgctccacgatgtcggatgttcacctaggggtgtgggtcctgctccaggctgtcggatgctcacctgggggtgtgggtgctgttccaggctggcggatgctcgcctggcgatgtgggtgctgctccaggctgtcctatgctcgtctgggagtgtgggtgctgttccaggctgtcagatgctcacctgggggtgtgggtgctgatccaggctgtccgatgctcacctgggggtgtggggtgctgctccaggctgtcagatgctcgcctgggagtgtgggtgcaga

SEQ ID NO: 443 - DNA, 1345 bp, Artificial sequence
  DNA replication origin
ggtgggcatctgacagcctggagcaggcgcccacaatcccaggttagcatctgacagcctggagcagcacccacacccccagttgagtagctgacatcctggagctgcacccatacccccaggtgagatctgacagcctgggtcagcacccacacccccaggtgagcatctggcaacctggaacagcatctacagccccaggtgaccatctgacagcctgaagcagcacccacacccccaggtgagcatgtgaccacatggaatgtcatcctcacctccaggtgagcatcggacagcctggaacagaattctcaagccccaggtgaggatctgacaacctggaacagaaccccactcttccaggtgagaatctgacagcataaaacagcaccctgcacccccaggtgagcatctgacagcctgaaacagcaccctccaccttcaggtgagaatatgacagcctgaaacagcaccccgcacccaggcaaaaatctgacagcatggaacaagactactgcccccaggtgggcatttgacagcctgggaaagcaccctctacccacacgtgagcatctgacagcctggaaacccccccactgcttccaggtgaacatctgatagcctggaacagaaccccaggcctcccagtaagcatctgaaagcaaggaacagcactctcacccccaggggagcatctgacaacctagaacagcaccctcaccccgaggtgggcatctggcagcataaaacagcacccctactggcagatgagcatatgacagcctggaacagcacccacacccgctggcgagaatctgacagcctggagcaacacccacacccccaggtgagcatctgacagcctggagcagcgcccacacccccaggtgagcatcttacagcctggagcagcgcccacacccccaggtgagcatctgacagcctggagcagcacccacactcccaggtgagtatctgacagcctggagtagcacccacacccccaggtgagcatctgacagcctggaacagcatccactcccccaggtgagcatctgaccacattgaatggcatcctcacctccaggtgagcatctgacagcctggaaccgcacccacacccccaggcgagcatctgacagcctggagcagcacccacacccccaggtgagcatctgacagcctggagcagcacccacacccccaggggagtatctgaccgcatggaatgtcatcctcacttccaggtgagcatccgacagcctggagcagcacccacacccccaggtgagcatctgaccgcatggaatggcatcctcacctccaggtgagcatccgacagcct

SEQ ID NO: 444 - DNA, 2007 bp, Artificial sequence
  DNA replication origin
tgctgctccgggctgtcagattctcatctgtgcgtgcgggtgatgctgcgggctttcagatgctcacctgtggttgtgggtgctgttccaggctgtcagatgctcgcctggggttctgggttctgctccgttggttcagatgctcgcctgggggtgtgggtgctgctccatgagttcagatgctcgcctgggggtatgggtgctgctctgggaggtcaaatgctcacctggaggtgtgggtgctgctccaggctgtcggatgctcacctgggtgtgcagggtgctgttccaggctgtcagatcctcacctggggtgtgggtgctgctccaggctgtcagatgctcacctatgggtgtggggtgctgctccacgatgtcagatgctcaccttggggtgtgggtgctgttccaggcagtcagatactcacctgggggtgtgggtgctgttccaggccgtcagatgctcgcctggcggtgtgggtgctgttccaggctatcacatgcgcacctgggggtgcaggctgctgttccaggctgtcagatgctcacctgggggtgtgggtgctgttacatgctgtcagatgctcgcctgggggtgcggggtgctgttccaagctgtcagatgctcacctgggggtttgcgtgctgttccaggctgtcagatgctcacctgggggtgcagggtgctgttccaggctgtcagaggctcacctgggcatgtgggtgctgttccagtctgtcagatgctcacctgagggtggggtttctgttccaggctgtcagatgctcacctgtgggtgtgggtgctgctccagaccatcacatgcgcacctgggggtgtggctgctgctccaggctgtcggatgctcgccttggggtgtgggtgctgctccgtgagttcagatgctcgcctgggggtatgggtgctgctccaggttgtcagatgctcaccttgggctatgggttctgaaccatgctgtcagatgctcacctggggctctgggcactgctccaggctgtcagatgctcgcctgggggtgtgggcgctgctccagactctccgatgctcacctggaggtgaggatgccattccatgcggtcagatgctcacctgggggtatgggtgctgctccaggctgtcggatgctcaccagggggtgtgggagctgtttcaggatgtgggatgctcacctgggggtgtgggagctgtttcaggatgtcggatgctcacctcggtctgtgggtgcgtttccaggccgtcagatgctcgcctgggtgtgtgggtgctgttccaggctgtcatgtgcgcacctgagggtgcagggagctgttccaggctgtcagatgctcatctgggcgtatgggtgctgttccaggctgtcagatgctctcctgggggtgcagggtgctgttccacgctgtcagatgctcatctgggcgtatgggtgctgttccaggttgtcagatgctcgcctgggggtgtgtgtgcagttccagggtgtcagatgctcgcctgggggtgtgtgtgctgttccagggtgtccgatgctcacctgggggtgcagggtgctgttccaggctgtcagatgctcacctggggatgtgggtgctgctccaggctgtcagatgctcacctgggtgtgtgggtgctgttccacgctgtcacgtgcgcacctgggggtgcagggtgctgttccaggctgtcagatgctcacctgggggtatgggtgctgttacatgctgtcagatgctcgcctggggatgtgggtgctgttccaggcggtcagatcctcacctgggggtgtgcccgctgttccaggctgtcagatgctctcctgggggtgcagggtgctgttccaggctgtcagaggctcacctgtggttgtgggtgctgctccagaccatcagatgcgcacctgggggtgtgggtgctgctccaggctgtcggatgctcgccggaaggtgtgggtgctgctccgtgggttcaggtgctcgcctgtgggtgtg

SEQ ID NO: 445 - DNA, 1302 bp, Artificial sequence
  DNA replication origin
gtcagatgctcacctgtgggtgtgggttctgttccagactctccgatgctcacctgtggttttgggtgctgctccagaccatcagatgctcacatgggggtgtgggtgctgctccaggttgtcagatgctcgcctgcaggtgtgggtgctgctccaggctgtcgcatgctcacctgggtgtgcagtttgctgttccaggctgtcagatgctcacctgggggtgtgggtgctgctccaggctgtcggatgctcgcctggggttgtgggtgctgctccaggctgtcggattctcacctgggggtgtgggtgctgttccaggctgtcagatgctcacctgggcgtgtgggtgctgttccaggccgtcagatgctcacctggggaagcagggtgctgttccagtctgtcagatactcccctggcggtgtgggttctgttccaggctgtcagatgctcacctgaaggtgtgggtgctgctccaaagcatcagatgctcacctgggtttgtgggtgccgaccgaggctgtcagatgctcgcctgtgggtgtgggttccgctccaggctgccggatgctctcctaggggtgtgggtgctgttccagtctgtcagatgctcacctggaggtgtgggttctgttccaggctgtcagatgctcacctgggggtgtgggtgctgctccaggctgtcagatgctcacctggaggtgtgggttctgttccaggctgtcagatgctcacctgggggtgtgggtgctgctccaggctgtcagatgctcgcatggtggtgtggttgctgttccaggctgtcagatgctcacctgagggtgtgggtgctgctccaggctatcggatgctcacccggggatgtggggtgctcttccaggctgtcagattctcacctgggggtgtgggtgctgttccagcctctcagatgctcacctggggttgtcagtgttgctccaggatgtcagatgctcccctgggggtgtgggtgctgctccatgcggtcagatgctcccctgggggtgtgggtgctgctccgggctgtcagattctcatctgtgcgtgcgggtgatgctgcgggctttcagatgctcacctgtggttgtgggtgctgttccaggctgtcagatgctcgcctggggttctgggttctgctccgttggttcagatgctcgcctgggggtgtgggtgctgctccatgagttcagatgctcgcctgggggtatgggtgctgctctgggaggtcaaatgctcacctggaggtgtgggtgctgctccaggctgtcggatgctcacctgggt

SEQ ID NO: 446 - DNA, 1906 bp, Artificial sequence
  DNA replication origin
cggatgctcgcctggaggtgtgggtgctgctccttgcgttcagatgctcgcctgggggtgtgggtgctcctccacgctgtcagatgctcacctgggggtgtgggcactgctccaggctgtcagatgctcgcctgggggtgtgggcgctgctccagactctccgatgttcacctgtggttatgcgtgctgctccagaccatcagatgctcacctgggggtgtgggtgccgttccaggctgtcagatgctcgcctgggggtgtgggtgcttctccaggctgtcggatgctcacttgggggtgcagggtgctgttccaggctgtcagatgctcacctgggggtgtgggtgctgatacatgcagtcagatgctcgcctgtgggtgtgggtgctgttcccggctgtcacatgctcacctgggggtgtgcgtgctgttccaggctgtcagaggctcacctgggcatgggggtgcagttgcagtctgtcagatgctcacctgggggtgtgggttctgttccaggctgtcagatgctcacctgtgggtgtgggttctgctccagaccatcagatgcgcacctgggggtgtgggtgcggacccaggctgtcagatgctcgcctgggggtgtgggttctgctccaggctgtcagatgctcacctgagggtgtgggtgctgctccaggctgtcggatgctcgcctgggggtgtgggtgctgctctgtgcgtacagatactcgcctgggagtgtgggtgctgctccaggttgtcagatgctcaccttggtctgtgggtgctgctccatggtgtcagatgctcacctgggggtgtgggcactgctccaggctgtcagatgctcgccctgcagtgtgggcgctgctccagactctccgatgctcacctgtggttgtgggtgatgctccagaccatcagatgctcacctaggggtgtgggtgccgttccaggctgtcagatgctcgcttgtgggtgtgtgtgctgctccaggctgtgggatgctcacctgggggtgcagggtgctgttccaggctctcagatgctcacctggggtgtgggtgctgctccaggctgtcagaagctcacctgtgggtgtggggtgctgctccacgatgtcagatgctcacctgggggtgtgggtgctgttccaggcagtcagatgctcacatgggggtgtgggtgctgttgcaggccgtccgatgctcgcctgggggtgtgggtgctgatccaagctgtcacgtgcacacctgggggtgcaggctgctgttccaggctgtcagatgctcacctgtgggtgtgggtgctgttacatgctgtcagatgctcgcctgggggtgtgggtgctgttctaggctgtcagatgctcgtctgggggtgtgggtgatgctccaggctgtcggatgctcacctgggtgtgcagggtgctgttccaggctgtcagatgctcacctggggtgtgggtgctgctccaggctgtcagatgctcacctgtgggtgtggggtgctgctgcacgatgtcagatgctcacctgggggtgtgggtgctgttccaggccgtcagatgctcacctggggtttttggtgctgttccaggctgtcggatgctcgcctgggggtgtggttgccgttccaggctgtcagatgctcacctgggggtgtgggtgctgctccaggctgtcggatgctcacctggaggtgaggatgccattccatgcggtcagatgctcacctgggggtatgggtgttgctccaggctatcggatgctcacctggggttgtgggagctgtttcaggatgtcggatgctcacctgggggtgtgggtgccgttccaggccatcagatgctcgcctgggtgtgtgggtgctgttccagtctgtcaggtgcgcacctggggatgca

SEQ ID NO: 447 - DNA, 1043 bp, Artificial sequence
  DNA replication origin
tatgggtgctgttccaggttgtcagatgctcgcctgggggtgtgtgtgctgtttcagggtgtcagatgctcacctgggttgcagggtgctgttccaggctgtcagatcctcacctgggggtgcagggtgctgctccaggctgtcagatgctcacctgggggtgtgggtgctgctcaaggatgtcaggtgctcgcgtgagtgtgtgggtgatgttccaggctgtcggatgctcacctgtggttgtgggtgctgctccagaccatcagatgctcacctgggggtgtgggtgccgttccaggctgtcagatgctcgcctgggtgtgtgggtgctgctccaggctgtcggatgctcacctgtgggtttggggtgctgctccacgatgtcagatgctcacctgtggttgtgggtgctgctccagaccatcagatgcgcacctgggtgtgtgggtgctgctccaggctgtcggatgctcgccgggaggtgtgggtgctgctccgtggtttcagatgctcgcctgtgggtgtgggtactgttccaggctgtcagatgctcacctgtgggtgtggggtgctactccacgatgtcggatgttcacctgggggtgtgggtcctgctccaggctgtcggatgcacgcctggggttgtgggtgctgctccaggctgtcgaatgctcacctgggggtgtgggtgcttttccaggctggcggatgctcgcctggcagtgtgggtgctgctccaggctgtccgatgctcgtctgggagtgtgggtgctgttccaggctgtcagatgctcatcagggggtgtgggtgctgctccaggctgtccgatgctcacctgggggtgtgaggtgctgctccaggctgtcagatgctcgcctgggggtgtgggtgctgatccaggctgtcacatgctcacctgggggtgtgggtgccgttccaggccgtcagatgctcgcctgggggtgtgtgtgctgttccaggctgtcacgtgcgcacctgggggtgcagggtgctgttccaggctgtcagatgctcacttggg

SEQ ID NO: 448 - DNA, 2365 bp, Artificial sequence
  DNA replication origin
cgcctgggagtgtgggtactgttgcaggctgtgagatgctcacctgtgggtgtggggtgctgctccacgatgtcggatgttcacctcggggtgtgggtcctgctccaggctgtcggatgcaagcctggggttgttggtgctgctccaggctgtcgaatgctcacctgggggtgtgggtgctgttccaggctggcggatgctcgcctggcggtgtgggtgctgttccaggctgtccgatgctcgtctgggagtgtgggtgctgttccaggctgtcagatgctcatctgggggtgtgggtgctgctccaggctgcccgatgctcacctgggggtgtggggtgctgctccaggctgtcagatgctcgcctgggagtgtgggtgctgatccaggctgtcacatgcccacctgggggtgtgggtgctgctccaggctgtcggatactcacctgggtgtgtggggtgctgctccaggctgtccgatgctcgcctgtgggtgtgggtgctgttccaggacgtcagatgctcgcctgggggtgtgggtgctgttccaggctgtcacgtgcgcaccgggggtgcagggtgctgtttcaggctgtcagatgcttacctgggggtgtgggtgctgttacatgctgtcagatgctcgcctgggggtgtgggtgctgttctaggctgtcagaggctcacctgagcgtgtgggtgctgttccagtctgtcagatgctcacctgggggtgtgggttctgctccaggctgtcggatgttcacctgggggtgtgggtgctgttccaggctgtcagatgctcaactggcggtgtgcgtgctgctccagcccgtcagaggctaacctggaggtgtgggtgctgttccaggatataagatgctcacctgggggtgtgggtgatgttccaggcggtcagctgctcacctgggggtgtgggtgctgttccaggttgtcagatgctcacctgttggtgtgggtgctgcttcaggctgtcagatgctcacctggagtgtgggtgctgctccaggctgtctgatcctcacccgggggtgcagggtgctgttccaggctgtcagatgctcgcctgggggtgtggttgctcttccaggctgtcagatgctcacctgggggtgtgggtgctgctccaggctgtcggatgctcacctggaggtgaggatgccattccatgcggtcagatgctcacctgggggtatgggtgctgctccaggctgtcggatgctcacctggggttgtgggagctgtttcaggatgtcggatgctcacctgggggtgtgggtgcggttccaggccatcagatgctcgcctgggtgtgtgggtgctcttccaggctgtcatgtgcgcacctgggggtgcagggagctgttccaggctgtcagatgctcatctgggcgtatgggtgctgttccaggctgtcagatgctctccttggggtgcagggtgctgttccacgctgtcagatgctcatctgggcgtatgggtgctgttccaggttgtcagatgctcgcctgggggtgtgtgtgctgttccagggtgtcagatgctcgcctgggggtgtgtgtgctgttccagggtgtcagttgctcacctgggggtgcagggtgctgttccaggctgtcagatgctcacctggggatgtgggtgctgctccaggatgtcagatgctcacctgggtgtgtgggtgctgttccacgctgtcacgtgcgcacctgggggtgcagggtgctgttccaggctgtcagatgctcacctgggggtgtgggtgctgttacatgctgtcagatgctcgcctgggggtgtgggtgctgttccaggcggtcagatcctcacctgggggtgtgcgcgctgttccaggctgtcagatgctctcctgggggtgcagggtgctgttccaggctgtcagaggctcacctgtggttgtgggtgctgctccagaccatcagatgcgcacctgggggtgtgggtgctgctccaggctgtcggatgctcgccggaaggtgtgggtgctgctccgtgggttcagatgctcgcctgtgggtgtgggtactgttacaggctgtcagatgctcacctgtgggtgtggggtgctgctccacgatgtcggatgttcacctaggggtgtgggtcctgctccaggctgtcggatgctcacctgggggtgtgggtgctgttccaggctggcggatgctcgcctggcgatgtgggtgctgctccaggctgtcctatgctcgtctgggagtgtgggtgctgttccaggctgtcagatgctcacctgggggtgtgggtgctgatccaggctgtccgatgctcacctgggggtgtggggtgctgctccaggctgtcag

SEQ ID NO: 449 - DNA, 942 bp, Artificial sequence
  DNA replication origin
ttggggtgtggggtgctgttccaggctgtcagatgctcacctgcgggtgtgcggtgctgttccaggctgtcagatgctcgcctggagttgtggctgctgctccatgcggtcagatgctcgcctggggttgtgggtgctgctccatgacttcagatgctcgccttggggtatgggtgctgctccgggcggtcagatgctcacctgggggtgtgggtgctgctccaggttgtcagatgctcaccttgggctgtgggtgctgctccacactatcagatgctaacctgggggtgtgggcactgctccaggctgtcagatgctcacttgggtgtgtgggcgctgctccggactctccgatgctcacctgtggttgtgggtgcttctccagaccatcagatgctcacctggtggtgtgggtgcctttccaggctgtcagatgctcacctgggggtgcagggtgatgttccaggctgtcagatgctcacctgagggtgcaggatactactccaggctgtcagatgctcacctgggggtgtgggtgctgctccaggatgtcagatgctcgcctgggagtgtgggtactgttgcaggctgtgagatgctcacctgtgggtgtggggtgctgctccacgatgtcggatgttcacctcggggtgtgggtcctgctccaggctgtcggatgcaagcctggggttgttggtgctgctccaggctgtcgaatgctcacctgggggtgtgggtgctgttccaggctggcggatgctcgcctggcggtgtgggtgctgttccaggctgtccgatgctcgtctgggagtgtgggtgctgttccaggctgtcagatgctcatctgggggtgtgggtgctgctccaggctgcccgatgctcacctgggggtgtggggtgctgctccaggctgtcagatgctcgcctgggagtgtgggtgct

SEQ ID NO: 450 - DNA, 1096 bp, Artificial sequence
  DNA replication origin
ctgtcagatgctcgcccgggggtgtgggcactgctccaggctgtcacctgctcacttgggggtgtgggcgctgctccaggctgtcagatgctcgcctggggttgtgtgtgctgctccaggctgtcagatgctcgcctgggggtgtgcgtgctgctccaggctgtcagatgctcgcctgggtgtgtggatgctgttccagactgtcagatgctcacctggggttgcagggtgctgttttatgcgtcagattctcacctggaagagtggggttctgttccaggctgtcagatcctcacctgtggttggagaattctgttccaggctgtcggatgctcacctggaggtgaggatgccattccatgcggtcagatgctcacctgggggtgtggatgctgttccaggctgtcagatgctcacctgggggtgcagggtgctgttttatggtgtcagattctcacctggaagagtggggttctgttccaggttgtcagatcctcacctggggttggagaattatgttccaggctgtcggatgctcacctggaggtgaggatgccattccatgcggtcagatgctcacctgggggtgtgggtgctgctccaggctgtcggatgctcacctggaagtgaggatgacattccatgcggtcagatgctcccctgggggtgtgggtgctgctccaggctgtcagatgctcacctgggggtgtgggtgctgctccaggctgtcagatgctcgcctgggggtgtgggtgcggttccaggctgtcagatgctcacctggaggtgaggatgccattcaatgtggtcagatgctcacctgggggagtggatgctgttccaggctgtcagatgctcacctgggggtgtgggtgctactccaggctgtcagatactcacctgggagtgtgggtgctgctccaggctgtcagatgctcacctgggggtgtgggcgctgctccaggctgtaagatgctcacctgggggtgtgggcgctgctccaggctgtcagatgctcacctgggggtgtgggtgttgctccaggctgtcagattctcgccagcgggtgtgggtgctgttccaggctgtcatatgc

SEQ ID NO: 451 - DNA, 1398 bp, Artificial sequence
  DNA replication origin
tgccccaggctgtcagatctcacctgggggtatgggtgcagctccaggatgtcagctactcaactgggggtgtgggtgctgctccaggctgtcagatgctaacctgggattgtgggcgcctgctccaggctgtcagatgcccacctgggggtgtgggcgctgctccacgctgtcagatgctcacctgggggtgtgggcgctgctccaggctgtcagatgctcacctcggtgtgtgggcgctgctccaggctgtcagatgctcacctgggggtgtgggtgctgctccaggcagtcagatgctcacctgggggtgtgggtgctgctccaggctgccagatgctcacctgggggtgtggacgctgctccgggctgtcagatgctcacctggggctgtgggcgccgccccaggctgtcagatgctcacctgggggtgtgggtgctgctccaggctgtcagatgctcgcccgggggtgtgggcgctgctccaggctgtcacatgctcacctgggggtgtgggcgctgctccaggctgtcagatgctcgcctgggggtgtgcatgctgctccaggctgtcagatgctcgcctgggggtatgggtgctgttccaggctgtcgaatgctcacctgggggtgtggggttctgctccaggctgtcagatgctcatctaggggtgtggggtgctgttccaggctgtcagatgctcacctgggggcgtggggtgctgttccaggatgtcagatgctcacctgggggtgtggagtgctgttccagactgtcagatgctcccctgggggtgtggggtgctgctccaggctgtcagatgctcacctgtgggtgtggagttctgttccaagctgtcagatgctcacctgggggtgtggggtgctgttccacgatgtccgatgctcgcctgggggtgtgggtgctgctccaggctgtcggatgctcacctgggggtgtgggtgctgctgcaggctgtgagatgctcacctgggggtgtgggtgctgttccaggctgtcatatgctcatctgccagtaggggtgctgttttatgctgccagatgcccacctcggggtgaaggtgctgttctaggttgtcagacgctcccctgggggtgagagtgctgttccgtgctttcagatgcttacttggaggcctggggttctgttccaggctatcagatgttcacctggaagcagtgggggtgtttccaggctgtcagatgctcacgtgtgggtggagggtgctttcccaagttgtcaaatgctcacctgggagcagtggtcttgttccatgctgtcagatttttgcctggggtgtggggtgctgtttcaggctgtcatattctcacctgaaggtggagggtgctgtttcaggctgtcagatgctcacctg

SEQ ID NO: 452 - DNA, 934 bp, Artificial sequence
  DNA replication origin
cgcagtcacatcacctgtgagtgggggtgctgttccatgccatcggatgcccaccttggggtgtgtggtgcaggttctggttgtcagatgctcatctggtggtggagggtgctgtttcaggctgtcagatgcacacctgggggtgtgggtgctgctccaggctgtcagatgctcacctgggagtgtgggtgctgccccaggctgtcagatgctcaactgggggtgcagggtgctgctttattctgtcatattctcacctggaagagcggggttctgttccaggtagtcagatcctcacctggggttggagaattctgttccacgctgtcggatgctcacctggatgtgaggatgtcattccatacagtcagatgctcgcctgggggtgtggatgctgttccagactgtcagatgctcacctggggttgcagggtgctgttttatgcgtcagattctcacctggaagagtggggttctgttccaggctgtcagatcctcacctgtggttggagaattctgttccaggctgtcggatgctcacctggaggtgaggatgccattccatgcggtcagatgctcacctgggggtgtgggtgctgctccaggctgtcggatgctcacctggaagtgaggatgacattccatgcggtcagatgctcccctgggggtgtgggtgctgctccaggctgtcagatgctcacctgggggtgtgggtgctgctccaggctgtcagatgctcgcctgggggtgtgggtgcggttccaggctgtcagatgctcacctggaggtgaggatgccattcaatgtggtcagatgctcacctgggggagtggatgctgttccaggctgtcagatgctcacctgggggtgtgggtgctactccaggctgtcagatactcacctgggagtgtgggtgctgctccaggctgtcaga

SEQ ID NO: 453 - DNA, 1098 bp, Artificial sequence
  DNA replication origin
gctcacctgggggcgtggggtgctgttccaggatgtcagatgctcacctgggggtgtgggtgctgctccagactgtcagatgctcccctgggggtgtagggtgctgctccaggctgtcagatgctcacctgggggtgtgggtgctgttccaggctgtcagatgctcacctgggggtgtggggtgctgttccaggctgtcagatgctcacctgggtgcgtgggtgctgttccacgctgtcatatgctcatctgccagtaggggtgctgttttatgctgccagatgcccacctcggggtgagggtgctgttctaggttgtcagatgctcccctgggggtgagagtgctgttccgtgctttcagatccttacttggagaactggggttctgttccaggctatcagatgttcacctggaagcagtgggggggtttccaggctgtcagatgctcacctgtgcatggagggtactttcccgggctgtcaaatgctcacctgggggcagtggtcttgttccatgctgtcagatttttgcctggggtgtggggtgctgtttcaggctgtcatattctcacctgaaggtggagggtgctgttccaggctgtcagatgctcacctgaagggggttgtttttccaggctgccagatgctcacctgggggcagtggtcttgttccatgctgttggaatcttacctggggatgtgagctgctgttccaggctgtcggatgctcacctgcatgtggggtaccattccaggctttcagctgctcacctggctgtgtggagtgcctatccaggctatcagatgctcacctgcagttgtggggtgctgttccaggctgtcagacactcacctgagggcggggagcttttccccacttatcaaattcttatttgaagttgtggggttctgttccaggctgtcagatgctcacctgggggtggagggtgttgttccgggctgtcatatgctcaccttgtggtgggcatggttttccacgcgtccccaggtgagcatctgataacccggaacaccacccttcacccccatgcgaacatccaaaaacctacaatggcaccttccatccccaggtgagga

SEQ ID NO: 454 - DNA, 1145 bp, Artificial sequence
  DNA replication origin
atattctcacctgaaggtggagggtgctgtttcaggctgtcagatgctcacctgggggtgcagggtgctgttttatgctgtcagattctcacctggaagagtggggttctgttccaggttgtcagatcctcacctggggcttgagaattctgttccaggctgtccgatgctcacctggaggtgaggatgacattccatgtggtcacatgctcacctgggggtgtgggtgctgcttcaggctgtcagatggtcacctggggctgtagatgctgttccaggttgccagatgctcacctgggggtgtgggtgctgccccaggctgtcagatctcacctgggggtatgggtgcagctccaggatgtcagctactcaactgggggtgtgggtgctgctccaggctgtcagatgctaacctgggattgtgggcgcctgctccaggctgtcagatgcccacctgggggtgtgggcgctgctccacgctgtcagatgctcacctgggggtgtgggcgctgctccaggctgtcagatgctcacctgggggtgtgggtgctgctccagactgtcagatgctcccctgggggtgtagggtgctgctccaggctgtcagatgctcacctgggggtgtgggtgctgttccaggctgtcagatgctccccctggaggtgtggggtgctgttccaggatgtcagatgctcccctggaggtgtggggtgctgctccaggttgtcagatgctcactgggggtgtggggtgctgttccaggatgtcagatgctcccctggaggtgtggggtgctgctccaggctgtcagatgctcacctgggggtgtgggtgctgttccaggctgtcagatgctcacctgggggtgtggggtgctgttccaggctgtcaggtgctcacctgggggcgtggggtgctgttccaggatgtcagatgctcacctgggggtgtgggtgctgctccagactgtcagatgctcccctgggggtgtagggtgctgctccaggctgtcagatgctcacctgggggtgtgggtgctgttccaggctgtcagatgctcacctgggggtgtggggtgctgttccaggctgtcagatgctcacctgggtgcgtgggtgctgttccacgctgtcatatgctcatct

SEQ ID NO: 455 - DNA, 1045 bp, Artificial sequence
  DNA replication origin
caggctgccagatgctcacctgggggtgtggacgctgctccgggctgtcagatgctcacctggggctgtgggcactgccccaggctgtcagatgctcacctgggggtgtgggtgctgctccaggctgtcagatgctcgcccgggggtgtgggcactgctccaggctgtcacctgctcacttgggggtgtgggcgctgctccaggctgtcagatgctcgcctggggttgtgtgtgctgctccaggctgtcagatgctcgcctgggggtgtgcgtgctactccaggctgtcagatgctcgcctgggggtgtggatgctgttccagactgtcagatgctcacctggggttgcagggtgctgttttatgtgtcagattctcacctggaagagtggggttctgttccaggctgtcagatcctcacctgtggttggagaattctgttccaggctgtcagatgctcacctggaggtgaggatgccattccatgcggtcagatgctcacctgggggtgtggatgctgttccaggctgtcagatgctcacctgggggtgcagggtgctgttttatggtgtcagattctcacctggaagagtggggttctgttccaggttgtcagatcctcacctggggttggagaattatgttccaggctgtcggatgctcacctggaggtgaggatgccattccatgcggtcagatgctcacctgggggtgtgggtgctgctccaggctgtcggatgctcacctggaagtgaggatgacattccatgcggtcagatgctcccctgggggtgtgggtgctgctccaggctgtcagatgctcacctgggggtgtgggtgctgctccaggctgtcagatgctcgcctgggggtgtgggtgcggttccaggctgtcagatgctcacctggaggtgaggatgccattcaatgtggtcagatgctcacctgggggagtggatgctgttccaggctgtcagatgctcacctgggggtgtgggtgctactccaggctgtcagatactcacctgggagtgtgggtgctgctc

SEQ ID NO: 456 - DNA, 1533 bp, Artificial sequence
  DNA replication origin
ctccaggatgtcagctactcaactgggggtgtgggtgctgctccaggctgtcagatgctaacctgggattgtgggcgcctgctccaggctgtcagatgcccacctgggggtgtgggcgctgctccacgctgtcagatgctcacctgggggtgtgggcgctgctccaggctgtcagatgctcacctcggtgtgtgggcgctgctccaggctgtcagatgctcacctgggggtgtgggtgctgctccaggcagtcagatgctcacctgggggtgtgggtgctgctccaggctgccagatgctcacctgggggtgtggacgctgctccgggctgtcagatgctcacctggggctgtgggcgccgccccaggctgtcagatgctcacctgggggtgtgggtgctgctccaggctgtcagatgctcgcccgggggtgtgggcgctgctccaggctgtcacatgctcacctgggggtgtgggcgctgctccaggctgtcagatgctcgcctggggttgtgtgtgctgctccaggctgtcagatgctcgcctgggggtgtgggtgctgctccaggctgtcagaggctcacctgggggtgtgcgtgctgctccaggctgtcagatgctcgcctgggggtgtgggtgctgctccaggctgtcagatgctcgcctgggggtgtgcatgctgctccaggctgtcagatgctcgcctgggggtatgggtgctgttccaggctgtcgaatgctcacctgggggtgtggggttctgctccaggctgtcagatgctcatctaggggtgtggggtgctgttccaggctgtcagatgctcacctgggggcgtggggtgctgttccaggatgtcagatgctcacctgggggtgtggagtgctgttccagactgtcagatgctcccctgggggtgtggggtgctgctccaggctgtcagatgctcacctgtgggtgtggagttctgttccaagctgtcagatgctcacctgggggtgtggggtgctgttccacgatgtccgatgctcgcctgggggtgtgggtgctgctccaggctgtcggatgctcacctgggggtgtgggtgctgctgcaggctgtgagatgctcacctgggggtgtgggtgctgttccaggctgtcatatgctcatctgccagtaggggtgctgttttatgctgccagatgcccacctcggggtgaaggtgctgttctaggttgtcagacgctcccctgggggtgagagtgctgttccgtgctttcagatgcttacttggaggcctggggttctgttccaggctatcagatgttcacctggaagcagtgggggtgtttccaggctgtcagatgctcacgtgtgggtggagggtgctttcccaagttgtcaaatgctcacctgggagcagtggtcttgttccatgctgtcagatttttgcctggggtgtggggtgctgtttcaggctgtcatattctcacctgaaggtggagggtgctgtttcaggctgtcagatgctcacctgggggtgcagggtgctg

SEQ ID NO: 457 - DNA, 792 bp, Artificial sequence
  DNA replication origin
gggggtgcagggtgctgctttattctgtcatattctcacctggaagagcggggttctgttccaggtagtcagatcctcacctggggttggagaattctgttccaggctgtcggatgctcacctggatgtgaggatgtcattccatacagtcagatgctcgcctgggggtgtggatgctgttccagactgtcagatgctcacctggggttgcagggtgctgttttatgcgtcagattctcacctggaagagtggggttctgttccaggctgtcagatcctcacctgtggttggagaattctgttccaggctgtcggatgctcacctggaggtgaggatgccattccatgcggtcagatgctcacctgggggtgtggatgctgttccaggctgtcagatgctcacctgggggtgcagggtgctgttttatggtgtcagattctcacctggaagagtggggttctgttccaggttgtcagatcctcacctggggttggagaattatgttccaggctgtcggatgctcacctggaggtgaggatgccattccatgcggtcagatgctcacctgggggtgtgggtgctgctccaggctgtcggatgctcacctggaagtgaggatgacattccatgcggtcagatgctcccctgggggtgtgggtgctgctccaggctgtcagatgctcacctgggggtgtgggtgctgctccaggctgtcagatgctcgcctgggggtgtgggtgccgttccaggctgtcagatgctcacctggaggtgaggatgccattcaatgt

SEQ ID NO: 458 - DNA, 1548 bp, Artificial sequence
  DNA replication origin
ctcgccccgtcatgcctgtgaatttgtgcatccaggatatgggctgatgctgcgcccccccccccatgccctctgcctcttcaccctgagaggaggcatggcacaggctcaaggctgtgagctctgactcagcgctggggctcagcagcaggcccctcctcctggccaacaaccctgtcctgtctctcagccttggtttcaccacaggtaacatgcaggggtgcttcttccaggcggtcatatgctcacctggtggaaaaggacagcacatattccaggaattcagacactaaccggggggcaggacttgtccatgctgtcagatgctcccctggaggtgtggagtgctgttccaggctgtcagatgctcccctggaggtgtggggtgttgctccaggctgtcagatgctccccctggaggtgtggggtgctgttccaggatgtcagatgctcccctggaggtgtggggtgctgctccaggttgtcagatgctcactgggggtgtggggtgctgttccaggatgtcagatgctcccctggaggtgtggggtgctgctccaggctgtcagatgctcacctgggggtgtgggtgctgttccaggctgtcagatgctcacctgggggtgtggggtgctgttccaggctgtcaggtgctcacctgggggcgtggggtgctgttccaggatgtcagatgctcacctgggggtgtgggtgctgctccagactgtcagatgctcccctgggggtgtagggtgctgctccaggctgtcagatgctcacctgggggtgtgggtgctgttccaggctgtcagatgctcacctgggggtgtggggtgctgttccaggctgtcagatgctcacctgggtgcgtgggtgctgttccacgctgtcatatgctcatctgccagtaggggtgctgttttatgctgccagatgcccacctcggggtgagggtgctgttctaggttgtcagatgctcccctgggggtgagagtgctgttccgtgctttcagatccttacttggagaactggggttctgttccaggctatcagatgttcacctggaagcagtgggggggtttccaggctgtcagatgctcacctgtgcatggagggtactttcccgggctgtcaaatgctcacctgggggcagtggtcttgttccatgctgtcagatttttgcctggggtgtggggtgctgtttcaggctgtcatattctcacctgaaggtggagggtgctgttccaggctgtcagatgctcacctgaagggggttgtttttccaggctgccagatgctcacctgggggcagtggtcttgttccatgctgttggaatcttacctggggatgtgagctgctgttccaggctgtcggatgctcacctgaagggggttgttttaccaggctgccagatgctcacctgggggcagtggtcttgttccatgctgttggaatcttacctggggatgtgagctgctgttccaggctgtcggatgctcacctgcatgtgggttaccattccaggctttcagctgctcacctggct

SEQ ID NO: 459 - DNA, 1338 bp, Artificial sequence
  DNA replication origin
gggcgcccgggccatgtgcgagcgcctgctgcggcccgcacgccctgaggaccctgcgggggaccgtgcaggggaccgcgcacctctcctggctctgcgcggcttctgcgcgctgcacgccggggactcgcggcgcgccatggaggacttccagacggtagtggagcagggggcgccgcacccggggggctgtgtgcgcgcgctgtgcggccggggactgctgcgggtgctggcgggcagcgcgttcctgggcacgctggactatgtcaccgcctgcaggctgcggcccgaggaggcgctgctggccgccaaggcctacgtgccctggaaccagcgggggctgctgctggtggtgctgcgggaggaggcccgtgggatgctgcagcgatctccacgcgccgggccgtccagagcgcagggccggagggaggccgcagagacgggcggccccaccacgcaggaggggtgaggacccgcccgggcacgctggggccgctgcttcctgcgggtctccttcgaggtagcgacggatgtgtttcctcctattttacaaaggaatgaacggaggcagtggctggtgacttcccaaagcacccgaggcaggtctagctccgctgcttccatcgaccgggccgcagtccggaaatggaaatccgcggctcacatttccttccaggcctttcgtttggtgcatgtaaaatagctcaccaaaccgagtctgtgctggacatgctgttcatatgctaattttcttactcaataggtcatgacgattccctttgtggctaaatgtgtttccggcagcaccgccccgacctgcgcccctgccactactccttccagcagtcctggggttggtttgttttgttttgttttgttttttgttctttgagatggagtcttactctgccgcccaggctggagtgcaatggcgcaatcttggcttgctgcaacctccgcctcctgggttcaggccattcttctgcctcagcgtcccaagtagctgggatcaccacgcccagctaatctttatatttttagtggcatggggtttcaccatggtggccaggctggtctcgaactcctgacctcaagtgatcctcccacccgggcctcccaaagtgctgggattccaggtgagccaccgcgcctggcctttgttcttagctgtaatccctcgtgggtaatgtcctgtctccaggatgttctctccatgagacggagacaggcatgcagttcccgggtcaggaagcgccgccacttgtaggatccttgacttcaggagctgccctcctcccaccacaatctggccaccgcccatcccccactcacccttga

SEQ ID NO: 460 - DNA, 1481 bp, Artificial sequence
  DNA replication origin
tgggtgatggagcaagaccctgtctttaaaaaaaaaaaaaaaaaaaaaaaaaaagcatatggcaagtctagagttgaacagtgcaataattgaaatgaaaatattagcgacagtagaagggtcggtgaacttgaagacagaatagaaattactcgatacgaagaacagaagaaaaatgaacagaggctgggtgacctggggacaatatcaaagtctcgtgtgtgtaactggaatctcggaaagagaggagagatcaccctttcacgtgggaacataaataacagcgccccatcaccctcaggtcccaagggttctcccctggctgcagctccctcggatccatgagccactgcaaaaatcaggggtaatgttgtgttcaagggtcagtagctggcaggaaaggctcaaagtgtcttttactttggccaccagaactagacagagtgaccttgtggctgcttgcatggctagtctcagggcacgagacaccttctgtgctggactcggcgcttaccgcaacagcagcagggcagtgaccgcagcggctttgcttctgtgccctgcgtggtattttgccctctccagaatcctgtttgaatgcagcagattgttgctgttgttgctattgaatggggttataaggaaaagctgtttgaaaattctgaaggagtcagtgcaaaaagcactgaagcagaggttcagaggtctgggatggaccctcagaacgtccctcccctgcagcaccttcgtaacctgtgaaaataagggccatgacctgaagcccgcccagcacggagtatccccgcctctcccagtggcctgtgcaccctgcctggggccctttttgggatggggcagctacacttcccttaccagtcagaaagccccattcacgtttgctcagacacactggggtggggggcaggtgcgcggggagggtgctgggggagtgggggtggggatgctgcccctgacctcactgactcacacgatgcaccaggccccttccaggcactggatgtaggtagatccgtttaatcctcaccccctgcgagcgtggatcattataacccattatagtgcagaccagggaacagacgcaggagactccgtaaatgcccaggtccaccctcagtaagcagcagggcatgcccctccagtcctagacctgagagaagagctctgctacagagagggaagggctgggtccccacttggcccaaagaaggcaagaaacaaaggcgcccaggaataaatggccactgcaaaggtcatagagttggagcttcagctctgccctgggagtggaggggcactgattcccagaggaggaaactcaatcctaaaacccattatttaaatgtcaggcaagggaaaggcgttgtaactgaatttggtttgcactgagcggtgggagtgactctgaacccaccctgagagcacagtgtcgctggcaggccgggcggctgccccctcgccgc

SEQ ID NO: 461 - DNA, 3186 bp, Artificial sequence
  DNA replication origin
gcccggaccaccccgccgccatcctgcacctgctggcaggtctgctggcccgcgggcgtcacgaagaagtggtgcaacgctgcagcgccctgctggactctcatgcacagcaagtcctggagctgcggctgacccgcgccctcgcctgggtcctgtccggggtgcaggcagcggatggtgtggccgcctatctccaggccttcgcctccagcgccgaccggacggtagctttcattcgcacccaccagcggccccacctccccgcgctgctcagtgccctccaggactacctctcggggcacccggaggctgggcacagtgccggccagcaggagaccggtggccagcgactcctggcggctctggaccccaggggcacccggagtgacaccctgtcacctgaagctctgctccacagcggcaggtttgaggactgcctggcagcatgcagccgggccctcgaggcccatcccaccggcagcgaaccccaaggtaggaggacggcatggcccctgcagagccagggtgaaagctgcccccgccactccctccccacatggttatgtcctgccatgatggggtgaggctgtgctggggctggggtgcctcagtgacaagaaagtcaggccctgcccctttggagcacccaaagacacaaacaaaatgcatgctttaagaaatgggatgggcaaggtactgctccagccggtgatcagggaaagcttctcaggagaggaatcatttaggctgagagtgagggttccaggcagcagaagcaaatgtgccaagtccttaggggagcaagagcttgggctccccctgccactgagggggccagggcgactgtcggagggaaggggaaaacgaatgggagactgaagatggcagctgtggggctagatcctcctggcctcccaaggcccttggatgttaccctcagtctgtgaggctgagctgtggagtgaggtactctgagctgcatttttttttttgagatggagtttcattcttgttgcccaggctggagtgcaatggggcgatctcggctcaccgcaacctccacccactgggttcaagagattctcttgcttcagcctcccgagtaactgggattacaggcacccaccatcatgcctggctaatttttgtatttttagtagagatggagtttcatcatgttggccaggctggtctcaaattcctaacctcaagtgatccacctgcctcagcctcccaaagtgctgggattacaggagtgaaccaccgcgcccggcgcctgatctgcatttttaaactttcctctggctgccatgtgcaaaatgtgccagaggaaccagagtaaggacaagacctgctgggaggctgggaggctggggggccgggaggctaggaggctgggaggctgggaggccgggaggccgggaggctgagaggctggaagtctgggaggctagggggctgggaggcttggaggctgagaggctgggaggctgggaggctagggggctgggaggcttggaggctgagaggctgggaggctgggaggcttggaggctgagaggctgggaggctggcaggcttggaggctgagaggctgggaggctggggggctgcgaggcttggaggctgagaggctgggaggctggggggctgggaggcttggaggctgagaggctgggaggcttggaggctgagaggctgggaggctggtgggctgggaggcttgaaggctgagaggctgggaggctggggggctgggaggcttggaggctgagaggctgggaggctgggaggctggggggctgaggggctgagaggctgagaggctgggacgctggggggctggggagctgaggggctgagaggctgggaggctgggagcctgggaggctgggtggctggggagctgaggggctaagaggctgagaggctgggaggctggggggctggggagctgaggggctgggaggctgggaggctggggagctgaggggctaagaggctgagaggttgggaggtttggaggctgagaggctggggagctaaggggctaagaggctgagaggctgggaggctggggggctggggagctgaggggatgagaggctgagaggctgggaggctaggaggctggggagctgaggggctgagaggctgggaggctgggaggctggggggctggggagctaaggggctaagaggctgagaggctgggaggctggggggctggggagctgaggggctgagaggctaggaggctgggaggctggggggccggggagctgaggggctgagaggctgggaggctgggaggctggggggctggggagctgaggggctgagaggctgggaggctgggggtactggggagctgaggggctaagaggctgagaggctgggaggctggggggctggggagctgaggggctcagaggcttggaggctggggagctgaggggctaagaggctgagaggctgggaggctgggaggctgagagactgggaggcttggatgctgggcagctgagagactgggaggctgggacaatggttcaggagagagttgatggaattcagatcagggagaaagggttgcagagaaaccacatgtctgagagttagaagtgacgagattgtgggtagatttaatggtggagagacaggcacagagaaggagggtcaggaacgttttctgagttcatgatgagcaactgaactgtggagggaagcgcggatgggaaaaggggtgtcagaggtttagacgcccccagtttgagacactgctcctgcccggtcccttcactgcctcttccttctggaggagcacccagggccacagcccagcctactgccagcactctgccaccctcggatccctgagtgcctgagacgaggctgcgtctccaccccaaaggctgctgtgtggattcagtaaacatgcacagcaaacccttagaataatgtcacctactgagtgctttacacacagtcctttgagcccatcaagcctcatgtcattaggcagccagacaggtgagccctgaggtgagaggagctcagtttgaaaaaggggggtttagggtcagtgcaaatgagaggttgaaagtcaaggctcccgacagaggcaggaagtggggccacgaggcatcctggagcagacaggacctccctggcgtgagtgtcctg

SEQ ID NO: 462 - DNA, 1394 bp, Artificial sequence
  DNA replication origin
acagcctgtggggaggtgccccaggaccgggtgacagggccctgccagaagaggagtgaggctgggcggtgaggggcccgcatagcagcccaggcggagttctgggggacaaacccagagcctgagtgcactgggtgggcaggcggcccccacctgcctccaggaagcgccctcctcatctatgtggagaggaggctgggggcaccctggcagagcaggcagggtggaggctggccccggctatggggggctgtaccccacaggccccttctcccccaacacccccatgaactcagggttctctgctctgaggcagcccattggagcctggctggggcagtgtgggtgggacctcggcctggtagcctctggccacagcggggcgctgcaggacagccaggagacccaagggtgttgacactctcccgggaaaccgcaggctgtgccttccccaacccacacggggcggtcataggagccccacccaggcctgggccctccagccagccacatccctctgtcccccaccacccacgagggaatctgggtccccagggcacagccggctcagcctccaagctgcagacgagtgtgagtgtgtctgtgtgtgtctgagagcggatgctgggggctgcctgtttgatgagggaagaaagggctgtgcggagctagttcgtcaggtcaagtagcttggggacagggaataggggagtaccaggggctgtccctggaacctcaacctcaaaactgaacccccccacccatgggctggggtggctcccccgacccaagggcctggcaggtgctctcggcgcccccctcgaatggcccaggtgtgagagggtgggcaggggtgtggtcctgcgtcccactgagagggctgcctggactgacggggggtgtgccttcctgaggggctcagggttgggaggggcagagggtgggtccggggttcctattgctgggccctgacacctcgggccaccgtaaccctcccgacatggacactcaggggtcagatgttcttagagggaactgagctgggggaggccactgtcccattctgcaaggcacgaaactgaggccccagaggtgaacagtgggctggaagttggcctgggacacctggtaggccccaccccaccagcccaggatccccccagttttcacccagtggggtctgcactgaccgtggggtcaatgggaaggggtggaggtggcttgaggctgggcacgggtggccacagggcaggagaactggccgccctctgtggactcaccatgctcccccacccccaggtactctgaggaccagacatgggcccgtcggggtcccagacatgatgtcagcccaggagctcgtggcctgcctctgccgggagggggagcagcat

SEQ ID NO: 463 - DNA, 1095 bp, Artificial sequence
  DNA replication origin
ggcctgagcggtaattcgggctgagcggtaattcggcctgagcggtaattcgggctgagcggcaattcgggctgagcagttgcagatggttttctcgcttcactcactcactctcgtcctcctgggagggagatcttgatgcctccactttcaaacatggagaatcggtcacggggcagcaaagggacggggaagtagtggagtcagtcgtggacgcagatgcgctgactccagagccccataggcacacgcttgggcgctgcacccagggaagagatgtggttgggcggggcaggggagctgagtcccaaggtcaggacatggcaaggtcagactcaggaggagggaaagagctgctccttctggaacagaaaggaagaggccgcatctatcctggggttcacagggcatccccagaaaagacagctgtgtggcagagccagacaagggtgcccaccaggtgtgctggtgtgtatgacggcaggtgtaggggtgtgcatgcaggtgtgtgtgtgcagacgtatgtgtgtgtgcatgtgtgtgccagcaggtgtggctgttcatgtgtgttcatataggtgtgtgtgtgtgtgcaggtgcgtgggggtgtgcatgtgtgtgcatacaggtgtgtgtgcaggtgtgtgtgtacatgtgcgtgcagtgtggctgttcatgtgtgtgcaggtgtgtggtgtgtgcattcatgtgtgtgcacacaggtgtgtgggtgtgcaggcgtgtgtgcagttgtgtgggggtgtgcatgtgggtgcatacaggtgtgtgtgcaggtgtgttgggtgttcatgtgcatgcaggtgggtttgtgcaggtaagtgtgtgcacctgtgtggggtgtgcaaatgtgtgcatacaagtgtgtgtagcttccaggtgtgtgcatacagggtgtgcagatgtgtgtgggtgtgcatgtgtccatgcaggtgtgtgtgcgccagtgtgatgtgtgcatgtaggtgtgtgtgttcaggtgtgtgtagggagaggggctgcaatgattggatcactgaacataggcactggtcacatgaccctgcacaaattcttggacttctctgtgcctccgtc

SEQ ID NO: 464 - DNA, 773 bp, Artificial sequence
  DNA replication origin
taccgctcaggccgaattaccgctcagcccgaattaccgctcaggccgaattaccgctcagcccgaattaccgctcaggccgaattgccgctcagccccaattactgctcagccccaattactgctcagccctcatgatccttgacctgcactggctccaggacctgccttcacttcaggggcctcggtttctccccatggcagtgaccccaagtcagcggagaggcccaaagagtcactcacagaggctgccctaggagtcctaggtgtgcagtgtgggcctggcccagcgccctccatgctcctaccactgtgcatgtgggtcccaggccagggggccaggggtccaggggtcgggggtccagggtcagggtcttggggtaccacgggctgaggggctggaggccaggggttcaggggaccagggggccagggggccagggggccagggtcagtgtcttgggggataagagactgaggggctggaggccagagagccagcagatggggggtccagggcattggggatctggaggcagggggccaaagtgctggaccaggaggactgtgcggtagtggccccgcattcttagcagccaggtctctggtgaggggtggaggtgagcacagccttgggtctgagtcctgcccgtgttctggccagcgtccagctgcatggatgttccaggagtgatggttcaggggacagaaatggcccagctgttgccgtcaggacagataaatagttgaccctgatgtttttcccaccaaga

SEQ ID NO: 465 - DNA, 1080 bp, Artificial sequence
  DNA replication origin
gtgaccagggatggggagaggacctgggaggggcagctctgggttcttggcttctctgaggacaaggtccccgtcacaggcataggctgctgagagctgattatgtgagctgccagtgtggaggccagcacccagagggttaggtcccctcactttgggtagggacagaagccaagggtttcacgttgtttaattaaaaattttagataactttcttgaggcatgctttacatatcatcaaatgcacccatcgggatgcattttagtagaatggctgttatttaaaaaaagcaaaccaggaaaacatgagtgtggatgaggatgtggagaaactggagccctgtgccctgggtgggagtgaggagttgagccccgtgccttgggtgggagtgtggaattgaaccctgtgcctgggcgggagtgtggaattgagctctgtgccctgggtgggagtgtggaactgagccctgtgccctgggtgggagtgtgaaatggaaccctgtgtcctgggcgggagtgtggaattgagccctgtgtcctgggtgggagtgtggaatggaaccctgtgtcctgggcgggagtgtggaattgagccgtgtcctgggcgggagtgtggaattgagccctgtgtcctgggtgggagtgtggaattgaaccctgtgccctgggtgggagtgtggaatggaaccctgtgccctgggcgggagtgtggaatggaaccctgtgccctgggcgggagtgtggaattgagccccgtgccctgggcgggagtgtggaatggaaccctgtgcctgggcgggagtgtggaatggaaccctgtgccctgggtgggagtgtggaatggaaccctgtgccctgggtgggagtgtggaatggagccctgtgtcctgggtgggagtgtggaatggaaccctgtgcctgggtgggagtgtggaatggagccctgtgtcctgggtgggagtgtggaattgaaccctgtgcctgggcgggagtgtggaatggaaccctgtgtcctgggcgggagtgtggaattgagccctgtgccccgggtgcgagtgtggaattgaaccctgtgcctgg

SEQ ID NO: 466 - DNA, 910 bp, Artificial sequence
  DNA replication origin
gggagtgtggaatggaaccctgtgccctgggtgggagtgtggaatggaaccctgtgccctgggtgggagtgtggaatggagccctgtgtcctgggtgggagtgtggaatggaaccctgtgcctgggtgggagtgtggaatggagccctgtgtcctgggtgggagtgtggaattgaaccctgtgcctgggcgggagtgtggaatggaaccctgtgtcctgggcgggagtgtggaattgagccctgtgccccgggtgcgagtgtggaattgaaccctgtgcctgggtgggagtgtggaatggaaccctgtgccctgggcgggagtgtggaattgagccctatgccctgggtgcgagtgtggaattgagccctgtgccccgggtgggagtgtggaatggaaccctgtgccctgggcgggagtgtggaattgagccctgtgccctgggtgggagtgtggaatggaaccctgtgccctgggtggaagtgtggaattgagcggctgctggggaaacaacgtggcatttcccagagaattaaacagaatctccacatgacccagccattccactcccaggaacatccccaaagaactgaagcagagacttcacagacccacaccccagtgcacacatagcagcataatccccagtagccgaaaggtgagagcaaaccaaatgtccgtcaaaaggtgagggcaaaccgaatgtccgtcagcagacaaatggatcgatagcgcctggtgcagtcacccccttatctgtggcttcgcgccacagtttcagtcacgcccgctcaattgaggcccaaaaatatcaaatggaaactttcagaaataaacaactcacgagctttaaattatgcaccattctgtgcagtgtgatgaaatctcccgccatccctctgtcccgccct

SEQ ID NO: 467 - DNA, 808 bp, Artificial sequence
  DNA replication origin
gccgtgccttctgtcctaggaacaactcgacagaggcagagaccacgcacacagagatggttttggctattaatcctgacagagaagaagcaggaatggctgtgtgcccacctgagggaaacgcttgctgagcctgctgtgtccagggctcgggcatcaagcaggactccaggggccacccagaggccatgctgctgcgcggactgggtgttggctcagcgtttgacaaacacctctgagagtgggctctgtgctggtgccagtcctggtccgagggtgcggccaccaaggaaagcccctgccccagctgcgtgggagctgcccggccaggctaaccacaaactcgcaaaagacaagtggacaaatacctttgagaggaggttggagaaagcaaaactgaaatacaggggcccagatgaagggtgttccgtgggcagttaggaagggcttcctggaggaggtgaattggtgctgaggttggaatgctgaggctgagcctccacaggaggtctgggcaggagtcctgggcagagaggagcctgtacaaaggctctggggtggagctaatcctgagcatgggtggctggagtgaccagagctccgaggcttgtgggaggtgaggccacgaggacctggtgctcacagagccgggggaacatggaccagcccagctctcccagtgccctccaagcccggcagggaggaagcgcatcagtgatgtcatcatcatcctgttcaggatgctggggttacgggcaattgtaaattagatttctacaccatccaaagtgcctccaggacgttttct

SEQ ID NO: 468 - DNA, 1013 bp, Artificial sequence
  DNA replication origin
tgtcaaaatctctatgaataaattaacctttttaaagattagtgctctctaatacctcagggttttttaaacacagcaaatgctacaaatattttgccgagcatggctggcgtgcagggctgccgtcggcaaaggccccacccagcgtccctccatgggccggccctgccagctggacctccacccaggctgccctgacactccaggagcaggttccggcccccatgggggagcagcatcgccctgtggggcggaaagttgagggcgtccaccccacaggaggcaggagggcgtggctgtgcccacgggcagagagtccgttgctgctggcctcttcctctgagtctttgtgcacaagatgggccgggcagtcacagtccctggagctgtccacgaagccacctgactcctggggtcagatgggggctggcacttctgtcacccacctcggtggccttcctcttgtcagccaggggtggaggcagtgtgaaggcggggcggggggttttacagtcaggggctgcggcttctctccagtggttgaggaaggggggcgacccaggcaggggtttgaggtgcaggaaggcaggaagttgagaaacactggcttttgggggccgtcgaggtgggggactctgtgtgtggacagagggcgtcggtgagctcagagggtgggggtctctgggcagggagagaacaggctgcaggggctgctccctggggtgcccggctgcaggtggaggagtggggctcttgtcctgagcccaagggagccactgaaggctgtgaaggaagaggtgatgtcacagagctgggacaaggcccccagagagcaggatggagtggggtgtgtgtgggctattccaacaggcccggtgaggccatgaggccagagtgggagcactgaggggaagggaaggggcccagacccccgagccctcttctcaggacaaagtcaccctctgacccactccaaggtggtcagctccccgagggctgggcttggccacggc

SEQ ID NO: 469 - DNA, 970 bp, Artificial sequence
  DNA replication origin
aatcccagcaacactggcatggggctgcacggatttacttcctggagaatcaaacccggagtggcaccatctgctctgaggatggggctgagctgggctgcccggggctgagatgctgctgtgcccgggggggcttccagggacttcactctgccgtctgcaccccctgtaggacttgggggtgggataacccgttgtggcctaggggcaggcagcccctgcttcacagccaggaccccctccctgcaggcgtttcctgccacctgggcagatgaggagtggaggctcagggagggggcggtggggcggtgcggcccggcaggtgctctggggcccaggccccaacctgagtggaaggacctgctgcggcagcacggggttggctctgaatacctgctgggtgagtgaggggtggcagcacccaccaagtgggggctatggtgaggcccccagggcagcaggaacagaaggctgggtgtctaggggcgggggctccacctgtagctgcggcctccacaggtccagggagaacagggtggtttttgctggtgggtgaggcagggaagggcagctgggcagagggaacggcctctgcaaaggtgtgagggtgagagtggccttgcgccttgctgtggctctgaggctgaggcagggagtgctggagagtggggctcacagagggtgagggctctggtccatgagcttggatcttgcccctcgagctggacgttcaccccagggcacctgttagtgaccacgcccctgccctgctgacgagacactacagtgggaacccagtgggggccgggatgggtacctgggacatggcaggtgccagacaagtgtttgccaagtgcacaaatgactgtgggggaggctgctgcctcaggggctgtgagaccttctctctatcccacttgggctcccgaaacatggtctcctgagtgtgtggtgctgggcagggtgcaca

SEQ ID NO: 470 - DNA, 857 bp, Artificial sequence
  DNA replication origin
ccggaccagccagcccagtgctgggtgacagacgtggagatgctgggcatggaacggccaatggagggggagaaggtgccctccaccaccgttggccccatcccacgtgtgcacgcaccggcaggcatgtattgagcgcgctacacgctcagtctgtggtctggcaccaggtgcctgtgttctgggctgtcatgtgccccacagtgaggggagctgagggcccttctgtgtgtgaaggagtcgcagggcccagggcagagggtcccccgtcttttgggcagaccagagaaggctccggagaccaggcgacatttagggagaacctgaggagggagaaggaggatgagagtctctcaggagggacgggggtgggggtggggggcaaagaagcaggggtggggccacacagcccggctggggagtgggaagggcctggtgtgcgcgggcgtggctgcctaggcatcatgcacgggggccttcaccctccagggctgcttggccagtggtgctgggctgggcccgtgaaaagagcaggtcgggtgagcagaggtggctgctctggccccctgggaggtgagagggcgcgtgcctgtgtcagggcaggggaaggaaacctgtttagttttgctgaatcatggtttcaccacaaagccggccccctgcctggtccttgcatcctgaggcatggcatattggtgatctatgctgcgtatggcaccactacacaccacacagcagaagcagatggcagacacccactcatcacctcacaggttccctggcccggaactggctgtgttctcatctgagggctccacgagggagggacccacttccaggctcatcccagcagcggg

SEQ ID NO: 471 - DNA, 1574 bp, Artificial sequence
  DNA replication origin
gctggctgaggactctggggatcacgagtccgtggtgggctttggagccagcctgggtggggctccaggtggggacagaggaggctctgtgtctgggctctgggggccccgctggaagaggccaaggacatcagaactgacgggaggaccaggaaggggtggccgggggctgagggaggtggggaagtcgggggcccgaagccaagggtgggggccgagctgtggggagctgaggcctgtgacccatgcttggtgggggtgaccaagcagcagacagagaatggcctggagatttcagaggtaggtgcctaaccctgcagcacagttccaggcaggagcatttctgggtgaggcagttctggggtggagggaggtggggggaggtggggggaggtgggatgaggtggagggaggtggggggaggtggggggaggtggggggaggtgaagggtggtggaacgaggtggcggggaggtggagggtggtggagggaggtggaaggtggtagaggaaggtgaagggaggtcgggggaggtggagagggtagaggagggtcgggagaccctgtgtgtgaggggatgggaggcacctgggcctgggggatggggagctcatggcaggggatggaagggcaccggcccctgttctgcagacccgctccactccagggagttcctaagccccatcctctcttttttctgcctccaccctctggccagcacacgtggctctgggcacagtgacccctcacactggggagtgcttcccacagttgtaccagccagagggtgcctgtgatgtccccatttggaagtcaggacctgggcacaccgactgccctggcagagagctgtctgacacacgatgggtcagggcccgggtctggggtcctggcttcctgcctgtgggtcccacggggggccggggcagaggatggctatggtgaggctgctgcctggcatctgaaatgtatcgtcaccagtaaagacccgatgggactgcccatcctggaggacacagaccgagcagatggccccgcccaccctcactctcctgtctccctcctggagccttgaggctgaggatcgcacctgtcaccccctgctgagcctcatcctcccaggggtgtggataagtttcccgttgatgctgcaacaaagacaatcattgtggcttaaaataacacacactgatttattgtggcttagaataacacacactgatgggttgttgcggcttaaaacaatacacattgattctctcgtggtctgggggctggaagcctaaagtccaggtgttcaggtccaggctccctctgaaggctctgggagaggatcctcctgcctcttccaggccctggtagcttcaggcagttcttggctgtggccgcctcactcccaccacttcctccagcatcactgggctgtcttccctctgtgggggtctctgtgcctctgttttcttcttataaggacaccagtcacaccagtagggcccaccctactccaatacaacttcatctgaagcaattatgtctgcaatgacccagcttccaagtaaggccgcatccccag

SEQ ID NO: 472 - DNA, 1034 bp, Artificial sequence
  DNA replication origin
acatgtgcatgagtgcatgtgtgtgtgcatgtgtgtgcgcacgtgtaatgtgtgtacgtgtgcatgtgcaatgtgcatacatgtgtgcatgtgtgtatgtgtgcatgtatgtccgtgtgtgcatgtgtatgcatgtgtactgtatgtacatgtgtgcatgtgtgtgtgcattgtgcatgtgtgtgcatgtgtaatgtgtgtacgtgtgtgcatgtgtacatgtgtgcatatgtgtgtacatgtgtgcatgtgtaatgtgtgcacacgtgtgcataagtgcatgtgtgtttgcatgtgtgcatgggtgtgcatgggcaatgtgtgtacatgtttgtgtgtgtgcatgtgtacatgtgtgcatgtatgcacgtgtgtaatgtgtacatgtgtgcatgtgtgagcatgtgtaatgtgtgtgcatgtgtgcatgtgtgcatgtgtatgcgtgtgcatgtatgagcatgtgtaatgtgtgtgcatgtgtgcatgtttatgtgtgtgcatgtatgtacttgtgtgcatgtgtaatgtgtgtacatgtgcacgagcgcacgtgtttgcatgtatgtgtgtgcatgtataatgtgtgtacatgtgtgcatgtgtaatgtatgtaggtgtgtgcgtgtatgtacgtgtgtgcatgagtaatgtgtgtgcatgtgtgtgcgtgtgcaatgtgtgtgcatgtgtgcgtgtgtaatgtgtttacgtgtgtgcatgtgtgtgtgcaagtgtgtgtgccaattcccttcttcctccccttctctctcccagtattatttcataaatggacagttaacagtggtcagcttgacaatgtattgtatgtgctacagaccagccagatgatctcacactgacctagaagaggagctcaccctgcccaagacgcatcccacacctgtgactgggcagtggctctcatggctgtggggcttctcctccttttacaggagggtggcgggtgtttcttttcacaacaggccatccagccttgtccagcagcagcatccccgggccaccaccgtcac

SEQ ID NO: 473 - DNA, 1390 bp, Artificial sequence
  DNA replication origin
agctgggcatacatcttttaaattataaatcgataaatagttaattcaataatagaactcttttgaatatttcatgctgcccatgcgctgcgacgctctgcatagatgatgaagtggcagaggaattagagtcaaactcccccaactcctatgagcgcggtcatgggctcggcttggagtgggcacctgtcagttacaggctgggccctcactgtcccggctctccactcacctgggaccacatgaggggcctcacccgtgattaaatgccagatgctcagaggggagatggaggtttgaggagaagaaagtgttggctgcaaattcctgtgttaaagtcctgatccctggacctcagactgtaactctgtttggagacagggcctttaaagtggtgagtgagtttagggtgggccctctggtgagcgaggttagggtgggccctctggtgagcgaggttagggtgggccctccggtgagcgaggttagggtgggccctccggtgagcgaggttagggtgagccctctggtgagtgaggttagggtgggccctcgtccagtgtcactggtgccttctaaggagaggagattcagacccagacacacagggcgatggccctgtggggacaccgggaggagacggtatccacaagcccaggagagaggcttggggaagaaccagctctgctgccaccgtgaccttgggcttcagtctgcaggacccccacagcaatattcctgcccccagctccctccccgccctgctgtgtcccaccctggggtcagcagcgggccaggccagagagtctgtgcgatgtgctctgagaagctgcaggaagcagtgcctgggagacccgacggaagtcctgggccaagccaagcagaggggacctcactgccacgatcgcccgctgcacccagcacagtatccccgggcgtttgggagagacgctggccggcacagcctatgtcctggatcccgtcacttgccctgtgctgttcctggactgtctgacctagagaagggccgtgtgtgagcacatccaggcagagcaagtgcgcagctcagaaaaccagtgctggctccagcaggtctgggtcagacagtgcccccttcccccatgagccttgtagcttggggacacctctgaccttaggccacgcctctgtactgtgcctacaccacgtgtggctccatgctccgcacagtgaggctgccacgtggccctgaggttgcttctgctgttcgtggttgccctgggtgtctcctgcctggaccctggcctaggagtgggcatcaaccaggcagagcaaagtccagctgtaccaccagggcccatgtgcgcctacctggggcccggctcacagaccagcacgtggttctggcctg

SEQ ID NO: 474 - DNA, 1319 bp, Artificial sequence
  DNA replication origin
ccaagcatcttgtctggaggcctgaggggtggtggggtgcagtgggccagggtccccatggcagttctgagcccccagggccaggcccgccaagccactcttgctgagccaccctggtgtgtcctgggtcccccttgctccctgtggccagtgtagatgggaggtgcagagggtgctgcccgcgaggttcctgagtctttctctgtgcacagatgagaggcaggtgagctcctgggccgaggtgtcatccagaggtctgggcgttgccccttggagacacttgcacgggggtctgggcgccaggacgctggaggcgtgggatgatggcgattcgtctcccatcttcaaggccaacacagataggcggtccactgtcccagtgggacctgacgtggcccagagtggacggtggcccctacccaggcgcgcgcgtggccccagatcccgcgctgagtccctgcaccgcggccgccgcggcgctgctgtccccgagaggcagccctgtctctgctggcccgttaactgtgctggcagagctgttaccgtgacagtagattaatatctctttagtcagccaaaatgaacatggcatgctggtgacagtccaattttctgctaacagattgtggcctatcgaaacccggcgctcagctgatttttatttctgccagagataattcagcgcgggaggagcggccgccaccatcccatccaccagcgccgttcaatatatcccgcgccggcgtttctcacccactgtcaggaggctgcccgagggactccgagggcctgcggcatttagaggctgtctcagagcccagaggcacggctgctgctgcgatcaatgctgagcctggacttgcctgtttccaggcttgggggctgcgggggagctcagggtctgagaggaggaagggggagggtggggcgggctggtgggcacacgagcacaggtgtgtgtgtgtgtgtgtgcgcgcaggatgcgtgtgtgttttggagtgtgtgggtgtatgtagggtgcccgtgactgtgtgtgtgtaagcacgtggctgtgtgcatgtatgtgtgagtgtgagtgaccttgtgggtgcacacgtatggggactgagagcctgtgtgggggcacaggctttgcatgcctctcaggcctcctctcctggctgcaggaagtcacctatttcccattttctctgcaggatgtggagagcagcccttacctggcctgctcccggagaagtgtcaggggatccatgacccaggggcgtgggaggtggagctccctcccacctcattgggtgggaggtcaggtggctcttggg

SEQ ID NO: 475 - DNA, 869 bp, Artificial sequence
  DNA replication origin
tgtgtcctctggcctcatccagtgggatcctgtgtaggtggcagtgaggagggaagcacacccattccctggtgggggtggccaagctccactggaagacccagctctgctgatggctacccagaccccctcgccttctacccatcctcacccccaaggccagggggctaccaagtcctccctgccttcaggtttgccagcagccctgcattaaatgtcccctagaatcactgactccacgggtcccctctgggccccctgggaccttgcagctccagcacccatgttcctgagggtggagtctgccaagcacctttctgagcagtgcagggatcccaggaggctggaaggttggtccctgagagctggtcctaaaaccaggggctgggggctggcagacatcactaatcaaaggcagcactgctttctttgatgggcaacgtggtgcctgccccagggcaattggtcaggtcctatgaagggtgggcaagacctcgaggactgagctgggcacacgaccacatgtgccgctgagtgccctgggcaaggtgctgtctcctctggggtgagagttcatgcctccaggggtggtgggaggaaggcggtggtgtccccttggtgcgggtgctgatgtcgctggaccaagacatggtggggacacaggagatgccagcccaggtctggggtttgatggagcagtttagtgatgtctgcctggacacgagcagggtggcaacagcacaagcgccaccctgaacgggacattgccgagggtcattttttctgcgttgtgtccctgctgggctgtgaccacactcaggccgcccccctgtggagacctcagcacaggcagcactcgggagaagcgt

SEQ ID NO: 476 - DNA, 749 bp, Artificial sequence
  DNA replication origin
gggcaaagcaggacctggatgatgagacagctggcccacgcctgctccttctgtggcaccctggccccaagagctgccattccattgctcaaagacttggggacccagcgttgccttgcccgagactgttaacagagcccaggtgggatttggtcccgggagagtagaaccaaccctgccctgaagccccttgagcattctggagcattctggagtctggaactcgtctggaaagctgctcacgttccaggtaaactcctgcacgccccggcctcgggaatccggagaaaagcgcccctcgaagattccctggctctggggcccctgtgcacacccggggaggagaactcagagccgcggccaggcagcgaaccccactaggaggcaccccaggcccctgggcttcctggggaagggggaagggagtggaggggcccagggtgggggcaagggctcaaagcaggggcgggtgagaatcacagcagcccacgaaaagccaggcgcacgcattcgcggccgcacaagttcacaatcgccaaaaggtgaaggtgtcacagatgcctctgggtggacaaatggctccatagatgtggtgaacgcatgcagggggtcatggtcagccaggagaaggacagcggcacccacacacgagcatatgcgggctgaccaagagcgtgaggaggagggagagaagttgggcataggctgccccacgcatggtgacatgtatctgaaatgtgcagaccgag

SEQ ID NO: 477 - DNA, 777 bp, Artificial sequence
  DNA replication origin
gcgcatccccagattcttccatccagccaaatgtctgtatttctaaggtaagaaggattacataggcccttctattatgatttttaaaatatggaattctccaatgtgctttcgtggggagtttcatggtgaaacatgctatcaacagggttctgggaatacatctagattttaaatgcttggacagtgtgagatctcacacaggcacatctcatcttttttttttattggcagggggttcaaggagctaaatttccttccaatgaaaacactaccggcccctgccaccaccctgccctgccgtgggtgaggctggcttcatggaacctcatttcctggcagaatcccaagtgtggggtgaggaattccacaggactctcagcctgctggagttcccaggcgaggcgtgctgactcggggccaggcctgagccactgctcccaggggactccggaggtggccaaggaagccgggctcgaaggcccttgaagcttccctgttgggtgtgggaaaggggagctgccgatgcccccagggcctgcttcaggtttttagggtcttggagaggagggaattgattctgagaatttcaacagctgcgggagggcataaagtctggtcctcagatggtgggcagggcttctgtttggggtattttctctgcctggaagagttaggtgaaggggctggctggtccccggcatgaggtggccttggagaagccctccctttcaggggcagtgggatatcctggggtatgataggtggtgcttggca

SEQ ID NO: 478 - DNA, 915 bp, Artificial sequence
  DNA replication origin
gtgaagggcatggaggttttggggaagcaaagggcccctgaggctgggctatagggcagggggaagcaagcaaggggcagaccaagacctccccccgccggtcttggtggaaaggcctggacttcgttctgtccacccctgccaggtggggtgcagtgtcactgcagctcccgccccgtccctgagtcctcctcaccccatcccccaggcaagaagcgttgttccttcttggtgacctgggcacaatgtacagcctttggcacacaggcatctggctttgtttttgtgccctcctctccctcaaggctgagtgtggatttccatcatctctggacacccctcagcccaaagacgctctgtgccatggagaagcccccaggataaagctcgggactgcgcagatccccgctaagagtagatgagaggcccagtgtggccggacgtcccctcagacacagtgaagtgagcacctccatgcaagcaccgggggctacggacaggctggaggggacgggcacaggacacagctcagagcagagtatcaaggacaaggacagggaccggggatgcaggacagagacagggaatgcaggatagagaccacgggacataggatagagaccatgggacatgggatagagaccaggagacacaggatagacaccaggggacagagaatagggaccaggggacacaggatagaaaccaggggatacaggatagggaccaggggacacaggattgggaccaggggacacaggatagacaccaggggacagagaatagggaccaggggacagaggatagacaccaggggacacaggacggagaccagggacacagaatagagagcaggagacacaggacgctgaccagagacaggacagtgacgtggaatccaggacagggactgag

SEQ ID NO: 479 - DNA, 1356 bp, Artificial sequence
  DNA replication origin
cctttccaaggccccaaccccaggggcaagcttagtccagccttgggagtttcacccttcaaatgtcattttacttgtcaactacaggtcttggcttaacttccccctctcagaaagtcctcttcccattgcaacctccaggacaacttattttcttgactttttccctcatggtttgtaatgatagattaagctttccctgttcccacaagacggtagactccacaaaggcacagacttgtctgttcaccaccatatctctgaacagacagagtacttagcaaatggccacttgggaaatagtcattgaatgaatgtgtggaaagatgggtgggtgggtggatgaatgaatggatgaatggatggatagatgagtagtagatgataagaaggatggatggtggttggatggatggatgagtggatggatggatggatggatgaatagatgagtagtattttgtaagatggatggtggtgggtggatggatgagtgaatgaatgggtggataggtgagtagcagatggtaagatggatggatggtgggtggatggatggatggatggatagatgagtagtagatggtaagatggatggatggtgggtggatggatggatgagtggatggatggatggatgggtggatggatagaagagtagtagttgtaagatggatggatggtgggtggaaggatggatgagtggatggatggatggatggatagatgaatagtagtaagatggatggatggtgggtggatggacggatgagtggatggatggatggatgagtagtagatggtagtatggatggatttggatgaatagatgagtagagggatggtaggatggatggatgaattgtgatgaatgggtaggtggatagataaatggatagacggaaagacgagtatgtgggtgagtgaatagatggacggggaatagaaagattgatgagtggttggaaagactgattggtaattgggtggatacatggaagagtggatggatggatggatggatggatggatggatggttggatagacagtaggacagatgtaggtgtatagtgggtggatggatggatgcacggatgaatggtaggatgaatagatagatgaatgcatggatgggtgaatggatgaatgaattgtgagtagatagaaaaatagatgggttggtagagagatggatgactgaaaagatgagtgtgtggatggatggatggatgggaagatggatggatggatggatggatggatggatggatgggtggatggatgggaagagtggtggatgggtggatggatggatgaatgagaatattgatggatgggtggatacatggatgacc

SEQ ID NO: 480 - DNA, 2403 bp, Artificial sequence
  DNA replication origin
cacacctcccctgggagttaattattttcttaaaatgcaacttgtactgttagtttaaaacattccaactgtgttcacactctttaaatcttcagtaaaccttggagtttaaatcacttgcagataagagtaattctattagggagagaggggagtgagcactcaatggaggtgaaatagaatggaataaaaaggccattgattgtgggctctcgggcacctcggtccatgccctctgaatgtgtcagccacacaatgagatctggcagggtccggtcatggtgcccagcagggctgcccacccagctcttaggaggctggatacaggacctggctgtccgcctggggcctggtgtccacctgggtgctggtgtctgcctggggctggtatctctacctggggcctgatgtctacctggggcctaatgtccacctgggccctggcgtccacctgggactggtgtctacctggggtctgctgtccacctggatcctggtgtccacctggggccagcgtgggtgctggtctggatggatggtggggtgctggtctggatggtggggtgctggtctggatggatggtgggtgctggtctggatggtggggtgctggtttggatggtggggtgctggtctggatggatggtgggtgctggtctggatggtggggtgctggtttggatggtgggtgctggtctggatggtgtggtgctggtctggatcgtgggtgctggtctggatggtggggtgctggtgtggatggtgggtgctggtctggatggtgggggtgctggtctggatggtggggtgctggtctggatggtgggtgctggtctggatggtggggtgctggtctggatggatggtggcgtgctggcctggatggtggggtgctggtctggatggatggtgggtgctggtctggatggtggggtgctggtttggatggtgggtgctggtctggatggtgtggtgctggtctggatagtgggtgctggtctggatggtggggtgctggtgtggatggtgggtgctggtctggatggtgggggtgctggtctggatggtggggtgctggtctggatggtgggtgctggtctggatggtggggtgctggtctggatggatggtggcatgctggcctggatggtggggtgctggtctggatggatggtgggtgctggtctggatggtggggtgctggtctggatggtgggtgctggtctggatggtgtggtgctggtctggatggtgtgggtgctggtctggatggtggggtgctggtgtggatggtgtggtgctggtctggatggtggggtgctggtatgaatggtgggggtgctggtgtggatggtgggtgctggtctggatggtggggtgctggtctggatggtgtggatgctggtgtggatggtggggtgctggtctggatggtgggtgctggtgtggatggtggggtgctggtctggatggtggggtgctggtgtggatggtgggtgctggtctggatggtgtggatgctggtgtggatggtggggtgctggtctggatggtgggtgctggtgtggatggtggggtgctggtctggatggtggggtgctggtgtggatggtgggtgctggtgtggatggtggggtgctggtctggatggtggggtgctgtctggatggattttggggtgctggtgtggatggtggggtgctggtctggatggtgaggtgctggtctggatggcgggtgctggtgtggatggtggggtgctggtctggatggattttggggtgctggtgtggatggtggggtgctggtctggatggtggggtgctggtctggatggtgggtgctggtgtggatggtggggtgctggtgtggatggtgggggtgctggtgtggatggtggggtgctggtctggatggattttggggttctggtctggatggtggggttctggtctggatggtggggtgctggtctggatggtggggtgctggtctggatggtggggtgctggtctgggggacagccttggtggtctgcttgggttttccttctctcccctctaacatggtggctcagatgtggcctctggtgcctcccggattattcctgggggctggtgttccatccaaagggccccagcttaagtcatgggaaaaaagacggtgacagccagcagcagagagccaggggccttgagcaggcttgtttcttgctttgggaggttcttggtttctgagtgggtgaggggctccttagctctctctgcccctccccatcaggctccacttctggctcaggggctacccctgcctcgtggtgacatctgtgttcctggtgcatccgcccagccccagggattttgttaactgagggtattggtcaccagtgcgttcctgcgtcct

SEQ ID NO: 481 - DNA, 873 bp, Artificial sequence
  DNA replication origin
ccacacctgtcccaggtgagaggccacctctgcagccattgtgtgcctaggtggggctcatcccctggccagggaggctggagccgccactctcctgagaccacccctgctggccactgctctgggcaccacagaaggaaagaagagagggagggaggagacaggaaaggaaggagggagggagggaggagagaggaaggcagagagggagagagggaggagagaggaagggaaggaggggggagagaggaaaggaaggagggaggagagaggaagggaatgagggagtaggagagaggaagtcagagagggagagagggaggagagaggaagggaaggaggggggagagaggaaaggaaggagggaggagagaggaagggaatgagggagtaggggagaggaagagaaagagggaggggtggaggaaggggagaggaagggaaagagggagggaggggagaggaagggaatgagggagggagaaaggagagaggaagggaaggagagaggggagccaggggagggaggaaggctggatacatgaagtatggctggaaagatggatactgggtgggtggatgcgtgggtaggtggatggaggggactcggattccatcttagggactcacaagcgctgagctgcgggggagaatgctggggcttgggcccttctggggtgacgggcagagaggtggaggagcagccgtactggatcctcctgtggccgctcgtgggccctgtgctccccacaccctcctcactcttttgaggacagcgcacctcctgccatccaagagtcgccctgttccttcactactgacactggcgtggaaccctcagccagagggatctggccaccagatgtagggccg

SEQ ID NO: 482 - DNA, 786 bp, Artificial sequence
  DNA replication origin
caactgaggtgacttaatttctccctcatccctgaaggctgtgtccactgcagtggaatctgcaggtcaccgtttcctttcagctctcgggctctccagccgcctggtttcgatcaggcatcctctgttattcgctgggctccccaggtcatgggtcaggtctctgtggctgcttcagagttttcactgtctctagatttcagaagtttaattttgatgcgtctcggagtggatttctttgggcttatcccatcaccttttcccaccgcgtgaatgctgggggttcacatccctgcagggagcccactgaccctaaggttcaggctgaagtggtggcgatgagactggctcacaccacctggctcagcctcactgctgctgctgggggcggtggggtggggtggggggtggagggaggtggggataggatgggggtgagatggggagggaaggggatggagtggggtgaggtgtaggggtaatgtgggggtgggaaggggcgggagtgaggtggaggtagggtgttagatcaattccccactttcccactgaaacccaaaggtggggtgtggtgttttcattggtgttgagctggagtaaggaaggtgtttccaaaaagctattctgctgggtcaccctgttcccagggggaacaggcttttctgggagctttttgtgtctgtgcctgttggagatttgggtcagaggcttctgagcaccctgctagacacgtgtgggagacagtcaggaagcctaggagccccagtcccgaggtccctgggcggc

SEQ ID NO: 483 - DNA, 1230 bp, Artificial sequence
  DNA replication origin
gtggggtggggtggggggtggagggaggtggggataggatgggggtgagatggggagggaaggggatggagtggggtgaggtgtaggggtaatgtgggggtgggaaggggcgggagtgaggtggaggtagggtgttagatcaattccccactttcccactgaaacccaaaggtggggtgtggtgttttcattggtgttgagctggagtaaggaaggtgtttccaaaaagctattctgctgggtcaccctgttcccagggggaacaggcttttctgggagctttttgtgtctgtgcctgttggagatttgggtcagaggcttctgagcaccctgctagacacgtgtgggagacagtcaggaagcctaggagccccagtcccgaggtccctgggcggccttccacctcccagtctttctatgtgtgtttgctgtgttacatccagccttttaagggaggacctggtaggaatggggcctttgaatgaggtttttatttctttccatggtacccgaaagttacaaggaaatgtagtgagggctcctggcctccaccatcaaagcccttcctgtcagggtcactccagtctacaggtgagaatgtccaaggccacacagggagttgagagcagagctcagcccagagtcccagaccatggctccttctcctttgtatactcctcctagacccttctccactccagatgatccccatgttactaaactacaccacaaataaaatagaactaaaagaaaactccctttttctattcaagacaccctgcttctcttcttatgatggcttctgctactactgctattgctatggtggtaggaatgtgatggttgtggtgatgatggcagtgatggtggtggtggtggtgataatggtgatggtggcaatgatggtaatgaagatgacagtgatggtgatgatgatggtaatgacatggtggtgtgatcatgatgatggtgaggatggtggtggtgatgatggtaacagtgatgatgatggtgatggaggtgatggtgatggtggtgatgatggtgatggtgatggtggtgttgatggtgatggtgatgaatacagtgatggtggtgatgatggtgaggatgatgatgatggtggtgatgatggtggtggtgatgatgatggtggtgatgatgacggtgatggtggtggtgatgatgaggatgatgatggtgatggtgatagtgatgatgatggtgatg

SEQ ID NO: 484 - DNA, 2308 bp, Artificial sequence
  DNA replication origin
cgcgccggaatccagactcggcttgcaaagcccgctcctgccgtctctccgcagcgcgccctgccccccactgccggccctcttagcttcaaaaccaaattttgcctttcatcctgagagattaataccccgcaggtgaaaccgtggagacggagctgcggtgggtttcttttccacgcctcagtttcctcgtctgtgaaatgggaccaggcgcgcctgtgcttctccgggagtttattgcagggctggctggagagaatggctgggtggaagctgccaggaggaggcccaaggccgcccaccccgtgggcctcgtttgctgagcgggggtcagaggcgtgcgggacagggcgcgccccacggcggctctggaggcggcccggcccgtccctgtctcctcccctcgctccccctcccccggccttcccggaactctcctcgcccgctgggtggaggaggggcgagggccgactccgccgcccctggggtctccctcctcccacccccaccgcagagtctggcccgccctgggctttcctctcaggtccctttgggtctccagaagcccggaggtttcgcgcagactcgaacctgagatgacaccacccagcaccccaaatcctgcagagtgtggaggggatctggggagaaggcaggggctgcccgggcgctctggctgctgggggtgggggacagggcctgccggggaagcgggtcgggggaggactggagacccaggctcccctaggtacaacgaacctcgcgggagggaatacgccatccccgtacccacttccgaggacgtaggtcttttggcaccggcggcagccgcgttcccacacatctgggcggggccccgcagcatggcctggggagctgaggcttcgggatccggcacaaactaccattctaggtgtagacggaggaggtggggtgtgggaagcagggggccatggtctgagcagaccttctcacctctgggcctcccacctcctggggcaggacttacggggaaggacccgaggggagtggggtgtccatagggacacccaagggtctatccctgcgagctttgctttctactaaaccaataatcgcagtggtggtggcagtcgagacacggctcaaagagccggcaagaatagagcagagaccaggatcgccccaggcagggaaaaaatgaccagttctgtagagtgacccgaaggtgatggaatcactcgggcgtcctcctgggaaagagctgcctgctcccccgccgccgccagtacaccggcgcccatgccccgggggctggagagagcagccaggcacaggtaactcaagaactccagtcccctcacgggtgccgtgctgtggggcgccctcacccccacactttgggtccctgggcctcctcatcaaagcaggggcctgagtggcaggaacacccctgtgtgcagaatagtgccccctgcagcccccacaggtcacctctttgaggacctaggtggggcctgccctggggactggggtgaagagggcaggtccagccttcagcagcccctcccccatgacttcagtggaattacaaggggaacacccagggcagctcccgtaggctgcacaagggaagaggggagggcttctactgaggtgaaacagtgacccacccctcccacaccgtcagcctccctcccctctccacccttcagtgctgggaccccagggcccatagacagctgggggagtggggagacaggaggaactcaagctcagcttctgcctcctgtctcctgggaccctcgggcagcccctccagcttcctgggagtccaatttcccaaggtagaacggtggcggcagagcctggccctgtggtggggcagctgcaccccgatgagtggcttgcagttcctggagccctgcaggttgttggagaggcagggagcccttctccctcctgcctgccctcttgcacttcctctcccagaacccagcactactcccagaggctctgagctggagccctagaaggtaaccacctcctggctggacacagggcaagttggggccaggcgtgaggacaggtgccccaggagccacctgctccactcatccacaaaggccttaactggctcaggggcccctagctcccagtcaagccctgccctcctgaccttgtcctgccctggtgctgccagtcgggtggagatgtctaggggccagctggtctcctggcaactgaagtccgcgcttcccttccgttcactcattccttcctttcctcatgcaggaggcgctgcaaggctccgtgctcctggagcttc

SEQ ID NO: 485 - DNA, 2810 bp, Artificial sequence
  DNA replication origin
gatgaaaggcaaaatttggttttgaagctaagagggccggcagtggggggcagggcgcgctgcggagagacggcaggagcgggctttgcaagccgagtctggattccggcgcgagccgattccgggaactggcttggtgacccggccgccggcccgtgtcccgggctctgggcgtttggggacacggaaggcgggctcccacctggcgactcccggaatgtggccgccgggcccggaaggctacgaggctcgccattttcgttgctgccagggccccgcccgcgcgcggccgaattgggatctgaaggcagcggcagcgtctacgcaagcagcgttctggagcgtcgctctgccaccttcccgcgcgcagttccgcgcgagccgcaggacgcgggcgctgtgggtaacgaagttgctcccggtgtgcgcagaccggcggccccggggttgcgggcggcaggagggaccgccactccacggctgcgggcgcgcgtgaacacacggctgaaggtcataggcagcgcatccaggcaacagcattcgttggcggatttttaaaggttcttagatcaagagggaaagcgtgtgaaaccgattccgtttattgcccccagcggcgggggagctccccgttgcagacacccagcggctcggccactgcagcgtcctggcccagtatgggccgcacacgagtaggagtcgttgggggcttcctgcaccttctcagtgagcccggttgggcctggattcggctccctcctgggcccaacgggaggagatcaagggagttcaggttcacagtctcaatctcttaaaacaaaacaaaacaaaaaactccggattgggccctcgaagtgcccatggggcatccagatactcccgacatctgcgcaggagagctgggcaccctggtggggacgccaggacacaaagccgggcagagggtctccactggggtggccacggcatcgtgcaagccggtccccggaagctgcccatctgcaagggacaaggaccctcttgcaatcaaaataagtcagtttccacacatctggggtttgttcgaaatcagcgacatggctcacattcctaggaagtccactcctcccagctacccactctgggaccaggaatcgggtatcggctttgggaggcccccacctttgagcagtgcagggaatggaaccttgccaccactgggccacaactgggacctgtgtcctgtcctctccaagtattctggggcacaagaaggtttcccaggcctcgggtgagaagaaggttcaaaggggccccgaaatattgaccccagggtctggggggattcctgtagccccagtgtgcggctgaggcatgatgctggaggaagcacccacttcgggtcatttcagaggtctcaatagggaagaaatggccttttccatgacttgtgtctcccacccacccccaccattctagaccaaacgcaggctccttccagcattcagcccccatcgagtcccctgcgaggtatagggtccaagcagccctcctccatgttcccctctgtctagtgggagccaagtcagccatccccaagggcccctgtggtctcctggctcctgctgctcaagtctggggcaggagaacatgcccggggagcaagagcctcatcctggcctgactcagtggcccacgtattgggggtggggtgagcgctggcgatctggatcccacctggggcatttccaatctcccaggaaagcccgttggtaaaccagaggctgtgtgcttctttgctacccggaggaacaaggtgggggtgtggagtcagtaaaaccttgacctggaattcaatagagcctgaggccaagtatctgaaaacccatggctaagttcaaaaagcacagaggagtgggagagaaaggggtgaggtgaggggagagaaagtgggagagaaagaacctggtgaggtgagtccatcttgccaggtgccatgcctacctcctgtcctgcacacacggcccgaagcagggctccctggggcctgaggggctgggggtaggggcagctggggctgctctgaccctgccagttggcatggggcacaaggcctggccaagcgaaggggccctctagcccttgaatgcatttgtagattccgggagtggagggcaggccggcatggtagttctgctactcaatgggcttctggggaacccctggggcttgggggcctcctactcgctaataagatgcttcctccagcacggcaggaccagcatttctggctctcaaacccggccttttccctaaggaattaacctggtcatgggtctccagccgttagaaacactgggagtctgcagggctcatggagaaatcgagtttccatggactccctctctgcccagaccccagcagaagttggtggttaaagccccgctctagcctccaagaccccagctatgaaattggttttggaactcgacagcagcgtgcagttgtccagtgtaggagcctctatgtggccaacccacactcactgtccttggacgacccaaggaggtcagtaggaatgagcttacagcacttacaatcccagcgcaggggccccagggcctggcatcagcctcaaggctctgcagagctagacttggtttgaaaattgcccttagaccttttagtatcaaccttttccccactgggcctacatttgccctacctgttctccaagccccccaaagcccttgccaggcagggacacagaactgggccccagggaggacttgcatctgatcttccctgcttcaccctttttccccacggga

SEQ ID NO: 486 - DNA, 1533 bp, Artificial sequence
  DNA replication origin
cagggacacagaactgggccccagggaggacttgcatctgatcttccctgcttcaccctttttccccacgggactcctcaatgcctgacctgctctccgcttctaagtctggccacgcgggggcagggcctggccaggccaggatgcaacctcggccagggccatggccttggggacagcctgcctgggctcctcgagcaggctcgggagacactgccccactggagccagggctgcgtcagtgccttgcaggtaggcagcccggctgtctccctggcgaggcttgaccggcagctaccccttcccaggcagatccatgaccccatccctacccaacagcctggtggagggcaaggaccagatggcacagaccagcttgctcccatacctcctgcccttcttccctaggggctggcaacaggccagggatggctgtcctgtcctagcctggccagggttctgagaaccacctcctgagctggaggaggaggcagggagagggcctgagagagttggggcacccgtagaagaaggccaggactgcacaaccttggcatctgttggctacctccaggccaggggcaaaggaggcctctgctgggctgcagggtgagggtggggaagggaccctctctgcaggtgggagtggttcgcaggcaccatagtaacttccccaggcctcctcccaaacctgcagaggcttcaggcaggagcaagggggacctgggtgcagagatatgggagtgaccttgagtcctttctagccagcagctccagccaggttgggcccaccgttgggaacctgcccttggcggggtttaggcaagacagcgcccgtgttcctgggctccagcacctcccacccactggggcgagcaggttcagaaccggccttggcggtgcaaagctgcagcggtgccctagttggctaggcagatcaagacctccagagccgggcctgtaaactgagctgttctctgccccaacccctgtagaaagatggtcagggtgtggggagggtgggtaaaggggtcgatagaccctcgaaaggacggcagggaatggggctgtgccattgctcatggcccttctctaggcgacactcacctggtgccagaaacagcagaggtagcggccagtgagcgcttcctccatccggggctcgggcggcgagctggctgcaagactgggcaccctggagccgtgggagccttgggagccgaatctgggttcgaatctgagcagggaagcggtgccgaccgcggaggatccaaggcagaaggcccagcgcaccgccgccgccagctcctgcccaacccggctccgctgggcttttcctctggggtggcgccggccccgcgcccctccccatccggggcgcctctgctaggacaccggggtctcggggtttctcagggctgctgcgtttcacctcctttaacgcggaggcgcggagttgcacgtgtgggtctcagtggagccgccacaggtcttattacacaacaaagggcagggagggcaaggccaggagcc

SEQ ID NO: 487 - DNA, 715 bp, Artificial sequence
  DNA replication origin
agctgctccacctgcgccgctggcctttccgcccgctacgcacctgggccccgagaggccagaggggagtgtccccagtggcccgggtccccgaaggtggcccagctcgggcgctcgcgcagccgggtactcaccttgggggcgcggcggcaggagagcgcgggcggagaggtgcgggcgccctgggacgaccagccgaggacgcctggtgtttggacggctgcccccgcgctgtccccccgtgcgaggcgtgttggcctccgtggcctcgcgagggaccgagggcggcgggtccgagtgccgcccgccggcctgggcagtggcggagcgcggagctggcggcgcctccgctgttgtttttgagccgcgaagcccgaagcagcagccgttgggtgggggcgaaggggaggaggcgggggccgggaggcgcgaggggggcggtggggcccggagggggcttcggaggagccgggttctggcgcgcgagccccgacgccccctccagcgatcgcagggcggggacgggggccgaggggagaatgcaggagaaaagcgggccggggcgacggggaacgcaaagcttttaaattagtaatcaaacgcagtaaaacggagcaaaaccagcccggactcgcgtccgaactatcggcgcgtgtgccccgagatccaaggaagtcgtgtggaaaaccgcagccgccgccccatcttcggcccc

SEQ ID NO: 488 - DNA, 740 bp, Artificial sequence
  DNA replication origin
acgccccctccagcgatcgcagggcggggacgggggccgaggggagaatgcaggagaaaagcgggccggggcgacggggaacgcaaagcttttaaattagtaatcaaacgcagtaaaacggagcaaaaccagcccggactcgcgtccgaactatcggcgcgtgtgccccgagatccaaggaagtcgtgtggaaaaccgcagccgccgccccatcttcggccccggctggggcgggagcagcagcgcgacgcgccgcgacgcaggggcagggtggggggatagtcacctcgcctccggggccacctgggtccttttaaagtgtccggggtgcgggccccgggcgggagcgccgaacacggaatgttttcttaaagggccagttccgagctgcgctgaaaagggggggggggagaggggggagagataagtgagacgaagaccgagaaggccgaggagagccccccaatcccgcgccgaggcggcggcggcggcggcggcggcgcgacgatgaggatgatgaatacattgcaaagtttttttggccccggcgaggggtgtcagattgagtgctctgtgcgcatgtgcgaaggtgtccaaactgacaatgctggggagatgaagatagtgtgtggctgcttctggactcaaggaggaggagagagattccgcgagccgacaccatgcgatccaaggcgagggcgaggaagctagccaaaagtaagtctcccgcgctcggccgc

SEQ ID NO: 489 - DNA, 1712 bp, Artificial sequence
  DNA replication origin
ccagcctcacctcccctgaggggcccggtggggggagcccctggctgctgggtccccttcacccagcctcccggcagaaatggcagacctggtcccctgccctgcgcactgcctacaggaggacttgggagccgaggaagcctcggggccaggaggggccaggatgtcgggctggcacctgctctggaagagccgctcacaggacaaggaggaccccccgagtgggcgtctggtggttggcgagccaggcatggccggtgcctgtccccaaggagcccacccagcagttgctccacaagccagcttggcaagcccctcctgccagcttccgagccatggcacacctgcgcagccaggggctgagggagggggcctgtgggtgacacacagtccactgccgtggggcaccaagccctggcggccagccccgcactccacccctccaccgcagcctctgtgttttcgtccgaagcggggcaagacgctggattcccgccggacgtcctggcgctgctgccctaaccggccttcagagggaaggctgccgtcctggctctggggaggggactggtggacggggccaactgccccagggagggtgggagaagggagggcccagccagcctggcctgtttctacgaagaaggaaggaggctgtgaactgggccgccagccccgcttacctctaccctgtctccagcacaccttccacacgcatcaccctcaaacacgagcaagacacacacagtccccatctagtgggggctgcagctcccccaccccaggggctagatgggacttgtggagaggacactcccccagccctggggtatgtggcatctaggacatggggtctgccacctaggtggggatcaggcctcaaggagcagctctgatgggggtgccgactggcacatcctcctcctgcacagaggcccccagctgtgctatgagggcgatggtgatccagagagcaccttggtggtgctaaccccccacctgcccacctggctcacaacagccctggaaacaataagcttttgttaagcattgagtttgtaaatgtggggctgcagcagcccctaccccaccggccctaccgccctggcttcagtaggggggaccctgtccctgaactgtcctcactctgttcctggcccccaggctcaggtggaggaggctgtaggtttcccatcagctgagccacagccccggcttgggtgccccagtggccacctctgtccttggaaagctcagctggaagcccgggtcacccccggagccgccaccatttggcccttcacaagacccaatccagaggactaacccacctgaactgaggcttggagtggggtctccagggaaacacaaacgaaattacacctccagatgcacactcggcggtggcccccgaaatgctgggtcatggggtcacctccactggcctggttgctgttctgtgcccagcctgaataccaacctggtaaccatgaccttgcccctgcccaaccccacagtcccctgacctggtcagcattgtggggaggggaggacctgctggctggagtgctggccctaccgcctctgactcgggtaatggactatggtccccggggaagttcacatctgcttaaaatatcgcctgatgaaatgaaattcttcagcggatcctgccttcttgctcagggcaggcagtgtgatcctgaacctgc

SEQ ID NO: 490 - DNA, 1061 bp, Artificial sequence
  DNA replication origin
ggctgcagacggcgtgggccgggtcggggagcggggcctgggggaccccgggccggccggtagtctcggccgacttcccactccccgcgcacaaagtcgcggccaactaccgcggagcagcgcccgcgtccacaccgcgcagcctggcgccccgaccctggcccagcgggagcggcgctctccccttctagagccccagcttggaccccggggtcccctcctcctggcctcccttgcggaggagggcggcctccgcgtccccaaccgccgaccctcgacctcgtgcgggacaccgtgggcgccaggccccccgcttgcctgggttccctgcgacatcccgacccgcgccccgagagacgcgggagcgcgcgccgcctgggtttaagtaggggctgtagggggagggaagacggtgcagagaaacggaggcagagggtgggggtctggctttccagggtagacccgcctgcccagtctgatccgcagccccggcccctgccggcaacctcgggagacgggccgggctccctagtgcacttgggggacaggacacctcctcccttcactgaccctgggaagacagagtgcaggcgagcaggcaccacttttgagagtgagaaaccccagacgcagagaggtggaggaactcttgggagggcacacagcagattgaggctccagtgaaattcagtggaatgaagacctccagggcttcttatgtagcattcccctcccccacagagcaccacaggctgccgttaattccatagggttttttctgtgtgtgtgtgtgtgtgcgcgtgtgtgtgtgcgtgtcagggtttaagcattttctcaaggccaatgctcaacttgtagcaggtctgttcttaaaaagcaggcaggacatcacgtgcgtccagcgtgtaagtgacctcacacctgcaggctggactcccgctgggctccgtcccccacagctcctgccccttctgtgggtgttctgtccccaagggcaggcacagaggagcagaaaccttggtcgggtggcctggcctgcaccctccacactccctcgctca

SEQ ID NO: 491 - DNA, 1166 bp, Artificial sequence
  DNA replication origin
gcagaggccactgctgtgtgcagccccttccccctgcggcgccccagacaggacaggaaacaggcgagaggccagggcagctaggccaggccggccacagagagtcttcagggaggagcagcccaaagcccctctgccacggccatccttagtgtgccccggggtccacctgtgctccttagttgggtgggggcaggacatgtcctgaaagctctgccctgtcctccagccccagcttcctgttgaagcttcctgggtgcagggctcagggctgagaagggggcaggctggggcccgtctcaccctcggcctcaaaggatgccagcccagctccccacctagcacatgtggatggagtcctggcagggtgggcggggtatggggggaagcccctgggggagcctgtcttccaaagagagcagccctggtgagcaggtggccaggtctgcagagaacacctggcaggcagttctttggatgcgatgggggtgtccaacctggaagctgaaggagagacacaggctaggagggaggggagctccctgggcagaggggccggggcactgggcctgaggctgttgagagcctggtgcttctgaggaggactgggtggtggccccactggggcccgagggggctggagggccagaagcggctcaggggcccgagggctggtgcgagatggatagctttgcctggctcacacacagcgggtacctgagcagaggcagggatggggatcctgccagggctgggggagtggtcacagggcaaaggctggacaaggtggggcttggggagttgtggtgtgggtgcgctgggtggcagagctggcaggaactggcaatgaattacacatggggtttgggaaagggaaggcacccccaggtttctgtcccaagcacctgggccagtggaggcatttggccaggccagcatgggggggagcagctcccggcgggctgcctgagggtccactggtatcagcgaggcagtgctggccattgctgggctggcattggaaggtaagggcagagggctgtgcccatagggctgatagtgctggccctgtcactgaatagtgggcacctgttctctagtgggcaggtgtggctccatgacaacagcgcctggggccaacagagccctgccacccagacgaccag

SEQ ID NO: 492 - DNA, 1275 bp, Artificial sequence
  DNA replication origin
gaggatgtggcaccgatgtattgaggaatccctgggccccacacctgccgagtgtgagatggggaagctggaggtgggaggctccacgctggctcacgtgcaggggcccagggattcccagggcaggcccctaggaccctgtccacacctggccttgggccctgctggccactgctgggcccctgtgcccacgtcacagcctgcctgtgccaaggcccctgggagacgcggagagaagggaaagaggcttgtcctcggccacggccttagtggggtgcgggcagcaccggcctctgtgtgatcctgcactgggcagtgggggaggcaggatggacaagagtctccctcctgaaggtggtgctggggggaagtccacacatggaggcaggattcttgtcaaggggtggaaagccaggccaggcacctgtgtggacccagtgccacgcggactcctgtggggaggaggacaggcaaggaggcctcgaagagggaagaccagagaaggaggggaaggggagagcggagggaaagaggtgggataaggaagagaaggaggaggaaggggaagagggaggagggtgccgagcaaggttgggggagcccagcgcacggaaaggaggcgcaggtcaggggcgcacgccccctggggcgggggcgcaggccggctttcaggtaccggccttttgtctgctgccttgggctcgcctgtcagccccgctgtcagaggcctaatctttttttcttcgcggctgaaaaggcccagcgccacatcaggcgacacacggctgcctattctccttccccgcagaacccaatcactggacagcgccacgataattcactccccagcccgccctttgaaaaggtgggccgcctctgcgccgctccccagcaagataaatcatgtactcgaaattaacttccattgagagggagggcaggaagaaaggctgatgggccggcgcggcggcgagggaggaccggccttgataaatgtcagtgcggataattggggggctgtgattaagatcttatctaggtgggaagtaaacagaaaagactttaataaaactcctgccccatccacgctcactaacttgagaagttcctttcccccccttatttttgggggtgaattcagaagagaataccaaaaaggtcttagcgaaggaaaagttggtttcagggcatcacttaaaaggattaaacggacctcggaggagcctcggcgtttcacccgtggtgacaaaaggcagaggaaacagaagggagcac

SEQ ID NO: 493 - DNA, 968 bp, Artificial sequence
  DNA replication origin
ggggtggggtgggcccaggggcgaggtcagaggagaaggaggccttggccaagtgtgcagggaggcgcctctcctcaccctgagggctgagtgcgaatcctgcatcccggccagggcctcttcctccccttcccacaacatctgggactctggagatcaattgcagggctgacctgggatggtctgggcagggctgggagtggtggctgtttggtgaagcgcaggagctccccgtcaggggcctgcaccccaccatctacccggctgcaggagggtgccttccctctgtgtgtgtgtgcacccgggtgcatgtgtgcatgtgtgtttgtgtgtgcacgtgtgtgtgcttgcacatatgtgtgtgttcatgtgtgtatgcacgtgtgtgcatgtgcacgtgtgttcttgtgtgtgcaagtgtgtgcttgtttgtgcacgtgtgtgtgttcatgtgtgcatgtgtgcgtgtgttcatgtgtgtgtgcatgcgcgtgtgtgcgtgcgtgcgtgtctgtttacactgcgtgtgtgcgtgtgtgtgcgtgtgcgtctgtttacacctggtgtgtgcatgtgtgtgcgtgtgtgtgcgcgtgcgtgcgcgtctgtttacacctgcgtgtgtgcgtgtgtgcatgtgtgcatgcgtgcgcgtctgtttacactgcgtgtgtgcgtgtgtgtgcgtgcgtgtgcgtttccactgcgtgtgtgcgtgtgtgtacgtgtgcgcgtgcgtgtgcatgtttacactgcgtgtgtgcgtgtgtgttcgtgtgcgtgtgtgcgtgcgtgtgcgtgtgtgcgtgtgtgtgcgtgtgtgtgcgtgtgtgtgtgcgtgtgtgcagtgtgcagagatacacgccgctgtcttactgcagcacggcgccatcacaaatgaacatgcaaatacaaatctacacttcaaaacttggcaactttgtccctgaaactcctccgcacatgac

SEQ ID NO: 494 - DNA, 1119 bp, Artificial sequence
  DNA replication origin
accgacagcaaacacggctgagctcctgggagagccactgagggatgttttcctttcttcccttaaaaaattaaaagcggagcccggtccagggacctgcacagccgctcccctaactcattgctcctccagagccttggcgagcgccaggcagggccggtccccccagaggcctgtgcttcagagcgtgtgtcccgctgagccggcgactctgcccttccgaacagcccagcagccgctgagtggggggcctcagtttccccatgtgccctggcgatgacagtggctactctggggggtcagaggagacctgggctgaacagaggcccacttccagaaaggacaggaggaccgtcctctttgcccatccaatcagcgggcactgggctggcctcctctggccagctctgaggcctctccagcccagagcccaggggctgggccgtccgctaagaaagcagcctcagccggagtgattcacggatgcgggaagcgcgctggctgaggaagcccagcattctcaaggaggtgcagctgcggggtgcgcacatggtcagcctttggctggtgactgtgccttagcgaggcagaaatgtcagagctttaggcaaagagaaactcgccagaactgtagttggtttgggtcagctgatcaggttttcccagagacatgcaaagagcccagagagccccagggggctcctgcggagctgacaggaacctgaacattgcgggagctggaacccaggacacacaggggccacactgcagctgctcgcttccagtacccctgagacctggggccccttctccagcctacttcccacagggctgcccggatgggagcagggagggggctgtggattgaggcctggccctggagctggcatgttcccaccctgacccctcacatcagccaccaagggcatagaggtccccccatcctgctggggcccaccttaggtggaggggggcttcgaggggctgtcaccaggctgagtagggatgcaagcccagatacacctgacccccggccctcattcttccttccgctccaaggcctggcaggaccgcagatgtggctccacacaccaggcctgggacatggcaggtggctct

SEQ ID NO: 495 - DNA, 1220 bp, Artificial sequence
  DNA replication origin
accgaactgtctcaataaacgcggggagaaaggggccattgtgggcccgggcgccgctggccgctcttcccggcccagctcccctgggcttgcagaggcacagtcggtccccgcagctctcgccgccgccgcacgcggccagcctggctgtgcctgggaacagtgtcggccagtctggccccaggccagccctggccacaggtgccaatggcatcctcctccccaggtctctcccatgcccccgggggctcagtccactgctcaggtggacagggcaaggccggaggagctggctgcaggtgcgcaggaagggacaggcctggctacctgcaggcagcacctggggtccagacagccctcaacgagggacagtcaggtcagatcaggtggacccagaccctgctgcggttcctggaatccctagatgagctttgaaaacccaggggcctgtacccaatcccaagcagtggcctaccgtgcttgagctctgtggtgggcagagggctggggactggaccaggagcctccagccctgggctctgtcagggaccctgccctgtagggctggtgcttctggagtgagggaggagtagacaggaaccagtcctggaggtgggctccccactgggcctgggacaatgaggtgcccatcgccagtgatggtcacagcacctcgaaaaggcagagacaggaagattccagaagggcttctgattctgtgcagaagcgttgtagatggggcatggttgctctggtgtcaggcccgggcccgctgtctgttccggcaaactttaggggatcgagagcttactctggactcagctgggaggcccctcgagcctgggagcagggcaggaccaccatcggccccggacacaattgctagggtcctgtcctcacactctggctcagcccagcctgggccccgagctggaggcctgcagtggggacgagacttagatgttagttttaaaatgaaaagggaaaggccaaggaaaagagagagaggcccagacggtctcttgttttgcaaaactcaaaatagatttcagcactgtgctttctaaagacaaatctttgcactcttctgcgatcctcgcttgacctctcatggtttctggcaaggacagcctgttacgatttggcatcgagttatttaaaatgcataacggcggtgcgcaggctttgccaaaagctgatatatgttggtttctggaacc

SEQ ID NO: 496 - DNA, 958 bp, Artificial sequence
  DNA replication origin
cattttctcccacaatggtgacctgcaggctcagggcatgagggccgaggactctcactcgggaacccagagggtgatcggccacggtgaccggccggtgagctgtggaaggaagcgtccagccctctgtggactgccctgttcctcccaccatgctactggagaccatcccaccatgctactggagaccatcccacccgggtcggtggctgttttccggtggtggcaacgctccaatggctctggttcccttactggaatccttgggcgtagcctgaagagtggacagctatccacagcccagtgagtgccctgctgggagctggaactgttcggccctcactaacaccagtcctggggagcctgccctggccccaggtgggggtgcgcagccgtggccggcagccttggtttcttcatctgggaagtgggagcgactgtgcagatgagatgaggagggtggccctggggaggctggggtgtggtcgctgctcccctagcaggaaaccaggagggagtctggtgcatgtgtgtgtggggggttgcgtgtgcatgtgtgtgcgtttcctggctggtgtgcgtgcatgggtgagtgtgcacgtgcgtgtgtgggtgtcctgcctggcgtgcgtgtgtgggtgggtgtggatcctgcctagtgtgtgggtgtgtggatatgtgtacatgtatgtgtgtgtcttggctggtatgtgcatgtgggtgcgtgtgtgtgggtgtgtacatgtgtgtgtgtgtcctgcctggtgtgtgcgtgtcagtgtcctgcctggtgtgtgtgtgggtgtgtgtcctgcctggttgtgtgtgtgtgcgcacgtgggtgagtgtgtgggtgcgtgtgcacgtgtgtgtgtgtcctgcctggtgtgtgcttgtgagtgtgtgtatccttcctggtgtgcatgtgtctgtgtgtgcatgtgtgtgtgtgtgtggc

SEQ ID NO: 497 - DNA, 1673 bp, Artificial sequence
  DNA replication origin
ggcgccccccgggtcacagaaattcgcaaggtgtgagcagcgcctcgggactcacacgcctcaccgcgggtatcaggcctcctgggccccgttagggacgcaatgaggacccgttttctgcgggacagagggtttggccgagcaggaaaacatttagacacacccccacacacagcacacgtgggcatcagggctctgctgcactgcagactctccagcccccgcacatttgggatattctgccgccttctgcaccgcccaccccaactccttaccctcggagggtggaaacgggggggcccgctaaccaatgaacgttcgctgacttcatctggggtggggggggcctccccgctaacagccacattctctttgaaaaagataaacaactgggcatggggataatcatataaaccgttcacaaatccaaccagaagcaattcataaaaatgatctgcttaaaaccattgtgctgccttgccatccgttgtcaaaggtgtgaggggtgtgtgtgcacatgtgttcagtgtggggtgtgcgcacatgtgtgcttggttggggtgtatatgtgtgcaagtgtgtgtgctcggtgtggggtgtgtgtgcacgtgtgttcggtgtggggtgtgtacacatgtgtgctcggtgtggggcatatgtgtgcacgtgtgtgctcagtgtggggggtgtgtgtgcatgtgcttggtatggggtgtgtgtgtgcacgtgtgtgctcagtgtggggtgtgtgtgcacgtgtgtttggtgtggggtgtgtctgcacatgtgtgctcggtgtgggttgtgtgagtgcacgtgtgtgctcggtgtagggggtgtgtgtgcacatgtgtgctcggtgtggggtgtgtgtacgtgtgtgctcagtatggagtgtgtgtgtgcacacgtgtgtgctcagtgtggggtgtgtgtgcacgtgtgtttggtgtggggtgtgtgtgcatgtgtgtgctcagtgtgggggggtgtgtgtgcacgtgtgtgctcagtgtggggggtatgtgtgcacgtgtgctcggtgtggggtgtgtgtgcatgtgtgtgcttggtgtggggggtatgcgcacgtgtgtgctcggtgtggggtgtgtgtgcacgtgtgtgctcagtgtggggtgtgtgtatgtgtgcgctcggtgtggggtgtgtgtacgcgtgtgctcggtatggagtgtgtgtgtgcatgtgtgtgctcggtgtgaggtgtgtgcacgcacgtgtgtgctcggtgtgggtgtggacgtgtgtgttcagtgtggggtgtgtgtgcacacgtgtgcattcacttctaagttggggcgtgaggaggcatcatcagtgctggataattctggacttagaaggaaaagaaagccttgaggtctggggtgtgtgacgtgggtgcacctgggcctgtttgccgtccctgtccctttcactggcaaatcatcctcaggcagagctcagacatccacagggagactggggcctccgaccaggtgccctgggcagtgtatctgtgctgtccgcctgtgctgagatgtccgactgtggactccgtcgccctgaggctatttctgctgtcttctctttgagaaatgggatctccagtgtctggaaactatcatcattgccctgcatggtctttgtgaagaatgagaccccaaatc

SEQ ID NO: 498 - DNA, 1675 bp, Artificial sequence
  DNA replication origin
gggaaacacgggcccccactccctcctcattccctgacatactttaaccattttttgcacattaatccaattaatcacctttacattttaaagcaatttctttgcattaacttaggcatcagatctgtatttcggtctgatctaaaccagggtatgaaagggcgaggggcgggggtggggcgggaatagctgcgggtccatttgtcttctttctccggacttctcattttttatgcctcagcaaatttcctgattttcctcattagcaactaatttacaagtctcaacaatctttccacctgttccttccaccgcgggggttgtaagattggaaagagccacttgctcacttgtgtgatgctggttccaggggttccagaaaaccaggcaggggtggggcaggaggatggctgcatgggaacgggggcgatgccacagaggcactgggaggcaggggtggggcgggaggatggcaggagtgggggcgatgccacagaggcgctgggaggcaggggtggggcgggaggatggcaggagcgggggcgatgccacagaggcactgggaggcaggggtggggtgggaggatggcaggagcgggggcgatgccacagaggcactgggaggcaggggtggggcgggaggatggcaggagcaggggggcaatgtcacagaggcgctgggaggcaggggtggggcgggaggatggcaggagcgggggcgatgccacagaggcgctgggaggcaggggtggggtgggaggatggcaggagcaggggggcaatgtcacagaggcgctgggaggcaggggtggggcgggaggatggcaggagcgggggcgatgccacagaggcgctgggaggcaggggtggggcgggaggatggcaggagcgggggcgatgccacagaggcgctgggaggcaggggtggggcgggaggatggcaggagcaggggggcaatgtcacagaggcgctgggaggcaggggtggggtgggaggatggcaggagcaggggggcaatgtcacagaggcgctgggaggcaggggtggggtgggaggatggcaggagcaggggggcaatgtcacagaggcactgggaggcaggggtggggtgggaggatggcaggagcaggggggcaatgtcacagaggtgctgggaggcaggggtggggtgggaggatggcaggagcagggggcaatgccacagaggcgctgggaggaggctccgggttggcaccttcttcacctgtggcaggattcatgagtgggaggcccttcgccccggctgcacatgagcgcgaatgtgacccccggtgacaagcatggggacctcctccagcccccagccaccaggccctcttgtccctaaccctgaggctctcccacgcaggcctgaattcccagaaaactgggagcagctttgagttctgcggatgacggatttccggaatggcttttaacggggtcgttttcagaaattcctctcacgtaaagggcaactgctgggctttgtgtacaggctgaaggcctgggagggacaggggccttcaccctggctcctcctcctctatttttctcttgatcatattgttggaaaaatcgctttctcaggctccccggtggtagtagtagtagccatgtagaccagcaccagctgagccttccctgccaggtgca

SEQ ID NO: 499 - DNA, 1009 bp, Artificial sequence
  DNA replication origin
accgtagggtgtttccctgagctctgggtcagcctcaggagtgttttctaaccctagggattcagggtggtgggggccggatggaagggccttaggaatcacatttttatgaggtttgtttcttcccgaggttccaaaccatgggttttgttgaaaagaaacagtagaaaatccacacaatacctccatgggcccatttagcatcagggccagctgaggctcagaaagtgtccagggccacacaccacacttgtcacaagccttccaagtagaggctggagaccgcagcagcggcacagcacagggtctcaggacgtccctcttacaggggtggggaggcttctgttggactcatcagcctacaggttacagccccatgtccccttgcactggtcctgaacctgcaccctgggcgtggccacaggggtcagctcaggtgggagggggtgtgggcagcaaccacctggctccaggagtaggctcggtaggccagagcttctcatctgcagaagtggaacgacagtggccacctggcagggtccttctgagcattccaggaaatgatgttggcagagcactttccatgggccgggcaggtggcaggtggcccgggaaacacgggcccccactccctcctcattccctgacatactttaaccattttttgcacattaatccaattaatcacctttacattttaaagcaatttctttgcattaacttaggcatcagatctgtatttcggtctgatctaaaccagggtatgaaagggcgaggggcgggggtggggcgggaatagctgcgggtccatttgtcttctttctccggacttctcattttttatgcctcagcaaatttcctgattttcctcattagcaactaatttacaagtctcaacaatctttccacctgttccttccaccgcgggggttgtaagattggaaagagccacttgctcacttgtgtgatgctggttccaggggttccagaaaaccaggcaggggtgggg

SEQ ID NO: 500 - DNA, 1034 bp, Artificial sequence
  DNA replication origin
ctggagggaaggtggagttgtgacctcacccagtttatacatcaaagaagtgaagctcagagagtgagcaacttgctcaatgccacacagctagtcaggaacgagctgggagatgttcaaacagtcttgatttcgaagcttctcaaacgccactctaacgaccccgtgttctccctacaatgacaaaacacctgaaacagtttcctggcagtcagtaagggccttcgtcatgtccagcagaagaggtatgggtgggagtgtgaatagatgcttgatagatggatggagagataaatagctgaatggatgggtgggtgggtggatgaatttacgaatggatggaaagattgatagatgggtgaatagatgaatagatggatgagtgaatggatgggttggtggatgggtgaatgaatggaagatggtggatgaatacatagataagtggatgaatggataagtgtatagatacatgagtggatggatgagttaacagatggatgaggggatggatggatggattagtggatggaaggaaaaatggatggatgagtgctggatgggttaatggatggatgaatgaatgaatgggtatgtgaatgaatgggtggatggatgagtggatagatgggtggatggatggttagacggaaggaaggaagaatggatagatgaatgagtgcatggatgggttaatgaatgaatggatgaatggatgggtgggtgaatcaaggggtggatagatggatggatttataaggggatggatggatggagggatggatggaagaatagatggatggatggatggatggatggatggatggatagatggacagatggtggatgaatgcatagataggtgaatgaatggctggatggatagatgaggggatagatgggtacatggatggatggatagatgaatggatgatggatggatggacagaaggaaggaagaatggataaatgaatgagtgcatggatgggttaatgagtgaatggatgaatggatgggtgggtgaatcaatggg

SEQ ID NO: 501 - DNA, 1024 bp, Artificial sequence
  DNA replication origin
tgtaagactgcgtgtgtaagaccgtgtgtaagactgcgtgtgcaagaccgtgtgtaagactgcgtgtgtaagaccgtgtgtaagactgaatgtgtaagaccgcatgtgtaagaccgtgtgtaagactgcatgtgtaagactgcatgtgtaagactgtgtgtaagaccgtgtgtaagactccgtgtgtaagaccgtgtgtaagactgcgtgtgtaagaccgtgtgtaagaccgtgtgtaagactgcgcgtgtaagactgtgtaagaccgtgtgtaagaccgtgtgtaagactgcatgtgtaagaccgtgtgtaagactgcatgtgtaagaccatatgtaagaccgtgtgtaagactgcgtgtgtaagactgcgtgtgtaagaccgtgtgtaagaccgcttgtgtaagactgcgtgtgtaagaccatgcgtaaggctgtgtgtaagactgcgtgtgtaagaccgtgtgtaagaccgtgtaagactgcttgtgtaagaccgcgtgtgtaagactgcgtgtgtaagaccatgcgtaaggccgtgtgtaagactgcgtgtgtaagaccgtgtgtaagaccgtgtgtaagactgcttgtgtaagattgcgtgtgtaagaccgtgtgtaagactgcgtgtgtaagaccatgcgtaaggccgtgtgtaagactgcgtgtgtaagactgtgtgtaagaccgtgtgtaagactgcgtgtgtaagaccgtgtgtaagaccgtaagactgcgtgtgtaagaccgtaagaccgcgtgtaagactgcgtgtgtaagaccgcgtgtaagactgcgtgtgtaaggccgcgtgtaagactgcgtgtgtaaggccgtgtgtaagaccgggtgtgtaagaccgcgtgtaagactgcgtgtgtaagaccgcgtgtaagaccgcatttgtaagaccgcgtgtaagatcgtgtgtaagactgcgtgtgtaagaccgagtgtgtaagactgcgtgtgtaaggctgcgtgtgtggctgcgtgtgtaaggctgcgtgtaagactgcgtg

SEQ ID NO: 502 - DNA, 894 bp, Artificial sequence
  DNA replication origin
aagatagtgcaggatttcatggcattcttgggctaaaaacgtctagggctgatgtcacggtgccgggggacatgggaagcctgtgctgtgactcctccacggcactgccggcttctcccggagcaacgccgaggcccatgggtttctctgcatccctgtccccacggtggcctcaggctccgcaccatcccacagggccccgtctctctccaaatcccgacgctgtgtgcctcgccgagctgcccggtgctggctccacgggaacactcctcagagcatccactggccggtgcgctcacggttttagacgtgaggcctccatagaaacatccagaagctcctgagtggggaagcgcggcaaagcttcctggcctcacgcagaactctccacgcagagtggagcagcagaggtgcccagagccaggccacgtcccggggccgagcccactcaaccgtgggggtggtgtgggcagtggagcgtgcatctgggaaccttggagagaaagggcaggccaggaacgagttttggcgtttagatgataaaacgtgggactgagaataccaagccctaatgtgtggcgatcagacggtggcgtgtggcggggagacggtggcgtgtggcggggagacgatggcgtgtggcgatcagacggtggcatgtggcggggagacggtggcgtgtggcggggagacggtggcgtgtggtggggagacggtggcgtgtggtggggagacggtggcgtgtggtggggagacagtggccagttgccgcagagtccagccttgatattatcagacctgccccagcctccctccctgagactccagcctgagccgaggtccccagcacctgccatggtctaccccttcccctctgttggaatttaaaggata

SEQ ID NO: 503 - DNA, 1430 bp, Artificial sequence
  DNA replication origin
agaaggagggtgaagtgggcgccgccttctgtgcctctgggccacggtgggtttgcctttgtgtcttatatgtgtggccattaggtctcgctcagtgtggcccaaggtcattcttgagagcggctcccggggtgggcatgagatgctgtccagccaggggcctacttccaagtgcccagggcagcaggcatccctctgacgcaggcccttggaaagcaggttgagaaccttgggtcgggctgaggagtctcaggttccgccatcccacggaatcagagcagacccgatgcacgagaccccccacggcaccgccgcgactgcagggagctcagcgcagggtaccagagccagcatcgggggcgttggtgggcggtcctgtccaagcaggcctcctgaccccagcccagggctcctccctgccgctgccctgcaggcccagtccgaggggctgggggctgcctggaggaggcacccaagtcctcaggcacagctccaccagagggggaggctgccacacagcactgcctgggccatcaactcatagttttttcagcctccgcaataaacaccgtcagcgtctggaggattcgagtgtttgccaaggccatgctggtgggagaatcagatccctaaccccagggctcagactggacccgttcagttacatttctaggcactctcggggagccgggggggttggggctgagagactgagagacatgagctaaaattcaaaggcaaagtcttcagactcgggggccaggaagaccaggacagacagccctcgagtgggcgtcagtccagacggagaccccaccctgcaaacaaatgcgccacttagagctgttggtataggtgcgatgtgtggattgctgccgtaactgtgcgcaccgcggtgctgttttcaggatgaattcagtacagtccttccttataggatgagaactctggtttaggggttttgtagtttgggtcacccaaaggcacacttgggaacattaaaaacctcataggggaacatgacgggggtggctgtgtgacctgtgggtgggcaactcctgtgtctggcttcagttcatccacctctgggaggattacacttcctgttctttatctgcctcagtgaaatgtgacgaagttaattaattcaatcagcagcttggcatatgagctgcagaaaaggtggtattttgtgaggaagccacggttaggaattctaagtatcagagagtgaggtttctgaagaggctggatgcaggatgactctactcagaatttacaggcgagggcggccgggccgagggttgtatggaggcctgggattcgaactcaggactgtggcgcggggcctggctcctgtgggcgctacagaggtgcctcccgttagccccgcccccaccccaggagggcggagccaccgccaggcgcag

SEQ ID NO: 504 - DNA, 1758 bp, Artificial sequence
  DNA replication origin
cttggagcctcctgtacgggcactcgccctctctgtgacccccacttcatccgagggttccagggctcagggaggggcaggactttgcccaaagctactgtgcagctgagcagactcctggccatcttccacaagcttagggagcataggtttccaaggccaaggctgtgaacagtcaggcccttccccagagcccaccatcccctggaagaagcgaataaaaagcagagaaatagcaatgacacgagcagttacaataacaggtgctatggagtccgaaaatggggcgctgtgtgacctggggcctctctgcggaggggccttaagggagtccatgaggctgagccggagcaggatatggagcagagctgagccttccaggtggagggagcagcatatccaaggaccccgggccagaagggaggcaggggaggggtgtggaggggcatccgaggaccctgggccaggaggggaggaaaggggagaggcatagaggagcatccgaggaccctaggccaggaggagaggaaaggggagaggcatagaggagcatccgaggaccctaggccaggaggagaggaaaggggagaggcgcagaggggcatctgagaaccccgggccaggagggaggcaggggaggggcatggagggacatctgaggaccccgggccaggaggagcggaaaggggaggggtgtagatgggcacccgaggaccccgggccaggaggggaggaaaggggaggggcgtggaggggcatctgaggaccccaggccaggagggaggcaggggaggggcgtggagggggcttgcaggtcccatgtgcgtgagtccctggggtgctgacaggagggggctgcagacagccaagggcagaggggcttggacaaggatggaacagaagataacaaacagacatatttgggacatctcagaaggagaaggatcaggctatggaaatagggtccaaggacagtggggatgggctcattggcagggatgggaagcccagaagcccagggcaagggactgggcagtggagatggaaatggaggcggtggatatcagaggaggggtcaagcagacagatgcagatttctgagcacagagaaacctgagctgagccactgagtcccccagcctctctctgacccagggcccaggagggaggggagaccagcagggaggcgggaggcagccctggaatccctggtgccacctattgaggccgaggcgagcgggctgttaggactgggactgagggtggtggacagggatgagacaggagcagggctctgggtccggagaaattgcaaccatggcttgacaacagcttgtcccttacggttgggacagaagcctcagggtgcagggggagcggacaggaatgcaggtgtgggtgggaaggggctgaaaacggacaggagctagagggctaagctgctaggcacagctcatggggaggcctgacgggcctgagactgatgatgtgaagggcctagtaggggctgaggtcctgtcccagtagggggttggggagggacttggaggcttcccggtgggaaggtgagttgccctgcctgcttttcgctgccaggagaaggcagatgcagggatgtgtgactcaagggacccatccgaggttcatgggaagaggagaaggggtcgtcctggtgggagagggagaagcagaccgcagaggcccctcttgggtctgggagctcctaaaattgcagccaaggccagccctcttgccccg

SEQ ID NO: 505 - DNA, 834 bp, Artificial sequence
  DNA replication origin
tgggctgaggctggacaggtgcagggacttgcccggtgttgaacaaccacccagggaaggaggcccaggcagtgctgtcctcagcccagagccaacctcgctgggcagccactcggcctcccagattcagaactggggagaaaacaaaacccatggatggagatttgacaaaagccctgggggctccgcattgtttctgaccaaatttccctgcccctgccccaggggctgtgagaaccccactttgatttctcctgggcagagaccccttggagacagggtgggtatggcccgggacggccagtctagcctgcttctcacttcacctaggaacgggtctttctcaaggttccctttcattcacatttactgttttcaaagctaagcaacagccttcatgcctcagagaaggtcttagttcttagttggtgccagtgtgaccttaacgccacagaccttgctggggtgagaggtgggttcttccagctgcctccaggctccaggtgggagtcgagggaggcgatggaaggcctgaggtgggaaggacggaccttgttggaatgtacgccgtccctccgcacatgaaactctggcttttctctggtgtgaggttggacgctggcagtaagggtggggggactcaggcagaaaaccacttcctctgtgtgcaaacagagaactctgcaccctcccagatatacctgccccaggtgagacagggagccacacacttgaagacatgtcccctgagacagccactgggctgcaagcatgcacacacacgtgcacacacaccaggtcatgcgcacattcatgtgcacacgtcacatgcac

SEQ ID NO: 506 - DNA, 1696 bp, Artificial sequence
  DNA replication origin
cagggggcggctccagccccggtaaatgcaatcctcgatgcccgcatggcaggggcagctccagccccggtaaatgcaatcctggatgtccgcgtggcggggcggttccagccccggtaaatgcaatcctggatgcccacgtggcagggggcggctccagccccggtaaatgcaatcctcgatgcccgcatggcaggggcagctccagccccggtaaatgcaatcctggatgcccgcgtggcagggggcggctccagccccggtaaatgcaatcctggatgcccgcgtggcggggcggctccagccccggtaaatgcaatcctggatgcccgcgtggcaggggcggctccagccccggtaaatgcaatcctggatgcccgcgtggcggggcggctccagccccggtaaatgcaatcctggatgcccgcgtggcggggcggctccagccccggtaaatgcaatcctggatgcccgcgtggcggggcggctccagccccggtaaatgcaatcctggatgcccgcgtggcggggcgcctccagccccggtaaatgcaatcctggatgcccgcgtggctgggaagtggagctctcctacggcgctcagggcatcctggaggcaccacggtttcaacatcaagcgtccaggtcccacttcccagcgtccatgctgccgccccagtggggcaggcctcctgctgaccccaggaagactccaggcccccaggacctcatgggccagatcaagggtgggaaaatgagggtcaggggaacagggccccagcacccaggaagggtgggcagactcagcacccaggaaggttgggcagacccagctttgagtcccagcacccaggaagggtgggcagacccagctttgagtcccagcacccaggaagggtgggcagacccagctttgagtcccagcacccaggaagggtgggcagacccagctttgagtcccatgctttccatcctcttgcatctgagctgggcggcccctccactctgtgtgcctctgtttccccgagtgaggcttgcaggtctcctgtgagttaagcgcccagcacgtagaggctgtcggtatgaaaatggtgactagaattttgccaccagcacagttggtgtgggaggaacttgggggtgcagaaggctgaacccccaggccctcaggcccttatggaggacacggggttcctgagcatccagctttctctgggggtccatgtcttcttctttctcctctcctgcatgtcaattcaggaggctgcaggctcggttgggtccagttggtgaggaggtgccaccaagaggagggagaattgtggccatgttgccgtctgcagagcagagcaggtgctgatgggaaacaggaacccagggctggaagattccggaatgcttgcatgtcacccacctggggctctgccaggcagggggcggcccttcgggctgtggggacgctgtgctctctgaagggttaactgcagttgcggccccccttggtccgcaaacactgaccactttatcaacacgtgcttcccattacccacacaacttgcaatattcctggtgtctgtatcaacttgattcaattactgggaccactgtgagggaacatttccttcaggggagcaaaggccccagtgcctgtggatgaggagagggagctggaggaggagaggctgtcgtggggaat

SEQ ID NO: 507 - DNA, 1672 bp, Artificial sequence
  DNA replication origin
tcaagagaaaaatcaccgcttcgaacacagcaggtggaggcagcaggctctttggggaaccggcaaatttccccctctctgtgcctcctcatctataaggtggggatactgagaggctctcctcttccagccattttgagcatggaaggggcgacacctctgaggacccctgagccctgtgggctggcaggcagatccctcccaccccgtcgctccttccttcccatgtctacttccaaatgcctggaaacctgcccacctcaaggggagcccctgtgccgggccagccttggagtcgtagggtgtgatacccaggagaacagcgcccgggtttgtcacatcagcatgacacatgcactctgtgagttttcattcaggaaaaacaccctgcgctcacgagcacacttttaaagccagaaaccgctccaccaggggaggcacagcagcaggggcagccccaggcaggagtggggtcctggcgcctggggtgggagtggggtctcggtgccctggagggattgaggtctggtgacttggattgagtgagatcctggcaccctggagggagtggggtctggtgaccgggcaggagtggggtctcggtgccctggagggagtggggtcctgactcctgggtgggagcggggccccggccttctttccatcctttgccctggaactagagccgacaccacaggcatagcagctgtgaaggccgtggctgtcccatgttccatggacacatccgtgctgtcctgccccagggcctttgcctgtgccgttccctcccctggaaggccatcctcgcttctgccagcagctctggggctcaccgtggacccgcccagctcctgacctgcccgcaggccttgctaatgtgtctgtctcctcctgctgggctgtgggcactgggactgggcttccttcacccaagcccccagccctggcacagggtgggcaccagtgtgggtgaggaggatgaaatgatttctggaagcaccaaacaaaaacagcgtggggaagctgcaggtgggaactcgctgcaggcaggtacttgtgaatttgtcgacagacacccatctggcacctgcaggggctgcgttcagactccggcgggcatcgggacaccagagagcttgcccacctgcagatttccaagctgaccccctccctgccagcgcacccaggaatctctgggggcctaggcagggggcttgggcctcagtctcagcagccctggtcctccccacctgtgaccttatcaggggccttgcccgtggccacactggtgggtctccctccacgcagaggtgttcccacctgagccctgtagcaggggccgggcgacaagcacaggagggaaaaggcagtgggaccccagatgcagcatcagcctcctcctctgcagggcttggggtcttcggccaggggctcatgggcagccagccaagttcccctgcccctaggccctgtgaggaggtggtgagcacgcaaggatggcaggcccctggtctgctcttccactctagggaacttctgaagcttcaaagacccaggggcagcaggcactggtcaatgtgggaggagaacacccaggaggccctacttcctcccccagaaggggcagcctggaccctgcacatgacatttggcccctgccccttccagggat

SEQ ID NO: 508 - DNA, 1684 bp, Artificial sequence
  DNA replication origin
gtgactcagaggccctgctcacacagcccagctgctgctgtggcaggaagagcttctgagctacacctgctcagctggggctccagccaagtcctctgagaggagcctggctagctcaggtcctggggaggatggtggttttgagggagggggctggcacgccctccctgcccacttgatccagcccccagccaggcacatggctgtcccaagcacccgagggagacgaaacgcgtgcccttcctcatggagcctgactcgtgtcctctgcgagggatagagcctggacactgtggtttgccctcatcacttaccatgggagctgcgtgggtgtgatttgtgcaagaccaggggactttcacaaaggaagaggaacagagggatcggagaagttgggagaggggaatctgaggtgtgtgtggaagctccctcagagataacttaaccccgggtgggctgatgggggagcatgtgtgcacacacgcgtgggggtaaatatgcatgtgaatatttatgtgtatgtgagtgtggcagtacacatatgtgagtgtgtccatttgtgtgtgggtccgtgtgtgtgtgtacatttgtgtgtgggtctgtgtgtgactatgtgcatttgtgtgtgggtctctgtgagtgtgtgcatttgtgagtgtatgcatttgtgtgtgggtgcacatgtgtttgtgtttgtggggggcacatgtgtgaagggtacatatgtgtgtttgtgggcatgcatgagcctgtatatttgtgtgggggtgcatgtgtgtgtgtatgtacgtttgtgtgtgagtgcaaatgtgtgtgagagtgtttggaggtcacgtttctggggggttgcacatgtatgtgaggccacacatatgtgtatgtatgtgtgattgtgatgtgcccaatgtgtgggtgcacgtgtgtgtgtgggtgcacgtgtgtgtgctttgtgtgggtgtacatgtgtatgtgtgacgtacatgtgtgcggtgtgcacaatgtgtgtttgtgtatgtgtgcacgtgtgtgctgtgcaagtgtgcgtgcgtgtgtgtaggtgcacatgtgtacatgtgtgcatttgtgtgtgggtccgtgtgtgagtgtgtgcatttgtgtgtgggtgcatatatgtgtttgtgtttgtaggagcacgtgtgtaaagggcacacatatgcgtgtatgtttggcatgcatgtatgtacatgagactgtatatttgtgtgggggtgcatgtgtgtgtgagtgcgtacgtttgtgtgtgagtgcagatgtgtgtgagagtgtttggaggtcgtgtgtgtgtggggagtgcacgtgtgtgaggctgcacatatgtgtgcggctctgtgtgattgtgatatgcacaatgtgtgggtgaacatgtttgtgtgtgagtgcactgtgtgtgtgtgctgtgcacactgtgtgtgtgagagtgggtgtgcacgtgtgtgtgtgagcatgtgcacgtgtgtgtgtgggtggcagtggttttctgtcaaagccgagtgtatagcagtggcctgggagctcagagcgaggggaaacaggcccggaataaacgggctgttgattgactcgagttacatcattttcttcccctccggagcctataaatctcacgctccttgtaaaaacagaatttaaaaacaattgagcctcctgggcccctcagttccag

SEQ ID NO: 509 - DNA, 1727 bp, Artificial sequence
  DNA replication origin
aaataccccgggcctccctcacccaatgagggccctgccatagcccccaggccgagccaggtttctgcagggacccaggctgcaggtgagaaatgggcctgcccatgcctaggagctgcccagccctcgtaaacttttaccgcacctcaggcaacatgcatttcacacccggttaacttttactacaggagggcattggtcaggaggaagcagcaaatcctgctgtgagggacgtccctgcgtgggagtctgggctgggggccagctttcgagctcttcgggtgtgcggctgcagcctccctttcctgacttctggctccagagccccaggcctggtcctcctcagggcactgctctgaaacagccctcagcccaaccgggaagccctctgcctccggccacgcatgggccccgaagcctgcagggtgggcactcagggccctgtgcagaggacggccccctccccgacgtgggacttgtgtgaacaccaaatgcggcctgactgccaccgagagctagctattgttcctgacaccgggcagaggccttggaggcggccctgaaatttgggagggggatgagttgggggcgggggctgtctcatgtctgttttcaatatgcggccaatcgcagcctgcttcttttctgtttaggataattttatactgggtgggtgtatttagggcctgaacggcctgacagtgatgattaataccgtgcattaggcgattccagcgcaagtattcgggaacaagctgtgctgcgcggttctcatcagatggtcaggcccgcaggcctattaaaagcagcaggaggccttgaggcttaatcacagaggctgggcccgtggagggagaagaaagggaaaggaaaggagaacaaacgaaatgatagagcggagggcggaaatgctactggaatccgtgtcccctcccccagcccactgcgggcagcaaggggggcgccggcttcggaggggagggagggtcagtggagagcatctggggggagaaaaacaattaaaagctgcagccagccgccaggaccacaactctgccgtgggaagtcgtgggaggggtgggcacggctgggatgggggcagaattgaatcagtccgcaggtgggggcagcacggctgggtggaggggagcaccagcccatggcagagagggccaaacacggagggagaagggcccacaccctgcagtgccagggccgggcaggtggactgtgccaggcaggtggaccatgcaccggtgtgccagggttggcctggggctgtctgagctggtcatgctgcccagagtcattcacactgtgctccccattccctcgcaggagtgtctcctctcctctggaggtaaagtgtgtggtcatcttgctctttggggaggtccttagggtctctggagggtctgggcgaggctgaggatggtacagcccagctaccctcaggcatcagtgcctccccgcccccagctctcccttccataccaagtcacagacacagagtgagtgtgtgagttctcaagggggaggcggaaccccccaaatggctggagactgcaagaggaggggctatggtgagagagagcaagagagagggagggaagaagagaaacagaggggggggagagagggagaggagagacagagggagggggagacagaggaagggagagacagagggaggagagaaagagggaggggagaaagagggaggggag

SEQ ID NO: 510 - DNA, 1125 bp, Artificial sequence
  DNA replication origin
caccctcatatccacatttgtcaataagggaatggaggcacagaagagttaagtaattggcccaagtttgcacagccagaaagggcagatgggctgggcggtgggtgctggctgtccacctgactcctttcacactgtcaggaccagcgccatgcaccttggctcgccctgccctgctcactctcctctaattgatgatggtagccaacagcaactgaagctcttccagggcctcacccaggatcagtgttcagtcagggctcactgaatgtttccatgaatggatggatggatggatgaatggaaggatgggtgagtgggtgggtggatggatggatgggtgggtggatggatggatagatggtggatgggtgggtgagtgggtggatggatgggtgggtggatggatggatagatggtggatgggtgggtggatggataaatggatgtatggatggatgatgaatggatgaatgggtggatggatgcatgggtgggtgaatggatgggtggatggacaaatggatgaatggatggatggtgaatggatgaatggatggatgattcaatggatgcatggatggatgggtggatggatggatgtggaatgaatggatgaatggatggtggatggatgaataaacgaatggatggatggatgggtggatgggtgggtgggtggatggatggatggatggatggatggatagatggtggatcggtgggtggatggacaaatggatgaatcaatggatggtgaatggatgaatgggtggattactgagtggatgcatggatggatggatggttgaatggatggtggatgggtgggtggatggatgaataaattaatggatggatgggtgggtggatggatggatgaatagatggtggatcggtgggtggatggacaaatggatgaatcgatggatggtgaatggatgaatgggtggattattcagtggatgcatggatggatggatggatgaatggatggtggatgggtgggtggatggataattaatggatggatgggtgggtggacggatggatgaatagatggtggatggattaataaatgagtggatggatggatggggagcagaccctcccctcaacttgccc

SEQ ID NO: 511 - DNA, 1461 bp, Artificial sequence
  DNA replication origin
catgggacagtgttcttgagcctccggtctgtccccgaccctctcgggtgcagaggcctggagaccagaggcaacaactcccccaggggtcctggtcccgagtacacgctcaggctttgctgccctgcgggtggggtcccctctctggcctgacagcctctcctcccttgtcactctcatttcccagccatttctccttgtccccggaggccgggtccccaacccctgaccaatttaatagtcacagggtgggagttacacctggtggcccctaaagggaggagcttcccctctgcctggtgggccccctggggtgactgaggaggtcttggttaactccttccttccacagaggggcacctctgaggggggccaggtgggcgctaacccttcctccaggagagccaggagaagccctggtctgagggccctgaaccagcaatgagtgcgctgagaagggtgtgccggaagggcatgcaccgggaggggcatgttaggagagggtgcacggggaggggatgtgttgggagggggtgcgccaggaggggtgtgttgggagggctgtgttgggatgaatgtgttgggaggggtgcatggtgagggattgcactgggaggggtgtgctgggagggctgtgttgggatgagtgtgttgggaggggtgtgttgggaggggtgtgttgggaggggtgtgctgggaggggtgtgctgggaggggtgtgttgggaggggtgtgctgggaggggtgtgttgggaggggtgtgctgggaggggtgtgctgggagggctgtgttgggaggggtgtgttgggaggggtgtgctgggaggggtgtgctgggaggggtgtgttgggaggggtgtgttgggaggggtgtgctgggaggactgtgttgggatgggtgtgttgggaggggtgtgctgggaggactgtgttgggatgggtgtgctgggaggggtgtgctgggagggctgtgttgggatgagtgtgttgggaggggtgtgctgggaggggtgtgctgggaggggtgtgctgggaggggtgtgttgggaggggtgtgctgggaggggtgtgttgggaggggtgtgctgggaggactgtgttgggatgggtgtgctgggaggggtgtgctgggagggctgtgttgggatgagtgtgttgggaggggtgtgttgggaggggtgtgctgggaggggtgtgttgggaggggtgtgctgggaggggtgtgctgggaggggtgtgttgggaggggtgtgctgggaggggtgtgttgggagaggtgtgctgggaggggtgtgctgggaggggtgtgttgggaggggtgtgctgggaggggtgtgttgggaggggtgtgttgggaggggtgtgctgggaggactgtgttgggatgagtgtgttgggaggggtgtgctgggagaggtgtgctgggaggggtgtgttgggaggggtgttttgggaggggtg

SEQ ID NO: 512 - DNA, 907 bp, Artificial sequence
  DNA replication origin
ttgttgtcactgttgcctctgaacgggcagagtggcaacccctaggacttttcttatttgctgtgacccccactcctccgaggaccaccgatgaggagacctgacctgctgtccactgtggagagacggtgtcccctcaaacagcctgaccatgggtggcggctgcaggccccccagcctcccccactctggccagtagctactctgggttctgaattcaaaccagcagcatcttgggcaagcttcctgggcagcccagcccagacagggcaggagggagggcagggggcaggggatggggccacgctacactcaggtccctaaagtagaaaggctatgtctctgtgggcaggagtgcccttgggcaggtgtgtcctgctggacaggtgcatatgggtgggcaggtgtgtcctgctggacaggtgtatgtgggtgggcagctgtgtccttgggtgggtgtgtcctggcaggcaggtgggtcacggtgggcatatgtgtccttgtgggcaggcgtgtccttgagcaggtgtatctgggtgggcaggtgtgttcctggacaggtgtgtccttgggcaagtgtgtccttgggcaggtgtgtcctggtgggcaagtgtgtccttgggcaggtgtgtccttctgcaggtgtgtcctggtgggcaggtgtgtccttctgcaggtgtgtcctggtgggcaggtgtgtccttaggcaggtgtgtctttgagcaggtgtgtctgggcgggcaggggtgatggataagggagtcacaaggacccaggggagtcaggatgagacagtgacctgtccaagtgaaaacagtggaggctgactctgggcacctcagatgctcggcatgcactctcccgggttcctagccatttcgggcctggtgctggctgaccctcagat

SEQ ID NO: 513 - DNA, 1318 bp, Artificial sequence
  DNA replication origin
ctccgagggcagcagacttgccgggggaccctcccctccggcgcggacactgccctggagccgccgccgccgcgggagggtctagcgcgccgggccgcgggctccccctccctggccctggacctgcaggaggagggcgccttggccatgggacttggagccacagtcggaattaatcgctattactgctgatcgcagggcccgaggcggggcggggcgggggcgggggtccccgacctgcctccaactgcttcgggggtcagaggtgaacgggaatccgcgcaaacttttccacactcgccggccccgcccttgccagcggcgcggaggtgcagacaaaagctggctgcgtttttacagcctgtccccggtgtcacaaaggccttatcagccagacgcgccgagaacgccactgttcctggccggcggggtcaggcgacttcccgggacaaagaccgggccggccgcggtgggaaccgggcgtctgcggacccagcctgcgccggctcctggctcgagagcgtcacaaattgcgcatttactgtactgcagaccccttcctgcagggcttgtcataaattatgactgcagctccctacacattcctgccgtctgcttataatcctcctttcctcgtgagacccgcggtgggtcctgctcagaccgcgctaagtcagcatggtgggagaagtctgttgaagcaaaaataaagtctggagtctctgatagcctttagcccccagcagcggcctcagggaggacgactggccgccggaaaggaagaagaacagtatatttgcttaagcgacagcatctaggcatctatgcctttttataaacactcgcctccgctatgctgttgaagtcgtgcctaagtccccgggttgtgttgcacgggcaaggctggaattttccctttggtttaaggatctgagagggtggggaaccctcttaacaacagctgagtttactagcgccaataaatgtctgctgtaaatggctttaaaaaaataatgatgccaaacagactggatctgaagttaagtccttgttccaacacttcaggttctctttgtaacaacaatgacttgactgaacgtgggtgaacaacacgaaacacaggtcctccgaattcaaactgtatttagcatgaccctgcctattttctcccccttttatcactttccagacacaaagaggcggcttcttgtaggtaagtggacttctgggacaaataaatggccacgttctcaacagaaggcagagaaattgcccgagaagagcctagagtcagcccaggccacgttcattcagacag

SEQ ID NO: 514 - DNA, 1534 bp, Artificial sequence
  DNA replication origin
gcggttctcccaggagcggggatgccatgagccaggaaggctggggcgggcaggactgtgtgcccactgtcagcttggcgccttgctgctgaccccacaggcgggagtctgggatggaggacacccttgagaactggtgggctcaggtagattctgcagcctggtcaagccctgggggcgaggggacctccatttggaactctgctcactgagcagtgctgttgggggctgtgtcactgcagcttgccaggggcctcctgaaaagaggaggttgtcttggggtgtggaagtggtggtcgagatgaagaaaattagcagttcacaaaggggaggccaggccatctgaggcctgggccagggcacgggccatgccgccagcacaaggaaccctgtgtcttcggtccgggagtgtctggcggcaggtgtgtttctcttgggggagtcactgcccaccctgcacatgtgggtgtttgagactctcttctgatcacagtaactggggagcttccagggaactgcaggcctggccggaggactggctgtgaggctggggagaggcccaagggaaatccacctgcccctgcgagacctggggctgaggctcctccaagaaaacagagtgggtctagactcagaaagggaagggctcccagggattgaggggacgtggccatccttgtgggtgacactcccatccccactgaccatcctgtgtcaggccaggctctccagcacctggacctggctggggtctgtggctggacacagctgggcacccccgagacagggctgggtgtggcccctgcatgctcctcccccatgtcccccacattgtgaatttcactacaatctgccagtcccaactgactccagaatgacaccaaggaactctcaaaagacacacataagtcacagcgtgacggtaatgcccagtgtctgctactcccaagacacccagacaggaactgcacgaaggaggacaggcaggtgcacggcctctgtcagtagtgtgtgaagttcccttatggggcgtcaggtaagttgctaaaattatgaggagatgtaaaagtggagaggagaaactggcccatggtaacttcttcaattaaacccattattattaggaccccagttttgtatcatcttatcaaaaaaaaaaatcacacagtggctgaatcattgtctcttttttaaaaaagaaacttgagccactgtattagaaaatcgggcccaaagtgcgggatgagaagcgccagctgggacaaagcccgggtgaccctctgagcggtgccgtgagtggcattgtagcaggcgcaagtggaaggggctgctgagtgactgcccggcctggctgatgcccgtggggcaggtggcctggcccgggccctgggcaggagagaggagggtcagcgggcgaggctgaggcttctcgaggggtcccgttagagggcaatgtggaccctggccgcccgccccttggctccactccaggccgcaccacccaccccacccaccacctccctctccaccccac

SEQ ID NO: 515 - DNA, 1713 bp, Artificial sequence
  DNA replication origin
caagtgactccagtgagagcggcaccagttggtgcctcagatgacaacgtggagttctatagcaagctcaggagcaagaaaattggacctaggtttaaacttccttgcctctctgggcctgcagacgagcgttctaaagtcccgttgcatcgctttaatgatgtgcattccaagagctgcagcaccctgggcagctggagcccactgttcccaccacactgcaggctgctccccatccctcgtggatggagtgaggacagggaaactcaactggccctgccccgcctcggcgactcttgcgcttcttgtccacacactcggctcacctttgtgccttggctttttgctaaggggataaagcttaaaggaaaaccccagatgtgggcagatcgggtttatgaagattctcattcccttagaaattagatcagacacaagcaacgcagccctggtatcccccaggccactgcacagtgtcctttggtgcaactgcagaagggggtcttcaggcttggagaggagaatttgcaaacaagtgagggagtccaaatggcgtggccctttccaggaatggtcagttgcttgcaggagaggtcacagctgcgcaggcgctcatggccagactccgtgtccacctgctgggtgacacacccatggcacaggcagatggaagccctaagcccccacctcactggccacacagacggagggggtgtcattcctggtggtgtctttcccaccaaggcgctcacctgtgccctgggctgtgtacaaacgtgtgtgtgcatgggtgtaagagaaggggtgggtagagcgagaggagaggagaacaggacagagaggaagtataatatctgggaatgaggtgcacaggctcccactgggcactttgcagaaagagcctttgctttaataagtatgcacgtgtgagagtgtgtgagtgtgggcgcgtgcaccggtgcgtgtgtgtgtgagagcgtgtgtgtggacacatgagctggtgcatgtgtcggtgcgtgtgagagcgtgtgagtgtgggtgtgtgagctggtgtgtgtgtgagtgcatgagtgtgggtgcgtgagctggtgcctgtgttggcatgtgtgagagtgtgtgagtgtgagcacgtgagccggtgcatgtgttggcgtgcatgagagtgtgtgagtgtgggcgcgtgagccggtgcatgtgttggcacacgtgagagtgcatgagtgtgggcgcgtgagccggtgcgtgtgtgtgagcgcgtgtgggcgcgtgagctggtgcgtgtgttggaggatgtgagagcacgagggtgggcacgtgagctggtgcgtgtgtgtgtgagagcgcatgagggtgggcgtgtgagccagtgcttgtgttggcacgcatgagagtgaggggcgtgtgagccagtgcatgtgttggcacgtgtgagagcatgtgagggttggcgtgtgagccggggcatgtcagtgtgtgtgagtgtgggcgtgtgggccggtgcgtgtgtcggcgcacgtgacagcgtgagtgtgggcgcgtgtctgtgagtgcgagtgtgggcgtgtgagttgatgcatgtgagtgtgtgagtgtgggtgtgtgtgagtgagtgtgggcacgtgagttggtgcgtgtgtgtgtgagagtgtgggcgcgtgagttggtgcgtgtgggtgtgagagtgtgtgagtggggcacagccagggtgtgctt

SEQ ID NO: 516 - DNA, 1166 bp, Artificial sequence
  DNA replication origin
tgtcggcgcacgtgacagcgtgagtgtgggcgcgtgtctgtgagtgcgagtgtgggcgtgtgagttgatgcatgtgagtgtgtgagtgtgggtgtgtgtgagtgagtgtgggcacgtgagttggtgcgtgtgtgtgtgagagtgtgggcgcgtgagttggtgcgtgtgggtgtgagagtgtgtgagtggggcacagccagggtgtgcttgtttggccggcagggctgagtgcctccccgagggccaggtaggtgaccgaggggtatttacagaccctccctctggagggtcacctgtccatcagcagccctccagagagggcagatttgatgaaacgagacaaagttcttctcccctcagccttgaaaacgccccgccaggctggacgagcaggaaggtagagcggttaatataaatagatatcgtgatgaaagaacacgatcatcttaggggaaaagctcccagctggagtcgaaggagatcaggcagccgacgatttctggtgagcaagaagcttgctgaaatcattgtttccaccacgccgtgtttaggaagcaaattgtcctacagagagagacactcgccgggatgtgtgtgtgtggtgtgcgtgtctgtggtgtgtgtgtgcgtgtgtgtggtgtatgtgcatgtgtgtggtttgtgtggtgtgtgtagtgtgggtgtgtgtgtggtgtgggtgtgagtgtgtgtggttgtgtgtgggtgtgtggtgtgggtgtgtgtggtgtatgtgtgcatgtgtgtggttgtgtgtgggtgtgtggtgtgggtgtgtgtgtggtgtttgtgtgcatgtgtgtggttgtgtgcatgtgtgtggtgtggttgtgggtgtggtgtgtgtgtatgtgcatgtgtgtggtgtgggtgtgtgtgcgtgtggggggtgtggttgtgtgtttgcatgggggggtgtggggggtgtgcatgtgtgtgtgctgtgtgtgcatgtgtgtgattgtgtgtgtacgaatgtggtgtgtggttgtgtatgtgcatgtgtatgaatgtgtgtggttgtgtgtgtgcgtgtgtgtggtgtgtgtgcatgtgtatgaatgtggtgtgtggttgtgtgtgctgtgtgtgtgcatgtgtagatgtgtgtgtgttcctcccttttttcttagaaaaacaagaggcaa

SEQ ID NO: 517 - DNA, 2129 bp, Artificial sequence
  DNA replication origin
aggagcacccgtcctggcctcccaaacacggcccgggccaggcacctagcttaggagcagccaagccaggcatccctcctgaggggtgcagacccccccaagaacaggggcatcttcctgaagtcagcaaaggccgggggacgaccttggaggagcttgaaagagacaccaccatgcactgagcccgcccagcaccgccgcggccccgccccagggagagccagtgaggctggggtgctgaatacctgtagatggggtccatgaagaagggcgagggcttggcgtagtggagcgggggctgctggggcatccgcgccgggcacacctggggcagcccctcgccggcgcccagcttgcgttccccatagacgtggttcttgcggggctcccgcccgccgccgttttggctggcacgggcccggctgccgatgctcaggtccagcggctgctcctcgccggatgcgggggccgaggggcccttgggcatgggcaggatgggcttcacgtctttgggcttggtggtgagatcaaaggggcactcggcactggggccgcccaccttgagggcgtcccggggtgactttggctcggccttgaccagcaagttgtgggcgagggctcggtccgtgaaggggtaaagggagtgggggaagttgggcaggaactggaaggggaacgccgagtggtaggggagcgagcccagcttcttctcctgcatccccatgaagccggggccaaagtacttctcggcaatggatgcgatggccttgatggagtccccggcggcgcccgttgcagtcagcagctgctcgtcgggtggcgggaagaatgagtgctgggaatagaagacaggcacctcggccacgctgttcggggcccccgggggcgccaagccgcccccaaacttgggctggccctcggcggacttgcccttgcccttgtccttgtcagggtcgctgtccacgtcgctgtccaggtccgagcccgtccccgtggtcgtgtccaggtcggtccccgtggtggtgttgacgtcctcaaagtcactgccgtccgacatgtcgctgctcctggtcttcagcttctccacacaggagtcctccaggcggctctcgaacttctcctcgggccccgcagctgccgtcgtgccctggctgctgttgctgacggcggagaccaggggcagggctgggttccccaggggactggggagcttggcgtcctgggtgtggttcagggggctcttgagcagcgatgtgggaggtagcagaggcggccgggggtacaaggatggagggaagatgcccgggaagccgggggtgagtgcggggaacgtgggaggcgccgtggagaagggcaggctccccgggtgcggcctggagggaaagtactcgttgaagcccaggctggcgtgattgaggctgggggagggttttgccttgtccatcatggggctgggggtcaagggcaggcccggggcaaagatgccgcccggcgtgtaatggttcttgccctcgcagaagcgccggtgcttgttgagggaggaggtagtgctgaacatctggccacagtccttgcacttgatctgcgtgcggcagtcggcgtgcatccgcttgtgccggcacaggttggagaactgcgtgtaggacttgtggcagacctcacctaaaacatcagcagaagccaagacaaacccgcatgaaatgaccgggaaaccctgctgaaaacgccacatgaaattactgggaaagccagccgctggaggggcgaggctggggctggaagcagtctgtctgggtgcatgtgcgtgggcatgggtgtatatgtgtgtactgtgcatacatgcgtgtgtgcgtacacacaaatacacaggcaggtgcatgtgtgtctgtgtgcgtaagtgtccgtgtctgggcaggcgtgtgtgtattctgcaagcgtgcgtgtctgagtgtgcacacgtgtgcacacatgagcatgtggaaacatatgtgtgtgtgcatgcgccccacccaagactggcctccagtgaccagcacagatcggggggccggttggtacagttcctgctgtgccgccaccttctttgctggagaatgggcttgccactgctgtttccaccctcctacccc

SEQ ID NO: 518 - DNA, 1077 bp, Artificial sequence
  DNA replication origin
ggggctcgggggccctggccaccccccctgacctgcccatactctgttgttcccctgccaatggcttctctgggagtgcagcaggcacggtcacagcaaggtcctctcaaggccctccgcattgcaccagggccaggctaccctgcacgttctccttccttttggagctcacgggcgtgttattttacgcagtgagaccatcaatttcactggccgcttgtcagcttatttacaacgcagaccccagctgctcggagaactctgctccctcgcagccctgggctcacggctcccctaaatttcaaatggacttctctgtctgggccatttatttagattagaagcaagagagggccacgttcagggctctctgcaaccaaattgaacgcacagccctgttcgtggctctccccggccccagagcttcacacaagggacttgctctccagttttatgaacaagcttcttttccaatcccatttcttacctcggatccacaattgctagggtttatgcaagagccattaggtggactttctgcaaaagtctctgcatttccaaagaaaccaggaactgaatgagccgtgtttgagcacacatgcagacagacaggcagacacacaggcaggcggacagacaggaagataggcaggcaaacagacaggaagacagacaggcaggcagacagacaggcaggcggacagacaggaagacagacaggcaggcggacagacaggcagacagacagacaggcaaacaggcaggaaggcagacagacaggtagatggacagatggatggacagacaggcagacagacaggcagggcagacaagcaggaaggaagataggcaggtggacagacagatggacagacaggcaggcagacaggcagacagacaggcagggcagacaggcaggaaggcagatagatagataggtaggcagacagacagatggacagacaggcagacagacaggcagggcagacaggcaagaaggcagacagacaggcaggtggacagacagatggacagacaggcaggcagacagacaggcagacagacaagcagatggac

SEQ ID NO: 519 - DNA, 889 bp, Artificial sequence
  DNA replication origin
cccacggccagggaggcggctggctcctcatcctcctcatcctcgtaggcggcctggggctcgggtgcgggggacacggtgtcatcctgcgacttcccggccaggctgtcctcatcgtcctcctccaggtcatcgtcgtcctcctcctccacgtcctcctgcttctcactggctaggcctggacactgggcactgccgtccacgatctgcatgtccgccctgaaatgatgcaggaggagattgactgagtttgggtgtctctgtccttcccatggacccccaaaggctggtgactccgctctgcccccactgcctcccccgacaacactcagcccccttcctgagggagctcccgcgggtccctgggcccagccactgactctgcagagtgagaggcacggaggcctgggggcgatcccgggagaggagggcaagcgctcggggcggtgggggcagggcaaggcccagcagcaagctgctatggccgggaggacaccagggccggggcggtgttggggtggaagcagtgggcagtcctgtggggaagctggacctgcactggcacgggggttgggcagtgcacgaggggcaccctcagggcagacttcagggggaaggaattcaggctgacaactcgaggacgtgggcactggcccgagagccgggagccctggagggctctctgggatctggagagtgagggcccaaagcctgctgtgagcagtctgaatgcaccaggacaagcttgcttcggagcctgtggggggactcttctgcagcccagggctctcctgacttccctcagggtcactgcagcccggcaggacccctccactccggttcctcagtattaaataaaaaagaacaaagcgtgcatgggtgtggctgg

SEQ ID NO: 520 - DNA, 1312 bp, Artificial sequence
  DNA replication origin
ggtctggcaggtggggaggatctgttgctggtggtgtaggtcctgggagttcggggctgccccctgggggctggagtggctgaggagggtggcacgaaggggtcaggggtggggagcttcagggagtggggaggggaggctgcgggcaggagggtccgtgagggctcaggtaggtgagaggttcccataggcatggccaaggcggtagctgtggtggtggctgatgtgagcaggtgtcaggcatcataaagatcagttttataatcagcctgggccactctcaaacaggggtcctcggaagaagatgctgctgggagacggtcgaaggccggcagtgttgactccaaagcgaggctgtcgaccgcgtgtgggtaataactgcccacctccctggaaccccagccaggcctgtgttccaggcactcgggggtaagggaggggagaggtggaggggcacagctccagaggcccggcccactgggaggggtggacaggagggagcccaggagacattcagaggccctgggtaggggtgggggtgggaggccaggtcacctgggtgacatcagttaaactctgtgtcagcagggagccagtgggggcctacgtgggtgagacggtttggggcagtcctggttggggaggctgggctcggtctggctggacattcccctttgaggtttacgccccctaggcttctgggtcagagcagaatcagggtaggggaatggagcctctcccagaggcaggagggccccaggaaggaatcccaggggcagtctgggggtagacaagagaagcccctgaggggactgggtctgctccagccccggggcctctagctcaccccctatcccacccctgtggctgtcccttgtcagggcagcatcaggccatgtgaggtgctggtggacacagacttcagggaggctgacatggggagggccacccttaggaaggggtgggttgaggactggcctagaacagaggcccccagaccccaggccatgggccaggaccagttcttggcctgttaggaaccgggccacacagcatggggggcgcagcggaacccagcttcctctgtgtttacagccacgccccatcgtctgcatcaccgtctgcactccacctcccatcagatcagtggcggcgtgagattctcatgggggcgggaaccctattgtgaactgcgagtgcgagggatcgaggctgcacgctccttgtgagcatctaatgcctgatgatctgtcactgtctcccatcacccttagatgggaaggcctagttgcaggaaaacaagctcaggact

SEQ ID NO: 521 - DNA, 1099 bp, Artificial sequence
  DNA replication origin
cattgcccccgctagtccggcaatgtgtaaacacttcatgtggtggtgataagaacataaaaatgctcaacaccccagactcgggtctgggatcttgttccgagatcagcctctgcgtgggcccatttggctgcaccaggagctgccgttgaggacctcagccccccggcttccatttacctacaattagagcctgctctggccccttggtggacttgggaggccctggtgatcccagaatccctgctgggtaatggccctcacagcaagtgaccgattcactcatcccttcattcattcatgcaggcagccttctcccaagcatgggccccaagccaggctttggggactgagaggtgaatcagggagcccccaggagtcctcacagccccaaatccagtgcatgtggtatttttggactcagtggatggaggctaaggggtcccctgcgtgacctggggcctgaagatgccggtctacgaggaggcttagaatcgctgagcacttcagctgtgctggaggaaggtgagatatttccctgcctgtaaaaaagcgtctacagctgcctctccttacacaaatgcgaagggatagatacgggggtgtcagacaggcagcccagggctcttggcgtgtggaagaggcgctgccctgccccctcccatgtggtctggcaggtggggaggatctgttgctggtggtgtaggtcctgggagttcggggctgccccctgggggctggagtggctgaggagggtggcacgaaggggtcaggggtggggagcttcagggagtggggaggggaggctgcgggcaggagggtccgtgagggctcaggtaggtgagaggttcccataggcatggccaaggcggtagctgtggtggtggctgatgtgagcaggtgtcaggcatcataaagatcagttttataatcagcctgggccactctcaaacaggggtcctcggaagaagatgctgctgggagacggtcgaaggccggcagtgttgactccaaagcgaggctgtcgaccgcgtgtgggtaataactgcccacctccctggaaccccagccaggcctgtgttccaggcactcgggggta

SEQ ID NO: 522 - DNA, 1030 bp, Artificial sequence
  DNA replication origin
tggggtcgtgggccgggcaccggtgtgccagccagaggcactgaccaccctcctcccaggacctgcctccctggcctgggcggccgtgagatcccgttgcgggttgaggagacaccacaggctctggggctgtcacttggcattttctcaggtgtcataggtagaggggcggcctgccctgcccctcctgctctggtcgccccacccactagtcccccaatgtctgccctgtggctggggctgcctgggtgtcaggtgccatctgggcagggcacaggctggcctcagggatgggtcccgtgggccatccatcccctgggagggagggtggatgagggaggagctaagagttgacccctgtgggctgcagcctccacctggagccgcctgtggggaggttccacttccaggcagctcttgggaaaggcaggtggctgctgccctcctgagtccatgatgggtactgcaccgacgaggcccggcctgccggagggagctggggtgtcccggagccttgacccgtgaggggactgaggtgcggtggggtcactgaggcccagtgaggggacagaagccttgccccaggccagtcagcaggacccaggttcctgattcccactgagtgctttcctgtaaaaccctctttcagtagctgcctccaagttacccccaaccccacaccttctgtccagcccctgctgggcccgttcagccaccctgggtctggcttcgtctccccatgtcctgctggcttccagaggccactcagcgtgtgcttgggatggtccctttgctggggatgtcacctgagctggcgtcaggacctctctgtgcctctgtcacctctgctgtaaatgagggcctgatgctggcgcaggagatcgccctggcatgaggcctaagggagaggttggaaggaaccagcttggagacctaaggggctcgcaaggagagagagactccggggaggcctgccagtgggaggcctgccagtggggtcggcccgtggcacttcctgcacctctgtggt

SEQ ID NO: 523 - DNA, 1634 bp, Artificial sequence
  DNA replication origin
tgtgacgcaggcggcgccgccacaggtgcccgggacgcgccccgccccctccccggccctccccgcccgggccctcggacccggagcagccccgcccgcccagcgcccacctgcggggccgcagccgccgccctccagccagaccgcgcaggaagcggaggaggcgccccgggccggaccgcgctgccgcaggagcgaagcggctgcaggacaggacaggacccggcgctggaagctgcaccgccagcgcgccgcccctccgtccctccgccccgcggcgcaggtgagcctgggggacaggtgagccgggggacaggtgagtcggggctcgggggagccgggtggggggattagcccgggggaggcgccgggaacccggggcgcttctcctccccctcgcttttcccgcaagccccgccccggcagccgcaacaacttcgcgaccctcctggggctccgccggggcgggagaggcggggctcgcgggctgagccggatgcgactttggacccgcccccccacacacaccaggcagccccctgcttgcccccgcccgctcgctcgctgccctctcttgaccccgagtggccgcttcctcttcctaaaggaaaacttccatgcaaccggaacctgggttcagacttgagcgccgaggactctggaagccccagggagtttgaaagagcatggggtggggggcggaacagaacgaccctcccgggagctctttggggaatctgacacccaaacctgctttggccccaaaatttcagaaaagccccgagaaggaagaaccccacacccaagacaaacccaaaccatacgcccctcccccacccttgaccttggtgggcggtggcagggagggacctgctttgtctcccctgagaagggagatggggagggggaggggtgcgtcccacctaccagggagccgtggccgcttgtcttggccgctcagcctctttctgcgtctgtgaaatgggaacagtatcccttttgagatttgagcaggtggggggactgagggagtggcagcgatggcaggtcttggtgacctctgcttctgacctgaatcaaggcctgaatcttctctgtgtccttgaggggaacagtctgtgcaccacctaacatgggggcctagggggtgcgtgtgggcctggctgggggtccagcaagagggtccaggtgctgtgcctggctgcaggtcctgacccctccgtggcatagttcccaggtgtgtgggtttcaggctcacatcctggctctttgtgaactaagcagctcttggggcctcggtttcctcatccgtaaaatgggactagtaggagtgttgagttagaagatgttgacccacaagtgtgccaggcagacgtggaccctgctgtgcgatgcccacagccagcagaggggaacagggtgagatgaaaggtactgtccagagcaggagccatgggctgaaggtaggcactcctcacccaccccagtcttgctggaagggaggtgtcttgggggcttcctggaagaagtaagtcacctggaccaaagtcacctggagggtgggatgggccctccctccacctggacactggggagaaacccttgttggggggcctccctgaggtcgctggctc

SEQ ID NO: 524 - DNA, 1816 bp, Artificial sequence
  DNA replication origin
cagtcagaggtgaggccacgccacagccttccacacagggtcctctgccaggaaggtgcctccccccgtgggcaccgcactgtcatcagcaggcccctgggagcctgcgctgcaccttgatgtggatggtttagagcagctgctggctcccgcggagtgtgatgacctctgagggtccttgaggccaccaagagctggccccagggccgggctaagcactggggctgtggcatcctggtcgttcttaagacgtggagcacttcccaggggtacaaccctgccccactgccaagcaccaccccaccaggacgtccaggcacagagggctgcatgatccaggcagtggtggccacaagctgctcacctgtaggcaggaagcctcgagttgcagctctgggtcatgttccacccaaaggtgtctggtggctggacctgagctctggttgcagggcctggaggtagagaggctggacatgcagctgcagccatgcacgggggtatgtgcgtggggtggggtggggtgtgtgtgcgtgggtgtgtgtgtggggtggggtgtctgtgcatggctgtgtgtgcatggtcagtggtgtgtgtgagtgggctggccccgaggcctggagggtggctcgggagcatccagcaccctggtgtgtatgcatgggtgtgtgggggcaggggtgtgtatgcatgggcaagggtgtgtatgcatgggcaggggtgtctgcacgggtgtgtctgcacgggtgtgtgtggacagggttgtgtgtgcgtgggcaggtatgtgtgtgtgtaggtgtgcatgggtttgtgtgcctgggcagcagtgtgtgtgcatgggtgtggggcaggggtgtgtatgcatggttgtgtgtgcgcgggtgtgtgcatggatgtgtgtgcatggacgggtgtgtgcacaggcagggatgtgtgtgcgtgggcaggggtgtgtatgcgtggtcagggttatgtgtgagtgggtaggggtgtgtgtgagtggctgtgttttcggtcaggtgtgtgtgagtgggtgtgtgtgcgtgggcagggatgtctgtgtatctgcgtggtcagggatgtatgtgagtaggtgtgtgtgcgtgggcaagggtgtctgtgcatggctgtgtgtgcgtggtcaggggtgtgtgtgagtgggctggccccaaggcccggagggtggctcgggagcatccggcaccctggtgtgtatgcatgggtgtatgtgcatggatgtgtgtgtgggcaggggtgtgtgtgcgtggacaggtgtgtgtgcgtgggcaggggtgtatgtgcgtgggtgtgtgtgcctggccaggggtatgtgtgtgggcaggggtgtgtgtgcatgggcaggggtgtgcgtgggtgtgtgtgcctggccaggggtgtgtgtgcgtgggcaggggtgtgcgtgggtgtgtgtacctggccaggggtgtgtgtgcgtgggcagggatgtgtgtgtgcatggacaggtatgtgtgcatgggcaggggtgtgtgtgcgtgggtgtgtgtgcctgggcaggggtgtgtgtgcgtgggtgtgtgtgcctgggcaggggtatgtgtggtctcgaccctgtgctgctccctatatgcaggaggaccccggagcatcgagtctcctgagcctcagcctcaatgctaacctgaggggcggtgcctctggtcccctcgtgggcttgggtggcgctgggagatgattaggggcctgtagtgcctggcacagggctgccccaacagtggtggttgctggcgcattcttatatcagccccgcccctggcgagtcccacccatctgctgcctg

SEQ ID NO: 525 - DNA, 1002 bp, Artificial sequence
  DNA replication origin
gcagtcggtgggacggtcccacccagctcctacccagtgctgctgggctcccgtccaggtcccacccggctcccctgcagtggtggggaggcagccacggacgggctccaagagttcccgcgtcccacagaacagaggccatggctttcgagtcctcctcgtggctatcaccggcagacccaggtctgcagaggaggtcagaggctgcacagcgagcgccacctgcccccgagtgtcacgtagagcatgtgccgagtggaagccgcgcctcggctctgaggtcagaggggctcagggccaactccctgtaccctcctgccccagggccagcggtccagtgtccatggagtggggctccccacaccctcctgccctaaggccacctcttcttcttggtcacaaccaggacatcgttgaacaggaaaaggtagcacgttggccggctggcaatttttcgaaaaagtccggtttcttccactaagaacagctctccgcgcttcagcagccaccgggaggcagagatcagtgggagggactggggggacagagccgggaggcggagatcagtgcgagggactgggggggacagagccggggtgagcaggtccccagggggtcaaggacgcatagcaccaggtgggactgactcctgcctctggactgggtgaccagctggctgccctcagtcggggctggacagaggaaaggggcacaatgtgtccgggcctcaaatcgaggtgcgccaggccggaccagaccctgcccgatagcccagggctgggtgaccactgaacatttcacccaagccaggactcgaaggccagtgctggggaagcctccacacacacctcacccctccgtggcaattacgcagacgctgggcctcctaggcacaaggacctgctcagccccgagggagggttggcaggggcaggcccacccgtgatggccacgctccacgtctggggcctttcctggctcctgagccacagaacatcctcc

SEQ ID NO: 526 - DNA, 1288 bp, Artificial sequence
  DNA replication origin
tgtgggacgcgggaactcttggagcccgtccgtggctgcctccccaccactgcaggggagccgggtgggacctggacgggagcccagcagcactgggtaggagctgggtgggaccgtcccaccgactgcccgtgtctccacagcgaggagagctacatggtccaggactacgcccagatgaaccacatccaggtggagaagatagagccgtctgagctccctctgcccgggggcggcaaccgtagctcctccgtgccccaccccttccaggtgaccctgcttcgcaacagcgagggccgccaggagcagctcctgctctcctcggactccgcgtaagtgggctcccgggagggctgttcccaggccacaggcacattagctccatggggaccgggttgtccccctgccttgctcgctgttgcatggctggctctgaacgcccaccgtgcacctggccctgctgtaggtgctgaggtagagccagaaacaacagaaatggccttgtcctcatggagtttatgttcccgggaggggacgcaccaacagttgggccaccaggagtgggaacaagggaggaaacgaggtggggggtggggtgcggggggtgccgtgaggaaagcttagcccatgtgagcagagggaggtggggccggagtgtggggttgctcagcagaggccccgaggcaggagagccctgaggccccgagggcacagctgcaggtggacagcagtgatgctggggtgcagcgaccctggccggtaggggccagttcagacagcagggtggtcctggcactcagaatgggagggggcactgatggagtctctgcgggccccccgtggaagccaggcacacaggtgcgccagtctccatattccctctcagctcgtcttgactgaggacagctctgggccgtttccagatgaggatgctgaggctgagtctgtcacagcaaacggagggggcagggagctggggcccagtgccaggaaacggggtggcctcaggtccagcaggctggggtctgggtgtgtggccactacccaactctgtgacctggggctggggtgacttgggggttagcctgcctggcacagtctgcccagccactcctgcccacccccaccacccccatctccttgccacggcccccatgggtggctgtcagaagtcaaggaacatcagacgggcaggatcggtctccaggcctggctcatgctgtctctggtccccaggagtgaccgggcacggtggatcgtggcgctcacacacagtgagagacagtgg

SEQ ID NO: 527 - DNA, 1311 bp, Artificial sequence
  DNA replication origin
tgtgcccgcccagcaggcagagactggcactgatgggcctcaggaagcatttaccgagtgactgtcagcctgtggggacatatccccagagggagcccagccctcggccagagctccaggcagcacctgccttctgtctccaggctgcccccagaaccggtttggcgtgggctgcgagcacacctgctcctgcagaaatgggggcctgtgccacgccagcaacggcagctgctcctgtggcctgggctggacggggcggcactgcgagctgggtgagtgtgcggggccagcgggaccccagcatcccctcagggaggtgccctgggctgccatagggctgggcaaggctggtgccgaaggactgcccaccctgccctgtccccagcctgtccccctgggcgctacggagccgcctgccatctggagtgctcctgccacaacaacagcacgtgtgagcctgccacgggcacctgccgctgcggccccggcttctatggccaggcctgcgagcaccgtgagttgggggcctgtgcagctgggctggggcccctttgagccactgtccactcctcccgtgtgggtgatccaggcagcagtgaagtggtggggaggtggggagccagcagcagtggggagggacgaggacgggcaggagggggcttttctcgggcccctggattggcgggttttactcactctgggcaaactggacatttctgccaccgtgtgcccttgtctcgtggtaaccggcgtccttcagcctgtccccctggcttccacggggctggctgccaggggttgtgctggtgtcaacatggagccccctgcgaccccatcagtggccgatgcctctgccctgccggcttccacggccacttctgtgagaggggtgagtgcttggtgcctccctgaacccccgctccctggccccgtcccgtctgggtgcaggacaggagggggacactgagcccactgcccccaccagggtgtgagccaggttcatttggagagggctgccaccagcgctgtgactgtgacgggggggcaccctgtgaccctgtcaccggtctctgcctttgcccaccagggcgctcaggagccacctgtaacctgggtgagtctggggtcctgcccaggaagggcgtgggtgtgggtctccatcagtgaccaatattgattggttgggccctacctgtgccagtcctgggctggccaccaacccctcttgttgcctctgcacctggactgtgccccctgggggggctggagtcagctgctgggacatgcggtaccaagcatggccctcctgct

SEQ ID NO: 528 - DNA, 1341 bp, Artificial sequence
  DNA replication origin
agctctgcccctgcacctgctgtgcccggcgacctgcgccatgtctgccaggggcttgagcacagccaggcacagaggtcagccaggcagctcaactgtggccaagcgtcctgctgggaaacgggcctcttccctcagtcatgcagggactttccccttctgggaccccagcagagctggcggggtgggcgggggtggcagtgagtcactgcagagcaggcggcagtggcctggcccccagcaggcctgcgggtggaagggagatgccagggtgggtgcatgagagttggctggccccaccctgtctggggcagacccagggtcccctcaccccatcccatcctgtcctatccccactccggggttgaccgggcagggagagaagggaagccagccacgatcaccacttcctccccggcagcctgtccgcagggccgcttcggccccaactgcacccacgtgtgtgggtgtgggcagggggcggcctgcgaccctgtgaccggcacctgcctctgccccccggggagagccggcgtccgctgtgagcgaggtgagtgttcactccagagggcatgctcacaggcccttcacagagatgtcactggattagccgtggggacactggaggggtgggcccagcccagacacccgcacatcctggctgccaccagctccccacttgaccctggggctgagatgagagtgctgtagcttgtgttgactacgctgccctgcttgggggaatggaccgtcccatgccaccccagcccctacctcgacactcagcccccgaggctcaggccacccagtgaccccatcctcatagaggtggccgtgggggctgcaggttcctacccagcgcctgcctggccccttgcagaagggattgggtggctgtcttctgcccgagggtggagtccttctggccctttctgccaggcccagggctcagggaccaaagtggaagtgggcctagagcacagtcaagagtagagagatgggctggacccaggggacaggcgtagtggctcctgctcagacaggcccagtgctcatgaacacagccacagcctcttggcctggtcccacccttagtctgcatcaagggactggctgcccccacagcagttcttggccttctgggctcattgggagcctgtggcagcagagggttcaggatcccagggctcaggccccagctgggatgtagcttggccccgcctcactcccaggaaggatagtgccatcaggccggtcatcaggcatccggctgtaacagcagggctacagccagccacctctgagcccacggcagcccagccacgctacttctcaggcctg

SEQ ID NO: 529 - DNA, 1127 bp, Artificial sequence
  DNA replication origin
ctgggggatgcaggttgctccctcttccctggccccagcctgccctgccggcctgtacggcgacaactgtcggcattcctgcctctgccagaacggagggacctgtgaccctgtctcaggccactgtgcgtgcccagagggctgggccggcctggcctgtgagaagggtgagcgctgggcggcagaggagggacataccccagcatgcttggtgcagccccgcctgcaggcctaggagggctcccaggtcagggggcagcgccctggggtgtaggcttcagctctgcgtgcaggaagcatgggtcagggtctcctgggcccaggaggcaggaccctcaccctcgtgcctgcctctgctcctgtagagtgcctcccccgggacgtcagagctggctgccggcacagcggcggttgcctcaacgggggcctgtgtgacccgcacacgggccgctgcctctgcccagccggctggactggggacaagtgtcagagccgtgagtggggcggggcagcaggggggtctgcaggccctgctgggaaggggtggcatcagccttactgcagggctgaggactgtgcccggtttggggcctcaccaggggacctgttgtcctgtgaatgcaagagctgccgtcggagcactaagaccctgttgggagggtctcagcctaggaagctggcctgtggggacagagtgctgctgctttgccttggcaggggtagccccagccagccctgtggtgggtggaacggaggatgctttggggctcagggggccgttcctgtttcctgcatgcagagaggggccccttcaccccttgtcctggagcctgtgctggctgggggcctcctgccagtgggagtctggctgtggctgctgtgccggcagggcctggtccacccagcggggcctcagcccctccagagcccagacatgcaagggcaacactgcctcattcctcaaagccccggcctcccacccaagcccctaacacgagccccccttccagcagaggcgccgtccccactgcttggggtacaacttgggcggtcccttgctcaggtcaggagccttgggtctgctgtctgaggggggcctgggcactcggctggcctcagggctgtcg

SEQ ID NO: 530 - DNA, 1236 bp, Artificial sequence
  DNA replication origin
ccgggctgagcagggacctcacgcactctcggcacagcgggggccccggcggccagcggggcagaggcaggagccattcacggcatcacaggcagctccggcggtgcagttgcaggcactgcgacagtccaatccaaagaagccggccgggcaggctgcagacagcgggcagtgatgtggaggggcccacactggaggccacccagcctagcccccgcctgtgccgtagctcaccatgctcgcagaaggtgcccctccagccggccgggcaggtgcaggccccgctgacgtggtcacaggctgctccatgctgacactggcaccgctgctcacagccgggcccaaagtggccctggggacactctgagatatgcagccccggcccacagtcagccagagggccaggagcctgacccagccgtgcccgggccttgccgccatccccaggactgtgggacaggcctggctcatgagaagccccttcctgcccaagggagactgggctcactcacatgcttcatcccccacccaggtggggccatgggaggcttgagggggctccaggcatcagctttagggatgggaacctccccaggggctgtccgtaggacgcccaacccaggcctcccccgattccaccaaccaagcctcgggggcacacactgagggataccagcctcagtcctaagcagaccccttctccatcccccaggtgccaggcctcccacagtgggggacagaccctgccccctcctgctgcggctccaagtgagcctggtgcaggtcggtgagagggtgggaccttggtccaggctgcgaagcagagcagtgggggctgggaaagctcaggaaaggcagaggaagccaggccagggcccagccgcagtgcgcatgtgcgtgcctgcacgttttggtgggtgtgtgcgcgcacaggagggggcgcggccaaaggcttcgtgtgtgtgcgtgcaggagggagtacggtcaaaggctttgtgtgtgtgcacgtgtgcatatgtgtgcgtgtgcgcactcaggagggtggcagccaaaggcagggccgggactcacgctgctcgcaccgcgggcccacgtagccagcctcacacagacacaggccgctgatggcatcacagctcccgtggccagcgctgcagttgcaggggtggctgcagtcaggtccccagtgcccagtatcacaggctgcaacagaactcagggtcacccggcgcaggc

SEQ ID NO: 531 - DNA, 964 bp, Artificial sequence
  DNA replication origin
atccacccagacgccctggatgccagcacagtcacagtcgagaggatgtggcttggagtccacagactcatggcggaccccagacctacatcccagtgggtgacctggctgggccccgatagcctcatcctaacccagactacaggtaacaggacatggaccatcccttccacccgctgccaccaccatggacactggaaggggcagtgagactcactgaggtggcagaagcggccgtagagccctgggtcgcagaggcaggccccgtagaggcggtggcaccggccccggttggcacagttgcatttcttgcgacagtgcttgccatagtagcccttggggcagcctgggggcagcggggctccatgtgaaccttggtggcagccagcctaccacatgtggtccccccatgtggtaggatgcgcgggggcccagggcccagcacaggagctgggagcagcccccgccagggcactaggtgagccttccggatgtggccgtctgccctggctggtctgtcccctacatcccctgcccccagggtttgtggcaagggcgggtggaagagcacattcctcggcccacactggagagatgcacaaagctcacgccccactctccccaaagtctggcccccatcaggagccgcctgacttctgtcccctggtggtcactaagcttgatctcagagcctcaaagcgggaaggacacgtggccccagtagacaaggtcccaggcccaagccgcaggtggccccagagctagaaaggtcctcgcctttcttccccaaacaattctctctggctgggtcctgccccacgtccttcctcctactgaaggcggtagtcagctgaaggtacccccacaactacatacacgtcctagtccccaggacctggagactaggcacagttgcatttcttgcaacagtgcttgccatagtagccctacattatccaggctg

SEQ ID NO: 532 - DNA, 2249 bp, Artificial sequence
  DNA replication origin
ccctagagttgggatgaggctgggggcagaggggccgggttcaggtcctcagggcccagagccttctctttcctgagaaggagggtcgggtgcagctgggatgacccctgggaccaggctgaggaggtgggggtagtggaggcagtaggagggtggtggggttccctggggtggggcttaggcccagccctacccgccggggggtcgctggagcaggcaggtgggtggcaggggctaaggcgcctctgtgcccctggcagccctggaggagccgatggtggacctggacggcgagctgcctttcgtgcggcccctgccccacattgccgtgctccaggacgagctgccgcaactcttccaggatgacgacgtcggggccgatgaggaagaggcagagttgcggggcgaacacacgctcacagagaagtttggtgagcgcgggcccagcccccgggggctcctgctcgcagggccagcagccagcgacccctcgggctaggctgccatccaatcagaggctggggacgtgaggaaggacccctgcaatgccatgttagaccaaggcccagagagggtgagccactggctcagtttgcgcagctcgtgcgggctgagccgggcgggaccgggctcacagcttccaggttagggctccttctggccccagcatctgtccccatgtcaccctttgggggccctcatgggccgaggatgccccttatgccccttccctggcctgagggtctgagccgggcctctgtgcctgctgaggccaggggtcaggctctgaatccccccatcctggtctgcccccagtctgcctggatgactcctttggccatgactgcagcttgacctgtgatgactgcaggaacggagggacctgcctcctgggcctggatggctgtgattgccccgagggctggactgggctcatctgcaatgagagtgaggcagctgggcaggggctgggggctgggaaggggcctctgagccccaagacctggggacagccctttgagcccattcagttttactcctgcctgctggccctgggcagggggctctgtgcagagccattcattcatccatttgttaattcctttgataaacatcccctgactgtccactctatgccacgcactgttccaggcagtaaggattccctgggaacaagcaagttaaagtgtttgtccttcctaaatatcagtcttcacggtccagcaacaagcaagccagcaaataactaagacagtgaggggtgtctgctgaagggcagccggcaggtggggttcctctagctcagatggccagggacccgtcataactgtcagtgaggctctgcctgtttgaaagagctggttcagaaggaggagactcctctctctgctggtgttcagagagaggagtcagtgatcaattagtgatgtctgccatgagcatgggcaggggtgatgtggtacaagtgccatcattttatctctaggcaactgcttctaaacccaagcctccaaccctaggaaggggtctcagagtgtcgtgctggctggtgaccctgacgcttccctgtcattctttgtagcttgtcctccggacacctttgggaagaactgcagcttctcctgcagctgtcagaatggtgggacctgcgactctgtcacgggggcctgccgctgccccccgggtgtcagtggaactaactgtgaggatggtgcgtgcagcctcttctggtgcttctggaattacccctgggctgtaagggaagtgggagacaccacccctccacgtcctccttgtctccttcctcccactggagcagggaaactgctaccaaacttttcctagactccctttccttcctgcctccctgtctccagagctttaggctgtgcttgagagagaatgaggcccttgaatgagaggggtattgctttttcactgttgctaattttcccagggcctaactgtagcagacgataagactacagagcagcacttttggaatgggttcccttgagaggcagtgaggtccctgttcctggaagcattcaagtagagctggtgatggctgggtgaggtttgcagaagggattacttgggggccagtggctgcaagggatgatgttggctcccttattaactctgaagtttcagcctttctggaggaattagtccagaaaatgtttcccaggtggctaaagcttcatctttaagtcttcagacttcatcatttctgcctctttcgatgg

SEQ ID NO: 533 - DNA, 1059 bp, Artificial sequence
  DNA replication origin
gtggcctctgtggctgagggtgagttttactggctggttgaagagatgctactcagctctggcagggccaccagggcttcagtcctgtgggtaggactgggtgggcaggggccttcctggttccccacctgggagcacaggcctcagtggtcccgggtcgcccgcagatgtggatgagtgcgcctccagccgtggcggctgcgagcaccactgcaccaacctggccggctccttccagtgctcctgcgaggccggctaccggctgcacgaggaccgtaggggctgcagccgtgagtctcccgccctccgcggagcaccggcctctgccttctcgagtttgccccagctgaccctgcgtcccgcaggcctggcccaccccacccccacctgcctggggtcctttgccccctggcctctctgggccaacacacctcagaggctcttgggcccttggggacccactgaggtcctgcctcttctgagggccgtgtgggggttggggacagtggggtgggggaagctggtgagacaggcatcctcccggagcccagcacctgtcctgaccacgtgagagaagggaccaagacctaaggtgatgttgtccctgggactgatggcagctgctcccacccctacccctctaggccccagagtccctagagttgggatgaggctgggggcagaggggccgggttcaggtcctcagggcccagagccttctctttcctgagaaggagggtcgggtgcagctgggatgacccctgggaccaggctgaggaggtgggggtagtggaggcagtaggagggtggtggggttccctggggtggggcttaggcccagccctacccgccggggggtcgctggagcaggcaggtgggtggcaggggctaaggcgcctctgtgcccctggcagccctggaggagccgatggtggacctggacggcgagctgcctttcgtgcggcccctgccccacattgccgtgctccaggacgagctgccgcaactcttccaggatgacgacgtcggggccgatgaggaagaggcagagttgcgggg

SEQ ID NO: 534 - DNA, 997 bp, Artificial sequence
  DNA replication origin
ccagatggagtccccaccctctagccccagtcccaacaccttgtccacagcagacaggcgggtggccctggggctgtgacatgtgtcctgtgtgtgcacatatgcgggaccaggaacgtgcatgtgcgtgggcgtgattgtgtggtgggtgcgattgtctgcaggtgccatgaatgtcggtgtgcacacgtgaggctgtgggcagctgcaggtgcagtcgggcgcgtgggttgtgtgtggtcgtatgcagttgtgtgtgggtgggggcgtgtgcacgtgcaggtgcctggtaccagggggcccgtggcgtgtgctccacagatgtcgacgactgtgcagacagcccgtgctgccagcaggtgtgcaccaacaaccctggcgggtacgagtgcggctgctacgccggctaccggctcagtgccgatggctgcggctgtgagggtgagcactgccctgccactgcacagctggggtggcctgggagcagggctgccctaaggaaggacacggggctggctctggtacccccatggtgggcatggggtcggcctgctctgtgctttgctttggggctgtgggtgttggttgagcgcctgctgtgtgcagggctgtggtgggtgttggttgagcgcctgctgcgtgcagggctgtgggtgttggttgagcccctgctgagttcagggctgtgggcgttggttgagcacctgctgcgtgcagggctgtgggcgttggttgagcgcctgctgcgtgcagggctgtgggtgttggttgagcgcctgctgcgtgcagggctatgggtgttggttgagcccctgctgagttcagggctgtgggcgttggttgagcgcctgctgcgtgcagggctgtgggtgttggttgagtgcctgctgcctggagggctgtgctgacctgtcccctccctccctctggcctgaggtcactggccgctctctcctggagctgggcctgtccccctggctgctgcctggccggcccc

SEQ ID NO: 535 - DNA, 1548 bp, Artificial sequence
  DNA replication origin
gtggggacacagccagaccatatcatcaggcccccgccggatggccacggggtgtcgtggtgtgtggttccacgtcctcactgacaccaggaaagtgctgcctgggcactggcacctggtcatgcaacaggcttagtgtgagacctgtgtgggtgccaacttcttcatcccaggggacctgcagggctgtgactagtggccgtcagggacagtgggattggccttgaatgcctgtgtcatgcggccacaggccctgggtgtcagcaggccgtgcactgtcttccactggtcccatgcaaaggcccttcctggcacctctgagccctccctgtggtctctcccctccagatgtggacgaatgtgccgcagggctggcccagtgtgcccatggctgcctcaacacccaggggtccttcaagtgcgtgtgtcacgcgggctatgagctgggcgccgatggccggcagtgctaccgtgagtgggcagccggcaacaggctgaaggtgcccgggatggccatgctgctccccaggaccccgaggcctgctttggctgaagggcagggcttccttgtcaatcaggggcagccctgggtgtgagcccttggtgagcagagggtcgagggagagcagggggtcccagacccaacaaggcctgggagctccatgttgctgcttcccacgggtgtccccaggcccgaggctggctgctgggtggaggtaggggtaactaaggtaggtgggggtcatcctagccgccatcccataccctgggtggctggtctcacggcagggattgagatggaaatcgtgaacagctgtgaggccaacaacggcggctgctcccatggctgcagccacaccagtgctgggcccctgtgcacatgtccccgcggctacgagctggacacagatcagaggacctgcatcggtgcgcactggctcctcccagatgcctgcaccccactccagggacccgctgctgccctgggtctgggatcagttccatgccatgacttggaggtcctcgtcagtctccctgagtcctggtctggctgcctgggccctggcggggtggtagggcaggtctgacagaggcagcatcctggccgggaaagaccttggtgcccacatcggcccgccaggcccatacccatgttcacggcacccccttagccccatcagcacctcctcagtaccaccccttcacctgggaaggacccagtgtcctggaagtcacaccccagaccctgactcccagatggagtccccaccctctagccccagtcccaacaccttgtccacagcagacaggcgggtggccctggggctgtgacatgtgtcctgtgtgtgcacatatgcgggaccaggaacgtgcatgtgcgtgggcgtgattgtgtggtgggtgcgattgtctgcaggtgccatgaatgtcggtgtgcacacgtgaggctgtgggcagctgcaggtgcagtcgggcgcgtgggttgtgtgtggtcgtatgcagttgtgtgtgggtgggggcgtgtgcacgtgcaggtgcctggtacca

SEQ ID NO: 536 - DNA, 958 bp, Artificial sequence
  DNA replication origin
gcagtgggttgctgccctgtcgatatagaccaggcctgccctcccgggactctggtgacaagtaaggcgccttcctaaacgctctggagaagctgaacccgtgtgatgctcacgcagccctgggtcggggcctcccccaggagggcaggtcggagctgacgctcagcagcgagtaggcgcgtgtggcggtgcaagcactgcgggcattgggtgcccatggtgcgccgtgcagctcccacctgggagtgcccctgttggcccccgccgtctggcctccttcattccatgtgtgtggtccagctgctgcctgccactccctaaagcacacggtgcccctggtaggccaatagggcactgctagcacttgtctatagggacccacctgtcaccttggccagtgggtctggaccactgcagccaagcatgggccgagctgaccacccagaaaggcgggcgctgggcaggatgatctggccctggccaggggtgggggccttgctggggtgtgggttgtggggtcagcttagcctggtccatggaaggggggtggcgggcgtttccctccctgctccatttctggacgcctggtggccatgctgaagggccattgtttgcctggtgctctgtgttgttggggtgacatcatgggctcagaccccttggcgtgtggacgaggacagctgctctcacaggctgtgagtcagtagtgcccctgtgcaacaaggaggccccattgagagggcaggggatgggggcaggtgtacagggcaggcccgcctggaggggagctgggggatgaacacgcaccccagcctgccatcctggccctgtccccaacagagggcttcctagaaggcagggctgtgggtgactactgaccacacgtggcaggagactcaagatctagaaaccatccctatctgagggcagtaattacaagcctcgtgaaaccagcagg

SEQ ID NO: 537 - DNA, 923 bp, Artificial sequence
  DNA replication origin
cacgggttcagcttctccagagcgtttaggaaggcgccttacttgtcaccagagtcccgggagggcaggcctggtctatatcgacagggcagcaacccactgcctacgcagtgcccggctccagcacaccaggcggcggtcagagggcagcaaggcggccagccctgacccttcagcacaagccaacggcctgccagcagcctcccctcccgggccgggcctcccctccaagaaggaaccaaggggccaggggagggggtctatgcagcctctcactgctgtgatggggagacccaggcctgggtagggaagagtctgccccagggcacacagcacacccatggcagagccaggtggggaggcagggctgggaggccacccccagccgtgtgcacatgagtccatccaactctgggggacacagggaggggatggccaggccaccagggtgtgacaacagagtcccctctccaacagtgtccatcccaaaggcctgatgggcatgggccgagaaggggagaaggacagcgggcccacctcttccctggggtggcacagcgtgtttcatctggagggacctctgctggtaaagccagtgacatctgtggccctcagacagggcccaggagtgctgctcaacccaaggcacatgagggaacagccatgtccaaggctagggtccagagtcagccaggccgcctccggggtcatgcgcgggcatcatgctggctcagagcagcccaggtacacagaggcggaggcctccagcgcagtgctagaccacatgggagctgctctcctctctgagtgttgcacgctggcactctgcagggtgtcacggaaaaccaagaatgatgcccccagacactcgggccagaccactgctccctacatcaccggggaaggcaagggcgggctcaggt

SEQ ID NO: 538 - DNA, 1003 bp, Artificial sequence
  DNA replication origin
ccttaaaatagccgctctctgagcccactcgtctctcaccagatggctccccccaggttcatgtcgcagctgtctggggcctctctggcctgccccctgccccgtgtggggcttggcctggggctggacagggacagtggatttgcctccagggtgggccgttgtccctggaatgagcaggttttgtcgcctgactcataggggcctccaagctcctttcggcctttgctggggccccgctaacctcaggctcaggcccccacactggcctctgagtctcgggggccagtgcttcctgggggccctggtcccactacagggctcagtgggcagcatggtctgtgtgtaggcagcacgggatggtcctggatcacaggtctgcaaaggagggaacccagggagcaagcttctgcagggcacgcggctcccgtgaacctggctgtgtgaccagccccacagaggcacaggagtcggggggccggtctggcagagctggcactgggagccccgatttccagcccagatggtccgagtgtctgtgactcctgagacgacagtggtatcttctgcagttgtgccccgtgggtgcggtaacaaataaccacacactcagcacttaggacagcacggatttattacctgacagtcctgcgaggcccagtccaaagtgggctaaaatcaaggcgtgggcagggctgtgctccttctggaggctctaggggacagtctgtctcttgcccctttcagctttatagaggccgcctgcattcctggtcttgtggcccctcctccatcctcaaagcctatagcacagcacctgccaatccctgcctccctccgacctctgcttccacgctcacatctcctcctccccgccctctgaccctcctgcctccctcttataaggaccctgtgatcatgttgggcccacctggatatgccaggataacctcccatccagatcctcaactcagtcccatctgcaaaggtaggtccctctgcc

SEQ ID NO: 539 - DNA, 1861 bp, Artificial sequence
  DNA replication origin
ggatcccggggctgggattgcgcgcccgcccggaacccagaaccagcccgagccgcctgccccgtcgcccggccgccggcttagggcgcagcgcggttggtcctcgccccctcccgcccgccggcctaccaggccatgggggcgtcccgggaccgcgggctggccgcgctctggtgccttgggctcctggggggcctggcgcgcgtcgcgggcacgcactaccgctacctctggaggggctgctacccatgtcacctgggccaggccggctaccccgtgagcgccggtgaccagaggccaggtgggcgccgggcgagcctgggcagggcgggcggggccagggcgctccccggcgcgctccctttgtttcctgtttttaaagtttgcgccagggcgctgcctgctaggctggagggagcagggcggggcagtgcccggcaggcgcgcctgcttctgggacagggtccgtgggcgctgaggagtcggtcacccccgtcccctctcagggctgtcggcagaggctactaacagccaggtcccttgaccggaggaaagaaaaacatcccctgactttgtctgtgggagcagggttccccgctccccatggcactggcgactctgcgggtcaagtgaaaaggcaggctggagacaaaggccctttgagacccccggagctgagtctccggggtctccagagctcagcccctttggggtcctgtctgtggatgtggcaggtgccgttcttcctggagccccacaggcatgggcagctgagaaccctggtggcctgggaagcaggttacagccctgctctcgttccgtcctgcctctctctgcagctgggatctggcgcctgcactaggcccgcctccctccaggtggttgctttgaactccctgggatccacagagcttggagctgggcaccctcgggaattggaggagggggtggaattggaggagggagtgtggggtttgcggctcccagtgagtcgtcagccgcatcacccgggggtaggcagtggctggcggggggccctgaaatggctccttagagacgtcacccctccttagctgtttcgagtgccaggccgagcttctgcctctctcctgcgtgaaggactaagcaccacgccctcagtgtggcaaaggcttccttcattccctggcttggtcacttggcctagggcagcccaggctccatcttcgctgggtaggcagccttccggctgggcggctcagccaaggccaggtccacccacagtgccactaaatgccttgcgactgcgaagcatccaaggcctctggctgggtgtcgctgggcgctcgggagctgggagcccctgtcctggtctaaagcgtgctccagcttttgggggagagaggagaagggcccataggtaatggtgtgtgctccctgggggtgaggaccccgtggcaagtgtggggacaaagcagggcttggaacttgataactgccctgagcggagctttctggcaggggcccagagccctccaagtttcctataagtccaggtgggcttcggaaggggcgcgtcttgggtggtttctgcagaggcagctggttcgaggcagcccagccatgcctgtccacctgcctgtgtagtcctgggctgggagctgtgggacgtgggtggtggtcgctgggggccccatgggctccctgaggctcctccacctcccagcctggtagacactgcaggtctcgccaggctcctggtgaaccagcccgtgttggcacagccgtgtcgctgtgtgccagtgtgctgacagttctcttgtgaggctgccaaagtccatagtctcgtatctagccgagggcagcagcaggatcctggccc

SEQ ID NO: 540 - DNA, 1398 bp, Artificial sequence
  DNA replication origin
cctggcctctggtcaccggcgctcacggggtagccggcctggcccaggtgacatgggtagcagcccctccagaggtagcggtagtgcgtgcccgcgacgcgcgccaggccccccaggagcccaaggcaccagagcgcggccagcccgcggtcccgggacgcccccatggcctggtaggccggcgggcgggagggggcgaggaccaaccgcgctgcgccctaagccggcggccgggcgacggggcaggcggctcgggctggttctgggttccgggcgggcgcgcaatcccagccccgggatccgctccgctcggcgccgcccgggagccgctctgggccgggcgcgccccgcccctcgcctttaagttctcagctttccctccgccccgcaggtaaaggccaagtccgcagacaaccgagggagccgcccccggccccgccccgagccccgccccacctcccccagggggccgcgccggcccgcccgccccgcgcattccagcgtgcgcgctcccggacccggacgcagatagggacctaggcacaaacgcagacatccacatgtgacccacagacacaggcacacagactcacgtgtgcaaacatgcacacaggaggtacacagacacgcacggacatacgcacaggcacacacatgcacaaacatgtgtgttcttggagccaacacggaaaagaagccaaagcagcaaagggagccgtcctggccgggccgcggggcgggggaggggggccgcggggcgggggaggggggcctgcagaggcggctggtggggctgaactctgacaagggtggggaagatggggaactggtttgaagctgcagcaccgatgtggaaacatgggctgagacacccccagtccccacgtccagtgcctgcactgtcctgtcctcccctggcccagggccccatacttggagggagcctgggcgagggaaagctggcatccctgcagcaggtggtgacggacagagagcagggagaacttgcctgcagggtggccagcagtgcccaggtgtcaggctgcaaaggccacggaggtgcttccaaccccagagccctgggtccccacgctcctcgagggcatagcccgggggaggcagtcctcccagggtcggcagcagaaggaaccacagattagagcctcgtcaagcacttaacctctgcaggagagccagggctgtgattccggcttggatcagagtccccagagccccccatcctctctgagccccttctcgcacctatccttggtcgggggtcactgggctcccactcctagcctccatggagatggaagagctgtgaccagcaagctgtggtgctcaatgaccctcagcagtgatccctgcctgggaccagcccagcaccacctccag

SEQ ID NO: 541 - DNA, 1636 bp, Artificial sequence
  DNA replication origin
actgagaaggtgacatgtgtgacgctagcacgcaggtccactgggacaagccacggtgcatggctcggtggcctttggggcttgtgggctccggctggccgtagactccgagtgcctgaccttccctgcttggggcctcgcgcagcggctcctgggctcctccctcctcctcgagacagcacgaggcaggagccctttcccagggtgggcaagacttgggggacagcatgggatcctgagggtgcggctggtgcctcctgcttcctgtgggcttcttcctcctcccaagaccccggagcctggagggtgtcagagtggggcctgcctgagctgggagacagcatcccttcaaggaagggcctcttgaggaaccttccccagatggggtgctgatggaggaccccagccccgtcgcctgttggtgagggtgactggagtcggaggtgcagggattctgttgcccaggctcccgccgagtactgggccccatcctgtagcaggcggagagggacagagaccagagagagctcgctcgcagggtggccggtcgtgcacctcctggaggatggatgctgcctccgcagcccgtgcccttgcaggcctggcctctggtgtcttcccctgcacccctctcaagcctggcccctacctccatggaaactgctgggctgaggccctgttgggctgtggctgcggagggcgggaccctcgagcttctgttggcactaactggtgagttgttggcaatgagttgcacattacggtcataaatgatgttgccctgcgtggaaggtgccttcaaacaggcccgtcagcctgtctatccgtgcgatttagaggctcctcatggcaagggctcagaggctgatgggaggggctccccaggaggccccgcagacaggcagggcccaggcaggcccatttctgcagagtgttgggggccaagggggcgggctggcctctggatggcagacaggacggggcaaggtgagacaggctgggactgggtggggcctcttctttcccacgcgctcaaggatggcccctcagcccttgctcccaggtgccctggatcagcagagactgtctctgccacatcttagcactgggcaggcttctgaggggtgggtctcggccagcaggtgggcccctggctgtagtggagagtggagagaaggtggaggctctgccgggatgggccgcctgcttccctgagttgccggggctggagttctgctcaattgaatttgacctgaggacagcatcttagtctgtctgggcctcagtttcctcacctctaaaatggggacagtagccctcccctgcagggaatggtgaggatggcactgcatccccagaacccagggcctggcacagcggccgcagctgaggttggcagtccttcttccccacagctctacccgtggctatgctcctgacctaggcttgcccacatacagggcctgctggcccagggagcatgcaccctcctccttcctgacagctggaaggtatccccaagctttctgtctctgcagtggccccagtcatgtggctttgtgcccaccgctcacctattgtcctctgggaggagacacaggctgcatctctgggaacaggctgagctccagggaca

SEQ ID NO: 542 - DNA, 889 bp, Artificial sequence
  DNA replication origin
cgttcagggaagccgaggccaccagaggacggccagagccagggtgcgaagccggagctgcctagaaactctttgtccaggccccagggatgcccccttggagagttgcagcactgagccctgcccgacagtctgcctggcgcctgccatggcctggggagggtgatgagcaggagagaccctgtgcccaaccagaggggcgcctgtgggtgcctgcccgagccattcccctggaggaacccgaaggaggtggcccagtgaggacaggatttgggggagagtcagacctggttcccctgggccgcacttctcttccctgcatgaccctggggaagtcatttctcctctggaaactggcttagcgaaaccccaggagaatgtcccaggagccgtgggcagaaggcaggacccagggccgctggggggcccccacactggggttccagctgggcagaatgagggtttaatcatggcctgtatgtgagggcagaggggaggtgggcgggtgggcatggggcagcagatgaggaggagaggagcagaagcgggggactcccggctacgggataggaggagcctgtgtagggccagggtggtctgtgtggaggaccagagggttggatgcagccttctggagaggggcagccttctggagaggggcagcctccctgctgcctgtcagatgagggtgtctgatgtgagtgaccctgagggtgagatggggatgtgataccaggaggctcccatagctcttgggggttttggggcagaaaagacaatttcctttgcctgaacttgttgtcaggaagcttcccgaaggcctcgctgcgctgtgacagctgttccctggaggctcgccctgctctgttggctgccctcctctgcctgg

SEQ ID NO: 543 - DNA, 1849 bp, Artificial sequence
  DNA replication origin
cctgtgtcccatggcttggcggcggggccagccctctccctaggacacacaggcccccaccccatcagttacaacaggggagtttcaggggccggggaaggtgcctgtgtccgctgcgggtcttcgtgctgcctccgcagggactcctagccccagggacaccagcccgagaggggtgcacttcttccccagggttgaggtgaaatcggttcagcacaggccccccagaatgccagagaccaggtaggggggtctggtcttcaccctgacacctcagtccctgccagtgagcagccctgggtgggggctgagtggacccttctgagggactgcacaggcagccgcaggggggaaaatgtaagctgtcccgcgcctcctgcgtcccacctgggacaggctcctcggtgggtcggaacctccagctccaacgtgtggaggtggccaagtcctggggccatcccatacctggagtggacaagggtgggggccctgcaggagagaaggcatagcagctgggcccctcctcatcacgggtctgggagggggttctcctcccctcatcctgcccaactccacctgcacctggctcatcctggagcctctggggctttccgccaccccagtggagcccctttcacagaaaccaaggcaagagccagaatggagcgggggtccgggagctggcggggactgtgccacaggtggagccatcctccctcctcactgagccggggctcccaagcctcccaggctccgcgggtcacagaagcttctcccctcccccagcctcccgctggccacaagcacaggctggagaggagcacacagaatctgtttctagaacatcccagacagagcagatgcccctcccacctcccctgaccccaagtccagcaggctggcccctgcccccctccaaacggctcgcagctggacagctggagacagcgttgcgtttggcaagggaagttctgggagatgatgacagtaagtgtctgaccgggacagcagagcagaggcctgaggactctcccaggggccaggctgcccagatccaccccagggtcagatgccagggcagaggctggagcaggcaaaggagtgtgagtgggagatggggacagcttggggcccccactgccaccctcctcggcctcctcccccacctcaatcctaatctgttctcatctctcccagtgggttttccttctgtctgtccttgactttgctgccagcctgccagccatggtggggctgagctacagggtctgcttagagctcgcaaacgcttctagccccaggtcttgcctgagccatccctgcccgcccctccttcctcctgcatggcccccaaggtgcctcccaccaacaccaggtcctctgagtccccacagaggcaatgtcaggagtggggagcgagttgggtgaggagtaccccgagtggagcccttggagcagcctgtgggccaggaaggagggtgccagggagggcaccgaggcggggtggcagtgggctgggaagggggctgccagggaggccgctgaggcggggtggcagtgggctgggaaggagggtgccagggaggccgaggtggggtggcaatgggctgggaagggggctgccagggaggccgaggtggggtggcagtgggctgggaagggggctgccaaggaggacgccaaggcggggtggcagcgggctgggaaggagggtgccagggaggccaccatggcggggtggcaatggcctgggaagggggctgccagggaggccgaggtggggtggcagtgggctgggaagggggcgccagggaggccgccaaggcagggtggcagtgggctgggaagg

SEQ ID NO: 544 - DNA, 1030 bp, Artificial sequence
  DNA replication origin
agaaatgcccccggcactggggagctttgggccagctcaggtccggaaaggcccgcgctgtgttccgtctgtctggggtgctggtgggaaaggtcggcctcatcttctgggaacagcaccctgtgggctgggctggcgtctggccatctgcgtcctcagcatgctgggggctccactggctctgagcctgcctccaggttccgatccccatgcagctggggagggcctggtctttggcctctagaggcgggggcacagggggctgaacattcctggaagtttggatggtgcagttcagcaggggtgggtgggcagaggcgcctggtccctgcgtcacctcaagttgggtcccacaccttctcaaggcaggtcacttgattcccttcttccctcgatgctcctaccagcccagtcacttgtgtggggaggcagtgacgctgcctctgcccaggaccaagtcccgggggaagtcctgctgcctgaaccaggcagaggcgcaccccgggagaactgccacattcccgcacccgcaaagacggagggcgggctagggcatgggctctgggtcctggcaggctgggctcagcaacttgatgtggtgttcagggctcctaacctgctctccaggcccaactcagatgccacgtgatccccagagacgcgccaggaagggaggatggggcctggggctgtccgaaggcgggagggggagtggctgtgcaggtgacagtgaaactcctcctggcctcagagccaagggaagccgggtttttcctgaaaacccacagctgtggcagaccgcttgaccggaacacacacggcagccgatctctggggactcacaaaaagggtgtggctgctttacgggagcagggccacctcctctgccaagctatacccaaatgttgctcctgagagccacaccacactgaaggcccggggagaggccaccttccctgggagcgagggagggacccgttctgcagtgcggctcccctgctgctgggtttccacacccagcctccctcct

SEQ ID NO: 545 - DNA, 1278 bp, Artificial sequence
  DNA replication origin
gtgggcagcctctcaccccgctgtgcctcagaggtccaacttctgggaacaggtgggcccgggagcaccccgttggccagcacaccagaaagtgccgacgtgggtgggtggcacggctggggcctgcctggtcttcctccccaggaatgttctgcctggaacccagctgctcccctccgccaacacctcaggggcagggacaagcggggggccctgtgcgagcttgctctgtggggcccacatgcctcctggtgtcctgtggggaacaagcttggcgcctgcttccagaacgcctgcttggggtggggaagagcacatgcgccccatcccgcccccggcagccaccgtgacccccttgccatgcaccctgctgcatgccgtgggcaggggcactaagacgacacctcaggaggagacggtgaggactctgggttccaacactgggctgggagcatcaaccagcgccccgaccaggcggctccgagagagtgtcgctgggggatggcaggaacactggaaaagccagcggggtctaacaaggggtggggacccagccgggccaggcgggagggggacggcactccaggtgtcccggtgagaggggagggcggcttcagcctgggggaagaggggcaggtaattcacctggagtcaggtaagggccccagggtcccagctgctacaggaggcagctacatccctttcctggggctgatgtaccagagtgtcactaaccaggtggcttaaacaacagaagcctctcttaaagttttagaggccggaagtccaaagtgagaatgactgggccccccaggcaggtgctccagagcctctcccacaactggatcctctcactctagcctctgtctctgaggtccccctgcccctcctctcctgtgccagcctctctccctccatgaggacatgagtgacagcattcagggtccacctgggcaacccagggccaccttcccatctcaaattcctgaaagtgatcacatctacaaagtcgttgccattcaaggtaaaggtcacagttccctgagattaggctgtggacatcgcggggccactattctggaaaccacagtgtggaggctagggccactgatttgggggttggcctcttccagctccctcagggaaaagacagggcggctggcaggggagtgggacaagggctgatcccaggtcctgcccggccctctcccgtcctggaacccagccacaccctcttgtccagggcaatgggagaaagcaggaaagaccaaagcctgg

SEQ ID NO: 546 - DNA, 1485 bp, Artificial sequence
  DNA replication origin
gtgaaacagcaggagcctgcagggccgagaggagccttctccagcccgccctgccccgcagggctgccaggtcaggtgcctgctgccgctcatgccagaagctcctcctggggtctcaggccaagacctggaaagccgggccagcggcggcatccaaaggcaggacttgcccctgcccccaaccaaggaagcgaggtatcctggaagactgagctggcatccttctgagcatctgtccaagaagaaagtgccccaaataagtctccaactcaagctgtcccatcatctctgggggagggactgtggctgcaagtccacctaggactggctacatctcaagtctgcccgcccacccacaggactcacgggatcctggctggccctggaaccagctggagtccgtggccaggggagcccctctccaaggtgggctgggttcagagaccttgggggtgggctccacctgttacagcaggagtggccttccgtggcccaggtgctaagtgaaccacgtccctgttgctgggccaccctgtgagtccatgctctgctccccaagccccgtcaggatttcccaggatggggagtggggcagggtccccatacataacctagagctctgtgtgaggcccgcaggccaggtcagaattaaactccatgatcttggcacaaagacacccccatgagctcccagaggtgacaacgtcacactcattacatgaagtttcatggtaagtggcgcatccaaaaccgccggctggctgaaccaaattggcccgggacctcctcacggagccacagccagcaggggtaggagaaacctcggcaaagcaagagacgccctgggcctcctctcggccgcccaccaggttttctgcctgcttcccactccagtgagtcaggagcgggtcacagaggctgcagcagcggaactacctgcaaatgagaggacagaggacccggtgactgcctgaggccgggacacactggagacgaataggactgaccaccaagcagactgcaggcagcttaagagctccattgtggacaaggggtggcacgtacgttatccttcaaaacaggacactggagagcagaagaggctccagtgaaaacacaaggatgcaggtacttcacgtccctgtcccaaccacacgcgctcacagaccggagaatgttaaaaactgccgagcctgccgggtgaggatggtgaggctgcctcatggtacaggggagccagggctgtggaaagaacgaaggcagcccctcagccgacctgacctaggaagccgatcccggcttatctggggggcctggtggaatcacatggagtttcatgggtgctggggatgcggggaaggcaggagggaaggtcggagtcagagagagaggcaaggacatcgcagcagccaggagagacgggcgctgctgccttggaaggacgaggaaggagccacgagccaaggaacgtgtgagctccccaaa

SEQ ID NO: 547 - DNA, 1534 bp, Artificial sequence
  DNA replication origin
accttctacgactagagatcacagatctgtgctgtttgaagcattacacttctaaccatttgtcatggcagcaaaagaaaaattgaacctttaccatgaaaaacaaacagaacgcagcttcccccgcagagctctgcaggctgctcccggctgcagctgcccttggctcccagggtggcgagggcatcctgcccggccaggctggcctggaggggtcttgaggaggagccactgtctaagcaagcccggcgtccaggctacgtgcccacctcgctgggcggttatctctgcgcctgcagctcagaagccctgccagcctgcggtagccagaacattccaaccccaattcccatcagaccccgccccaccttggcacaggccacagggagccggacacagggcccgctcatccctcgctcactcccacagccagcgctgcggagcaccgagggatgcccagccctggcaaggagagacggggggcccaggaagcaccagcagcagggggagttcaggggataaagtgcagaagggcatatcagggaaggcctcccagaagaagcggcccgtgggcagacgtcgtttgcacaggctcagggaaaaccgtctaatctatgaggcgccgtccgggtgggcacagcagtcaagagggctgggtgtctccacaggctctcaggaaacaaacatcgaaagctcagccctatcgtgagtgttgttgggtggtctgctgtgtaaaggagccacacagagccctctgcataggaagcatgcttccgcggtgcagctggccttcccctccccgctccgtgcagtggttcagccgggccggtggtcacgatctggatgtgctaagttcagagtctccttcagaccctcagcactcactgcctgcaggacacacatcacccagctctcctggtccaatgtcaccgaggtgacagctccaggaactgcctgaccagcttttctcctttctccactctgaggactgtgcagtgccaccgtccctgcctctctcgtcccctcctctctctcccactccaccaactggtcatgcataaatgtacatgtgactgtgtcgacctcctttctaattttcttctaaaactgaacatctaggtctggtgcggtggctcacacctgtaatcccatcattttaggaggccaaggcaggaggatcacttgaggccaggagttcaatatgttgggacaactaaggccctcctcaaagactcaacttcctggtcataagttgtaaggttgtaaatcaaccctacccccttcctgccccgacttccctttttcttgctcgcaagacgtgcgttttccctatttggaaagagtttcgttctaagccaactgggatcagcttaggttgtgcggtccaactgcagccaataggggaaaaacacagaaaccagaactgcgttagggataaaaatcccttcctttctctgttcggtgtgctcttgcgatcgtgatggatgcgagcagcacccttctgccttgctgagaagtgaagttgccttgctga

SEQ ID NO: 548 - DNA, 2116 bp, Artificial sequence
  DNA replication origin
tgggccatcccacaaggaggggacagccatggccagtggctgggttttctgatggtccagaaaccagagagtgctcctccaagcctggaacccagaacagccaggaagggcaggagtcaatgaggcatctcccagcccaggtgtcaggtgtccggtgcttgtaggacacgaccccaccatggaggccagaagcctgttcttgctctcagaggactcccacccccgagcacagagagcaggaaaacaccgagaccaaggccagcctgccccaaaggccagagagcaaggttcctgagtaaggacatcccccccagacacgctgggtcctccccaagggtgctgggtcctcccggctccaaaggccagagagcaaggttcctgggtgagggtgtccccccagacacactgagtcctccccaagggtgctgggtcttccccccaagtgtgctgggtccttcctgcatatgctgggtcatttcctggtatgctggccctgctgggtgtgctgggtccttcctgggtgtgctaggtccttcctgcatatgctggttccttcctggcgtgctgggttctcctgggtgtgctgggtccttgcgggtgcactgggtcttccctggtgtgctgggtccccgtgggtgtgctgagtcctttccaggtgtgctgggtcctcctgggtgtgctgggtcctgctgggtgtgctaggtcctcctgggtgtgctgggtcctcctgggtgtcctgggtcctgccaggtgtgctgggtcctcctgggtgtgctgggtccttcagggtgtactgggtcctcctgggtgtgctgggtcctcctgggtgtgctgggtccttcctgggtgtgctgggttctcctgggtgtgctgggtccttcctgagtgtgctaggtccttcccgggtgtgctgggtctttcctgggtgtgctgggtccttcctggtatgctgggtcctcccgggtgtgctgggtccttcctgagtgtgttaggttctcccagctatgctgggttctctcaggtgtgctgggtcctcctgggtgtgctgggtcctcctgggtgtgctgggtccttcctgagtgtgctaggtccttcccgagtgtgctgggttctctcaggtgtgctgggtcctcctgggtgtgctgggtcctcctgggtgtgctgggtccttcctgggtgtgctgggtcctcctgggtgtgctgggttctctcaggtgtgctgggtcctcctgggtgtgctgggttctctcaggtgtgctgggtcctcctgggtgtgctgggttctctcaggtgtgctgggtcctcctgggtgtgctgggtccttcctgggtgtgctgggtccttcctgggtgtgctgggtcctcccgggtgtgctgagtccttcctgagtgtgttaggttctcccaggtatgctgggttctctcaggtatgctgggtccttcctgtgtgtgatgggttctcctgagtatgctgggtcctcctgggtgtgctgggtccttcctgggtgtgctgggtccttcctggtgtactgggtcctcccaggtgtgctgggtccttcctgagtgtgttaggttctcccaggtatgctgggttctctcaggtgtgctgggtccttcctgtgtgtgctgggttctcctgcgtatgctgggtccttcctgggtgtgctgggtcctccctgtgtgtgctgggttctcctgggtgtgctgggtccttcctgggtgtgctgggttctcctgggtgtgctgggtccttcctgggtgtgctgggttctcctgggtgtgctgggtccttcctgggtgtgctgggttcttctgggtgtactgagtccttcctgggtgtgctgggttctcctgggtgtgctgggtctttcctgggtgtgctgggttctcctgggtatgctgagttctcttgggtgtgctgggtcctccctggtgggctgggttccctcaggtgtgctgggtccttcctggtatgctgggtcctcctgtgtgtgctgggtcctccctggtgggctgtgttccctcaggtgtgctgggtcctccctggtatgctgggtcctcctgcgtgtgctgcgtccttcctgtgtgtgctgggttcccccaggtttgctgggtcc

SEQ ID NO: 549 - DNA, 1180 bp, Artificial sequence
  DNA replication origin
gactctcacggtgcctgggcccggggctcagcatccacagcagcagccccatgccccagtcaccgtgggaacgcaccgcagagcagggaggctggaggctgggagctccctcctggctctgggccactctctgcctgcgtcacctcatcagctccacacttcatttgcttcatgaaagaggaaagcaaggttgaggagacccagcagctgctggtgctcagctcacaagcagcctagttggggctgaagccaggtctgtctgaggagtgccatgtgctcccttctggccatgctgccacctggtgcagggacaagccttggtcccgggggagctgttgagatttgctttggaggagaggggagcagggtcccctgcagggcaggagcatcctcccctgtggctggcttgtggcccttgggtagcgggcctcctgggagagtggccagttggggcagacgtggccttcacagggggcagttgacaagctggagggtggctgcccggcctcctcgctggtcactctctcggaagaaggggagggtatggaggctgggtgtgcagagccgagggtgcggggctcaattatgcagggctggacattcaggatggagtgtgtagagctgggtgtgcagggccaggtgtgcaggggtggagtgtgcagggccaggtgtgcaggggtggagtgtgcagggctgggcatgcaggatggagtgtgcagagctggatgtgcagggccaggtgtgcaggggtggagtgtgcagggccaggtgtgcaggggtggagtgtgcagggccaggtgtgcgggggtggagtgtgcagggctgggcatgcaggatggagtgtgtagagctggatgtgcagggccaggcctgcaggggtggagtgtgcagggccaggtgtgcaggggtggaatgtgcagggctgggcatgcagggtggagtgtgcagggctgagggtgcaggactgagtgtacaggactgagtgtgcagggctgagtgtgcaggccgggtttgcagggccaggtgtgcaggaccagggctgagggggtgctgcctgcaggtgtagcccctgcccatagtgctcccacctagacctctcaccatcaccttcctgtccctcctccactctgggtctggggactgcagacctgagctcaaacgcagttgggaatatttcact

SEQ ID NO: 550 - DNA, 971 bp, Artificial sequence
  DNA replication origin
gtggctgtgggttgtcagcacatgctgcagtgcggaggggatgctgacggcatgggggtgtctaccaggaacacctgctctcggtttggagcgcagctttgcgcatctttgttttagagcctcgtagtatttttccaccccttgggagcaagtccatgggtagccctcctcctccgtccccttgcaccctccctttccccaaggagcatccacaggtctctcacacctggctggcctggccatgcggtggtttgttcattcattcaccccttcatcaacaagcttgctggtgcacctgcgtgtcggaactgggtgcgtgacagcgatcaagatggagttgggggctgctctcagggagcccagggcctggcatgggaagtgagctgtcaccccaactgagtgcctaatcacagttgagaggcactagagggggcaagagcggggcgctgtgggctctgatttggagacgggttagggagcctccctgtggaagtgacatttggggaagagaagagttgtccacacggagagcagctttctcatgggaggcccccaagcagggagagctgagtctggggtgaggccaggagctggatgggggtctaatagggaggatctgggggccgcggtgttttgtgccaagtcaatggaaagccagtgaagggtttgcaaccggggaaccaagatctgagttgtattctaaaaagtcactatggcagcagggtagagaatggaaatagagtgagcaggagaagctggggccggctaagaggcgtctgcagagggcaggggatgacggtggccttggtgtcatggaggagacgaggtggagagacgtgggtgtgttcaagataccctgagggtggacccgactggactggctttggacgggatgcaggtgaatgatccagtgcgtacggggctatctcccagacccctggtctgagccgctcggtgagctgctgggagga

SEQ ID NO: 551 - DNA, 1349 bp, Artificial sequence
  DNA replication origin
gatccgcctggtggtcaccccaacttcccaaaggatggctgggttgttcaaggggcaggaagaaaagttgccaagggctctggccaagcggcagctccagagaagtggcccaaggtcttcacctgcaggaaccgagtccctggagaggaatccagtcccctttccacagttaacccgattctggaaatgagctccagccactgggagaggcgtttgcttgtggttcagtccaatgtgagaaagtggggggcattaaagaggctacagacatggcctggacatgccgccatgccctccccaaacctgccgtcctgcgccggtggcaccctggatgcctctaagggccctcccagccttaggtctaggaatttgaggcagacctgcccagtttcaccctagagcagatgcctgggaagctgggcagctggcaaatggccacggtcctcactgccagttcccattctgtgaatgagggagaggcgtggccctcgacagctctggaggccgggctgctgcaggtggctgtgcattgtctggtggctgcgcgttgtctggtggctgcgcgttgtctggtggctgcgcgttgtctggtggctgcgggttgtctggtggctgcgcgttgtctggtggctgcgcgttgtctggtggctgcgcgttgtctggtggctgcgggttgtctggtggctgtggctgtgggttgtctggtggctgcgcgttgtctggtggctgcgcgttgtctggtggctgtgcgttgtctggtggctgcgggttgtctggtggctgcgcgttgtctggtggctgtgggttgtctggtggctgcgcgttgtctggtggctgcgcgttgtctggtggctgtgggttgtctggtggctgcgcgttgtctggtggctgcgcgttgtctggtggctgtgggttgtctggtggctgcgcgttgtctggtggctgcgcgttgtctggtggctgtgggttgtctggtggctgcgcgttgtctggtggctgcgcgttgtctggtggctgtgcgttgtctggtggctgcgggttgtctggtggctgcgcgttgtctggtggctgtgggttgtctggtggctgcgcgttgtctggtggctgcgcgttgtctggtggctgtgggttgtctggtggctgcgcgttgtctggtggctgtgggttgtctggtggctgtgggttgtcagcacatgctgcagtgcggaggggatgctgacggcatgggggtgtctaccaggaacacctgctctcggtttggagcgcagctttgcgcatctttgttttagagcctcgtagtatttttccaccccttgggagcaagtccatgggtagccctcctcctccgt

SEQ ID NO: 552 - DNA, 2183 bp, Artificial sequence
  DNA replication origin
cagtgcacccagaaccttccagaagaaggagctccagctgccactaagcatcactctggactctggtgactggcgccacgtctgtgcctcatggcctgtgttcccccacaccagagtcccagggcaggcccacgtcccctcaccatgcaccagcagaaacctccaggggacagggacggagccgaggatcagggactcctgccccttctgctgaggacattgagcagtccccaggcctgcatctgagacggtaaccacagaatccagggtaggtctctgcccgcaagcaccggggaggcatgggcgggtggtaaggccgctgccctcagcacctgcacaccccctggatggggctcccagcccggaggtgcctggggactctaaggcgtcacggggctccccacccagcaccctacagggcagctcttgtgctgaagagggaacagaaggaggttctgggccaggtgtgaggatggagctgcagccatgaatgggagcaggtgtaggtgtgagtgacacacgtcctgtgtgtgggagtgagtgacacgtgtcctatgtgtgagtgtgagtgaggacacatgtcctgtgtgaggacgtatgtcctgtgtgtgggtgtgagtgacacatgtcctgtgtgtgggtgtgtggacacgtcctgtgtgtgggtgtgagtgacacatgtcctatgtgtgagtatgagtgaggacacttgtcctgtgtgtgggtgtgagtgacatatgtcctgtgtgtgggtgtgtggacgcatgtcctgtgtgtgggtgtgcggacgcatgtcctgtgtgtgggaatgagtgacacatgtcctatgtgtgtgagtgaggacacacgtcctgtgtgtgggtgtctggacgcatgtcctgtgtgtgggtgtgagtgacacatgtcctgtgtgtgggtgtctggacgcatgtcctgtgtgtgggtgtgagtgacacatgtcctgtgtgtgaggacacttgtcctgtgtgtgggtgtgagtgacacatgtcctgttgtgggtgtgacacatgtcctgtgtgtgggtgtgaatgaggacacatgtcctgtgtgtggacacgtcctgtgtgtgggtgtgagtgacacatgtcctgtgtgtgggtgtgtggacgcatgtcctgtgtgtgggtgtgtggatgcatgacctgtgtgtgggtgtgacatatgtcctgtgtgtgggtgtgaggacgcatgtcctgtgtgtgggtgtgagtgacacatgtcctgtgtgtgaggacacttgtcctgtgtgtgggtgtgagtgacacatgtcctgttgtgggtgtgacacatgtcctgtgtgtgggtgtgaatgaggacacttgtcctgtgtgtgggtgtgaggacacatgtcctgtgtgtggacacgtcctgtgtgtgggtgtgagtgacacatgtcctgtgtgtgggtgtgaggacgcatgtcctgtgtgtgggtgtgtggacgcatgtcctgtgtgtgggtgtgtggacacatgtcctgtgtgtgggtgtgtggacgcatgtcctgcgtgtgggtgtgagtgtggacacacgtgctgtgtgtgggtgtgaggacacatgtcctgtgtgagtgacacgtgtcctgtgtgtgggtgtgacacatgtcctgtgtgtgtgtgaggacacatgtcctgtgtgtgggtgtgagtgtggacacacgtgctgtgtgtgaggacacatgtcctgtgtgtgggtgtgagcgaggagacatgtcctgtgcatatgattgagcatggtgtgtgagcatatgtctgcacataagcatgcatgtggcgtgtggccttgtgcacgctcgagtgagcatgtatgggcatgatcgtgaataggtgctcacagatgtgtgtgcgtatgcgtgtgtgtgtgccaatctgtgcaaggcagtgcatgagtgagctcgtctggtgggcggcgggtgcagatgcaaacgtgtgcctggcacaggggtctgtgagtctggatgtgactccataggaggagagacgtggggtgtaggggtgggggtcacagtgggacagcaggtcctgccaggccatttgtgaagcccgtgctgtgtctgcatggaggaaaagggagcccagagcctggggggccagctcagccaattcccacgctgggactcggggctggcatgcggcccgaacggaaaaggaaaagcaaatggc

SEQ ID NO: 553 - DNA, 1540 bp, Artificial sequence
  DNA replication origin
gtggccaggagtggccaggagggggcaggagtggccaggagggggcaggaggggacaggagggggcaggagggggcagaaggggacaggagggggcaggagggggcaggagtggccaggagggggcagaaggggacaggagggggcaggaggggacaggagggggcaggagggggcaggagtggccaggagggggcagaaggggacaggagggggcaggaggggacaggagggggcaggagggggcaggagtggccaggagggggcaggagtggccaggagggggcaggagggggcaggagtggccaggagggggcaggagtggccaggagggggcaggagggggcaggagtggccaggagggggcaggagaggccaggagggggcaggaggggacaggagggggcaggagtggccaggagggggcaggacagggcaggaggggataggagtggccaggagtggccaggagggggcaggagggggcaggaggggacaggacagcctggagagaagctctgggtagtcgcactgaagcgtcctccctgggccgtgggtgcctgggggtctgccccagagtcgagggccaggcaggctgggcacagagaagggctccaaggtcctgcagccccagccttcacagaggcagggccgggcccaagctctctagactcagttcttgctccatctgcaaatccagaatcccaccccttctctctgcccctcctgaccccctgaactgagtgagccctgtcacctctcacaagggccaccatgaagcagccctcactcccacctctgccctgcacggcaggcccagcccctcctttgcacagactctgcccctgccctcatgagggccccaggcctatccccctgtggtggggtggaaatcctgtcccccaaatattcctgccttcctgtgacctctaaatgtgaccctgcttagaaatggggtctttgcagatgtgatgaacaccacgactgagatgaggccctgctggattagggtgggccctagggcctatagaaaaggccccagagacacacagaggggagatgaccatgtagagacggaggcagagtggggaacgaggcgtctacaaccacggaacgccgcggaagctggaagagataggaaggaccctcccctagagcctcaggagcaggcacagccttgctgacaccttgatctgaggcttctctcctccagaactgtgagagagtaaactcacattggtttcagtgcttggctcgtggtccctcgctgcagcagccccgggagctcatacctgcgccccccaccccacgcccgtcccatttgctccagccacaagatcctgcctcagggccccgcaccttctgttccctactcagtgacctcttcccagggacgtgcaaggcccacccctcacatcagtagaccaccaccacccggacagaggagccttcctggacccccatccaagccagcaccacccagcccctctgccccttcctcctgcctcactttactccgtagcatttctcactggcggctt

SEQ ID NO: 554 - DNA, 860 bp, Artificial sequence
  DNA replication origin
cgtcctgccagctctgtctgcctgtgctgtggccaggcactaggccgccatctgcatgtgggaccctggagccttagaagaacgtggtggctctgccctggcctggccctgctggccggagtggggtggagggcatcttggctgagaccctccccggggcagcccgggctgggctgaggctgggggcagggagcaggggagggtgggggtcctggttgtcacgtcggtggggtctccacacagatcctggacttgagctttggctttcttcttgtttttaaacattcgtttttagcgcaagatttgcttgtttgtaccttttacttttgcttgttttcatggtccggggaatccctgtgatctccttctctggccgctccctgttcaaccccatggctgggtcccagcaagtgaggggggcggtgggtgggtaggagtcagggttcacacgggctacccctgagccccaagggtgggaggggtgctgcctggcgcgtcctgtgctagccacagagtcattcatttatttggtcactcaattgtttgctgggttttggctcagctgctgccgagtcctgggggttcggggaccctggcagcgggtgcttgcccatgtggagctcatggctgggatgctgactgtgagcagatgcttctcctgtggccagggtgtgacgaggcctgcaggagtgaggatgagcagatgagggccattgggggcctggagggtggtgctggggactgcgggagtgtctggggggctgcctgggagcccggaacgtcagagagggagcagtgagtcagggtcagcggggggcctggccaaggcttttggacctccccacaccacgaggcctcca

SEQ ID NO: 555 - DNA, 648 bp, Artificial sequence
  DNA replication origin
gtagaggtgtgcgcagccgcgttcccccgatgccgtcccctccgagccccgagctgggctctggctatcctcgtgtgcccctgtgttcacctgcgtcagcagtaactgtctcagagtcaggcttgagggcaggggctgctgggtcgtcccccgaggctggttcagccgctccccgctgtggggatctcagtgtctcgatggtcccagcagggcctagtgagtgtgcccatctccatcaccagcctggctcgaggtgagctttgggcccgtcctgccagctctgtctgcctgtgctgtggccaggcactaggccgccatctgcatgtgggaccctggagccttagaagaacgtggtggctctgccctggcctggccctgctggccggagtggggtggagggcatcttggctgagaccctccccggggcagcccgggctgggctgaggctgggggcagggagcaggggagggtgggggtcctggttgtcacgtcggtggggtctccacacagatcctggacttgagctttggctttcttcttgtttttaaacattcgtttttagcgcaagatttgcttgtttgtaccttttacttttgcttgttttcatggtccggggaatccctgtgatctccttctctggccgctccc

SEQ ID NO: 556 - DNA, 775 bp, Artificial sequence
  DNA replication origin
ctggcagcagggaggggggtgctggccagccgcccctcggagggggtcccagcccccactgttgctgatggcacctgagctgtgcctgtttctttgctcctgtcgtctgggaggaacaaaggggtctttttagtggggagggggcagacatcaaagccaaggctcccccgggtttccactctgaggcaggggttctggggcctgccaaaggggattctaataatggggggaaacaataggcagcttggagcaggccgggggcggggagaggaagtggggctgccagcccgagtccccagggtttactgggggagagcgggctttttgttcccaggaggggacttgaaggcacagccgcatgaatggctggggcgggggtgggggtgcccctgggcctggggtcctgggtggggcgggggtggagagcccgggcggggaaggcaactgcaggtagaggtgtgcgcagccgcgttcccccgatgccgtcccctccgagccccgagctgggctctggctatcctcgtgtgcccctgtgttcacctgcgtcagcagtaactgtctcagagtcaggcttgagggcaggggctgctgggtcgtcccccgaggctggttcagccgctccccgctgtggggatctcagtgtctcgatggtcccagcagggcctagtgagtgtgcccatctccatcaccagcctggctcgaggtgagctttgggcccgtcctgccagctctgtctgcctgtgctgtggccaggcactaggccgccatctgcatg

SEQ ID NO: 557 - DNA, 1504 bp, Artificial sequence
  DNA replication origin
ggcagtggagctgtgtgagctgctggtggctgcagggcaatgagtgggcggtcctcacaggggctgcggggtccgcgggccgaccagccctctccaagggtctttcactttagggggcatggagcgggtggttggcggcctgttgggggcagctcgagttggaagaggcccagacaaggaggaactgagacttacgagccccgggatggggctgtgatggtgggaggcttgctggggctgtgggctggggtgcccccacctcccaccttccctctgctctaggtttgtagctgtcccactcagggtgagttccagagtgggagaggcaggccccttgccaaatgctctgccaagacttcccatgcgtgggggctggtgatgcctgtaggagcagggtggagacgggggctgggcaggggatggcgcggggtgccctggggtggagacagggtctgggcaggggatggcgcagggtgccctggggtggagacgggggctgggcaggggatggcgcagggtgccctggggtggagacgggggctgggcaggggatggcgcggggtgccctggggtggagacgggggctgggcaggggatggcgcggggtgccctggggtggagacgggggctgggcaggggatggcgcggggtgccctggggtggagatgggggcttggcaggggatggcgcagggtgccctgaggtggccgggctttgtggactgcacggtgctggtggcctgaggcagcgtctggacttggggagggggacgtcatgtcctctgggtagctggggtctctctggctgtgggcaccttctcaggctggccagatcgggctgcccattcccagcaggacactgccgtctcctggggggccttaccattttctgctcagccttagtgacagccgcagcccgtcccatctgagcaggagccagcctgtgaaccaaggctgccctggccacactgcctccgggaagccctccctgcctgcccgccatggtgcctcctctctgacctgggcccacacaggtcctcctgctgctcccctaactgcttcctccaggtctcctctgtctccccagctcagctttgtcctcctaggtgtagggggcagtggccattgcacctgtgtgtggggctcctactggggccgtctgcttcactgatggactcaaaatatggagtttgaactggcacctcccctgcctggcacagcccacccggtcccgggcaccatgggcccacttggctcatcccagaagccattctggctccagggctgggcacttccaactccccgagatgctcacagacctgcctggtactgagagccgagtgagcggtgagatgtgcgtcccaacgccagcctggagccaggaccaccgtcgggagggagggggccaggcaggggcagtgaggtagcgtgttcccgggttgcatgcagcacgaggccactgtcgctggctccagcatggcccctgctgcctccatgctgccccc

SEQ ID NO: 558 - DNA, 1325 bp, Artificial sequence
  DNA replication origin
cgggcgcatcttctactccttcgatttctctttctatgtctctctgtcttgcctctgtccctctctgcctctgtctccatcctcccgctgctcacatgcacgtgagcagttgtccttgcaaacacaaaggcctcagagccttgggacccctgggcaggtaccacgcggtgagctgtgcaagagtttcctgccactgctgcagtgagccccgacaaaccaggtggcttcaaaacagcagggctttattctctcccagcttcagaggccggaagtccgagatcaaggtgtgggcaggctgggcccctgcaggggctctgagggggcgtctgtcacagcccccagcttctgctgccggctgtctgggagtgccttggcttgtggccgccacttccgtctctgccttcctgttcacacagccatcccctgtgcctgcgtccaaatttccctcttcttataagggcgcccgtcactggattagggtcccccatccactgtgaatgacctcatgttaacttgactgcaggtgaagcagagaccctatttccaagaagtaaggtcacagccgggtggacctgagtttgtggggacattagtcactgcagaacaagcagcgggagacagggcgtcagggtgggcaggtggcacaggtggccgtctgtcttgctagtagtccttgctagagtgagggtggaggctgtttgggcagtggaggggtgaggacccaggcgtcagggcggcttcccgaggaaggacggcagggtgggcaggcggatcctggggctcatgtgacccatgctctggggaagcaggaaaggagcttcctcgagaggcagcgaaccttccagaaggcagaggagtaggcatccgtgtggccaaggcctcattcccctgatgaccccagccctgcgtgaaccagctccctggtggcagtggagctgtgtgagctgctggtggctgcagggcaatgagtgggcggtcctcacaggggctgcggggtccgcgggccgaccagccctctccaagggtctttcactttagggggcatggagcgggtggttggcggcctgttgggggcagctcgagttggaagaggcccagacaaggaggaactgagacttacgagccccgggatggggctgtgatggtgggaggcttgctggggctgtgggctggggtgcccccacctcccaccttccctctgctctaggtttgtagctgtcccactcagggtgagttccagagtgggagaggcaggccccttgccaaatgctctgccaagacttcccatgcgtgggggctggtgatgcctgtaggagcagggtgga

SEQ ID NO: 559 - DNA, 823 bp, Artificial sequence
  DNA replication origin
ggctgtgttgtggtgttgtggtggctgcggtcagaagggcagcaggcgtcagcccctcgtctggcttctgggctgtggagcctgctgcctgcctcaggcagggccgcggggtgatgggtgctccagcccggcccggcccagagtaggtgaggctgtgagtacagctgagagggcgcccgggtattcaggggtcttgccttcagccccctcagtgggtacttccctgacaaacccggccgggggccctttgaataaaggggctcccgcgctctgcagagcaaggtccctgagaaggaaggggtgggggaggggctctgagggtggagctgccgctcaggtccctcctgccaggcccacactccctgagccgtggcctccactgtgagctggtggctgcagaaggcagaggagtgggccccggggggggggggggggctcgttaccatgacgacccccgccctgcgtgaaccagctccccagcgttggagcccgtgtgggctggtgctggctgcaggagaacggagggctggtcttcacggggctgcagggactgcaagggtcattcccttttggggggatggagggggtggtcagcggcccagggaagcagcacgtagcccggcactgctgcagcctgggagaggggataaatatttaccacgcacaggcccaaacactctcagctctgccaaatattgttcgccgtggtggtcggtttctgtccgggcaagtggtttcatgtcctgccaagacggggtttgcaaggcgctcccagagcgtctctgtgcagtgcgcgtgcatgagcacgtgcttccgggaagcg

SEQ ID NO: 560 - DNA, 1256 bp, Artificial sequence
  DNA replication origin
tgcccagatgggggagctgaatggagttggtctgtgtggtaaacatgtgtgctttgggctgttggagaaggaactgagtgccagaatgggcaggaagccagccgagatgaatttaattttgaaagatgattccccaacgggccgtttagcggtctctcatgaacagcaaatcaatccttgtgttggcctcaaaggaaaacgtgcggcagtggaggaggaggaggaggaggaggaggaggggagtcgctggcgcccccacccagcactccctggccttgctggcaggggtgggtgggcgagggccaggtccaggtgaaggcctcctgtctgacagcctccccgtccaggggccacagaggggccctcaggctgttcccgtccagcactccccagcagggcctggtgctctagggcccaccacaaacctggcggtgcaggaccaagctgcagctggctggggactgacagaagaagctgccacgtcgagctggtgaagaggagggggtccaagctcccaagaccccaccctgggtctggctttactccagaaagtggaggccttttcaaagccatgctgtccctgggttgggggccttggcatccgcagtgtgaacggccctagtcctgactccacatgacggcgggacattcctctttcctgtgattccaatgcctttgtccgaggagagctgcaggctcagaagggacacaacagtggccttcgctgctcagccagccacctcctcccaggaccagccaggggcttccaggggcataggctccccagagtcccaggggtgggctgctgcttggcggaggtggatgtcccgctgtctctgctcggatgtccctgctcttgcgaggggcctctgccaccagtgcactgtggaaaccgtcagcgaccttcctgggcccgctgccggactcagacttgctggggtctccaggggaggagtggagggtctgcttcctgtgtcctgcctctgcacctgggctcgggaggtccttcgtgaccctggggcaaagctgtttgaagtggtggaaatgggttgcagcagagttggctctctttgctcatcctttctccaagcctcccctcctctcccttctctgtccttcacatcctgctcttctcctggggagcctccctggctgcagtaagtggcggtggctgcgctgggggcctgtgcccctggtttatcttcttggctgcaggcgtatccactggaggcctctgctcacagatcgtccaccag

SEQ ID NO: 561 - DNA, 1092 bp, Artificial sequence
  DNA replication origin
gggcgcagggggcgggcgagccagggcgggtcgggactggggtccgggctgggggcgggccgggggcgtggcggctttccaggctctgagtccggggcactgtgctcaacgcgccggggcgagttcctgcagggtggacccggcgatcaggtctccgcggtgccactttgggcgcgggcgggaagccgggacgctccgcacctgcagcgaccttgggctccgcggagcgggcgcgggcacctgtggctgcgtcctatggcgcacgtggaggcggaggctccggggagccgccggggccgcctgtgagccggagagcggaggaggcaccggcgcgcacgatgtcgttccttgaagaggcgagggcagcggggcgcgcggtggtcctggcgttggtgctgctgctgctccccgccgtgcccgtgggcgccagcgttccgccgcggcccctgctcccgctgcagcccggcatgtgagtagcaggagctgggagggctcggccggtcgtccagggaccccggggcctctggaggcccgtggtggaccgagctccgaggctttgtccctggggctccagaacaatgggctgtttgcgttaactggggaggaggtggctgagacacagggctccagggtcgagtctggggcccttctgtggcagggcccctcgccgtgtcccctccccccctcccactctccccttcttttgctccgtgatgtgggtcctgcaggctcaggcagatactgtacttggaagcggtgaggaatctgggcccctttccgggcagggtctggccccagagcccggctgggagaaggcagagaggaagccgtctgttcccgcttccctccaaagcctgtctcctggggtctgggggccttcgcaggggcgagcagtgcccagatgggggagctgaatggagttggtctgtgtggtaaacatgtgtgctttgggctgttggagaaggaactgagtgccagaatgggcaggaagccagccgagatgaatttaattttgaaagatgattccccaacgggccgtttagcggtctctcatgaacagcaaatcaatccttgtgttggcctcaaaggaaa

SEQ ID NO: 562 - DNA, 1414 bp, Artificial sequence
  DNA replication origin
aacgggggcaccaactggtagctggggttttagaagacagtgaactagctcacctcttggggattcctggctattttgtgcctgtcaatggttgttgttgttgtttataagcagcagattacagggttaggcgaaggtccccagagccagacccctatgttcagttcccggatctgcagttcacaagctgggtgatttggggtgctccccctcctgtgacctaggtctccccttctgtaaagctggggtgacagcaaggctggccagacggccacccacccccagaggactgtagcctccaggtggtgtggaggcacagacagcctgtgtgtgttgggggtactgttgtccctcctatcgggacagtcagggggtgctcccttcccaagcccctcccagccagggctccctccagtgctccctattagcgaagttcctcccccaaaccacacgaagccttggagggggaaggttccaaggaacagggcctggccaggcttcagtggctgagctgatggtcagcgcacctctctagcagggaccggcatggctggctctttgtgtggctaatgagggggccacacctggcccccatccggtctcacccaggttgcacctccctccgctattcaaaaagagactctcctgagtgtctggtagctctgacaccagagactccatctccatccctgagactacctggtcctggcccctggagtcaatttcaaaccaaaaccaggtttcaaaggagacaagtgaatcttgcttcgcagaagcctcaccctagacagtgcctctctgcccatgggcaccctagaagttagcaccctagacagtgcctctgtgcccatgggcaccctagaaattagcgcctcctcctgtctgtggctgctgggaccccgcgcccacccactccaggccactgtccaagaacatgcagcacagaaagaggaacggggatgcccagaaggtggttgggaaccaacaatgcaggtccccgaagcaggggtgtccagggtgcacgcgggctgcagaggctggccacgccctcctcaagcccttccccgacccctgccctgcgggaagtgggtgaggtgtcagggcgaaggtggacggagcgtccacgggcaggacaagccgaggctggcttccccgtgggacttgagaagtgagggaggctgagggctgtctcctgagatcgaggtctggggtccgggatcccagagagctgcctttgcggggtgtggccccctggcgcccggcccctcctggattggtcactggagtcggttaggacttggactttccgcatgagacgagcagggagcgcaaaggggctgcgccagccccgcggggtctggggcgggactcgggaaggctgtgggcggggccgggaccggagaggggagggggc

SEQ ID NO: 563 - DNA, 2267 bp, Artificial sequence
  DNA replication origin
ccgagtcccgcagttgcagcattgccgcaccccttaccgaccccgaccctgacgccgacgcgaccgccgtcgccgcagccaccgccaccacccggccgcgcccccggccccgccccgcggaccgccgcgattggctccgccttgccggccccgcctctggctccgccccttcccgcgtccgccgaccctcgggattggctctcctcctgccgttttccgcgattggctctgccccgccgccgttcacaatcgctcccgcccctcgccgggccggaagcgaccgtcacgcgcaggctcacttcctgtttacacaacgagaaggggcggggccgaagccggttgccagggtgtcgcggagcggctgggaaggaggggctgggaatcttggagccccttggcccgcggggaaagcgggtgacccgccctgcaagtgggatgcccccttcggccttctggagcgcaggtgggggcgcgcgcccatcgggggctcgcactgcacggagggtcgcggtgccggggagctgaggttggaggatgcagggcggcggccctggtgcaccgtgggggagttcgcacgccgggcagcgatcttctgccgggacctggcgttcttcacacacggcttattcgtgacggatccacagagcaatgcactctgaagccggagggtagaaagtgctggaatgcgcgcccgggcccaggctgtcgcgagccttcagcaagccagtgcacacagagagggctgcccagagatcccggtcagcgctcgcagttcgaggtggaacatgtgtgtgccctgcgctagccccagctcccggaggtgcccccagcgcgtgtggaggggggcggtgaacggacccgcaatctggtggaggctgcgggaaggaggcgcagagtccaggggtcagggttaccttcgggcaggaggacagatccctctgctcggaggtgaggaagacacacgaggcgaggtgcacacaggcgaggagagtgagatggggggagaatgaggagttcaggatacatctgtttacttcagtcagggagtggggatggagcggagtatttgtaaagatggacggtttagaatcgccgggatgagaaccgggcagggagctgatcagggaagggcatggggatctctgagcagctgggagaccccagggaagtttgcagtggcgcctcccacgcggcagctgggggagtggaagaaaccaatgctggctggtctagatggaggagtttgctgggtagcggtggtcaaagaccagagagaaaagggaggccaaaatcctagagggagtgttgcccaagaatggtggagtgcagggattctgccccacttgccagcagacaggccaggctgccaaagttgcatgggcgctggcagaaagacccaatacccctggagtcagagaggaaagactacaacaggaaacgggcgacgctggtgtgcccagacgcatgttgcaccacagcgggtgcactacaaaacaggaccctggatcctgtggaccaatgtggtctttgtcccacagggaggctgtctccccggcaagggtgcccactgcaagcacaggcgtgagaaatggcccagaaaagagtggtcagggcaatgtgttcttggcacgcccagcaagacctgccagagggacctacagacgagtgtctcccagctatcttaccagcggggaccttgaggtccaagtatccagtccggttagaaatggccgcggatccaacaggtgctggtgagtgggagaatacccctgagggaggaagaacagaggccgggagggagctgagtggatgtagatgagaaatacctggacagctgcaagctgtagtcagtgatgggcaactggaaccagagattccagagagagggagggagaaagagggaggagaagggagaatgagaaagagagggagagagaatgggggggagaaagagggagaatgggggagagaggtaggagcaagttctggaccacgccaaggatggagctgtggtcctggaaccagatgtccagggaatgggatgaagtgacactggctggggccgaggctgcagactgctggtgggagctggcaggacaatgaggattctgaaccaggtgcctgagccttctgtggatatggggagtgacttggatgtctataaattccagaaatgataggagggatagatgatggagggactgtattttagacaataaacaaatttcactcagtatggatgagtttcctggggcttctgtcacaat

SEQ ID NO: 564 - DNA, 1437 bp, Artificial sequence
  DNA replication origin
gcgattgtgaacggcggcggggcagagccaatcgcggaaaacggcaggaggagagccaatcccgagggtcggcggacgcgggaaggggcggagccagaggcggggccggcaaggcggagccaatcgcggcggtccgcggggcggggccgggggcgcggccgggtggtggcggtggctgcggcgacggcggtcgcgtcggcgtcagggtcggggtcggtaaggggtgcggcaatgctgcaactgcgggactcggtggactcggccggtacgagccccacggcggtgctggcggccggcgaggaggtgggggcaggcggcggcccgggcggggggcggccgggggcggggacgccgctgcgccagacactctggcctctcagcatccacgaccccacgcgccgcgcccgcgtcaaggagtacttcgtgttccgggtgaggcaggggccagggccggggcgggggccgagggcgcggggcgggatgggggcgggtggggtcggaggcgggcgccgggcggtcccgcagggagcgagctgtgacctgtgatctttgcccccgtcccccaccccgcaacccgcccagcccggcagcatcgagcaggcagtggaggagatccgcgtggtggtgcggcccgtggaggacggcgagatccagggagtgtggctgcttaccgagtaagccggggctgcgctctccttggtggggggactcgccccgagccgccgcgcagcaccttgcgaggacttcccggggtgctcgtgccacgctcaggcgccccgtgccgcccctgctgcccttccaggcgggctggccttggctaagtcgagacagccgcgtccagtgtggactgaggcccctcctctgcctacagggtggatcactggaacaatgagaaggagcggctggtgctggtcacggagcagtccctgcttatctgtaaatacgacttcatcagtctccagtgccagcaggtggtgcggatagcgctcaacgcagtagacaccatttcctacggagaattccagtttccccctaaatcgctcaacaagtaagcctgttcagagtccagtatcactggacctaagcaccagagtggaccttacaattcagcccttttaaatcagccccccaagcggtgtgtcttctctgtcattaattataagcacaaaggctccagctccaaatatcaatgggaagttccttaaaaagaagcgacttctgggcaattgagtgcattaaaaggaattctggcacagaaggcagctattaggctggtagtaaaaagacttacatgagttcaggatgcattgaagtagagcccagcgtgttaaaaaggaacttggatgttcttcaggaaaagtccaaactctgcatttttctccagccagggacagattgcatatgacacatcaagtcttgctctggctaattttttaa

SEQ ID NO: 565 - DNA, 1229 bp, Artificial sequence
  DNA replication origin
gccctgcctccccgcccgcgcacccgcccggaggctcgcgcgcccgcgaaggggacgcagcgaaaccggggcccgcgccaggccagccgggacggacgccgatgcccggggctgcgacggctgcaggtaggaggcccagggccggggggcggttcggctccgcgggcgggggctggagcgcagcgctgggcaggcacctgggctcgcagctccgaagctgggaggtgaggggagagcgatcggggacgagctgggacaaggcgacacaggggctccctcggagttggatcggcccctgggacttggcgctcgcgagaggctggagcggccagagtctagcctgcgaggagacgcgggtcctgccctcagcgccggccgcctttggcgccaaagacagccccgcaggggttccgggagggccctcctcctgctgtcccctctccaccccgggctccgagggccgttgggagggtaaccccgggaagaggccggggtgcggggcgcgggtgcaggtggaaatcgccagcaagctcctccccgcccgcgcgctccctccgacctgcagggctgtgccaatcccgaggcctcagcttccctgaggagccagggccaggcccccctctggacagggagaaggatctgggcgggggccttgacccatggagttggttactaagcggtttcgatggtttcccgagggacagctccctgtggctctgagtttgtctgtcgagggctcctggcctgtctccggagcggtcccaggtagagaaagcccgtgaagaaatggcccgggccggcctggagggagacacctcacgcccccttagctcctgggccgcctcctcctgcagcccctgcctttcccggggcttggacttggggagcgatgattacctttgctcagcttgtattttggcctggacgctaggagataagcccatgtagtatgcacacgtctgctacataaacaggggacagatagacgatcttcaaccagcaagggtgcagggaaaagcaatgcaccccaaacttctgaccagaggtcatttgcttccaaagatgctgccatctgtttattcactgtctggacatttggaaatggctcaggctcattaacacaatgctttggtttttgttgttttgttttttgttgctgtcattgctgtttatttgttcagccttagctctgggggaggagtaaacaaagcgcgtggcctctggcactt

SEQ ID NO: 566 - DNA, 1118 bp, Artificial sequence
  DNA replication origin
cctgatgggacaagccacagctctggggagccatctgccccaagtggcacatcagggctcctcgtgtgaccctaggatcgggggcagaagtggctctggtaccgccacctccaccccttggacccaccaggagctctttccacttcctgccaaggaggcgcagagtgactgccccagcctggcacgtccgggggcttcccggctgggggccgccatcctcagcctcacacagctgatccagaacctcccagttctccccagccccctcactcttttgtggccccggagcctctcccggcaacagcaagccatgccccggcctccccggcactcacgcagctactcccaagcctgaccatgacgtggacggcaggaaggggctgggcatgtcctgttccttctgcctgggtcctgcttccagggctggactcccaggctggggaatcctcagggacccatcaaactgggggacaggggaggggcttgtggggatttgctgtgaggagggcagagtgtgtacgtggcagtgcctgcggacacatgtgtgcgcatatgtgaataggtgtgtccatgtgcatgtatgtgcaagtgtgttgctagaggtgagagggtgggtagggaaactgagtgaccagctcctccctgaagccttgggggaatgtccgaggggccagggcctctggatcctgttcccttggctctttgcaaagtctccagcctggcctcctggatgggcatgtggctcggggggcgagaccatgggctcttcctggcttgctgtgtcgctctgggtgcgttttacaccactctgaggatctctctgctcatccctaaggcagggatgatgatggggccaggggaccacatgggcacaggtaaggcagggatgatgatggggccgggggaccacatgggcacaggcttctggaatgtgggtgtcgtctccctggggtcccgcagtctgaactcaagactcaagagccccatgtccaggtggggatgtacaggagccccttagaagtggggaagaaggccaggcgtggtggctcacatctgtaatcccagcactctgggaggctgaggcgggtggatcaacagaggtcaggagttcgagagca

SEQ ID NO: 567 - DNA, 1378 bp, Artificial sequence
  DNA replication origin
gtgtctcctcccacaatggcccaggtgtctcctcccacaatggcccaggtgtctcctcccacaatggcccaggtgtctcctcccacaatggccccaggtttctttgccacttcagattggaatcgttgatctgctgaaataacaggtaaaatcattggtggtttgggaaccaccggaatcagaagtgcattgagatgtttgctttaggggtggcccggggcgggtggagttcctgggggcttttccctcctccctgaatggaggaggacaccctgcacccctcctgtgatcccccttaagagccagtgtccgggatggctgggccagacggggcagaggggcctgtgtctcctgcccaggctgagtgcggacggctcggtctcagagctccaccgaggggtgggtaggtaacagcagccctgcggccagggcccctgcaggtgggagtgggtgtccccatggggagtgcctcttccagagtgggctcagtcggggtggagtgtcctggcttatcaaaggtggttgtggagccctgtctgccccaggcctgggcagaggtggaaggggttggggaactgacgaggccttacctgtgggcccatggccaaggaaatgtctggtctcccacctcctgtcaggtggtgaggggagaggatggggcgtcagccggagacggggttcctagaggaggctgggtcctggcctggcctggagagatagggatgagatgggagggcaggaagggggtggtagacaaaggctgaacacagagagcacatagccaggcatgtggggactggggacaggggacaaggagggcacccatggggacaagagatagggagaggacagagggacaggagacggggagggacagaggatgggggacaaggaggggacaggaggacggggacagggaggggacacagaaacaggagctaggacggggacagaggatgggagaaggagaggtcaaagggacagggaacagggaggggacccatggggatagggcagggatctatggggacaagggacagggaggggacagagaaacaggagatggggaggggacagagggatgcagacagggaggggatagaagatggggggctaggggacaaagggaaaggggacagggaaggaacctatgggggacagggagacagggggacagggagaggacagaggaacaggggacagggaggggatgcttggggacagggagggaatgcttgggacagggcagggggacagggggctgtggctttcgtgggaagctatggaagacgaggccagaggggttgggcagggtgagatgagagaggctgagagcccctcaccggctgcggactcctccccacagggcagaggggag

SEQ ID NO: 568 - DNA, 1313 bp, Artificial sequence
  DNA replication origin
ctctgtgagtgcgcttggctggccagagctgggggcccccctgggaggcactctgggctagcctcagccaccttcgctgggctaactgggccagagcaggaggggtggccccgggaggactctgggctagccccagccaccctcactgagactttgggctaaacttggcaaccctcactgggattctgggctagcctcgaccacccttgctgcactaactggaccagagcaggagaggtggctccacactagtcttgggctagccttagccaccctcatcagcttggggacagggcgggtcggaggggcagggaagagggactgctgccctaggccttccctggggatgcaggaccaaaattcagactcttttctctggccagctctggagagggcccatggccagcagaggcccagaataacagagcccatgactggctctgcctctctggcactcacagcagccctggaatggcaggtggaggacagagatgggatgagagggaatgggaagggcaggagacgtaggcctcaccaggagtctcaggctagccttgagctctgggcctgggaggtattggggtgacacccaaactggggactgacgcttctattttcctctccctgccccagggaaccagacagcacctacttcgaccttccccagtcaagccgggggaataatgaggtggtgggcggaacggattccagcatggacgtcttccacctggagggcatgactacatctgtcatggtgagtgggggggctgccctctgcaagaggactggagtggggacaacaaatgtggcctgtcctgtcttgggagcctggcagaaccaggagatagcctcttggttgtacagcttcccctgtgggtttctgaggacacttcaaattgcaaaggagaaaatgtatcagctcatgtaactgtcaatccagagataggaatggattcaggcatggctggatccaggtgtaggaagggcttcaggcatggctagatccaggtgtaggaagggcttcaggcacagctagatccagatgtaggaagggctttggacatgggtgggtccaggtgtaggaagggcttctactggtggatccaggtatagaaagggctttgggcatggctgtgtccaggtgcttcacagctgcctcgctcagtctcttggtctgctttcccctgcagtgactttgtttttaggccgcatctcctctcatggtgaagagtaccaggctccaccagcatgccctatccctgtggagaggagatccctcttttcccatagtccagcagtcctgcctcccgttg

SEQ ID NO: 569 - DNA, 1781 bp, Artificial sequence
  DNA replication origin
ctggcctccaccatcagtggaacagggtgacaatggaatggagtggggtgggcctccccacacagggacccccaaaggaagatggaggtgctgtttccaggagaagaggactggatagggggcaggcagggccagtgaggcctccggcaccccatcttggcaggctcccccattcctgggagtctcaagccctgccccattggctgctcctctgggggaaaaggccaggctgtgggagctggtgggggccacgctcctgcctacctctctggctgcccatagccaggcctcgactgtgccgggaggtggatggcaggtgggcaccacacgtgaggagagagcaaagatcccgacctgggaggcccagcgaggccagccgtccccgctggactcgtcagctgctcggccccgcccacaggctggctgccccgccccgcctccgccgcccagggattcgtaggtggggaatttgtttgcgctgcggaaaaccagcccgaactgtggggatacgcggaacagcgcgtctggggcagggtcgggcctccctcacttatgctcagcccgaaagggagggaggcgatgctgggcctctgggggcctgagagcacccggcctggccctcctcctccctcaagtccccattccaggagctggagccccttccttgcccctgcgcacgactgactgtctgaggcatgggggtgggcggcccagccaccctgagcactggagggagtgggggctgtggggctccagtcagaacgaacagagtgaagcggggtgggggagtgtagaggtggaggggccgtgttgcctgttccgtctccattgcggatgctgggctggcccagagccatgtggggccagagaaggcacctccttgggcagccacagtcccggggggtcaattcctccgaggagcccctcagcctgtatctgagggttcgaccgcctgcccctgccctcccacccctgctcaggagaccgtcccagtggaaacactcgacagtgtctgcgcgtgttctagtcccgtgttatgggtgaggaaaccgaggcagatgctgggaaagggtgggctggggatggggccgggtagtgcaagaaagtgagactgcaacctctcccctctctcgctttggaacagttctgccggctgctctctggggacaagggtcctgaccccaccccctccaggtccccttctggacatccgtgtcctccaatctggggaggggcaggaactggccgctggaccccagggagggagggaggaagacccataagattgtcccctgagatccagaagccacctcccaaccccaagttgctcagccactccccctgcagagggcagaaggcccctaagatggcacagacccaccctgtgtcgggaggaggacctggactcagggaggcagaaggagcagttctacattcctgagtgggtggagcgtgcttgtcctccccagccccggagggttccctgagctccatatcggggtctggtccgagcccccgcctgctggaacgtgccactccccagccacagggtgacagtgggagcctcgaacctccgcaaacagcaaggtggctggatctgtctggcagcgacacgcctcctcccaaagccatgtatgaaattcctaggtgcacagctcgactcacggagatgggggattccctggaatgaaggcaggcccaggcctgcgtggggagagccaagcctcattctgaccccagggcccagccccctcacaacagtggctgctgggccaagagca

SEQ ID NO: 570 - DNA, 851 bp, Artificial sequence
  DNA replication origin
gtggcagacggtgcttcttgtcagccccacgggctcttctcggtgtgggtctgagctccagggccaggacctgtggcaaactgggcttgaggcctcttgcgccacccgccccctgcagtgggctgctggcttggaagaggggagggaagggtctgcagcttgtggttggcccctgcagcctgagccctggggacctggcctcacttccagacttgccaggtccctgggggccaggcaggcaccagctgctaattgagaaggtggaaggctcggcacagctgctccacgtggggccgttcctcctcccagggaagcagacagctgggaccatgggtacctgtgccacacgggaaactcagccatgggcagggggcagcgggcagataggcagagtccaagtgccccgaagctctgctggcactgggatgtagaggcccaaagatctggggacggaggcctttggagccgtgggctccccaggcagtgtgaccagggtgtgtgtgacagcgatgtgtgtgagcgtgcacatcaatgtgcatgtggcgggtgggtattggtgtgcgtgcatgtgtgtgtctaagcgtggatgtgcatgcaatacgcaggcgaggatatgtgcagatgtgtgtgtgtatgttatgggtgtgtgtacaggctggtgtgtgtgtatgtacacgtgtttgcctgtgtgttgtggtgtgtgtacgtgtgagcagattggtactgcaggtgtgattgtgtgatttgggtgggtaggtgctcacgtgtgtccgtatgtgtgttgcgatggatacatggatgtctgtgcctgtagctgtgtgttcccaggcaaggctttgagaagagaggca

SEQ ID NO: 571 - DNA, 2202 bp, Artificial sequence
  DNA replication origin
ctgcactgattggcttccccccgccccagggccctgtcctggaggcccatcctgcccagaggtttcactttctgcaggaacagagtggacactggctccatggggcgcacgggagtgggggtgtccaaagctccagatccgtccgtgctgctcctcagcacaggggtggccacgttcccgcaacgcatggatgcccaccatgcggaggggcagggtgggaacaggccaggcccaagggtgcacagcccaggccctgcggcgagacaggctccagcccctccatagagagggcgcaggagagctaggggtgtctcccatcaccctggctaacctcctgagaccctaaagctgaagaacagcggccccaggaggaagtggggggcaaggggccatgaactggacatttgggaagtcagggagactcctgggtgttggtagacagcacccagctccgacgtctccagcgctcagcctcttctagaggggccccactcatccagccatcggctccttccttgctacaggcagaagtgggtaatgtctctgtgtccacctcggggttgggcattgatcaaccccagtccgtgggagccgcagactcagaacgtggccttgtttggccagagccaccacaggattatccagtcccccatgtggaaggacagtgtgggaagcaagtgaagagcatggctgggattgcgggaggaggggctgaggctgcatggctgggattgcaggaggaggggctgaggctgcagggctgggattgcgggaggaggggctgaagatgcatgggtgggattgcaggaggaggggctgaggctgcatggctgggattgcaggaggaggggctgaggctgcatgggtgggattgtgggaggaagggtctgaggctgcatggctgggattgcaggaggaggggctgaggctgcatggctgggattgcgggaggaggggctgaggctgcatggctgggattgcaggaggaggggctgaggctgcatgggtgggattgcgggaggaggggctgaggctgcatgggtgggattgcgggaggaggggctgaggctgcagggctgggattgcgggaggaggggctgaggctgcatggctgggattgcgggaggaggggctgaggctgcatggctgggattgcgggaggaggggctgaggctgcagggctgggattgcgggaggaggggctgaggctgcatggctgggattgcgggaggaggggctgaggctgcatggctgggattgcgggaggaggggctgaggctgcagggctgggattgcgggaggaggggctgaggctgcatggctgggattgcgggaggaggggcggaggctgcatgggtgggattgcgggaggagggggctgaggctgcatggctgggattgcgggaggaggggctgaggctgcatgggtgggattgtgggaggagggggctgaggctgcagggctgggattgcgggaggaggggctgaggctgcatgggtgggattgcgggaggagggggctgaggctgcagggctgggattgcgggaggaggggctgaggctgcatggctgggattgcgggaggaggggctgagaatgcagggctgggattgcgggaggaggggctgaggctgcatggctgggattgcgggaggaggggctgaggctgcatggctgggattgcgggaggaggggctgaggctgcagggctgggattgcgggaggaggggctgaggctgcatggctgggattgcgggaggagggggctgaggctgcagggctgggattgcgggaggaggggcggaggctgcatgggtgggattgtgggaggaggagctgaggctgcatggctgggattgcgggaggaggggctgaggctgcagggctgggattgcgggaggaggggctgaggctgcatgggtgggattgtgggaggaggagctgaggctgcagggctgggattgcaggaggaggggctaaggctgcatgggtgggattgtgggaggaggggctgaggcggcagctctccaggccaggcccccctgcgtccccatctgcagcaagtaaccagtggctcccattgggccccgcagccgagcagctacggtgaacaccgtcctcatcatagaggagactgaggctcagagagcggcgtcactgaccaaagactcagctggcagatgccagagagacagaccccaa

SEQ ID NO: 572 - DNA, 1670 bp, Artificial sequence
  DNA replication origin
ggcctggcctgttcccaccctgcccctccgcatggtgggcatccatgcgttgcgggaacgtggccacccctgtgctgaggagcagcacggacggatctggagctttggacacccccactcccgtgcgccccatggagccagtgtccactctgttcctgcagaaagtgaaacctctgggcaggatgggcctccaggacagggccctggggcggggggaagccaatcagtgcagcaagctgcagttactaggcacctactctgtacgtggggctacggaaccaagggacgcagctggcagacgttctgggagggcccccggctgcagtgctggggatagaccacaggggggcagggccaaggccaggagccgcctgcaggctgggacgatccagggaatggggcagccccgccggtcaggtggtaccacaccgtgggattctgggcaagatttgctgatgggctggatatgagggaaggggtgggggagaccccaagttttctgccctgagattggtagaactgcagcagagcaggggtgaaaacgccgcggtcggccgtggctgtgttggagatgcccggcagccattgcatagctgagaaggagccgcatgcagggaggaggacgacgagcgagcagttcccaaagccccatgagggaggggtttccagtggtcctggggcctgaaaagtgtgaccacctggtggctcagtcctgtgtgcatcagaggaggtggtgggtggtggtcaggcttagggtggagtttgaaggtgaccttagaggaagagcaggggaggattccagaaagatgctgaggttccatttgcacccttgcaggaggctctgctgctccccaaggcaggaaaggccggcagggtctggatgtgaggtgggtaaggagttggggccacactggcaggagcggccatgtggacactcagttgctggtgtgggcaggcaggctgtggagacgacctctagggagtcctgcacatgggcacttacagtcagggctctgggggatctgcacggaggcagggagagacagcggctggagctgagcactgggcactacgacatccgagacaccaagcagagggggagatgcagaggggcagcctgggaggccaggaggcacgagaggctggctgggagaacagaaaagggactggggcttggcaacccagaggctgctgagttcccacggtttggagagggcagggcccaactgggaatggctcatgggattgctgagcatggccaagggagccctcagcatcctctccaggccttgtgtcatgaaagaccccgagcagcggtggggctcaagccatgtggggccaggggagggaccagttgtcctaactggagatccagggatcagaggagccaccccactcacccgcctgctgtgcctagtgcacgcccgcctccggcccccctgccaccctcggccagctgctatttctgtctcctttgttctgtcccccattggacctccccccagtcaccagcctaataggacctcaacttgctaaacccaaactaaacttatcttcccctgagaggggatggtgccgtgtctcagccagcaggaaatccactctcgcctttgctcaggccagagccctggaggcactctccatgcctgaggtcctgtgaatcctgcctg

SEQ ID NO: 573 - DNA, 1350 bp, Artificial sequence
  DNA replication origin
tcctgtgaatcctgcctgcaaatgtgcctggggcccctgcggggcccacctcgcacccgcggcccacgtcgcacccgcggcccacctcgcacccactgctcagatacatctcacaattgctgcctttgctgacgcccgccctgtgttctcaacaccggagccagagggagcgctttgcagccccgggcgtctctgctcagctccgaccacctctcccgctatccccctgggctccgtctctccctgcacaggccctcggcccttcctctggctgcaggctctctgccctgctggtccccagcctggaaacacccccaggcccacccaatacctggggcagatctttcccttcctgcaggcccgccttcaccttttcccgagcccgtccttgcctggacgccagccctggcccctgtgcctggctctgtgtttctgagaccacttttgatcccaagcccctgcacgcttgctggctggtttgtttactgtcgtcagcatggagggccggggtcgtgtctcgtgccggctgccatcttcctgcacctgggagggtgctaggatgtcaagcctaggaaatgggtgtgaagaggagacctgcctttgcaggagctgaccaaggccagtgcactgggcgggaccatccgtcactcctgagcccactaactggggaggggacaggcagagcggggctgggtgattcctgagcaagcatgctgctgtctctctggctctggggcctctgccctctgcctcgatggccccccacagccgtcctggaccgccttctccacctttgggctcctgctccaatgtccgcttatcaccgagggccatcggaggtggcacgccccgtgactgcctccccctccctgtaccctgcactgcacgtgtcataattcaagttctcggctcagccacccattctcggctcagccactaatgtgtgctggaaggtgtccaggaagccctgctaagcatctgtcagtgtctccagcacagcaggaggctgttacaggtggcgcctgattcacatctgcaggacaggtggatggatgggcagacagatgggcaggggcatgtgtgcaaggacacaggatgtcagggctgacacctgggttgggctctggggtgctggcagcagggttcggagaggggagagaagcgtgtgtgagctgtgccttccccctcgtcttcccgggcactcggcattctgggtgggagggcctggaccagcccgtttccaggtggttaaataaagtctgtgcatcctgttggccacctgcctctcataggcagcagcacagggcctgatggggatacagcctggataccccactggggcctcccgca

SEQ ID NO: 574 - DNA, 1272 bp, Artificial sequence
  DNA replication origin
gacactcagggtccaggctgcccctcgccacaacctggaagggaggggctggtgggccagccctctggaggaggcctctcaggggaggtgggctttgagcgggatccgggaggcagggggcagaagctgagggacgtggagaagggtctgggggaggaggcggcggcaccgtgagtggactccggggcggttagcaggtggaaggcagtgagggttgaggagagggtggggcgaggcccttgcaccaggccacagtgggcggctcaaatgtgggtccgtggaggcccggggggcaccaggctaccctggagtcatctgaagtcacctgggcgtgtggagggacatgcatctgcaaggcccccatgtggcgctaagcacagagtgggtgctgcagacgggctcagccgctgcgggcaggtgcaggcaggatagcagcggtggccctgggcctcgcagtcctgcagacacacgtctggggactgctcctgggggcgcgtttctccggtgtgaggtgtggaaagttccacatggccctggcacgggattgggcaaggcctcgcctcagccccgggtgagagcagagggtgctgtgggtgagagcacagggtgctgtgggtgagagcagagggtgctgtggatgagagcagagggtgctgtgtgcacattgtcgggagagggaggcttccccccagccgcatgtcgaatcttgttggcatttccattcgtttaatcacgggctccgggagatgctgtgggaagtaccggcaggacggaggtcttgccctggtgggatgggctctcttcctccgaagcccaggctgcttgtcagtcactcacccctgggtgaggttggggcccaagttcagacatgcccacgagagatcagggagtttgaggagcggcatactctcaaaaaaccacaacagtctggtctcaatattctccagggaacgaggacacggacctccttgttctacaagagctggggtcacagctcagagcccctgtccaggctggagggagaaggccaggaggccagagggaggccagctgagccctcaggagactccaggcaggccccgatgccagactccagccctcaaacatgctgccttctggaaacgtctgtcacgggcacaccatgcaccatgccatggctgccagtggtggatgaagaagagcatgtctctgccccgtctggagctcccggttcctgtcctagttgaacagaatgaatgagagtgcgggataaatgccgggcggggagcaggg

SEQ ID NO: 575 - DNA, 1296 bp, Artificial sequence
  DNA replication origin
tcagagactgagaggccacccagtagctgggccccctccaggagggctgtggagggtcccgcctgccccctggcctgcctgtctgagagcagagaggagcagtgtgggggaggccagagctcagcccagccctgaagccccatcccactggctggacaccccaatccaagcaccagcatctaccgtcggccaagctggggacggtgatggctgaggtctgggggttcccacaaggtgggcaggaagtggtggccagggctgcccatcccagaacagcaggttcttctgggtctactgatgcccctacgccaccatcctggaaaccaggcctctctgcccatccaggagaggggcaggagagacctcccagggacctggggggccaagcagggctctgaggtcaggagtcctggggccaagtctcagctccacctgtgtaacctggcccatcgctccacctccctaggtcttcgttttctcatctgcagagtggggatgaaatcaacatgtactggccaggcgtggtggctcatgcctgtcatcccagcaatttgggaggacgaggcaggcggatcacctgaggtccggagttcaagactggcctagccaatatggtgaaaccccgtctctactaaaactacaaaaaaaaattagctgggcgtggtggtgggcacctgtaatcccagctacttgggaggatgagcaaggagaattgcttgaacccgggaggcagaggttgcagtgagctgagatcacgccacagcactccagcctgggtgacagagcaagactctgtctcgaaaaaaaccaaaaaagaaatcaacgtggacttcgtaggatggttgtggggatcaagagggtccagaagtatggtaacctgagacttcatcggaagtgactctcgcccgggagccctcctggaaccaatgtccaggaagctcccatgcacgaggcatgacctccacgccttggcacaaaaacccagccaggaggaacgacggctgggcaggctccgccgaggaacagggacgggaatccagattcactacgcagaggacagtcgctaagccctgggcacagggacggatggggaagagcaggtgctctcgggggcaggtgctcacaggggtcggggtctctcctgttccccgaggtgtccagatagccagtaccgacaggacgctcagaaactcttggttggatgaaacagaccctgaaatccacgcgggccatccaactgggggaagtggccacggtgtgccactgcccgccatgtcggccacagccccaagccca

SEQ ID NO: 576 - DNA, 1179 bp, Artificial sequence
  DNA replication origin
ggagggggcaagtgagccctgcctgggcacccaggccatggctgcaggaggggctctatgggacacatgttggtccggcccactgggcagcgtcccctcccccacgaggccccgcctccccgggcacagctcagtgctggccccctgaagtccatgcagggcggccgcattcccaccccctgtcgggagtgctgagcaaggggcccctcaggtttttccgctttaagaatcgggtcccactgccctgctggccatagctgcggttttcccacgctcctggagggccgaggggcagggcggagcctaaggtagactgtcaggctctgcaggtagccggacagtcctgccgggctggtctggggtctgggttccaggccccgcccgcccccacctgcggttgtttctgattctcactccagccacgggctcccccagctgctggctccgggctaagagaaggctcagcccggactcgctgggcttgatgggagggggctctgtgggctgttgggctgaggggcagaggacctggcacctcctccggggcctcccacctccatctggcaggcaatgccgaccccagtgctaacaccccgttttctccatttggaaattactcctccacgcaccttactgcacgatggagataaggatgggaagaccgtgccagggctgtggccagcacggtgcttagctcgcagcaggaggcccatgcgttgtcttaattgtggtggtggtgtgctggcctgggcctcccaaatgagtggttccgtggcagctgcacctgcctgtggggcaagggggaccaggcctatccttccaccccacttggaggtctgaagccaggtcagaaagccccaaggcatcctcacctgcacacctccagcagcaggagcctcaccactgcttctctcccacactcaggcttgttgcctaagtccactctctcccctctaaggacactgacctcctgccctggggtttatgatgctggtggtttctggagagtgtctccctggagtcctggcaggcagcttgtgggagctctgcctcccttcctcccatggtctgaggatgctgatggggtcttcaccatgcttggaatgcactgcatgtggtctgagctgatcctcatggaaggacaggagcaaccccctctctggctggcttcccccatct

SEQ ID NO: 577 - DNA, 1304 bp, Artificial sequence
  DNA replication origin
tccctgacagccccatggagtctcaacagcgtgaggggtttcacagctcctgcctggcccctgcagcccctcccctaggcccctgccccagcacccccggccatagtcctctgcggagcctgagctcccgcccgcctgggcctcagggtcagcagtgctcccatttcgcagacctaggcagcggcctctcagcagcgccctgctgagcccgccccactccctctgggtctccgggcagggtgaagtggcgatccttgctctggaagctgcgtggtggggcgtcccaggccagggcgctacgaagtgggtgcagggcccagtgcgtgctcccgtctctgcactgtctgagggactcccgtctgcaagaggtcctgggggcccaggcgcggggagcactgtggatgccccgccccgccccgccccggggaggagcttgggcgcgccgggagctgtccctggtactcggtgcaggcggcggccggaccacccaccccgggaagtgggggctcggactggagtgtggagcggcctagaacggacaggtcttcgacctgggccagtggcggagggaggcccaggcctcagggtggagagcaaggaggcccctgtcctcaggcgatgtgagcacttctcctcccctctggccagtaaggccaccaaggtcctgggcctggctctcctccccacaggtgtccccagtgcagtgctcacatggcctttggggcatacatgcctggcagacctcaccctggcactaactggaccccaggtgcccagccgggccggagctgggtggcctcggggaggatgtctgtgatgtcccctgccctggcagcatctgggggtgggtgacacaggtggccacaggagggaagggagccctgagagatccaggtccttctagagggtggctgagcccaggacggctccagcgctcccccagctccttcctcctgtctccccagcaggcctctaggcttcaggcctgggcttggccctgtggaaaacgggcaggaggaggaggactccggtggagcctattctataggaaaggtcacgtggagacacttcccctccgccgcccccctcctgccttctccttccctagaaccgctagatggatgtgtttcaacagattccgagctgataaaatcgtatttatcttcggctgttgacacggagccgcctggacttgcctgcccagggtgcgtgcaccgtcctgcttgcaggaaagggtttgcccaaacgccactgtgcccatccctccccacgctgccggctcctctccgaccctcctctccttc

SEQ ID NO: 578 - DNA, 842 bp, Artificial sequence
  DNA replication origin
gtcggcggctccttcctcacccacacccgccccactgtgcacactgctgctctgtccccacatccgcctcgggcactctcggggcctcagtgtgcccagctccatagtggggagtgggtcttcagccttgccctctgttggtgcccaacactggttccggcctggggctcccagacacagggatttgggagatggggaggtccccgcccatttagaccctggattggctggggcagaaccaaaccagcaacagcgcctgaaggggtggcaaattctacaaagggggttgagggatggtggaaagactcctaggccaggccaggggcccaggagaggtggcctgcaggaggctgaggctggtcagcagggtggagagccgggaggccccgctgggcaccacgtgggtggggggtgcaggggactggggggcatataggctggaggggaggggacacggagaggctgggggctttgacttttggcccaaaggcagcataagtttctgggacacaattctggagctgatgtggggcccaactggtgtgaaaggctggggtagggggaaacagagggtttgaagttactgcgggatggtggggcaggggcagaacaggaggtgaggagtgggtaccaggcccccaggggaaggcaggcaatggcaggcctctgccttccctgtacctggttctgagaccaggctccatgctgtacccagccccagcctcccccaccaggtccccatccctgtaccagacccccaggacaccccagactcctgtacccagtctccaggtcctccacaagcctctaccctgtacccaggcccccttcgacgtccccat

SEQ ID NO: 579 - DNA, 1350 bp, Artificial sequence
  DNA replication origin
atggatggatggatggggtgggtgtggggggtggatatgtgggtgggtgagtggatggatggagtgggtgggtgggtggatggatggatggattgactgatattgaatggatgggtgggtgaatggatggttggatggatggacagataatggggggagtggatggatggatggggtggatgggtggatggatggatgggatgggtggatggatggggtgggtgtgggggtggatgtgtgggtggatggatggagtgggtgggtgggtgggtggatggatggatttattgatattgaatgggtgggtgggtggatggatggatggatttattgatattgaatggatgggtgggtggatggatggttggatggatggatagataataaatggggggagtggatggatggatgaatggggtgggtgggtggatggatggatggataggatggatggatgaggtgggtgtggggggtggatgtgtgggtgggtgggtggatggatggatggatggagtgggtggatgggtggatggatgaatggatgggttgatattgaatggatgggtgggtggatagatgggtagataataaatgggggagtggatggatggatggatggatggggtgggtgttgggggtggacgtgtgggtgggtggatgggtggatggatggattgatattgaatggatgggtgggtggatggatggggttggtggatgaatggatggatggatattgaatggatgggtaggtggatggatgggtagataataagtgggggagtggatggatggatggatggggtggatggatgcatggatagacgggtgggtggatggatggggtggatggatggatggattgattgatattgaatggatgggtgggtggatggatggttggatggggtgggtggatggatggggttcgtggatggatggggttggtggatggatgcatggatggatattgaatggatgggtaggtggatggatgggtagataataaatgggggagtggatggatggatggatagatgggtgggtggatggatggggttggtggatggatggatggatggatggatgaatagataaatgggttcgatggatggatggatggacggatggatggatggatggggtgggttggtggatggatgaatgagtggacagatatacaaatggcaacaactatagagcagggcatccccctgcctacgtggagccaggaccagacatggagctgggggctgccaccttagtggattggggctgcgtgctgatgctagcccctctccctgctcccccatgtgcaggtggggacggaattcaccaccatcctgtaca

SEQ ID NO: 580 - DNA, 1265 bp, Artificial sequence
  DNA replication origin
gctactcagaagactgaggcaggaggatcacctgagggcaggaggatcgcctgagcccaggagtccaaggctgcagcgagctatgatgatgccactgcactctagcctaggcgacagagcaagacgctgtcgaaagaaagagagagagagagacagagagacagagagagacagacttggtttctaaaaacccagtatctgttggtaggggaggaagagggaggcttgggggccacaaggagcaggcatggttcttggggacaggatacctgcccactgagtcaggggctctggttagacctgcttcttgggaagaggaaagaagatcaggggatcctgagcctctggggtgctggggaacccccagaaaggacagatgctttgccaagcccaggtcctcctgaggctgcggccacccccctcccgtgggggtctggggcacgtgggcagagatctgctcctctgtgctcaggtgcgaggccgggagaactttgagatcctgatgaagctgaaagagagcctggagctgatggagttggtgccgcagccactggtggactcctatcggcagcagcagcagctcctacagaggccgtgagtcagccctagcccaccatcagtgtggggaaggaggacatggcttaaccccccaggagaaggccaggaggaccagaaacccctccagaaggcatcatctgccagggacaggcagcagggtccagagcagagcccaccccacatctcctcctccaggaagccttctagcacttggggctgccctgggaccctgggtcatggcccttgctatgcctctgccactgaggggccttgtaaatgtctgctgagtggaaaggccaggaggggtggccagagtgaccatgacccaccaagaccagagtccgattccagtggcacaggtcatccccctgcctcccggccccgccatggccagtgtccttctcaggcgcaggcccagtggccgtgcatggccatggttggggacagggaggctgggggaggatgaagccactctctgacatcagaggctccacccattcgcagcatgggggcatcacgggcatgggtggtcggtgggcacgaggctgccttgcttcccacccatgcgagccgttgcttctgagcaggagtcacctacagcccccgtcctacgggccggtcctctcgcccatgaacaaggtgcacgggggcatgaacaagctgccctccgtcaaccagctggtgggccagcctcccccgcacagttc

SEQ ID NO: 581 - DNA, 1903 bp, Artificial sequence
  DNA replication origin
gagagtgggccagcccccgccccacaagcccagcactagggcagctccagaaggttctgcaggtgactcaggctgtccacaggcggcttcggtggctgggcctttcctggggcctgtgaggtgcctggggatgggccggaccttgcctttccccgggcacagcccgaaggtcctgcctcctgaggcagttttggacacacaggaaggagaggggaggcagcttgggtctctgggcggtggcgcaggctgcagccaggcgaggccctcagtggatctcggcctccgtgaactcctccttgatgggctgcttgcgggccttgcagtcgggcaggtcgaagccgaagtccgcccactcgtcagggccgccgcctgggccgccgcggttggggatggtgatggtgtggcgcacgcggaagtgcacggcctccatgacccgctggcgctgcagttcccctgagccgccgatggagatggtggccgcgttgctagagcggagcagctgctgcgcggtgctgtagtcgtggccctgcttcaggtcctgcaggccccgccagatggtcatgcggtactgctcggggatcttcagggcccccaggtcctgcgagaggccggcgcattaggggcagggggcagtggagcagggagagcagggggggtcgccctgggcctggaggtctggccacaccacaccctggcccctacacccccaaccagagtaggcaggagacgggggagggggagagcccaccagagtcactcctggcctgtgcggggcctgggccctgacctgggagtgttagacatggagccccctgagcatctacctggccctgggggaggaactgcctcccagcctcagggcagggccctccttggtctccatgtccctgccccctggagtggacccccagctcatccctgagctcccaacaccctctgggcaccacaccaagcacacacatcactcaggggaggcaagggttaacgtgacctggagctggctcagcgtgggtcactggggacaggttgcggggagggcggttagtggacacagacgcggccactctctgcacgagggacagttaggctgagcagctggccctagctcgcactgaccctcatctctgtctgcagccccaggctggggatggtctgggacgggccttggacctgggccgcggcactggctggggggcaggttcccaccagagggcttgctcttccttgactgacggtgccctgtggttcacaccgtcctaggctaccagcaggctttgtactccactagtctctaacccaaagacaagccgtggctgtttaatcatggtgcctgcagtcagctgccatgggtgccaagagctgtgtggcctcgggccaggtgcttgccttccctaggtcccctttcctgtctgtgtaaatggcgctgacctctctgtaaatggcactgaactggactgactccctcggggccttacattcttctgttctttgtgccttggaaacagcccatcccctaaaatcaaaggcacactggctgctgggagtccaaaaaggctcaaatgaccagttcagcatccggaggcctgggcctgtgtcccgcgccaccagccacgtgcctggctgcatctgcctaagctctcaagagtcaaatcatcgcatctgcttgcccgtgggaaagggtttccaagtttcccagccacgagagcaaggaagagaaggctctttgccctccggacaggggcccctccagctactgcctctgcagagcggggtccacccgggcgttacctcaatggtcaggttctgcaggtggtaaatgctctgtaacccttgggaggtgaaatactcgatgcagtttggacaccccaatcctgttaaaaaactgcagagagaatttgagaaa

SEQ ID NO: 582 - DNA, 1374 bp, Artificial sequence
  DNA replication origin
gtgagtcctgccactttgtttaagtgaatgtgtcttttgtccagctcagccgcctcggatctcgctgccaccagccttactgcacacccgtgccacccgcccttgccccgtcagcctcagcctcagctcattctctcaggcagtcccagcattggcacggtacctcctcccgctgtgggccacacgtctctgctccctgtcaaccctcctgccatcagcaccaccaccagcgacttgtctgcccgggaggatgcaacaccatctgcctccaccggccacctttcagtgtttcctgctttccaagtaaagataccagcagtgccctcagagcagaccagccagagtttttctgaagcctcccacagggtgctccccggaggaggcccgagatgctctcgtgactttggagccggggtggctggccaccttggcctgggcatctttggggtgggcttcgggagcccggcactgctgcagagtgtggtggatgagaacagctgctgcttgctgtacgtggtggaggaccagctgtgtgatgtggagcaagccttcagagctgagcatttgggccaacaccagagtggttcgggaacaggatgcagacattgtcctcaacgaccagcggtacggtttcagttgtcagcagaggttcactgaacacctgctgtgtgccgggcaccgtcctgggggctggagaaatggctctgaatgctgcaaagtccccatgcttgtgctgctgaattgggggcagaggcagatgcgtagatctcaacacatcagtagcaataagctctgcggagagaactcacgctgagtcgggagagggaggctggtgggagtgctgttttaggtgagatggctggggaagacttgaggagggggcattggagcagggacctaggtgggtgagtgagatggccgtgggggcatccggggacgagcacactctacaaagaggacactgagtcttctccaggccttggtgtagccaagtggccctgctggcaggaacggagtgaatggggtgagggctaggcaaggaggtcccaggcccaaggagcctgggggccacccggaggctttgaaagccgccaggggttggtttggtttgagctcacactcagggggcggaggagaaggacgcagggacaccagtgaggggtattggggggccagtggggcatgatgggcccggaccagggcagcagtatggctggatttgggatattttgaatgtacagcctttgcaatggggtcctggcttcctcccttcactcgagcagctgggtgtgacatgtccaccctgttcatgagcggtgtctccagcagctagagcagcatctatacttgctgtccacagggtgtggacagcca

SEQ ID NO: 583 - DNA, 1061 bp, Artificial sequence
  DNA replication origin
acataatctagtaataaccagcgggtgcagggtcaggtgctgaagggacattgtgagaagtgaatagaaggcaagaggtgagccttctgtcacacccgcataagggccgctttagggttccttggtcaagcggtaacgccagcgtctgggaaggcacccgttacttagcagaccatgaaagggaatctcctttccttggaggagtcagggaacactctgctccaccagcttcttatggaaggctggatatcatccaggcctgcccacagtcatccggaggcctaacccctccctgtggtgcttcaatgctcatgctccttgtccactttcatgcccctcccgtactcctggttcctctttgaagttcgtagtagatagcggtagaaggaatagtgaaagtcttaaagtctttgatctttcttataagtgcagagaagaaaacgctgacgtatgctgccttctctctctgccttgcctacctaaaatgtatcctgtaatcacatgacttgcttcaccttgtcaatcacttagaagattcaccctccttaccctgcccccttgtcttgtatgcaataaatatcagcgagcccagccgtttggggccactaccagtctccacgtcttgatggtagttgtccctggggccagctgctttctatctctttgtcttgtgcctttatttattacaatctctcatctctgcacacggggagaacacccgctaagccccatagggctggaccctacaagtggcaccagaaaatgtatctgggaagcgaggcagccctggaagtctggccatcgcggggggcaaggtgtgtgtgtgttagctacaggtatctcctgctgcgtcctcatttcccagaacaaggagtgggtgggccagtgtgaagtgagggtggagtgtgaaaggcacacgtgcgtctatttgctacctaggggtcgtgtgagctcggcatccctcccctgggcccacacctcccacaggtgttgtgttcttgtactcacggaaaagcaacctgggccttcagggcctttattgataaaactcgcgcctgtag

SEQ ID NO: 584 - DNA, 967 bp, Artificial sequence
  DNA replication origin
ccactaaaaattcagtagggtcaggggctaggggagtggaaatggttgaagattctggaagcttcaggaaagaaccccataaagccagatagctcattagggacagtgcccctggggagccctagcagctatccggtccaaacccttcactgctctgatgagaacaggaggcttggagcaggcagctgccgagctccatgggcatctgggggatgctgcccagagccaaggcttcatcccagcatctgctcctggacctggactggttccatgtccccacacaagacaccattcttagggatggcgagcttgagctaaattcctataaccagtagcaagggtggggtgggggggttggggagggggtcccgtgctgtccaccaatctcagccagcatcaggtagaagcagggccctcacctttctaggcttcaggcccccactgcctcagcaagagggtctccacggtggccagggctccaggaccaggcatttttgtgggcaggtctctggggaggctgaggggccacacggtgtcctgggcgtggggtctgcgtctacatactgctcataggcacctgccattggggcaatttgtgatggtttaggggaaacagggtctgccttggatgggctggtctggaggcaggggagcttccgttcgacttttaggaggcacatttttaccgaaggaaagtagggtctgcccctccgggggaaagggggcatcagctagagaaattcagccacacttgggtctgctgaggtggagacaccagggcaggcaggaggatgaagcccaccctttggttcagcccttgctcagtcccatgcatccattaaaaaaagccacctgtgtccctacctggtgtttaaggataaataagagtctgccctggagatcttggggagacaagaccgcagcagtcaccagatggcatctttaacactctacaggttcacccact

SEQ ID NO: 585 - DNA, 1302 bp, Artificial sequence
  DNA replication origin
cagtagcggggaggcgcctggtccagaaggggccgggggcggggcgagagggggcggggcgagaggggggcggggccatgcggggaagggctagggccgcagcggggaggcgcctggtccagaaggggctgggggcggggcgagtggggccgggagacgcctcgtccggaaggggccggggctctaggccgcccagccccggggccaggaggtgcaggggggccgggcagggtctgcagagggctgcactttctgcccccagacggctcgcccttggggcctccagggtccccgacctccttcacccctgctggagcccctccgacgccacgagcctcccagccccgcggggacccggctgcagcgccgacgagactgcgggaggctctgggcgcgtctgggcctgaatgctgggttcggggacccggccgcggggaccgtcctcctccggggcttgaggggcgtggcgcccgcacgtggcccacgctcggtgctcgcggcgggaagggaagcaggtgtgggtggggagcagagaagggtaatggggagagtcccttccgaaggtgttcaggcgcccagagcctcagaggcgccggggaagcgtcggggaccacagacaccgttcccgtgcgtaaagctttccttccaggagcggggggatgggaacagagccccccaccctcaccatcttccagaggggtcctccagcaagagagtgccccagccaggagagcccccagggcagaaggtcacagaccccttctgctcaggcgtgaggtctgtgctgagtgctgggcggacaccccggctcaggcctctggcagcctggtgccgcaaggggacctgttaggagctaggggcacaggctggtgtgctgactccctgtgagtgagctttggaatggggagtgtccttgtagctcaaggtcgcagaggagagtaggcccccgcgtggatcccagagaagaaaaaggtgggacagtgccaacaccggggtttaattctgagtctgagagcaggacgcatggtgggggcgggtggttctggagctgggccccggcctctgctgggctgaccgtatttgggggcctggctgggcctacttggaggtccccttcttggatttgctggtcaggaaggcctctgactgttgcagggggggcactttgacgcctttctgcttcagctgattatagtagtcgcttctctctgagataattctctacacaagaaacacagccgtcgaggtggccttcccagttcctcaccttggccttgaggccggtctgcacagtccgtgcca

SEQ ID NO: 586 - DNA, 1980 bp, Artificial sequence
  DNA replication origin
ggaccagacacctccccgctgctggctccagcccttccccgcgtggccccgcccccgccctcgccccctgcccaggcccggcccctgcggagcccagagacgcggggacacaggtgaggcgcgcggggtccgggctgcggcttcccggtgcggccgcagtgggcaggtgcgactgtgcgcggcctcgctggctgagaactggcgggggtgggggcgtgccctggactgacccccaccggcctaacccgcggtgcggggccagggccggaactgcccgcccggctccttgcccggctccttgtggctgctggggacccccgacaccagccactttcccttcccggcccttagcaagatcggcttctccggtcacctttatttttttaggctcgaggcgtctgccgcacctcagcccacgacctgccccgctgggaggtgcgggccgctggccaggccctgaccgcaacctggcccagaggccccagccctcaggcaaggttctccgggtaagtgtggggccctgaggcgctgtggggtgaagaggtctatggaggggcgcctgtgtacctagggccttcctgcactcacaagcccccaggaggtgccaggatccgggagcctcccagggcctggaggggagtccctgatgggttcctgccgccacacctgtgaccatcacatgagtgtggagagacgtttactgagcaagtgagggaggccagcctcaagggccggctctggtggctgtgcaccggggtgacttgggaacaacgtgttctacgtcagcaagacaggaacccatgatcccagagttgaacacactgggcttgacccctcccaccgggaggcccatggtgggctgctgctgtggacttggagcctcagcactcccgagactaatgctgcgtggatgtcgggttgcaaggcggctgctgcagctccagcagctccagccatcacgtcgagtctggaagaaggaggtggctgctgctgctttcacagaagcaaactctcccatcccctgctgcaccctggctcctggaccccagctgggtgacttgggaaagcaggggtggtggtattaagcttgtcttacccgggtcatggctgttacctggggctggcacattgctgctgggaccagaatgggattctgcacaccaggcaagagggcgtgaacctcgggtaggcagctgaccgctccacatgctccgggaaaacagcacccatactccagtagaggctgggcctctccgggcctgagtgccaggctgcactgagccagggctcccaccgaaggcacactttatggctttgagacagctccttctgcctctctgggctttgggggaaggcagacatggaagtgccgggagtctcagaactgcctggggcctgagtttctgagctggcttcttgcaggggagtggctgctgtgcctttaggcctctgtgccgatgacctgggaggaaggtcagccttccccgctggagggggcccagcaaagcctcagctcctagaagtgaggggcctgccattgcctgcccgaggaccccactcctgggggccagatgctgagaggggacactgggggcccagcagaccagagagctgaccccagtcccacagcctgggtgggttgtcaacttctcgtgccccctccaactcctccacccccacacccccttaggtaaataggaggtcgaaacagaggccagagggtaaaggaggtgcttagagtccgggctggctcaggccggccgggcagctgtgctagtgcttggagttcctgctcagtccccgtggtctcctcgcccctctgggcacttgggctgccaggcaccgagctgagtgccgagatgcaaagatgagtcccaggtctgcaggagttggagcccagcagggagctggccttggggccgggcccctcctgctctgggcagccacccagccctacgaccctcctgtctctgtagggcc

SEQ ID NO: 587 - DNA, 1242 bp, Artificial sequence
  DNA replication origin
cctgggtgtgtcctgcagctcctgctgaggctgggcccaggcctcccagccacgtgtgcccagctgtttgtaggtcctttgaagggctgtgtgccaggtgtttgtgcgcccccgtgtggggccgatgacagctgtgcacctggtgtcttcgtgtgcctggctgccagcgcgtgtgccctgtgcgctgtgtgtgccgcagggtccgtgtctgtgggggggtccatgtgtacaaggggtgtgtctccaggcctgtgctctcacgtgtgcggccagccccccgcgtgcatgcggggcagcatttatttgcacttgtgcacatagtagcctgtgaggtagcccaggatgaagatgatccagaagagggccacgccgcccagcaccttcatggcgatgcccagcttgcccgtgcacagcctctgggagatcctggggtgagaaccaactggaggtgagccccaggccagggccgcatgaggggccccctaagtggactgtggccgttggtctgggtcagggggaggggcctgggcgctctgctggagtcaagaggaagctctccccgcccacagccaaccagagggaaggccaaaggctgcggtttgctgagctgctggaccgtgggctcccagccaggatggggtggagggtgatggggccggtagcaggggttagggcaggcgtctctggagggagacaccagcctgctatggctggcaggctgccctcaggcccctcacctgcggcagcgtgaggcctcttctgtgctggacacagcccctaggctgactccgtccctgctgccgtcctcccacctactatagtggacgtggctctcctggggctgcatgctgtggggctgcagcgggaggggcggggccttctcggtggggagatcaagacaggtggccaggctgtggcttcactgtaaaacaagcggatggagggcggcagtcaagaccccctctgaggctgctgttaggagaggggcactaagggtcgggggctgactccctcaccgggtctgtcgcctgacttaacaggtgacctagacacaaagtggtagagtcatttgcccagggtcaggccgggaggatgggaccaagcgagaattccatctcaggccaagccctgacctcaggcatgtgggaggccagtgtttccttccagcacactccaggagcctcccttccccggtgcttttatcagggagcctgcacagcctgccaccctcaagagacgagg

SEQ ID NO: 588 - DNA, 1213 bp, Artificial sequence
  DNA replication origin
gtcgagcacccgaagggcaggcagcggcccgagctcggggctcaggccgggccccagcgcgttgcgccgcagcacgaggctgtgcagctgcggcaggccctgcgccaggccaggccccggcgcgcgcaagctcccgcagccgctcacttccaagtagtgcagcagcggcagggtgaaaagccgcggcggcagctgcccacccgccgcccgcactcgctcctccagcccgggccccgtcagcagcagctcccgccgccgctcgcgctcagccagctccagctccggccaagactctgacaccgctgccgccgccatggcgcctcagctgctggcaggcacccacccaccagggtgcttccggggcagcgcgcgccacttccgacctgtgccggaaaagcccatagagaagccacctggctgctagagtgccgccgcgcgtgccatagaggagagtggcctctcctgcgtagagccggggaggggctggagagcggctcgctctctccgcgggtaggggtgagggtgggggttatgaacccaaaaatatctgagacaggactcaatgaaatgtaaaaagtttattttgccaaggttaaggacacgccagtgtcacaaccctaggagatcgtgacgatggtgcccagggaagttgggatgcagcttggttttgtacattttggggagacgtgagacatcaatcaacacgtgcgagtgtaccttggttcagcccagaaaggctggacaattccaggagagggctttcaggtcacaggtagagaagagaccggagggtgcattcttttgagtctttgttcagcctttcgctgactgcacaatttattatgcatgtgagacgcgggtagaggaatagtcgcttatgctttagtctggcttactgaatcttcatttctacgtaaacagtagagcaaaggaagcgatcagatatgcatttgtctaggtgagcagagggatggctttgagttcagtcctttgtctcgcacctgtgaagggaagctatcaatttgcattgccagggtgaaattcaacagaactgttttagggtaaagatcttgaggcccacagagaatttctttgtgggcaaattgtgagggaggtgtgtagctttaaaaatatgtatttgtaactatcttatttaggaataagacgggaggccgatttgcccgaagcagttcccagcttgactttttccttt

SEQ ID NO: 589 - DNA, 1328 bp, Artificial sequence
  DNA replication origin
ctcacatccacgtgtataaagaacggccccaaatcaataaaaacagatggacaacccgagggaaaccggtgagaaaccaggtgctttgcaggacagccaaggcctgcagacaaaaggacaggcactccacctcatcttcaccagggacaggcacagggggaactcaccaagacagcaggaagcatggccgcagtgccactgtgggaagggggcagtggcacggtgggaagggggcagtggcaccgtgggaagggaggcagtggcaccgtgggaagggcggcagtggcaccgtgggaagggggcagtggcactgtgggaaggggggcagtggcactgtgggaagggggcagtggcactgtgggaagggggacagtggcactgtgggaagggggcagtggcactgtgggaagggggcagtggcactgtgggaaggggggcagtggcactgtgggaagggggcagtggcactgtgggaagggagcagtggcactgtgggaaggggggcagtggcactgtgggaagggggcagtggcactgtgggaagggggcagtggcactgtgggaagggggcagtgcctgtgctgctggcagtggtgcccaggcacaacccctttggagcactcctgggcagccccactgagcatcagcacacctggcaatcccacaacacattgtgaacccaagaaagtgcattcctgtgcatcctggaagacaccagaacgctgtggcaacattgtttatcatggtcccaaactggacgcagccctggcgcacagcggaaggtggatgaaggtgctgtggtccattcaagcagtggacactataaagcaagaaatccaacatgacgccacatggttccgtttctacaaagctcaaagagcaaggaggacccatttgtggtgtcagaaatcagacccctgctgactctggaaggagccccgaggggaggtggcggcacagcatgtttccggttcactgggctgtctgtcatatggaatgactcgcacgcatttgcgggtgtgtgcttggcttcagttacttttctcgcaacctctcctctgaaaatactaagacttgggacagctttttgactcggcctttcaacagccaggtgttcccgctcatgcaagtagctggctgctgtgccgctggcctgacctgtttgcagtggtcacatcttgtcagcatgagacagtgcttccagtagtggagatccagaccttcctctgtgaaggattcactcctttccccacaaaaaatacacaaactgaaagcaaagcaaagcaggaaataaaggtaaggatctagttccactgatggccgttccg

SEQ ID NO: 590 - DNA, 1539 bp, Artificial sequence
  DNA replication origin
cactctcatgacaaccaagcccagccctgggccagggcctctgcgcgtgcgcgaccccgccccaccccaggccgcgcctgcgcacaaggggagggctccgctactctggccctcagggttgtgtagtttccggggccacggcacctgggcacaccaggtggcgtcgcgcctttgctttcctgagccttctgagtaaggtaatgtggtgtccgtggggcgacgcctgcgcacaagaccgcgtcgggcctcacttttcccaggccttctgggtaatgtagtttccgggatcggcacccggcctgtgccagcttgcagagctcaccaggtgcagacccctgcggccagggcgaggacggatctgagcagctgggcagcaggtgccaccgcctgtgggacccagagggcttgaggacatctgcaatgctccagaagcccaagagcgtgaagctgcgggccctgcgcagcccgaggaagttcggcgtggctggccggagctgccaggaggtgctgcgcaagggctgtctccgcttccaggtgcccgctgggctaggcggggacggcccgtcggggaggcgtgtggggagaataggaggtgccgcttttcctcttccaaaacggagggtgcaggcggcgcccggggcgggtagttttcgttcgcctcagccgctaggaccccgggcccccgcagcctggggttcctgagcgtggcttcagaacgcaggggggttgggggacgacctggatcaccccttccctcttcccacctctcgggcaggacagccctgcatcagagctaggagacccgggtagagtgccaggtactggcacgcggggtcacggctgctctgcctgtccggcctcagcttccccttgagtaacatgaaaggcttggctaggtgggctctgcaggccccttccagccctcgcagctggggattgcaatcgtcaccttattctaggttggttttctttttagaccagtactagggttaccaggtgtgcattgccggggtcggtgcgggtggggtgggagtagccataaaatgcctaaaactgaccagtgcagagtaacagggaaccggactccaacaaattaacagtgccacgtgccggtcacacttgtgcacagaggcaaccaaccgttctccttcgtgtgccagcaccgctctggcggctgtgtgctggggatggtggtgttcagctcctggcagcagggaggcggcgctgtcaaagacaggctctatttgaagcgccctcaggagctcatttaaaaagggtgaatcctgcagagccagcagtcaccccctgatgtatgtttttcctgactcttcgtattttagaacggcccgcagtcaggcgcccttgctcccgctccctcatccttgcctgggcgttggagcgactgtggcatacaggcggcagcctgagcctgcttctttaagcacagctcattccggtcgtttgtgaggcctgcagatgcaaagccctcgtcttgagacccttcctcctcctgttgcttctcccgtccctgcagctccc

SEQ ID NO: 591 - DNA, 1073 bp, Artificial sequence
  DNA replication origin
gagggagggagggaaagacaaagaaaagaaggaagggagggacggagggagggagtgagagggagagaaaaagagagggagggaagagggagggagggaggaaggaaggaaggagggaaggaaggaaggagagaaaaagaggggaagggggagggatggagggaaagacaaagaaaaggaaggaagggagggagggaggagggagggaagggagggaaggagggaaggagggaaggggagggagggagggaggaaggaagggaggaaggaaggggagaaaaagaggggaagggggagggagggagggaaagacaaagaaaagaaggaagggagggagggatggagggagagagggaagaaggaagggaaggaaggaagggagggagggagggggaaggagggagggagggcgggctggtgggcaagcgagctagttgctatttccaatgcccttggaacttcagtgcccattgtcagcctgaaacctgcagaacagagcaggggaaagtgccagccagtgaatacctgaggacgggggcatgggtggccatgacatgtagatatgcagagtgcacccagccccatggcattcatagggtgaggggcccagagaccaagacagcccagggctgcaggctgggagaagatacctagagcaagtcctggaaatggagctggtcctgcgtggttaaagtgcctcagggactggacaactgggcatttttatcactccatggaactgggggcagccccttgtcgtgcatgggagggggcttgcactgggtctttccccataggcctcctgatccctgggatgtgagtagccactgttgccaatgctcactaaccctaggctccctgatgtccccgacaccttgccaacctgggccttcatcaccaggcaaagtggccagagagagaatgtggatgtctcaggagacggcctgtgtgcccactcatgaagaatcgtttcctggagcagggcagagcatccccttccaccgccactgtccttgagaaagggagggttccagacgcagatgactttcagcccctatctggaaaagggaaaa

SEQ ID NO: 592 - DNA, 1777 bp, Artificial sequence
  DNA replication origin
agagatggctggggacagctctggggaatgtggatttggacgcggtaatatgcaatgcttattggacatcccagtggcgctactggggaatctttaggaaaagtggacctgacatttggaggaaagatcacagatggaaaacgtgctttcgggagatttgagtgtagggctgaggctggacgcgctcaccaggggtgagtgggcagagagagggagagatcccagaatgaaaacccgggtcccactgttaggaggcaggggaggagtgggatccacaagggcaaagcagccacgtcccctgactacggggtcaccattcacctcgcaggccatgtgaatcgcacccctggaactgtgcagggcccacctgtgtggccacacgcagtgaccctgagcaaaggagtgaccacagaagtgcatggcaaagcagaaaggtgtgacgtcttggaggacgcgggaggaaagcacgcccagcggacaggagccatcacgcggctgcgggctgctgctgagaacctggcgtgggccaccgtcgtcagcagcgtggaggtaactgacgaccttggccaagaagttgggtggcagcgtggaggtcatgctcagagtgagtgggcgcaagagacggtggcgggagagggagtggagatcataggcgtggatggctcttatgagccttttctctgtagaggggagtgggggaacgggggaagctaggagggagctgtgccttgtgcgttgtgtgctgtgtgcttatcagttaaggggaaaaacagcggcaggtgagtttcgtatgttgctggggatgacgtggcagagggactatcccacgagggagcagacggaagcaggcttgctggggtgatggcctgggcagggtcgagggggtgaacttagtgcacagtgggagggctggcgctggagaggggcctggactggcccctggggtgacaagggagaaggtggaaggcatgggcactgaggtgggttgtggaacctcctggaaactcccatttgagacagtgacatgatgccaccactcaggagactagcgtgtggaggggctgggggccgggccagcagggaggatgaggggcccccttgagatgcatgggctgaatgtaaagtgaggccgatggcatgagctgttcctcatcctcgttgagccgaaggatgcgggtgctgcgagttgggggatgggcgactgtccctgggactgaagttttgcaggctgccaaagcgacagggcatgagggtcttgcaaggagacctctaaagatgaagcaaatgcgaggggggctgaggagctgttggaggggtgggagtcggcggcagaagtgcagggagggccacaggggttgaggggaagggctgtggcagtcggcgtggcccagggaggggccaggaggatggcagcagtggttgtgagggtgtctgacattgcgtggccatgagggaggagttcagccaatgctcggtgagggccaaaatggaggaggggctgagaggagtcagactcctcatgactgggtgggagtgggacgggggcagggcatgagtgacaaaagctgagccttccaggaaccagggctggagggggacttggcaaaggggatgggggccaccacccccactgacatgggactcagaaaggaggctttgactgtggagggagggaacggggtctgtgcatagactgttggcaaaaatgaccccactcccaccctgtgtctctgctcttggtggggcggggtccctcacagactccgggcttggctgc

SEQ ID NO: 593 - DNA, 745 bp, Artificial sequence
  DNA replication origin
gtgtctgacattgcgtggccatgagggaggagttcagccaatgctcggtgagggccaaaatggaggaggggctgagaggagtcagactcctcatgactgggtgggagtgggacgggggcagggcatgagtgacaaaagctgagccttccaggaaccagggctggagggggacttggcaaaggggatgggggccaccacccccactgacatgggactcagaaaggaggctttgactgtggagggagggaacggggtctgtgcatagactgttggcaaaaatgaccccactcccaccctgtgtctctgctcttggtggggcggggtccctcacagactccgggcttggctgcgtacctcgctttgaccagtgggacattagagtcgaaggctggaaagcccatgtccactggggcttgtccttttgctgggcctggagtcccaaggctcccacgggcacaggctcaagccagcctgctagaaggtgagatgctgcccgggggagaactggggagccctggccgatggtctgctgcgtgcagaacgggtgaggaagcccagcgagattatccagccactaacccaccagcctggggagcatgacacgtgagagagcccagccaggactagcagggcccagaaaattcacccagacaacccgagattcgtgggaaggaaccactgtgactgtggtgtgtagctttagtgccgctggtttttggtcatttgttagatagtgagcagaagc

SEQ ID NO: 594 - DNA, 1316 bp, Artificial sequence
  DNA replication origin
tggctcttggcttaactgttgaaaaacaaggattctttttttttttttttgagagagagagtcttgctctctcaaaaacccaggctggagtgcagcagtgccatcttggctcactgcaacctctgcctccaaggttcaagtgattctctagcctcagcctcccgagtagctggggttacaggcatgtgccaccataaccagcttttttttttttgtatttttactagagatgggattttggcatgttggcctggctgatcttgaactcctggcctcaagtgatctgcctgccttggcctcccaaagtgctaggagtacaggtgtgagctactgtgcccagctgaaaaacaaggattcttaacaaagtttaccttcatattatttcctgaagaggctggtgtcttgcagtgatgctttggggagaggtgatgtcatgggggagatgatatcatgggtgaggtgatgccatgggtgaggtgatggcatggggaggggatgtgttggggaagtgatgccatggggaggggacgtgatggggaagcgatgtcatagagaggtgatatcatggggaggtgatgccattgggaggggatgccatggggaggggatgttatggggaaggggtgtcatggaggggtgatggcatggtgaggtgatgtcatggggaggtgatgccatagagaggtgatgtcatgggggaggtgatgccatagagaggtgatgtcatggggaggtgatgtcataggggtgatgtcaaaggggagatgatgtcatgggagaggtgatgtcatggagaggtgatgtcatggagaggtgatgtcatggaggggtgatgtcatggagaggtgatgtcatggggaggtgatgcatggggacgtgaagtcatgcggaggggatgtcattgggaggtgatttcctgggagaggtgatgtcatgggagaggtgatgccattgggaggtgatgtcatgcagaggtgatgtgatggggaagtgatgccatgggggagacaatgttgtggcagtggtgatgccataaggaagtaatgttattagggagatgatgtcatgggggtaagccattggggaggtgaagttgttggggaggtgatgttgttggtgaaggatatgtcgttggtggaggcgggatagtggtgacacctgtgtgcagccactgaacgcctcatgactgtgggatactgagctgtggcaggagactccaggaggggaaggtgggctctcgcctcagcatggcttgccagcaggctgtgcccagtcccagctacagcaactccatagggactgagggtagggccggg

SEQ ID NO: 595 - DNA, 937 bp, Artificial sequence
  DNA replication origin
catatccactggctctgggaattgggacgcagacaacttagggggccattattctgcccaccacagtaaccaaacgtctcagcctaggaggaatttttggtttcagctgagtccccttgctcctaccacagcgatcacacagagtgaccctgctggatcggatgagcagtggcacggtcagagaggccagggctagccatgctccaagggaactggtccttgtcatggaaaaggaagctgtgccccagtgcccatggcctggcctggagtccagaggcactggtccccatggccgactccccacatccagcagcgagctcgaggccacagagcagttgcctctcaggtgtcacctttcctcaccctgcccccaggggcaccccttcctcacgcagcacaacctggaactacctactgcacaaggaggccccgacatcccccagacgcatgtcctgggggctgcatacatgacatgggtgaggaccagctttctgctgagcgggtcatgtaacacttcggtgaacgtgggcttttgtggtcaagcgcttttgcaatgtagctgccctggaggtgccagcccgtgcttctcagggtgttcatgttggaagggagagggaggctgtggcagtacgacccggggtctggggtggtggcagggaggctgtttggacaggtggtggggggcagccaggctgagtgagatgaggctgtgatgggtacagtgctgtgaggtgggcatgggagtttcccgtctcagctggcctgagcatggttggattttctaactttggccctcagggaacactcaggtgctgacccagaagtagttgaattttcttgaggataaggcaggttagatcatgggtgtgccactgtcaagaaaatacagggagtagtcttcattatttcatcctgaatcccactcccttccactcct

SEQ ID NO: 596 - DNA, 753 bp, Artificial sequence
  DNA replication origin
aaccggaggcccagtcccaacctcgcccatccagctgatgtctgctggccccatgcactgagcgtgcaagctgccccgatccagtccctgactcaatggggcttacctcaagtgagggagatggcacttgtccactacacagataggtcaggccctaagtgctcatgaagggaactggtggggaggtgatggagaatgaccgtggagggggaggagggaggtgccacttccagagagagctcagggagccttctgagcaggtgatgataagctcagcctggggaggaagagctggccacagacagagccaaggagagagccacagccagagccatgaacagaggagagagccccaggaaagttctgaggcaggggagcacggggcatactaaaagacagacaccaggcacagggtatggggaagaaggcgcagctgggctcacaccaggtgaggtgaccagctgggatttcacctgccaagcaacaagaagccaggaaggacactaggcagagacggggcttctggatccactgtcagtgaccacataggagattcctgcaaggagtgggggttggtgctggagagaagaggctggactcactcattcagccaacacaggcgcatggtcaggaggcaacactggggccacagggacaggacagggaacaagcagaccccaccctctagacctaacctgtagaccacagacatagtgtgaaggtcacagagagggggcttgatgtgttggggag

SEQ ID NO: 597 - DNA, 893 bp, Artificial sequence
  DNA replication origin
ggcccgtggttatcccatggagtttgggccaaattgtgaattacatcagctcctcagaggggcttcgcttctaatcaggccttggtcagacaaacttcttccagaaagggtgcgtgggagtagctcttgggcaactgaccaggacggatgctggacagtggcctctactgagtgggggtgtccgtggggaccccagaggccggggggcaggcagagcatgtgagtgtcccatctgggccactgcagctgcggctggctcatgggtgccctgacagatgccctggtcacaggtcaggatcttggcagagcctcaaggcaggagttagttctccaggaggaggaaagggaggaaaggaggaaatcagaaaaaaggaagagggatgaggagagagagggaaatagggtaggggagagagagaaaaagagagaggaagatggagaggggggagaaggagagagggaaagagagggggaaggagggggagaaagagggaggaaggggagagggagaagagagggagagaaataggggagagagggaggagagagagggaggtggaggagaaggagagcaggagagagggggagaaggggaaagaaacagagagagggagaaggagagagagggaaagagggagaaggaagggggagaaagagggagaagcggggagagaagagagggagagaaataggggagagagggagatgggggagaaggagagagcaggagagatgggggaaagagggaaacagagagagagggaagagagggagagagcgacgaggagagagcaagagagagagaggaagcaagtgagggagagagagacagaaacagagtcagaaagagagacagagggcgcgagagcaggagagacgtgggtgcatgggtg

SEQ ID NO: 598 - DNA, 727 bp, Artificial sequence
  DNA replication origin
ccccatccaaagacagccgtgaccctcagagctcacctggactctggtggaggaacagacaagtcaacagaaagctgtggtcccacatggtgaacacagcaggatgggggtggttgcaggaaccaggcgagagacccttaagccaagcggggattcaggggaggcttcccaggggcaggatccttaggctaaaactgaagggtaggagttaggcaggcaaggaggtgcctggggagtccacggggtggggagagaggaggactccaggcagggaggaacagcctgtacatgaggcatggtgcgctgggcacctgccagagaagttcagcgtgtggaacagagctgggtgggggctgacaaggaaggggcaggagggtgagagatgaggatgggggaatcatgcaaagaatttgggactacatcctgagagccctagggcttaaaccagaaaggatattcttacagtgggggcatttgaaaagggttttgaaggatgagtaggtgttcccaagaagaaagatatgaagcttaacattccaggaagaggaggcagaatggacaaaaatggaggcgcataaaagagcaagaggtctttaggggggctgagcctggggactggatcatagagaatctgccagaaaacagctgaaaaggaggtagggtagtgacaggcactgaataccaggttctgcagagtgggggtgcccctgagggtagcgggaagtga

SEQ ID NO: 599 - DNA, 2190 bp, Artificial sequence
  DNA replication origin
ctctgtcactgaggctggagtgcagtggcatgatcatggctcactgcagcctctacctcctgggctcaagtgatcctcccacctcagcctcctgagtagctgggaccacaggcatgcaccatcatgcctggctaatttttgtgctttttgtagaaacagggtttcggtatgtcgcccaggctggtctcgaactcctgggctcaagtgatctacctgcttcagcctcccaaagtgctgggattacaggcatgagtcaccatatctgggccctcagctgattttaaactgcatcctttcaccatgataaacattaatcaagggtgtaacagctttcagtgagttctgtgagtccttctagtgaatttccaaacctgggtgtggtcccagagacccccaaattctgcagttgctgtcagaaatgagggtggtcgtagggacacttccctaaccataggagcagattcccatccatgtctccctgggtctgggtgcatcagctgcatctgcaggtgactgttgggaggtctcacggggtctgggtgtggggtgcatcagctgcatctgcaggtgactgttgggaggtctcacggggtctgggtgcggggtgcatcagctgcgtctgcaggtgactgttgggaggtctcaccgggtctgggtgcggggtgcatcggctgcatctgcaggtgactgttgggaggtctcactgggtcttggtgtggggtgcatcggctgtgtctgcaggtgactgttgggaggtttcactgggtctgggtacagggtgcatcagctgtgtctgcaggtgactgttgggaggtctcaccgggtctgggtgcggggtgcatcggctgcgtctgcaggtgactgttgggaggtttcactgggtctgggtacagggtgcatcggctgcgtctgcaggtgactgttgggaggtctcaccgggtctgggtgcagggtgcatcggctgcgtctgcaggtgactgttgggaggtctcactgggtcttggtgtggggtgcatcggctgcgtctgcaggtgactgttgggaggtttcactgggtctgggtacggggtgcatcagctgtgtctgcaggtgactgttgggaggtctcactgggtctgggtacagggtgcatcagctgtgtctgcaggtgattgttgggaggtctcactgggtcttggtgtggggcgcatcggctgtgtctgcaggtgactgttgggaggtttcactgggtctgggtacggggtgcatcagctgtgtctgcaggtgactgttgggaggtctcactgactgttgggaggtctcactgggtctgggtacagggtgcatcggctgtgtctgcagatgactgttgggaggtctcactgggtctgggtacagggtgcatcggctgcgtctgcaggtgactgttgggaggtctcactgggtctgggtgtggggtgcatcggctgtgtctgcagatgactgttgggaggtctcactgggtctgggtgtggggtgcatcggctgcgtctgcagatgactgttgggaggtctcactgggtctgggtacagggtgcatcggctgcgtctgcagatgactgttgggaggtctcactgggtctgggtacagggtgcatcggctgcgtctgcaggtgactgttgggaggtctcactgggtctgggtgtggggtgcatcggctgcgtctgcaggtgactgttgggaggtctcactgggtctgggtgtggggtgcatcggctgcgtctgcaggtgactgttgggaggtctcactgggtctgggtgtggggtgcatcggctgcgtctgcaggtgactgttgggaggtctcactgggtctgggtgtggggtgcatcggctgcgtctgcaggtgactgttgggaggtctcactgggtctgggtgtggggtgcatcggctgcgtctgcaggtgactgttgggaggtctcactgggtctgggtgtggggtgcatcggctgcgtctgcaggtgactgttgggaggtctcactgggtctgggtgtggggtgcatcggctgtgtctgcaggtgactgttgggaggtctcactgggtctgggtgtggggtgcatcggctgcgtctgcaggtgactgttgggaggtgcgttggcatctgcagcatctgcaataaatccccgagacctgtgggcagatgctgcccaacagcctccatccacccatg

SEQ ID NO: 600 - DNA, 1063 bp, Artificial sequence
  DNA replication origin
gatgtggtggctcacacctgtaatcccagcactttgggaaatcgaggcaggtggattgcctgaggtcaggagttcgaggccagtctggctaacatggtgaaaccctgtctctactaaaaatacaaaaaaattagctgggcatggtggcgtgcacctataatcccagctccttgggaggctgaggcaagggaattgcctgaactaggaaggtggaggttgcagtgagccaagattgcaccactgcactccagcccaggcgacagagcaagactccatcagaaagaaaggaaagagagaaagagaggaaggaaggaaggaaggaaggaaggaaggaaggaaggaaggaaggaaggaaggagagagagagaaagaaagaaggaaagaaagaaagagagaggaggggagaggaggggagggaaaaagagaccttttcatcatcagtgtgcttcaggaggcacgttaaataatccccctcctcacaacagcccttcccgtagatatgatccccatttaatagaagagaaaggtaagactgagaaataatgacagtccttatctctgaccttgtccctggcactgtctccttcaaaactcacaactcagagtcatcatccccatgttgcagttgaggaaatggaggtgtaagagacagcagggctccacagcccatcccagcacacagccgagattctggttcagatcacttggtcctggggatgccttgcagtcaatctcggcattcccagcctcaggcattacttctgtcttatggctccgtccgtcttccacacaccccacaagcatttggatcacagttgcgtccttctatctctgctgtccctgcgttttgctgggtgaatgtccccgggtaaccctgatccttgtttgaaaggtaggttccagggctcaagggcacaggggcagggacagaaagagcgagagaaatagagaaagagaaagagagacagagagatccgggctgaggaccaccggtgtctgccttatctaatctttgcgggatcaccctgaaagctgggcggcagcccctggtccaaaactgaga

SEQ ID NO: 601 - DNA, 1458 bp, Artificial sequence
  DNA replication origin
agagtccccaccctgtcctcacagaggaaagacaagagacaatgcaatcagggataatgaggaccaggagaaaatgaaccccgagcacctgatcccagctcaggatcaaggaaggctgcttgcaggaagtggcctttctgctgagataagaggatgtccaggagtttgttgatgaagagtcaaattccgtaaaatatttgcagaggtttgttctgagccaaatatgagtgaccatggcccgtgacacagccctcaggagatcctgagaacaggtgcccaaggtggtccgggtgcagcttggttgtatacattttaaggagacatgagacttcagtcaaatacatttaagaaatacatcatttcagtccagaagggtgggacaactcgaagggtgggggagggcaggtggttccaggttataagtagatttaaaattggtctaattggcaattagttgaaagagttatccatagaaaggaatgtctggattgtgataaggggttgtggagaccagtgttttattatgcaggtgaggcctccaggcagcagacttcagggacaatagactgtaaatgcttcttaacagacttaaggtctgtgttgatgttaatgccggagggaggggtagaatgaggcatgtctgacccccacttcccatcatggcctgaaccagtctttcaggttacattttagggtgcccttgccgaggaggaagtccattcagatggttgaggggccttaaaattttatttatggcttacaagttggtcaggagaagaatagagagggaggaaggtggggtattcctggcagagggtcagggtggggagtggccaagaagtgagagagggcatttgcagccattgaggaatgacaagaagtcaggctgcctggggtagagttggggacaggagagtagacagggttcagaggggtcggaggtcagagggcaccatgtcaggtcagggttcagaggggtcggaggtcagagggcacacatgctggaggaactgcaggttctcagcttgaaggttctctgatttgggggagagtggcatgactagatttcagtcatgtggagcccccagccaagaagccagccacaccagcagaggatgatgaggacgataacatggacctgtttggcagtgacggtgaggaggacaaggaggcagcactggtggtcaagtcctccatcctcctggatgtcaagccttgggacaatgagacggacatggcccagttggaggcctgtgcacgctccatccagctggacaggctggtctggggggcctccaagctggtgcccatgggctacggtatccagaagctgcagattcagtgtgtgatggaggacgacaagttggggacagacttgctggaagaggagatcaccaagtttgaggagcatgtgcagcctgtcaacatcacagctttcaacaagatcagaagcctcag

SEQ ID NO: 602 - DNA, 1663 bp, Artificial sequence
  DNA replication origin
ggagggtattggacaatctccttgtgtctgtctgtggctttggggtttgcagccataattctcagtctcagatgctcactggaattaccgggggttctttcaaacaatgctgcaggcagattcgggtttaatgggtctgggcgtggcctgagcatggggacattccaaaacccctgggcgattctaatgtccatccacatggtttacgggatcactgggggatccaccatgatacctgagggtttgcagagcaaccctgagaggctggacaaagaaggtcacaggaacctgttccccaagtaaggaaactaaggctcaggatgaaggttccctagaaccacatgctggcaagtggcagacacagaattaggaccctagcctcctgagtctccccactgggaaagagccagcactatcccaccacccatcacctcctcttctccaagccccaggtccccagccctctacactcatgcaaaactgggtgggaagcatgaaagactttcactgtgaaaaggagagatgagagaaggggaggtgggggtcaagggaggcccaagcagggggaggtgaggtggaagtgaagaggcaggtggaggtggaaaggcaggtggaggtggagaggcaggtagaggtggagaggcaggtagaggtggagaggcaggtggagaaggagaaagaggtagaggtggaaaggcatgtggaggtgaagaggcaggtcgagatagagaggcaggtggaggtggagagagaggcagggggaggtgcaaagagaggagggtagaggtggagagaggcagatggaggtggagaggcaggtggaggtgtggagaggcaggtggaggtggagaggcagatggaggtggagaggcaggtagaggtagagaggcaatgggaggtggagagagaggcagggggtggtggagaggcaggtcgagatagagaggcaggtggaggtagagaggcaggtggaggtggagagagaggtggaggtagagaggcagggggaggtggagagagaggcagggggaggtggtgaggcaggtgaaggtgaggcaggcgatggatgagagcaaggtccaaacagatcagagccctgcatctggttggaggtgtcaccagcatcatgttctgggaagttggacacttcttctgggccaggtgtcgggtatgaaggagcatgtgagccctgggtccatctccagcccaaaaccagctagtgggcaggggctgcctcgctccagcgagatcaccttcacgggggtcattgcatccaggtcccttgtgaacacaatgtgtctttcacaacacacgatgacaacagctcccaccatatctcacactcgcaggtgagctgttgctgcctctcctgtttgcatcaggaggggaggtgtttctggatccgtggttaagacattaggcggcggctgcacaggaggtctgttcattctagcaccgccactgtgttctcaaacaaacttccctctgacagccatgtgctggaggcgttaagtggtggtgtgggttaagtcgtgttccccgaaaagagctatggaagttccaaccccagcccctgagaatgtgaccttatatggaaggagggttttgcagatgtaatctcattaaaatgaggtcatactagattaggatgggctctggatcc

SEQ ID NO: 603 - DNA, 1146 bp, Artificial sequence
  DNA replication origin
atcatgagaacagcacaggaaaaactcacccccatgatccaattacctcccactgggtccctcccatgacacatggggattatgggagctatgattcaagatgagatttgggtgaggacacagccaaaccacatcagggactaaaaataaaccaataaaaagagttacttcaagtatggtggatattagaaaggaatcaaacaaagccaggagggggtgtgacaaacattcttctagatgtactgagaacaggaagaccaagaggaactgcttgggaagaatgggggatgggagccgcacgttccagattgtggggccacatgagcgtggccctaggtggaaaagaggttggcgagaaaaggaggaatgaggaggagagaagaagctgatgctgttgtaactgatgggcagagggccctggtcaggaggtgatccataggcagaccctcaggtgtgggggtgctcgggtgtgttcttctgcagtgggagctttgtgaggttgccacacaaaggagtggccagatctgagttgctttaggaagattctaggtggagaatggactggaagaggcaggtgtagatgtgagggggccaatgaggagggtcctgtggtcacatggaaaagaagggttggttccctggatgaagatgtggcatggagacagagcagcaggcttgagatggggtctgaaggggagggattggaagtggaggctgaggaagaggacgctgtcaaaggtcactcccagtttccaggccagatgatcggtgggtggagctgccattgccaggggccaggctgcagcgggctgtgtggaagagctttggggagcatatggtgggcaaggagcattcaccccgccttgtgctttcaggaacccagagacctccagtggggacgtcaagtgcccaggtggaaatgtgagtggacggtcccctcaggtgaggtctcgggcaggtgtaagggtgggtcgcgagcctgtgtttatgatgaaggcacctcagagatgtctgtgtaaggaagcgcagtgtactccacatgcgccatgccagttgggtgggcttatccctcctgcagttttacagcccgctgtggtggtgtcttttgaaaggggccggtcaagggggaacccatatggagagctg

SEQ ID NO: 604 - DNA, 1112 bp, Artificial sequence
  DNA replication origin
cccctcggagtccatgggaatccagtgaaaaaaaagagcaccagaaaacggcaacgtgggtgccagggaaagaaactcccccagtgggagagtccacagccttctgcaactgtgccccacccagcgcccggcagcctccgcagctggggtgtcatatctgccagtcccacagtgagtggagggagacgccagcccccggccaggaactggctgcagtagcagccctcactgcagctcctgaatgtcctctaacttgcttccagctcctcatgcaatccagcctcaagtgcagctccggggatgtggaagaatggaatggaatggaatggaatggaatggaatggaatggaatggaatggaatggaatggagtggggtggggtggggtggggtggggtggggtggggtggggtggggtggggtcgggtggagtggagtagaatggaatggaatggaatggaatgtactcgaatggaatggaatggaatggaatgcaatggaatggaacggaatggaatcaaatggaatggaatggcatgggatggaatccaacggaatcgaacagaacggaacggaacggaacggagcggaacggaacggaacggaacggaacggaacggaacagaacagaacagaacagaatagaatagaatagaatagaatagaaatgattacaacacggaccttacttcggcttggagcttgtagtcggatgaggaaatgaggccatggaggagcagcagcagggagaggcaggaggagcacaaggatctaaccttaggctatcaccgagactctgtgagcctcagtttacccacctgccatgggactggtcaccagagaatgcccctcacagtgtggaagctcttggtgctgggctcagagtaagcacttgtactggtcatggaggactaggttgaggtgcataacaaacatcccccaaatctcagtggctttgacatgagagacatttcttattccacttttccactgtgagtctgcagggcaggggatcccattctgccaacaatggagcagcccctatctgggtcatgccagccacatggcagtggcccagggaagcaaaggaaagcaaatcacaccctggccctt

SEQ ID NO: 605 - DNA, 1292 bp, Artificial sequence
  DNA replication origin
ctagggaaggggtttcctgggctggatctgtagggaaggggtttcctgggctgggtctctagggaaggggtttcctgggctgggtctttagggaaggggtttcctgggctgggtctccagggaaggggtttcctgggctgggtgtctagggaaggggtttcatgggctgagtctccagggaaggggtttcctgggcctagtctccagggaaggggtttcctgggctgggtctctagggaaggggtttcctgggctcggtctccagggaaggggtttcctgggctgggtctccagggaaggggtttcctgggctgggtgtctagggaaggggtttcatgggctgggtctccagggaaggggtttcctgggctgggtctccagggaaggggtttcctgggctgggtctccagggaaggggtttcctgggctgggtctccagggaaggggtttcctgggctgggtctccagggaaggggtttcctgggctgggtgtctagggaaggggtttcatgggctgggtctgtagggaaggggtttcctgggctgggtctctagggaaggggtttcctgggctggtgctgcaggtcgtggattagagctctcttttctctatcatctggttgttgcccatttgtagattcagcgtctcaacaggctttgaaagcatcatttggcctgctcccatccccttcccagctccccaggggagccttcctggggcatccctggggacttgccgtctgtgctgcctctggtgcttgatgtgtgtgctgtagttgtgatgtgtgcgtgctgcagttgtgacatgtgtgctgcagttgtgacgtgtgtgctgcagttgtgacgtgtgcgtgctgcagttgtaatgtgtgcgtgctgtagttgtgacgtgtgctgtagttgtgacgtgtgtgctgcagttgtgacgtgtgtgctgtagttgtgacgtgtgtgtgctgtagtgacgtgtgtgctgtagttgtgacgtgtgtgtgctgcagttgtgacgtgtgtgctgtagttgtgacgtgtgtgcgctacagttgtgacgtgtgtgctgcagttgtgacatgtgtgctgtagttgtgacgtgtgtgtgctacagttgtgacgtgcgtgctgcagttgtgacgtgtgtgtgctgtagttgtgacgtgtgtgctgtagttatgacgtgcatgctgcagttgtgacgtgtgtgctgcagttgtgacgtgtgtgctgtagttgtgacgtgtgtgcactacgcagcgtgcgcatcacactgggtctcaggctgctcctgggatagg

SEQ ID NO: 606 - DNA, 1185 bp, Artificial sequence
  DNA replication origin
agccttattgatggggtgctgttctcagtgctatggctgaagcatggaaggcagggctggttcaattcccattctgctgctttctgagcctggcttcaggcaacttgctttaccttgagaaaccttgacttcgtgatttgtgaatggggtaacagtgagattcctgggggagctgctgccccattttatcatctgtcacctcccactcaccccctccaactctggcctggatgccaccttcctcattctgttgattctcagcttgccaaggtcacttaggctgttactagattcaacagatgccttatagtccctgtctgacttttaacctctcagcaccattcaacacgtttttctccaacactttcctaaaatcccctcttctctcagcttccagagaccacattctccctcctttcctccttcctgggcccctccaacaacagacatttacgttctaacagttctggaggctgggtctctagggaaggggtttcctgggctgggtctgtagggaaggggtttcctgggctggatctctagggaaggggtttcctgggctgggtctgtagggaaggggtttcctgggctgggtctccagggaaggggtttcctgggctgggtctgtagggaaggggtttcctgggctgggtctctagggaaggggtttcctgggctgggtctctagggaaggggtttcctgggctgggtctgtagggaaggggtttcctgggctgggtctctagggaaggggggtttcctgggctggatctctagggaaggggtttcctgggctgggtctgtagggaaggggtttcctgggctgggtctctagggaaggggggtttcctgggctggatctctagggaaggggtttcctgggctgggtctgtagggaaggggtttcctgggctggatctctagggaaggggtttcctgggctggatctctagggaaggggtttcctgggctgggtctctagggaaggggtttcctgggctgggtctctagggaaggggtttcctgggctggatctctagggaaggggtttcctgggctgggtctctagggaaggggtttcctgggctgggtctgtagggaaggggtttcctgggctcggtctctagggaaggggtttcctgggctggatctgtagggaaggggtttcctgggctgggtctctag

SEQ ID NO: 607 - DNA, 1006 bp, Artificial sequence
  DNA replication origin
gccttgatgtccacaagtgcagggaaaccactgacccccagaagagaccatcagccccttccccagagctctctcatggcacctgctcagttcaaacaaaagcataactctggactcactaaggagagactggattcagaagaattcttgcaatagggagtgggaaccattgcaacaggggaggggccattgcagtgggggaggggccattgcagtgggggagggactactgcagtgggagaggggctattgcagtgggggaggggctattgcagtgggggaggggctactgcagtgggagaggggctactgcagtggggaggggctattgcagtgggggaggggctactgcagtgggaggggctactgcagtgggggaggggctattgcagtggggctgctgcagtgggggaggggctattgcagtgggggaggggctactgcagtgggggagggctgttgcagtgaggagaaggctcccaccatgagacctgaaagcatcccaaaagttaggcagaaagaggcttttctttatgggattagaaaggactggtgtgggaggtgagaagaaaaggtggaggtggctcagtgggacaatggatcagagaacatttgaccctgaggccagcctgctttcagaccggatggccgtctatgggttcaggctgagggtaagccagagttcagggcctggggtgggagagaagcagaactgtttcactaacaagcattttgttccaattatcagtggggacaaaacagttccactaatcatctgtgaggcaaagaaatggaattcagaggggctgtgtctggacttgtcctgggtaaactggtgggggtgtctgtgagcctcacctaggttatatgaggagggatggtctttgcagggagctgttctgaggagcgcagtgggtcacaggctcctgagcagtggctgtcaaccagcaccacaggcctcggatgaattcaccatggtcattggcctgcggcacagcctggacct

SEQ ID NO: 608 - DNA, 1262 bp, Artificial sequence
  DNA replication origin
gtgggtgaaagggtggttgaggtagatagatgggtaaatggatggacagatgggtttttgggtgtgggtgcatgagttggtgggtgggtaaatggatagatagatgatggtgatatagtttgggtctgtgtccctgccaaaatctcacgtcaaattgtaatccccaatgttggaggtggggcctggtgggaggtgattggatcacaggacagacttcccctttggtgccattctcatgataatgagtgagttatctcaaggtctggttgtttaaaagtgtgtagtaccttccccctctctctcttcttcctgctccggctgtgtaagatgtgcctgcttcctctttgccttctgccatgattgagagtttcctgaggtctccccagccatgcaatctgtatggactgtggaactgtgagccaattaaacctcttttctttgtttctttgtaaattgcccagtctcaagtatttttatagcaatgtgagaataaactaatatgcatgggttggtaggtgggttaatgagtggatgggtgggtagatgaagagatacacatgggttggtgggtggatagatgagtggatgggtgggtggatgggtggatggatgagtggatggatggatggatggatggatggatggatgggtgggttggtaggtgggtgcatgaattgatgggtgggtggatgggtgagtgagtggatggatggatggatagatcgatgggtttgtgggtgagtgcatgggtgaatgggtggataggtggatggatgagtggatgtgggattgagtaggtggaagggtggttgaggtagatggatgggcaagtgaatggatacatgggtatatggttgaatgaattgatgggcttgtgcgtgggtgcatgagttgattgagggatagatgcatagatagatgtttggattggtgggtgggtggatgggtggatgagtgggtggatggatgagtggttggatgaatagatgaatgggttggtaggtgggtgcatgagttaatgggtgggcggatggatggttaaatggatgaatagacagatgggtttatgggtgggtacataggtgaatgagtggatgagtaggtagatgggtggatgtgggggtgggtggatagtggtggttggggcagttggatgagcaagtgggtggatggatggcaagtgggagcagtgcaactgaactgggtctagtgcatgtgtcacaaaggacatggtgatgtcctcatctcacatccactcttga

SEQ ID NO: 609 - DNA, 1194 bp, Artificial sequence
  DNA replication origin
acagcaatgcagttggaccaatcattggccttctccattgtttctgctcctgggcgttggggggcattccccagccttctgccaagggcggcaacctctggacagagagacagccaacactttctctgtaagtccagctacctctaactccgtcagtagaaatgaacaacctcccacttctgtagagcgtttccaaggcagcccattcacaaacatgccactcatggctacagactgtgcattccactcgcctgtaatgtggggattcaatggagacattgcaggtagagggcagggctatctcagggctatctcagggctatctcagggacacgatggagacgtgcaggtagagggcggggctatctcagggacacgatggagacgtgcaggtagagggcggggctatctcagggacacgatggagacgtgcaggtagagggcggggctatctcagggacacagtgggtacatgaaggtagagagcagggctatctcagagacatgatggtgacatgcaggtagagggtggggctatctcagagacacaatggtgacatgcaggtagagagcggggttatctcagggacactatggagatgtgtaggtagagggtggggttatctcagggacacaatagtgatgtgcaggtagagagcagggctatctcagggacacagtgggtacatgaaggtagagagcagggctatctcagagacacaatggtgacatgcaggtagacggcagggctatctcagggacatgatggagaggtgcaggtagagagagcagggctatctcagggacatgataaggatgtgcaggtagacaggagggctatctcagggacatgatggagacctgcaggtagagggcagggctatctcagagacatgatggtgaagtgcaggtggagggcagggctatctcagggacatgataaggatgtgcaggtagagagggaacagggctctctcagggacactgtggggatgtgcaggtagacaggagggctatctcaaagacatgacacagtcatgcaaatagggagcagggctatctcagggacatggtggggacatgcgggtagagagaggggctatctcaagcctactgcccttcctcttcacattgcagtggccctgcgggggctgttaaggccagggtgggggtttgggagcgcacaggggaagg

SEQ ID NO: 610 - DNA, 1193 bp, Artificial sequence
  DNA replication origin
catccaggtcatagctaagctcactcaaaagcaagttgattggcaaaacaggcctcgtgtattttctccctccataagtgacatttatacactcctgaagtttcttcttctaacaacctgccaatgtttccctgaaaatcagttgctaacaaaagagagacctggctgaatactaatggtccagaataggaaaccctttttgtgggcttccaggaatgcatgattcaaaggcaggtgagtttaggtatggtcaaaagattcacaaagaagtttaaagttcttgcaacaaatgggtttcagatttcttttgtgttgagtttgtatgtagaaagatttttctcatgttcattggcagaaatagcaggcaatggttttaacatggagtcaccaaaccatgaaagtattggggaaaccaaggctcccagtgtggtggagatagaaggtctgtgtggtggaggtggagatggagggtccatgttgggtagaggtaaagggtctgtgtgtggtagagatggtggggtcatatatggtggtggaggtggagaatttatgtctggtggagatagtggggtcacgtatggtggaggtggagggtctgcgtgtggtggagatggagggtctgtttgtaatggaggtagagggtctgtctgtggtggaggtggagggtccgtgtatggtggaagtggaggttctgtgtgtggtagagatggtggggtcatgtatggtggaggtggagggtctatgtgtggtggagatggagggtctgtttgtaatggaggtagagggtctgtctgtggtggaggtggagggtccgtgtatggtggaggtggagggtctatgtgtggtagagatggtggggtcatgtatggtggaggtggagggttcatgtgtggtgtaggtggagggtctgtgtgtggtggagatggtggggtcatgtgtggtggagttggagggtctgtgtgtggtagaagtggaaggtctgtttgtagaaaaggtggagagttcatctgtggtggagatggtgtggtcatgtaaggtggaagcggaaggtctgtgtgtggtggaggtggaaggtctgtgtgtggtagaggtggaggttccgtgtgtggtagagatggtggggtcatatatggtggaggtggagggtctgtgtttggtggagatggtgaggtcatataaggtggaggtggaag

SEQ ID NO: 611 - DNA, 1975 bp, Artificial sequence
  DNA replication origin
ataccccagcatcccccagaggagtctgaccaccccggcctaccttcagcaagaatcctgttaggtgactcgagcctgaatcccccagcccctgatgtttcctcctagtcactttccatccgtggaccccgccctgctcctgggctgtgaatctccactgcctgtggcgtgtttggagttgatcccggttctatacctaggtctctttctattgtaattgttcctgaataacatctgtttttatcgcttcagctaccatccaccatgggtttctttgacagatgggactccttggcccgcactgctcagcactgaggtccagcctctgacaagcgaagtgcaggcccccggcgcgggctcctgtgtggatgcttctgcaccctctgccgcactgggcacccggggcccaagcccacctgccctctgaaccattctccaggtcaggcaggcagcatgcagcctgtgagctccctgtgagctgaattaatccactacttcaccacatgcatcaggatggaccccctgctgtgggccgtaggctgtgtgctgtgtgctgtgtcctgtgtgctgtgtgctgtgggctgtgggctgtgtgctgtgtcctgtgtgctgtgtgctgtgtgctgtgggctgtgggctgtgtcctgtgtgctgtgtgctgtgtgctgtgggctgtgggctgtgtcctgtgtgctgtgtcctgtgggctgtgggctgtgtcctgtgggctgtgggctgtgtgctgtgtgctgtgtcctgtgtgctgtgtgctgtgtcctgtgtgctgtgtgctgtgtgctgtgtgctgtgggctgtgggctgtgggctgtgtcctgtgggctgtgggctgtgggctgtgggctgtgtcctgtgggctgtgggctgtgtgctgtgtgctgtgtgctgtgtgctgtgggctgtgggctgtgtcctatgtgctgtgtcctgtgggctgtgggctgtgggctgtgtcctgtgtgctgtgtgctgtgggctgtaggctatgggctgtgtcctgtgtgtgtgctgtgtgctgtgtgctgtgtgctgtgtgctgtgtgctgtgtgctgtgtgctgtgtgctgtgtgctgtgtgctgtgtgctgtgtgctgtgtgctgtgtgctgtgtgctgtgtgctgtgtgctgtgtgctgtgtgctgtgtgctgtgggctgtgtgctgtgtgctgtgtgctgtgtgctgtgtgctgtgggctgtgggctgtgggctgtgggctgtgtcctgtgggctgtgggctgtgtgctgtgtcctgtgtgctgtgtgctgtgtgctgtgtgctgtgggctgtgggctgtgtcctgtgtgctgtgtcctgtgggctgtgggctgtgggctgtgggctgtgtcctgtgtgctgtgtgctgtgtcctgtgtgctgtgggctgtgggctgtgtcctgtgtgctgtgtcctgtgtgctgtgggctgtgggccatgggtcatggggctgtgggctgcatgctatgggctgtgggctgcttgccaggcacttaggaaccgaggcacagcatgagtgagtccctgccttcaggaaatgtctggtctggtgtgagaacaggcgcgtagacactcagtcatagtgcaggcattgtagggtttggcatagctacggatcatacagagatcatctcctcatgtggcagcatgaaaaatgtcccccaaagatgtccacgtcctcatcccagagcctcacatggcatagggcctttttgggtgggattaatgtaaggatcttgaggtgtggatttatcctggagtagtcagggttgtggggagtgatgccatcacagaggtctttgtaagaggcagacgggagggtcagaggcagagggggagacagaaggaggaagcagcggtgagggagagaaggaaagatgctggactgctggctttgaagacggaggagggggccatgggccaaggattgccggcggcctctggcagctgggaaagg

SEQ ID NO: 612 - DNA, 1229 bp, Artificial sequence
  DNA replication origin
tccgtggccagcctccacttcagtgcccgggctgcatgggtgttagatttttaaaatagtaggcctaggtatgataatgttaccaacccttctgggtctttgtggaggttaaatgagatcacaaatgtgaaatgcatcctgccgaggctgatgcttatagacaggggtgagttttagtccgaactagagtgaaccagctgggtctctgttctgcatcaggccactcaataagtgaaatgtcttccttcctccccagcatgttccagaagcttcttcaagtccaaggacagcagctcagacagggaactgctggaggaagtggcttttctgctcaattaccctctaccttggtggtgggttgcctgtatgccaccagagctgctgcttggggatgaggtcctgcaatgactgcccaaaaagggggccacaggagggtcagctgctttttcatgttttaagaatgggtatcttggcagatactgaatcccaacaaaattctaaaaaaataataatgccgatggtttgatggtgatggtggtggtggtggtggtgatgatggtggctgtgatggtgatcgttgtgatggtggtggtgatggtggtgatggtcatggttgtagtaatggtggtggtaatggtgatggtggtgatagcgatagtgatgatggtggttgtgatggtggtgatggttgtgatggtggtggtcatggtggtggcgatgatgatggcggtggtggtgatgatgatggtggtggtggtgatgatggtggtggtggtggtgatggtggtgttggtgatggtggtgatgttggtggtgatggtgatgatgatggtcttggtgatggtggtgatgatgatggtggtgatgttggtgatggtggtggtggtgataatgatggtggtgttggtgatggtggtagtgatgatgttgatgatagtggtgatggtgattgtggtggtggtggtgatagtggtggtggtgctggtaatgatggtagtagtgatgatgatgatgggggtggtggtgttgatggtggtgataatggtggtggtgatgttggtgatggtggtggtgataatgacagtggtggtgatgacgatggcagtggtgttggtgatgatggtggtggtgataatgacagtggtggtgatgatgatggcacagtggtggtgatgatgatggcagtggtggtggtgatgatggtggtggtgatgatggtggtgatgctg

SEQ ID NO: 613 - DNA, 1262 bp, Artificial sequence
  DNA replication origin
tggagcgcggggcgtggggacgcgcggcggcggcgccgcgcggaggaggcgcgcggggatcccggggccccgccgcccgcgcccaccgcgcccgccgcagagccgcccgcgctgctcagccgcctccctcctcgcgtctgcctctccgcgcgctcgcccccgcctcccggagccggtcccaactccgcccgcccggcccggctcacgtcacccgccttccccgcccctcgaacgggagctcgagcccctggcctggccccggctcctgctcgccgccccaccttgcgggggccggggtcgccgcgggtggtggggggcgctgtgcccagcaggggcgacagcgcaggcggggcctcctgcagcccccttccccatccccggtcgcgtcccggtccccaccttgcgaaaggctcgagagaggccgcaggctaggattggaccgccgggcgccgccggatggtgttgccagggtaaccggatggcacgcgaagccgttcgaggttccgacccggttacgggggcgcccagtggacccggagagctactttggggagggggcggccccgaagaaggactgggtgggggcgcatggagcgggggctgcgcgaaaagtttcctggggcggagctgagccacgcgggccgcgcaggagcgtctgtccgagggtcgcctacgagggactcctctgctcggctgcgcgggcttctgcgttgatgaagtcaccgcgttccgggtcggagcttcggcgcttctgccccgaacccagcgaagcccggtcctatgcccccaattacccaacggtccctcatcgcccagcgcagctgctgcctggccaggcccttgctccggaggagtcactggaaagttccagggaatctgggcctcccggactctccaccggcgtttcactgctcccttcccatgccaggactcctctgtgcctacctggttagtctgtatttgcaaaaaacaaacaaaaacaacaacaaaaaacaaatggggggcacttaaaggaggacagacgctgggcggggacctttcactgagagaagtgacatggggcggaatcctctgcagacccgctgacgccttgagaaaccacggcaaaaccctgcttttaatcctccacaggctgagggcagtgcagaatccgggccttggaaaggacactggtgccacccttcactggggaaaggtgcaaggggcgggggatataccatgccgagccttcgctctgtgctctgtgcaggtgcttgacccag

SEQ ID NO: 614 - DNA, 1383 bp, Artificial sequence
  DNA replication origin
ggggcgcccgcccggagcctggagcagcaccgcggccctggcggggagcggccgggtctccagggttccgcgcgtccggggtcggggcagcggcgcccgccccagcaacccgggaagtggggccggccaggcgcgcccgcagctctaggagccagcagcgcagtgtcctggccggctgccccggcgcgcctcctccccggggcccggggcgaggcgccggccgctgggcgcggcgggcgcgggggccggggctgccggggaaagctaaagctccgggctcccagcgagagcttcgcaggcggagttggaggaaaccacagccaaacagccactccgctcccccttctcctttctcggggccccggggctgagcaggggcctcccaggctcccagctgccgacccagctgtttgcgggtgacctccgggcccgacgggcgctcacagctggcgggcagctggggcgggagagctggggttcttggggagctccggcggccaccccgctgtaaacacacacgcacatacgcccgccggcgcgcccggggcttgtctgtgtctgggactccagggccagatggaagagggggttcgagcctagagcccgtggtgggggtgtccagaaagacccttctcggcaaactttgccagcccgccggggttctcgggcttctctggcttctgcctggggtggcccagggcccaccagagcacagctgtcgtttttgctgggcaggctgcctctgagccctcgccctcctgccggggcattcaccgagctcgtgcatttgggtcccgggttggaaccgcgagcggggaggacagaggtggaggcggagagcagcgtgcggttctcgagtttgtccactgggatgcactgcgctcccgcgttggggacgaaaaggccagtagttgttagcccgctgcttgagccgcccccactcagggatgaagctgcggggggagtgaggcgaagggagggaggatctagtgcgtgtcctgattttgagaaatcggaaggggactgggacgccaagtgttttctagcgacccttgatttatgagccgattctgctcccagaggtgaatactgtgtaacacatctagtgaacattgtcagatgttattattagcatcccttctctcagtggccgatcttgctgtgggcttcaaaggttaatcatggagccgattgtgttgggtgtgggatattggtcgggcgtgaatcgataagtgtgcttgggctagataaggtttaggcttggaccgttgtgggatgttggcaaaatggagcgaggacagctttgcaggaatgaccctgatccaggtgccctggaggcctgccatcccctgctctgccccggactgtcccaggtctcagcaa

SEQ ID NO: 615 - DNA, 1087 bp, Artificial sequence
  DNA replication origin
cgtttttcccccctcgatgtcagcacaggagattttctgtaagtgtgcctttaaggacgagctgtcacctatttgggatcctgatgggagagctctgtcttgttactgctgtctcctggccagagaaggaggcctgtacccagagggtctgggtggttttgcatcacaatgggcacctggggactctgagccaaagggttgcaagttcaaggtctggaaatgcactttttctttcaagacagcccttcacctttgcttgcaagccactccgcggctccctaggtgagcactgggcgtcttgctgccaagcttggagcctggttaggacaggtagacactgagcctccagctggggtggcagaaggcctggcttgctccaccatgggagaggtgcagtgtaacttgctgggcagggggtgggggtgggggtggggtgggctttcttagttccggccccagagacgaagtctgggcttggttatttacgtctgtgttggaactgagctgtatgtggagctttttttttttcttttccccccaagagggagaagcagattgagacttattgagcagcttttgtgtcttttgcggtggcatttaatagttgtagcagagctccaaagatactttccatcagctgagagagagggagccacggaaggagacccagtggcttgacaagccctgccagagctcacccgtggaggaggcgcgtattcagcaagcagctcagagctcacccgtggagggggcgcgtactcagcaagcagcccagagtttggaattggcttcctggttgtgagttgcttcccaggctgcagacctcagatgctgtggcttcctcaggggctccgagcgtccacctaatacgtttgctgggttgcgctcaggactgtgatccctagcagagtgccacgagctcattcccagcccatgtccctgcggccatcccatctgttctcccgctccaaggttctggggccccttttgtttgggaggccctgggtgtgtgtgttgacataattcacagttccccaagccctctcagtgcgcgctgtaccatgtctgggcctcatggcagggatcc

SEQ ID NO: 616 - DNA, 3410 bp, Artificial sequence
  DNA replication origin
cccgcactcaaacccaggcactcagctccagcatctggcctctgaaccgttacatcctgttcttcctagtctagaagaacactttggattggatgtatttaaggaatacagcatccaccaggctggggcaggcagccaagtatgggatttgagcccagcatccagggccaatttccttgctgcctggcaccgcacagaacatacatggatgcccatggtatggaggtgaaaaggacatgcctggagcttcaagcgttctgagcctggtagggggacaatggtggtggagttgccaggtgacagcagcagcctgtccgggtggttgggcccaagggtcagccctgcttagagtacagcagggaccacctctcaccagctgatccccaccatcagctggggggccccggtcatgcccttctgccggggtgtcatttttacacaggtgaagaaagagaatggacccaggagagagctggcgattttgctcatttcctgggctgccctttggtggcatctgcctggctctcatttgcttctacttggagcatctgaatgactcaatgacagagtcccgtaaccaccctaccaggctgactacagccctgatcagacagaagtcagtatcctgctgtggattcaatttcccgaatggttgcagagagccatcttaggcaagggtgaagcaatcacccacggatggtgccggtagacttcctaggcatgcagctacgatatatataaaagattcagttactaggcagggtcattgtatttggcgtgttagcaaggaacctatctgaaccacgatgtcagcctttgtggcagaagcctctgccccaggaccagctgaggattgtgctctctggcttggaaaggagtgtggtaaaatgcggaaaaagccccacgagagctggttttcagtcgacgcccccacccccctcttttttgtcaagagaaaattcaagactgtacccagatgctgaaaaaagctgtgcttcctgctgagggacacggtggctttcagaaggcaaggattctttagggagccaattatgcgagacaagagtaagcatgtttatttttatgacactgcatttcaaaatcccagaaaatgttgatggaatggccccattaggcgcctgggtctcctggatgctgtggcattacactgtgcaggcttccaggggcattttggggactcttgattaagccccggtactgggctaatttactgcccattactaccctggagggtctctttgaacactcacagctccaggttccttcttccttcagcattttttgggctaatttgattctctgcacagaagcctgatgctctgggaagacctgagccgccacactcactccaacagcatctgtttctcaggctctcaccccgacggtccctggggagcactgggctggggttttgtggcaccagccacgcaagtggtcccccgagagtctgctggccccaggtgagagccaggcagcgtgacaggtatggtagccactgaggtttgtcctgggacaggctgcctatgggcctgacatccagacactttcatgcagcagacacggatgagtggccaccgcgtgctgggtgctgtgctgggcacagggatgaaaagacccctctcctggtcctacaggaactccaagtggaggagaggacagaggagcaaatggaattgcaggagccaagaggaagaaggagatggggaaggtttcccagaggtagcagcgtttgactcccttctcagaggatgagaggaaggaagcccattgggcccgaggaggaagggacagccaggcggagggaatggggtggctgccgtttacggagcactggtggtgagtgtgctgcacagatggggatgtggaggcaccccgcagtgaaatagcccactgaggctcctccggcccacccaggaggggcaccccgcagtgaaatagcccactgaggctcctccggcccacccaggaggggcaccccgcagtgaaatagcccactgaggctcctccggcccacccaggaggggcaccccgcagtgaaatagcccactgaggctcctctggcccacccaggaggagggcagggcaggtgtatttgggtcagcccttaggagttgggtctgtgaagctggagaggaaggtgtatgttgcggggggaatgcttggaggagactggaaaggccagcaggccccaggactggagccatctagggccagggtcccagggaaagtgtcatgctctctgcccgtgtgcgttcaaggggaaagcaaatgacagaccctggggagtgaggggtgcagagagggggcccgtgactcacaggaggggtgcggagaggggcccgtgaatcacgggaggggtgcggagaggggcccgtgaatcacgggaggggtgcggagaggggcccgtgaatcacgggaggggtgcggagaggtgcctgtgaatcatgggaggggtgcggagagcgggcctgtgattcaccagagggttgcagagagaggcccaagaatcgcgggaggggtgcggagaggggcctgtgaatcacgggaggggtgcggagaggggcccgtgaatcacgggagggatgcggagaggggcccgtgaatcacggaagggttgcggagaggggcccatgaatcacggaggggttgcagagaggagcctgtgaatcacaggagggtgcagagaggggcccatgaatcacgggagggttatggagagggacccgtgaatcacgagaggggtgcggagaggggcccatgaatcacggaggggttgcagagaggagcctgtgaatcacaggagggtgcagagaggggcccgtgaatcatgggagctgcgtgggatggaacctctgtgtcctggtggagcagcttagttttgtggaaggagagccctggggtaagcagagggagggagaggcagccctctggggctgtggtcttagggaagtcccagaggactccccaggcggggaagacaactggcctggccccaggaaacacgtctgcggtcagttgccatgattcccaggctctgcttttactcagaattagtctgagggaaaatgccagcctagaccacgtgggcacaaaggtgtgacaggccctgacgacccaactttcctttcctgagtctcttgctgcttctccacccttccagccccaaccagccacctgcccctgcccctccgtggggaccttctcaccttacaacagcagtccccaacctttttggcaccagggaccagtttcatggaagacaatttttccagggacagagcgggtggatggtttctggataaaactgttccacctcagatcatcaggcattagattctcataaggagtgcacaacctagatccctcacatacatggttcacagtagggt

SEQ ID NO: 617 - DNA, 1055 bp, Artificial sequence
  DNA replication origin
ggacgaggtgtgccccattctggaacccagtgctcattgcagctgctttattaggtggctatcaaataattgtataaaaataagcagttaatatttctattacagtgtaattaatactaaataagaattgagcttcataaatgcccacctcagctgtgctttacagtttcctggaagccacccttccctcaccatggcccagggaggttgacagggctggattttctcccagtttatggggagaaaccgaggaaaccttggagaagcccccatgaaggccccatgctgcccaggattcaaaggcccacccgagtggggaggcgcccatgggaactttagacaccaggccactcaactgaggggagaagcagcccgtggtcaggggacgtcaggggcatgtgctgatggagagggactctcggcttcggagggaagaaccccatgggggactgggagtcatggagggcttcctggaggcagggggcggggggagggattggaggaggcctaagcaggagcaggtagggcttctgggctaagactgagcgtccaagccttccttggaggcaccagagcccaaacccagctggctgcagaatggcccttcctccccacgtggggctgacagcctgtgttttgggcatcaggggactgggagcgggaggggaggaagagttgccagctcatgtcagacttgattagtgcctgtcttagcctgttttatgcggctctaacaatatatgtgagactgggcattttataaaaagcagagatttatttctcacagttctggaggctggggcacccaaggtcaaggggcccacgtctcgctggggcttcttgctgtgtaatcccgtggtggaagcaggagggcaagagagcacatggaggggaggaaggggccaaacgcgtccttttatcaggaacccacttgggggagataatggcattcagccattcaagggggcagagccttcagggccccctcacctcttacaggtcccacctcagtgctgtggcacagggattacatttccacagaagcttctggggac

SEQ ID NO: 618 - DNA, 832 bp, Artificial sequence
  DNA replication origin
cgcaaccctgaggagggcggggctgcctctccacgcagcggggctgcaggggagaagtcagggctggcggggcggcccctccccagttcacatggagcggctttgtcaccaggtctggggtcgcctctggaccagtggactctctggtgtcacatgaaaaccagggcgcggcagagagccacgtggaagggctcagaggagccaggcccacgctccctcttccaccagcacagataattgaagactgattataggtgtcattcaaagtcagttctcgtcaccagcctcacgtctgaaagttaaaatgaatcccaaaactgtaatgactgaagcgggtggggggcgcgagggtgttcaggtgccaagcgccagcctgacgccgcccaaagccaggcctggaaagcaggttgggtagagtttttctttataaggcggtgagtgacttcacaaaggaaggaagctgtgtgtgtcattgtaatgcgtgcacgcaagtgtgtgagtgtgtgcgtgtaggcaagcacacgtatgtgagtgtgtacgtgtgtgactgggtgtgagtgtgtgcgtgtgggtcaagctgtgtgagtgtgccagtgtgagagtgagccagcatacatgagtgtaaagatgcatctgggggtgtgtccacgagtgtgagagactgtgcgtgagtgagggccagggtgtctgtgtgtatttggtgcgtgtgtgagagtgtactgttgtgtgactgtgtccatgtgtgtcagcatagaagtgtgtgagtgcatctatgctcgtgtgtgtcagtgtgtatgagtgtatctgtgcgttcctgtgtgagtgtgtctgt

SEQ ID NO: 619 - DNA, 1165 bp, Artificial sequence
  DNA replication origin
gggcccagtccccctcctgggcttccactgaccgctcttctctcctttcccccccgcacagctccatgtccatccgctggccgggccgccccctcggaagccatgcctggatactgatagccatgtttcagctcgccgtggacctgcccgcctgtgaggccctgggcccggggccggagttctggctcctgccgcggtcgccgccccggccgccccggctgtggagttttaggagtggacagccagcgcgggtcccggccccggtgtggagcccccggccgccccgagtggagcggatccacgggcagatgcagatgcctcgagccagacgggcccacaggccccgggaccaggcggccgccctcgtgcccaaggcaggactggccaagcccccagctgctgccaaatccagcccttccctcgcctcttcgtcctcgtcctcgtcctccgcggtggccggtggggccccggagcagcaggccctcctgaggaggggcaagaggcacctgcagggggacggtctcagcagcttcgactccagaggcagccggcccaccacagagactgagttcatcgcctgggggcccacgggggacgaggaggccctggagtccaacacatttccgggcgtttacggccccaccacggtctccatcctacaaacacggaagacaactgtggccgccaccaccaccaccaccaccacggccacccccatgacgctgcagactaaggggttcaccgagtccttggatccccggagaaggatcccaggtggggttagcacaacggagccttccaccagtcccagcaacaacggggaagtcacccagcccccaaggattctgggggaggcctcaggtacagccatctctcttctggtttgggtttgcttggggttgagggctgggagcgtgactcgggagagatgcttagatgtccctgggtgatgctatgtgtggaggctccaggagatgcaggcgtgatgtgtccatgagcttgcacatgcctgtagactggcaaatacaggctgtgccttagaggaagggggcgtgagaagggagagtttccctttttagtatgtacctagaagtgggcgctgcaccccttgtgcctctgttagggaccagctgaatccaccaggtgctgcagccctgttacagac

SEQ ID NO: 620 - DNA, 893 bp, Artificial sequence
  DNA replication origin
ggtagatcctgagtgtgtccaaggcggtggagccacgcttggcttttacattgtagggagacataaggcatccatcaacacacagaagatgtgcatcggtccagtgtggaaaggcaggacaactggaagtgggagctcccaggtcgcaggtggattcaaggattttctgattgatgattggttggatgaattattatcaatagaaaggaatgtctggatcacaagaaggggttgtggagacgaaggctttatcatgcagatgaagcctccaggcagcaggcttcagagagaatagattgtaactgtttcctatcagactgaaagaggctattctatcagtaattccaaaatgaaggagggtataatgaggtatgcccagcttcccttcccatcatggcctgaactagtttttcaggttgactctggagtgcccttggccaagaagaggggtccattcagatggctgcagaggggccttagaattttatttttggtttacactgcatgagagtggcaacgagagactgaaaatatgaaggaaatccaaaaaagatggaagagtggaagagccagggcaaaacggtgttcttcaaaaaagacagtgctcaacctcaacagggttgcattggatgaaagccttgaggagacaagtgtccactggacttaaggcaaaggaggtcactgacagcttcagcaggaggtctctctcctaggtgagtaatggagcggattggtgtgggctgacagtgggtgggaggcaaggagtggaaatgcggttcagatcatccttactgagaggcagagggagaggaaggaaaagagataggaggctggaggaggtagaggcatctgcttggtggtcaggggaggaagtgagggtgttgggggttttt

SEQ ID NO: 621 - DNA, 1200 bp, Artificial sequence
  DNA replication origin
aggaattctatataagattaagcattctcacctcattttaaaatgctgataagaagttgcttggttaaaaacacataagagttaggctaattagggattaaaatccttgagaaggtgtaatgagagagaaataaaaggcagagaatgtgcagagggattaactttagcccaggaaacagtctcttccttcaatcaattaagagaaggaaacaaagagataagagcatgtgggtagggggcttgggcttgaagagttgatgctagaagggagagctctcatacattacttcacatgctcattaggtgtatgttctgtgccaggaactagtgtgatggtgaggtgggagggtggagacacgaggaaggggaggtggttgttgaggggatgggagggtgggggctctaagagtggggaagttgagggagtggggaagtggttgttgggagaaatgagggagaagtgtggggaggtggttgttgagggggtgggagggtgggggctctgatgggggaggtggtcgttggaggggaatggggagatgagggtataagtttagggagatagttattacaggagtgggaggctggctatgagagtcaggaggtggttgttggggaatatgggagaggaggatggggaggtgattgttgagggggtggtggcaagtgactggggttttgcatgggtctccctggttcccagctatttccctgggttcagatgaaataactgaatcagttacacagtgccacactaagcataaggctctaggtctctaaagcccaactaattccgaggattcagaggacaggagcaggaagcaggaggccccctggcagaatgactccttctctgcagccttcatctatcagggacagaccccacctgcgcacctccgtgctccccctctcctgccctctctccaaccccgtggcttccgccccgccccatgcacttggcgtcagtcacttggaacagtgctctgagccgactgggctctgtttgcggaaacgatggaggaagaacggatgtgaaccctctggacacatgagttactcatgctgaggatacagccctatgtgcgggcagccacctaagatcacgcccacgggtccccatgcattctcctcccacctgcttcctacttgataagggttgtttagggtaaatatgtgcgataaatgtattgaaaaacaggc

SEQ ID NO: 622 - DNA, 1155 bp, Artificial sequence
  DNA replication origin
gaaggtcaaagactgtcaaagcttacggccaaagcattagaagctggagaggggcctggaccaggttctcccttgcagcctggggaggaaccaacactgtgggcagcttgatcttggactccaaacccccagagccgtgtgacaagacatttctgttgctcaagccactgggtctgtgggtctgtgggtctgtgggactttgttacagcagccccagcaaaagccaacagaagaacccccttgaagaaggggcagaaggagtgtgagccggcagatgaatgagcattaattaggccaaggagggaagaaatagggatatagttccagagaatcaggactgcgctggccctacagaagggagaggcagcagggacagggcctggaaaggaaatcactgtggccagaacagggggactagggacaaggtgggagaggtggtggggaaggggcctggaaaggaagtcactggccagagcagggggctggggacaaggtgggagaggcacctggagaggttggtggggagatttggtcttcatctggatgcatcattgaggaggttgagccaagtgctgatgagaatgagttgggcatggaagaggccccctcattgtaggtggagtcacacggagagaccgagaggggcctggtgtcggtgcagggaccccagtgaggatccgcgcaggaccatgagtgataggctgggtgtttagaccaaatggagaggagtggagattttggaggtgtttggagggtagaatcagtacccactgaccatgggttagaggagggaatgaggaagggaatgtttctggcctctgcggcaccatttacagggtaaataaatgaggatggaagggagcaccaagagtctggatctggaagcactgagctgaggttgaggtcacttggcaacacccaaggaggccctgcaaggaacgagttgggtagaaaacccacagtccagagggaggggtggggtgttgtgtgggtggaaagtatgggcacgaatgagattgtttaaggatggggtacagggtgagcagcccagagggcctaaagggaactgaaagggactcctttgtttaattctggcaacagcaagcccagcctgcaaaggagacagcaagtcaaagaggacccaggaggaaccta

SEQ ID NO: 623 - DNA, 1856 bp, Artificial sequence
  DNA replication origin
cctttgtccattgactgctgcccacttacatgggtggaggtgggtcttccttactcaggccactgatgcaaatgctaatctctcctggaaccaccctcacagacacacccagaaatcatgcttcgccagctacccaggtatcccataatccagtcaagatgacacgtaaataaatcatcacaggtgcacataggagttcagtgtgggtgagaaagagattgaagtgaagttccatgaagtttaggctgggctgagtggagattgaagacagggggcaattgggaggcaatggggggccaggcctagaagtctcagtgaggttgaggaataacgagaattagaggaataggaaggaaagggagtgtgggcagagatcaggcagagggaccgcccaactcagagtctgggtggggactaaggagggggtgactgtggtgggatgggggctttaatggggatgaccagtgtgaggtgggctcctggggggggggtggtgattgatgagggatgaggttttggagggtgaccaggttagaatatagtccccgggggtggccagggtggaatgtggtcccttgggggctgaccaggttagaatgtggtcccagggaggtgaccgaggtggaatgtggtccctgggaggtgaccgaggtggaatgtggtccctgggaggtgaccgaggtggaatgtggtccctgggaggtgaccaggttggaatgtggtccctggggtggtggccaggttagaatgtggcccaggggggtgaccagggtggaatgtgtgaccaggttagaatgtgatcccaggggggtgaccaggttagaatgtggtcccatggaggtgactggggtggaatgtggtccctgggtggggggtggtgaccaggttagaatgtggcccaggggggtgaccaggttagaatgtggtccttgggggtgtgaccaggttggaatgtagtccccatggggtaaccggggtggaatgtggtccctggttggggggtgaccagggtggaatgtggtccctggtaggggggtgaccagggtggaatgtggtccctagggggtgatgcagtaggacagtgtgtgttgttccctcagcttcttgggagtctcaggaggtagaataaaagtgggtttgggggcttaaaaacctgaggcagtgtgggggtcttcatttggaggagccgacgtctcctggagagaccctggccagcatttgctggcagctgtggaggcaccttggacagagcttttctgaggagagttgtggtctgtcactgttactacaggggctccagcctgatgcctggagagggaatgggtgcagggacaggcaacagcccactccagaggggagaggaagcaggtgggtccttcagcccagcctgatctgcatggtcccggaggaccctctcaacccaggcctggccaactgtgggctgcagctgcccagtgcccgtgctggcaagtggtttctggttgaggatatcagccctcaagcctggctaaggaggccccgccctgcccttcctccctgaccttgactggcagcacacctgggcagattggcctttgcactggggagtggggctgtgcttcgggcggtgtgcaaggtgtccagaggggtgagaggggacaacctgagaggcagggctgctgctgctggtgctgggagccctgatgtgtctgagctgctgctctccggctgctcgcatgagttttcttcaaagtgcgtaggaccatggccttccctgctcaggctgtgttctgtctctcgtttcccacgggaggatgctggcctaccattgccatgttcagggattcacacgaggactcctggcttctcttcccgag

SEQ ID NO: 624 - DNA, 1153 bp, Artificial sequence
  DNA replication origin
ggcaagggaggtgtccacctctgggagacagagaaacatgtgcactctctgtcccctccaccctgctgccaactttgcaacgtagaaagtgtcccaacatgaagaggagaaagaacagagacccttgagaaattcgagcaacattttcctggacctcgcacgattgccacctgcctgggtcacggggtacccccttagctctggtcatatcagcatcatcgcacatggccaagtcttctttgagtgcccaccgcatgcccacagctgttcccgggatgcacgccagacgaggtacccctttgtactgcacgatcggtagcagtgtcttctcctcaccaagcctctgcttctcatatggaaatcagtcaagatgacagcatcgtcactcatgagactgttgtgaccacacaggcagagcacttggcaggggacctggcgtgcagagcgtcctcaacacattatactcactgcacgtgtgagtctctgggaggggcacgtggctctgccatcctgcagcttgcagctggttaaggaggcagtgcttccagagagaggtcatctgaagaccgaaccttgcaatgcgccccattagtgccacaggatggcaagggagattgagcatgggctgggggtgggagggctctggagggagcttgaagcacagataggacttggggtggcgttatctgggagaggggggcagagaagtccagcggtggagacagtatgtgtggtgcatccaggcagtggctggagcatccagcggcaggatggggggtgttccaccctccctcccttccctggttcctgctccacaaggccgtgtggtcctcagagctgagggagagcaaggcctgagagttggggagacttagggagtgcacaaaccctgccctgagtgtggccaccctggacttgatcatctgtgctgggcaacaaccaaaagagcgtaagcagagtgggacttgaacgctttgccctgcagattaccctgccctcccctactcctagggcctcaggccaggctgcatcctggaaatgtgagagaaaaaggagcaggctgctttctgaggccaagcgctgaattctcagcgcccaggatggggtccctagccagccaggcatggcggggcctccctgcagtctgtcagca

SEQ ID NO: 625 - DNA, 926 bp, Artificial sequence
  DNA replication origin
gaggaagggagggagggagggaggaagggagggagggagggaagaaggaagggagggagggagggaagaaggaagggagggagggaggaagggagggagggaggaagggagggagggagggaagaaggaagggagggagggaagaaggaagggagggagggaggaagggagggagggagggaagaataaagaaagaaaaagaaagaaaaaaagaacacccccccaggtgcacatggagactctgcgctggggcccagttacccagggtcgaggcccagccagcttcactcagagctggatctgggctctgtgagcgtggcaggcccgactttctccagaaaagtgtttggagccctgtggctgggctggagctggatgtcttctgtaaaggggcagagcttcttgctggtagtgtggacacagcagatctcatggaagggtgggaccagccttgctggggtccagcacccaggcctgggccacctcagggcttggggacggtggtcgttggctgggtccaggtctcctttccccagggctagggtgggtagcaaaaatggatgcacagtgcctaggaccacatgggcagggagacggggaggctgccccaggaccctgcatccacacctgggggacgggcttgcctttgctgctaggcgaggaatgcctccctgaacagagcttcatgttctgcacccgtgatgtgatccgcaatgtgcaggggctgacgaaggggctgtcggctgggctctctgtgagcctgtgatctcctcaccacccctgcacctctgcactgaggggaggcagcaagagaggggagctcatctggaggagtcagtgccagctttgagaagcctcagccccttctagacacctggctcctcaagccccctccatggggaggggatgagcaggtcctgtccttc

SEQ ID NO: 626 - DNA, 824 bp, Artificial sequence
  DNA replication origin
tgtgtgcaatccagggggcacagagaaagaagaaccaaaggctctggggctcagaaagcttcaagcccctatgcaggcctggaagtgccaaggcagagcctcttctccaagcaagtgcagagaaggctgtgcaatagactgacagcaggaagggaggaaggaggggggaggagggaggagggcagaaagggagggaggaagaacggtaggagggaaagaggacaaaagggagggagggaggaggagaggaagggaggagcagagggagggaggaagagagggagggaggagagggagggaggaggagagggaggaaggagagggagagagagggagaaagagaggaggaagaaggagatggaggagggagaaaggaagggagggagaaagggaggagggagggagggaaggaaggagggagggagagagaaaggagaaagagggaggaagggagggaggaatggagggagggaggagggagggaggagggagaagggaaaggggagggaggcaggagggagaaaggaagggagggagaaagggagagggaggagggaagcaaatgggcgttggagtcagaagagcctggagtaaacctagccctgctgtctacaagtcgtaccactttgggcaggttccttacctctggcctccctttccccacatgtaaaatgggctcggtagcagctcttccctggcagggctgttggggaacgaagcggggctgtgtgacatcaagtgctcagcacagcgcctagcacagcgctcaacagttactcccttcctgctcggtgtccattcagggcccccctttcccctccagg

SEQ ID NO: 627 - DNA, 1949 bp, Artificial sequence
  DNA replication origin
agtagtcttgggccagccagtagaatgggtgaatcaagtatctgagtctcttatcacacaaggttgttgtggaaacagagaaagaggggttgaagggaggtggtgggcacctgaccctgccgttctggctcttttgatctcccaggcctgggacagcactcagcacacagtgggcatccgatccacctgctcttcattcatctgttcaagtgctcctcattgcttcccatctgtcaggcattgttctcaggccttggaatccattcgtgaacattaaagacaaagatttttacaatacattagtgaattacataatagatcagaaggtgttattactatgggaaaaaagctgagtctgggatattagtggcaagtggttataaaaaataggatggtgatgctagactctgtgagatctttgagccagtgcatgaaagggatgtgggcctggaagcaaatatgtatttgtcttcagccgagtgatgtgtatgttgactggcatgtgcgtgttgagtgacatgttagtggcatgtgtgcgagtggcatgtgtgtgttaagtggcatgtgagtggcatatgtgtgttgagtggcatgtgtgtgttgactggaatgtgtgtgttgagtggcatgtgtgtgttgaataacgtgagtggcatgtgtgtgttgagtggcatgtgaatgacgtgtgttgcgtggcatgtgtgttgactggaatgtgtgtattgagtggcgtgtgtgttgattgccatgtaagtggcatgtgtgtgttgagtggcatgtctgtgttgagtatgtgtgtgagtggcacgtgtgtgttgagtggcatgtgtatgttgagtgtgtgtatgtgttgagtggcatgtgtgtgagtggcatgtgtgtgttgattgccatgtgagtggcatgtgtgtgttgagtgccatgtgagtggcatgtgtgtgttgagtggcatgtgtgtgttgagtggcgtgtgtgttgattgccatgtgagtggcatatgtgtgttgagtggcatgtgaatggcatgtgtgtgttgagtggcgtatgtgtgttgagtggcaagtgagtggcatgtgtgtgttgatggcatgtgagtggcatgtggtgtgagtggcacatgtgtgttgagtggcaagtgagtggcatgtgtgtgtttgcatggcgtgtgtgtgtttgagtggcgtgtgtgtttgcatggcgtgtgtgtgtttgagtggcgtgtatgtgtgagtggcacatgtggagtggcaagtgagtggcatatgtgtatgtaagtggcatgtgtgtttgagtggcgtgtgtgtgagtggcataggtgtgttgagtggcaagtgagtggcatgtgtgttgatagcatgtaagtggcgtgtgtgtttagtggcatgtgagtggcatgtgtgtgttgagtggtatgagtgtgagtggcaagtgagtggtgtgtgtgttgatggcatgtgagtggcatgtatgtgttatgttggcatgaaagggtgtgtacacgtgtgtattttgaatgcatgtatttctgcctgttccatgtctgtgtgtgcttctgtgtgtacatgtggtttttgaggtgtgtctatttgtgtctgtgtctctgcctgtgcgtctgtgtgtgtgtttgtatgtcttgtgcctgtcttttcttgcctgtgtgtttgtgcctctgtgtgtgtacatatgtatgtagttgtatgtttgtgtggggtgtgtgtccgtatttgtgtctctgtgtatgcgtgtctgtgtatctgcatgtgtgctgtgtgtgtgcatgctcatttgcattcataagaaagccttcatatatgtggggattcccaaggagggaccctcaccccaaactgcctccccccagtgccttcagcttcttcagtttacagatcttctctcacactctttatttctcttctagaaacttccgccccagcctcacacttgattcc

SEQ ID NO: 628 - DNA, 1738 bp, Artificial sequence
  DNA replication origin
aatgcttattctgcaccagataatgtgctagaggctttataagcattacctactttaatcctcataatagtcctgtaaagtgtgtaatataattacaaccattttacagaagaaaaattaggcatagaaaggaagtatcttgcccaatgccatacgttcaggagtgacagactaggactgaaaatcaggcaacatgctatcctctgcccctgaagagactcagatgtactcaacccaatgcaagtagcagaatctcatatcccgttgtcaaaccacagaaggatgcaacagatcagagaaactccaagaagcagaggacaaatcgagctccaagcagtagccacagaggttgacgccagccaccacttaaccaactctctcaggatcagctgcaagatatagaggccagcactccccttctccaacaagggggagactaggggaacatgtggggagttcatgctgcccttaggacagtggcagtgtccagagaattactgggtgtgtggacatgggggattcctggtgtgtggacacagggcattactggtgcgtggacagaggggattactggtacgtggacatgggattcctggtgtgtggatacgggggattactggtgtgtggacagaggggattactggtgtgtggacacaggggtttactggcgcgtggacagaggggattactggtgtgtggacagaggggattactggtgtgtggatacagggaattactggtgcatggacatgggattcctggtgtgtggatacgggggattactggtgtgtggacacgggattactggtgcgtggacacaggggattactggtgtgtggatacgggggattactggtgtgtggacatgggggattaccggtgtgtggacatgggggattaccagtgtgtggatacgggggattcctggtgtgtgaatacgggggattactggtgtgtggatacgggagattcctggtgtgtggatacaggggattactggtgtgtggatacaggggattactggtgtgtggacacaggggattactggtgtgtggatacgggggattcctggtgtgtggatacgggggattcctggtgtgtggatacgggggattcctggtgtgtggatacgggagattcctggtgtgtggatacgggggattcctggtgtgtggatacgggagattcctggtgtgtggatacgggggattactggtgtgtggatacgggagattcctggtgtgtggatacaggggattactggtgtgtggatacaggggattgctggtgtgtggacagaggggattactggtgtgtggacagaggggatcactggtgtgtggatacaggggattactggtatgtggatacaggggattactggtgtgtggacagaggggattactggtgtgtggacaaaggggattagtgggtgtgtggatacaggtgattactgggtatgtgaatacaggggattactgggtatctgaatacagaggattcctggtgtgtggacacgggggattactggtgtgtggatacaggggattcctggtgtgtggacacaggggattactggtgtgtggacacaggggattcctgggtatgtggacacaggggattactggtgtgtggatacaggggattactggccctctccatctgctccaccgtcttcattcgagtgtcttcctggaccaggtaagctggaaatcctaaaagcttcatttcccagaat

SEQ ID NO: 629 - DNA, 1721 bp, Artificial sequence
  DNA replication origin
caggttttaaaatcttatcttcagaagaaagattgcctccattatatgttatctccaattgtcattttcatactttgcctgcaagagagagataagctcataggaaggggaggctgagatagccagcctgggagactccggcgctgacgggagagggagaggttttcacaaaggtcgaatccacccgcagcactctgcgcatcagtgcagcgagcctggctctcctccgtcagttctgcgttttttggaaaaaaaggtgttatggcttttctttcttcataaaactggctattctgtggtacagtaggcgtctctctgctagcagcgtgggtgctggccatggaagcctgcagggttaccgcacgggacagaacctgagcctcggcctcggcctggattctgctctgggccagctgcattcacagtgcatgttcctgtctgaggccacgcaaggaaacctgtgccatggctggggacatgggtgtctgccagctgggcccagggccctgggactctgatgatggggagaggactgccctcatgcttggtggctgcttcacacagctgatttccttggcagcctcttttgcactgtctttcggtcagcttttgtcgtccagggacagcaagcaccagattgctttctttgatcccagtgatcttggttgtggagtaggatgggttcggctgggagcttgggcagtgatcttggttgcggcgtaggatgggctcggctgggagcttgggcagtgatcttggttgtagagtaggacgggggtttttctgggagcttgggcacttatcttggttgcggagtaggacgggtttggctgggagcttgggcagtgatcttggttgtcgagtaggacgggggttcagctgggagcttggacagtgatcttggttgtcgagtaggatgggggttcggctgggagcttgggcagtgatcttggttgtggagtaggacaggggctcggctgggagcttgggcactgatcttggttgtggagtaggacgggggctcggctgggagcttgggcagtgatcttggttgcggcgtaggatgggctcggctgggagcttgggcagtgatcttggttgtggagtaggacgggttcggctgggagcttgggcagtgatcttggttgtcgagtaggacgggtttggctgggagcttgggcagttatcttggtcgtggagtaggacaggggctcggctgggagcttgggcagtgatcttggttgtggagtaggatgggggtttggctgggagcttgggcagtgatcttggttgtggagtaggatgggggtttggcagggagcttgggcagtgatcttggttgtggagtaggacggctgggagcttgggcagtgatcttggttgtggagtaggacgggggctcggctgggagcttgggcagtgatcttggttgtggagtaggacgggggctcggctgggagcttgggcagtgatcttggttgtggagtaggacgggggctcggctgggagcttgggcagtgatcttggttgtggagtaggacgggggctcggctgggagcttgggcagtgatcttggttgtggagtaggacgggggctcggctgggagcttgggcagtgatcttggttgtcgagtaggacgggggttcggctgggagcttgtgtgttacttgtgttctgtgacctttcctgggggaggcaggcgtcaggacagatggcccca

SEQ ID NO: 630 - DNA, 1294 bp, Artificial sequence
  DNA replication origin
ccagagccctcctgcacccgcttctccaggaccccgcagagcgtaagagccagacctggccttggcagcactcactgctctcgtgccttccctgagtgttccccacctttagctctgaatgggatctttctcagtgtaaactgctatctgcttagctaatttatctaagaggttttggcagatgtttcgtggccttggacttttggcagaaagtaaagaactgaaacacaccagccctgagggagggcattggtttgtggggatgagcacgggagcgcctgtgagagccacctggagggaggggaacagctctgctcaccagatgaagtagtagctctctgtcaccagccaccggctgtctcaaacctctgaccgcacagccgtcggttatctccagcatggcaaggccccatggctgagaggccgccttagagcagagcaggggtcggcggggagcttcctgctgttcctcagtgaccagccgttcccaggcagccagagggagccatttgggaaggatggggatgacggtctgctctgctgctgcctgcctggaggatgacaggaagggcgtgtggtgggaggggtgggagtgggctagaaggacatcagggaggctcagagcacagaggctgtgcttgcctagcagttgggggagtgtgggtggggaagagtggccggaggtggatctgttggggagggtgacttttctgtctcttcgaggtgagatgctgcccagattcctcgaaggggatgtcatgtgtgcctcgtggcttgtgttaaaagtcaaacctggccagacacggtggctcaggcttgtaatctcagcactttggtggctgaggcaggtggatcacttgagctctcaggagttcgaaaccagcctgggcaacatagtaagacctgtctctataaaaaatacaaaaatttagccaggtgtagtggtgtgtgcctgtagttccagctactcaggaggctgaggtgggagaatcacttcaccccaggaggcagagattacagtgtggtgagattgcaccactgcactccagcctgggtgacacagtgagaccctgtctcaaacaaaacaaaacaaaacgtcaaacccactccctttgcccctcactggtcttggtgacaatctcgtgataggagatgtcagctgaagagtgatgaggttcctgagactggaaaggagagattcatttctcataaagggctgcagcctgcaggtggcctttctgacaggctgggaagtgtagcctccagccagaagccagaaacagacccttcgaga

SEQ ID NO: 631 - DNA, 1417 bp, Artificial sequence
  DNA replication origin
gaagccgacgaagagaccgccgtccaggatcgtctttaatgaggtgggccctggtgatggtggcaggggctgctccaaggcggagggtgtgtgtgcgggtggtcctgggtggcagcccagagactggggccttgccgagacctcacagcgcgtctcagacttgtgggtccaggcagcacagagcttagtctagcggcaagcgctttgttaccaaacaaaatcttatgtggaagccagttgtcttaaacagatgagagagctctgctctgctctggttgaagggtcaggggaatgggggtcttgtcaccttcaaggaatcttggagttcttgggaataagttgggaaatgattgacctcatctatggctgctgccactactgctccctctcctcctctcccctcccctctccttccccctcccctccccctccctttccctttcaccgtccccttccttcctttcttccctccctcctgtatagacaaactaagatttagtaaagtgacttgcccaggtagcaggtatcagagcctggactcacacctgtgccttctgtcttgagaccggcaggtggatgggcactggttgagcagcgtgttttcactcaggtggtcttgcggctggccaccctgcgggccggcatgctctgtctctgtggttcactgcacagcatacattccattcagcacctgctctctgcagggcatcatgctaggctcagggtgatgatggcgctcacctaacagaactgcagactgtttcggagacgcactgagcaggtaacagagtaattgcaagttgtgttaaattctcaggaggagaccgataggagaacgtggagaccaataggagaacgtggagacctgctttaggtgggtgacgagggaggcctctctgcgaagctgctgattaagctgggacttacaggatgagaaagaaactgactccgtgacaagcagggacgaggctgcttcaagcagagcagggagacccaggggtgttaggacgagaggagagcccaggtttgctgacgggtggggttggcagggtggccccgtcgtgccttctggctgggtcctacagggtcttcttagggacgctgacgtttgactcttaacagccggcgatgtcatggaggcctttcccatgcctggctgctgcttcacagctgaactcgagtggggggagtttgagagggatggtgtctgagcacgacgggtgtgcagcagggacagtgtggaggcaacagaggtgatgagagggtctcagctgtcttggtttgatcttaggtatatagaaggaggccccaagaggcctggtattgggacagtttgtatgatgagtaacagtggcggtgacagtggccgtcctttgagacgttactctaggtaaccactgcccaggtgtgcctttcc

SEQ ID NO: 632 - DNA, 1195 bp, Artificial sequence
  DNA replication origin
tgggaggactgggccagggagggtgggcagctggacgggcttgcgttggccaaggagagtcatgtcgtggtctctgaggtgcagggatggcccgaggtgtctggtcactgaccctgagagaccatggcagagggtgggactcctggggtgtgtgagccagacagaggtagtggggcatgtggtctctggacgggttggttttcatgtcagacacattctgataggcctgccatttgccaccctaggaattaaccggctctgggggacagtcttatctcgtcactgaggccccagatgccagagcatcagtaatacagaaaattagaaaatacaggccgggcatggtggcttacccctgtaaccccagcactttgggaggccgagacgggcgggtcacttgaggacaggagatcaagaccagcctggcaaaacccactctctacaaaaagtacaaaaattagccgggtgtggtggagtgcacctgtggtcccagctacttgacaggatgaggcaggaggattgcttgagcctgggaggtggaggctgcagtggccagacctccagcctgggtgacagacgagacccttttcttaaaaacaaaaacaaaacacaggtactatagctaaatatagttcctgcacttctcgctggctcctggagcacgtgtgctctcttcctctcaggacctttgagtttgctgctcctcctgcctggctccctctccccaaactccctgtggttcttctcatgccccccttgttctcagctcaaggatcatctcagagagcctgccctgccctgccctgccccgccccacccacctctctccccgttcttcaccatgtaagccctgtaagggcagagattttgtctgttccttgttgtttccctagtgcctggaaatgtgcctggcagagagtcaatgcgcagaatagatgtgtaagtaacgtttactaagtgaataggtgaaagaaaggtggaggactcttgtctcaggtaagaacctgtcacagaagagaaaaggctaaagcaatacttgctgtaagtggtaaagctccggggcagggtcctgcctgtctacactctggctgccgctctgggcagggtcctgcctgtctacactctggctgctttgttctgtatttgtagccatgatttctcaattctcaaagatctgctttttgctttgccaatg

SEQ ID NO: 633 - DNA, 1085 bp, Artificial sequence
  DNA replication origin
gaacccaagaaaagggtacagtgggctctccaggggaaaaaaaaaaagaagaagaagaaaatacacccacttttaatgagcccctgatgcaagacaggaactcacattctatggttactattccaacaactctgccaaatgagaatcatcattatcgccatcttacagatgagaacactgagactcagaaaggataaacagccaatccaaggtcacacagctagctattataactagctattataatagtattatagatataatactgtaagctattataactacctcccactacctcaatcaaggaggccaggagaggccaagggagaagagaggcccagagggaaaaagtaagagcaccaaaggaacccagggctaatgctgtctcctctttaacttcaggacagattcgcagcctccccacctgtttccaacctccaaaatgagagctgtgaaatctccttgagatctctgcttctgctgatctattcagcaactatttcccgagcacttgtgttccagtgcataagaaggctgtcaaatgtgctgtcttcaagcatctagaaagccagtgggggagaaagacaagaaagtgactgtgagcagcaacaggcccccgggagggtgcagaggtgagcagggctgaaggaagatgcagggggtgggaggcgctgtcagggtccgggaagcctccttcccggaatggaaaatgtgtaatgcctgagacccagatgccttggggagcttttggggaagcagaggtctgattaagcactgcctggaattccctcattcatgagcattctttcagcacctaccctgcgcccgggagaaacggtcttgaacacagcagacaagctcgctacccccatagaatgtaaagaaacggggcacaaattagcatacaaaaagacacaagtgtgacctacggaaactgcacagaggaggtgcaacgaacggagccctgggttaggaccgggaggcgctgcccaccatcaacagaaatactcctccttttgccaactacacacgcgagaggctggatttccttcacagacgtccaccaaagccacacatcgcgacac

SEQ ID NO: 634 - DNA, 1411 bp, Artificial sequence
  DNA replication origin
tctccacacgtaggtccccaaaccctgcaacctgcaacgcggggcctgaatgcggcttccttagcagagcaggagcttactcttggcactgggggaaaggggaggggtgaggctggggtttttgtcggggaggagaagttgcagagaaagaaaaaatcctgaaacgacagacagtgggacagctgtggcctgaacttggtgttcttgctcctcggatgtggatgtattaatttccataaatgctaatagcccacttccccaagagctattacttatgtcatctccccttggacacagttcaacacagggcagacaaatgaaagggaggaaaagacaacccccagtggcggtccccagctcctcagccccctcccaaccaggcagctcaggtctggttcctaaggtggccctgctaaccgcagggtcaagacccctgccttcagctccgtagccaggtccctatcacgacaggaagcaagaaagttaccaaccccaaaaatgctgaatcacaaagtgaggctgagcaggaaagtgggggtggggagggaaggagacggtggccagggaggaaaggtgctaaggggctttccacctggagcaccccgggatgctgcgggcaaagcacagtccctgtaagagcccccaggacaaatgccaggaggagggacaccaggatgcggctggttggcggggtgggaaggtgggcaggtaccccggctgctgctaatgccgcaggacgcggtgcagcagtggggtctttgcatcctgggagcagcagcaggtagggaggtgcggaagtgctttgtgccaaggcctggcaggagggagaagcttaagataggagtaggggctcagggtcagaagtggcggtgtgtgtgctgtaaacagcccgaggaactggtgcaggaagcagggtcacagtcttggggagcagggtaaggtggtgagagcgtgcccgcggggagaggtcggaggggctgggggcagaatgggagggtggggaaagggaccggagcgacacagggacaggcagcgagaacgacggatgagccttgagaagcgatcaggaggagagatggggaggaccgggaacagcagcgccccggtggggctgcgcagaggccgggagaggggatgagaggaggatggaggaaaggggagggcgaggctgctaggaccggagcgggcagagatggggaagaggtgcaccgggaagagggacggcggcaggggcaggggtcagggatgcgagctgaagggtcgggcgggcgggaggacagggaaggaaagacagaaagggatgggggaagggagacgatggagaaggaggtgaggaggctggagaggaggtgagacagcggcggaggcagggacgcagggccggggaagaagagatggagacgggaccgcg

SEQ ID NO: 635 - DNA, 965 bp, Artificial sequence
  DNA replication origin
tcttagaagatgactgaaaaatgaaagcgaggaagccttctctagctggccagcccatggcaccctcggcctttccagctctctagcgccatggcccacgtcccacctcccgggtgcaatggcttctgtgcacactgcttcccatccaggctccaaatccagacccaagacggttctcaaccaagaaacacacgaaaagggtttcacactttttcacgacaccccccaactccagtgcctggctcagcccccaggtgttgactagcacctacaaagcatttgctgactggcgcagggaaaaaaaaaatggccctgggtgtcaacagggaagcccctaccatgctgctctcgagggatgtgctgcggcccgaacactgtcagtgccactgaggccgagtgtggccgtggagacaatgacaggacctggaggaccaagtgcactcttagggccccacactgcgagagcacagggccaggagctgcacagggctctgcagcagacacggccgccaggcgagaatcaggtgggcagatgtgactctccacacgtaggtccccaaaccctgcaacctgcaacgcggggcctgaatgcggcttccttagcagagcaggagcttactcttggcactgggggaaaggggaggggtgaggctggggtttttgtcggggaggagaagttgcagagaaagaaaaaatcctgaaacgacagacagtgggacagctgtggcctgaacttggtgttcttgctcctcggatgtggatgtattaatttccataaatgctaatagcccacttccccaagagctattacttatgtcatctccccttggacacagttcaacacagggcagacaaatgaaagggaggaaaagacaacccccagtggcggtccccagctcctcagccccctcccaaccaggcagctcaggtctggttcctaaggtggccctgctaaccgcagggtc

SEQ ID NO: 636 - DNA, 927 bp, Artificial sequence
  DNA replication origin
gggtggggttcactcctcacaggagcgggctcgcctgccccagtggcctccccagacccatcttttgggatggagagagagcatggcagctccccggagcctctgaagtgccccagcacagggtggctgatgtcccctggacacccccactgccttgtaagcacgaaggatgtaaataaggaggcatccactactccttcaaggagcaaagcaccctgtgtccctgcggaacggggaggttttgagttgggatttacaagtcctgttttgggcatcctgtttcctttgtaggagcaaagggacaacatggctccgggccttgtgtctgtgacacctgaatacctcctggtctgggtgactaaaaatacctgctactcatttccatggaaaggcaataccctctagggggtgcggggggctggctgagcagaggcgggaggcgctgcaggatctatctagacagacagggcacaggtagggcgtgcagagggcccagatggggcacagacagagtgcaggcagggtgtggacggggcacagacaaggtgcagacggggcacggacggcgcagacagggtgcagagagggtgcagacagcagagcaggatatggatggggtgcaggcagggtgcggacggggcacagacagggcgcaggcgggatgcggacggggcacagacagggcacagacgacacagacagggtgcggagagggcgcagatggcgcaggcagggtacggatggggcgcacatggggtacagacagggcgcaggcagggtgcagacacggtgcagatggggtacaatcagggcacaggcaggtgacagactctgtatggtcaggaacagggtggcgaggactggctcctgtactgacccctggcctcctctgccgtgggcaagcactcgggccatcagtacccctga

SEQ ID NO: 637 - DNA, 1942 bp, Artificial sequence
  DNA replication origin
gcccttggaagaagttgaggggaaagattggttccacttgcacaggggaactcagagcccagaggagggatgtggtcaggtagcgcttctgacagagcactgaggggtgagggtggagtaggggaatgtgggagctgagctgaggagtgagggtgaagtgggggatgtgggagctgagctgaggggtggagggtgaagtgggggatgtgggacctgagctgaggggtgagggtggagtggggggatgtgggagctgagctgaggggtgagggtgaagtggggggatgtgggagctgagctgaggggtaggggaggagtgggtgatgtgggagctgagctgaggggtgggagtggagtggggctgaggggtgagggtgcagtggggggacgtgggagctgagctgaggggtgagggtggagtgggaaatgtaggagctgaattgaggggtgagggtggagtggggggatgtgggagctgagctgaggggtgggggtggagtggggggacgtgggagctgagctgaggggtgagggtggagtgggaaatgtaggagctgagctgaggggtgagggtggagtggggggatgtgggagctgagctgaggggtgagggtggagtgggaaatgtaggagctgagctgaggggtgagggtggagtgggaaatgtaggagctgagctgaggggtgagggtggagtggggggatgtgggagctgagctgaggggtgagggtggagtggggggacgtgggagctgagctgaggggtgagggtggagtgggaaatgtaggagctgagctgaggggtgagggtggagtggggggatgtgggagctgagctgaggggtgagggtggagtgggaaatgtaggagctgagctgaggggtgagggtggagtgggaaatgtaggagctgagctgaggggtgagggtggagtggggggatgtgggagctgagctgaggggtgagggtggaatggatcagaacatcagaacagagccccagggtgccagccctgggacctccctccagtcacagcacccgtggtccctgccaggggaaactccggccggcatcctgggcagggagacccccatctgccccaatgggaggctgtgccctgtctccccacgtgggggccctgcatcctcacagtgaccgctgggaaaagacagacctgggcttccgtgcctccccgggccactaaacccatctctctgagccaggagggtgtgctgccttccaactacaaatacaccagcaggaggggagagaggggacccaggttggatcccactcctactcatggggggtaggggggaccctcagtcggctccaggtccacaggctggcttcctaccaggtgtgctccaaggccctcagctgggctgccacgtccccgcctccaccctcacccctcagctcagctcacacaacccacaactccacccccacccctcagctcagctcccacatcccccagttcaccctcactcctcagctcagctcccacatccccccactctaccctcacccctcagctcagcttccatgtcccccactctaccctcacccctcagctcagatcccacatcccccaactccacccccacccctcagctcagctcacacgtccccctactccaccctcacccctcagctcagctcccacatccccccactctaccctcacccctcagctcagctcccacgtccccccactgcaccctcacccctcagctcagctcccacatccccccactctaccctcacccctcagctcagcttccatgtcccccactctaccctcacccctcagctcagcccccgcgtccccctactccaccctcaccccttagctcagctcccagatctctgcctgcaccctcatccctcagctcagctcccacatccccccactccaccctcacccctcagccagcaa

SEQ ID NO: 638 - DNA, 2385 bp, Artificial sequence
  DNA replication origin
aaatcatcgtggaagcggcgaatgagtggcaggaggtgcatggacagtcctggctctgcaggcgagcagcctgccccagctctttcctccttagaattgtgtgactttagccacatcatttagaagacacagatgatagaggtggtagaaatggaaagtgcaactctctacctgctgttgcccaccaccaggacgaccactgcaaatagtgtgggtgacccgttcagacctgggactcagccacacattggcccctgaggcagatgaagtccccagcagatggggagatgcagcattgctctgagggagcagcaggagtgaggacaggagctgccacgtgcacaggagcaggagggaaacaggcaggcagctgtgcccagggccaagtgtgcaggaggcgaggcaggcagctgtgcccagggccaggtgtgcgggagacaggcaggcggctgtgcccagggccaagtgtgcgggagacaggcaggcggctgtgcccagggccaggtgtgcgggaggcgaggcaggcagctgtgcccagggccaggtgtgcgggaggcgaggcaggcagctgtgcccagggccaggtgtgtgggagagaggcaggcacgtgtgcccagggccaggtgtgcaggaggagaggcaggcagatgtgcaggggcagagggggttgaaggatggaaaggtagacaggagaggctgtgaatggctctggatgccgagctgaggcacttggacgtcatgctgacagccctggacctccacgaagggcttttgagaaaagcatggcatgaaaagatctgctgttgagaaatagaaacggggctctggtggcaggttgacaaccatggtccaggcaggagcttccaaggcaagtggtggaggtgggcgagagggagagttccagggatatccgcgtggatggagccaacacctggagcccagggcaggggggtgggctgaaggggcacctgtggggcccttgcctgtggaggtgagaactgcagcttggagagcagcagaattgccccccggaaggttgctaggggaagattcccagagaagctgaaagcagtagtgctcagaggacaatgagctggcctaggatggtggaggtggaggtgatgaaggcagagggggcagaggccatggtggtggtagaggtggaggtgatggaggtgaaagtggaggtggtgggtggaggtgatgaaggtggaggtgatgaaggtggaggtgatgaaagtagagatgatgggtggaggtgatgaaggtggaggtgacgggtggaagtggaggtgatgaaggtggaggtggtgggtggaggtggagatggaggtaatggtggaggtgatgaaggcggaggtgatgggtggaggtggaggtgatgaaggcggaggtggtgggtggaggtggagatggaggcagtggtggaggtgatgaaggcagaggtggtgggtggaggtggagatggaggtagtggtggaggtgatgaaggcggaggtgggtggaggtggagatggaggtagtggtggaggtgatgaaggcggaggtggaggtgatgaaggcggaggtggtgggtggaggtggagatggaggtagtggtggaggtgatgaaggcggaggtggaggtgatgaaggcggaggtgggtggaggtggagatggaggtagtggtggaggtgatgaaggcggaggtggtgggtggaggtggagatggaggcagtggtggaggtgatgaaggcggaggtggaggtgatgaaggcggaggtggtgggtggaggtggagatggaggttgtggtggaggtgatgaaggtggaggtggagatggaggtagtggtggaggtgatgaaggtggagagggtagaggtcatggtggaggtgatgggggaggaggaggtgatggtgacagagatagagatgattgagatggaggggcagagatcatggtagaggtggaggtgacagcagtggtggtcgtgagctgtgtgtgtgtttctgtgcaggtgctcacccatgcacgcatgcccatgagatgcctggctctccacacacgccctgtgagccaggcatcctctcggtcagggatataagcctgggcctgtgcaggctgccctctcccactgtggatccccttggaggagactgctgcagctgcagggcaccctctgtcgccctaagaggagcagcagaacatgacctcccatcgctccacttcccactgctctgcttggcttcagcctcatgctggcatctgtgttatctataagcagaaagctgcttgttcagagcgggctgagacaccttcgtgcgttcatcaaaagcgtgctgggcaccaatgaggtgtcagttcctgttccgggcatgagggattcagcaggaaacgagacag

SEQ ID NO: 639 - DNA, 1750 bp, Artificial sequence
  DNA replication origin
gggtcaacacttctcggagtccagaggggttgggagtgggacaggtggcctcccagggacgcctccctgagtggccagtggtgccgcttgtccctgcacctgtagctgccctgagcacccccactggacacagtgggcattgcaccctccggagaaagctgcccttgttccacgtgcgagccctgtccccagcgccatgggctgtgctacctgcagtaacgcagactgcgagccccggctgcctctccagtgctctctctcctctggccttcagcaggctgggtcacagaggtatccatccactcattcattcactcaacaaatatctgttccatgtctactaggtgccaggcacagctgggaaccagcagacaaaactccctgctttcccggagccggcatcttggtgggcagacagcataagcgagacgagtaggtggaggagaaggcgtgtgagcaggtgacaggcgctggggagaaacagcccaggggagggaccagggagtgtgggggagacggggactgcgatgaaagggaggcgtccagggaagacctccatgagaaggtgaccttggcataaagaggcaaacgtgggagcatgctcaggcagaccacggtggtcagaagttgaattcgggccggaggaggaggagtgcatgaagccctgaggtgggagtgagtctgtctgctgggttcacagacccccagggagccagtgtggcaggggccagtgtgtgaggggctcagcgggggatgtggctagaaaggttgtggacccactgttgagattggactttggctctgaatggaatggaagccattggaaggtttggagtgaagcagtgacataatctgacttatgttctgggaggatcaccctggccgcgtagagtctgccggcgggggtggaggtgggcgcagggaatgctgtgaggagcagcatgagagccggtggcagctgggcaggagaggagacagggagaggcacggggcccctggcccagggatggattggatgtgggaggcgggacgtgggaggaagggaggagtcggggtgactcccgggagtgggactgacacctgggagggtggggagctcgttactcatctggggccaccctgggaagaactgggctgggggtgagggcagtcgggagctcagtgtctgacccaggaatccgaggcacacgttccccaccctcatagctgagccacacaggcaggaaataaacagctctggggttcaggggagtggtagagggggtggggtctgcagcatggggacggggttcagagccacgagatgggtggaaatctgaggggctttgtggggatggaaaagaatatattcaagagctgagcaagggcagccactggaggacagcgatgagcaggaagaagcccaggagactgagaaggagtggctggagggatgagaggggagcgtggagtcctgggagctggggaagccgcaggcagcacctctgtcaccccgatacgatgggcaccgctggacctagcaacgaagaggtcaccgcaaccttggcaagtgcagtttccacggagtggtgagggcagaggctgattggagttggtttataagccggaagaagaagaggaatcgcagataagtgaaggaaaactttttgaggaattttctcaaatggaaggcaagaaacagtggagaagaaagtgggtctaagaaactgcttttttaggccgagtgaggtggctcacatctgtaatccca

SEQ ID NO: 640 - DNA, 833 bp, Artificial sequence
  DNA replication origin
tgaaggaaaactttttgaggaattttctcaaatggaaggcaagaaacagtggagaagaaagtgggtctaagaaactgcttttttaggccgagtgaggtggctcacatctgtaatcccagcatttagggaggccgaggcgggcggatcacttgaggccgggagttggagaccagcctggccaacatggtgaaactccgtctctactaaaaatacaaaacttagccaggcatggtggtgcacgtctgtaatcccagctatttgggaggctggggcatgagaatcgcttgaacccaggaggcggaggttgcagtgagctgagattgtgccactgtactccagcctgggtgacagagtgagactctgtctcaaaaaaagaaaaaagaaactgtgttttttgttttctttggagatgagagaaataataacttattgggtgcagctggcagtgcgtcctgaagaaggaggaatgggcttgggatgcccttgagtgggtgtggggctggggacagccatgtgaccatggacactgtggggccggttcactgggtagccacaggagggaaggcaggtggctttgagcacagatcgtgtcgctgtgtgtggaaggtggcttctgattgcttgtgttttctcaggggtctgggaagcagcagtggcagctgagggtggggtgggaagggaggagcagcgaggtgtcccctgaacctgggagagaggatgccgtagagcaggtgcccatagactctttctgtaaaggaccagatagtaaataatttaggctttgccagccagccagtctctgttgcagctcctcagccctgcccttggagccc

SEQ ID NO: 641 - DNA, 981 bp, Artificial sequence
  DNA replication origin
actgttctggggaaaaagagtgggaaaaacaaagccaatcagccacttggctaagtgtcaggtttcccaacaacttcatgggttgctgtggatgggcggggctgttttgagcccagaccatccctttgcctgtgggtgtgggaccacgtgattttggatcaggggtcatttgtccttccagaagccaagccctgttccaggcatgggggtgcagcagtgagtgagacccacagaaccactgccctcctggaacacaccccccccagagagggaactggggcaccacagacccgtgtgcaggcagcaagggcgtggtgtcggccggggagcagcagggacccctgagccccacagtcggggctcatggcgctgagaagcactgcagcaagggcgcagccagtaggagaggagccgcaagcgcaagcatccgcagacagtgtgagctcagcgtgctgggaaggcgggggcctgggtcaagggccaggcggcagagcataggggcctgagggggcagtgcctaggagtgggaggaaagagcatgggaccagattcactttggaaatagaagcccccaaccagcagccagccaggtggaggaaggcgtgcagagctgagagggttcaggaggcggtggggggagccactgggaggggacccaggggttcaggtgaaagacagcagtggctcagcccaagggtggcagccagagatgtgggtggacggctggatattggcagccatactcattatcaatgctgctgtaacagctcatcacaaaccctgcagcttccaactgcccagagtgagatctcctggttcttgtgggtcaggcattggggcagagcagggctgggtctgctgttttgggacccctgagctgcagtcgaggttcttgccgggactgggctcaccttggaaacctctggtaggaaaggatccacttccaggctccctcgttcgtttgaaggactcctttctttg

SEQ ID NO: 642 - DNA, 2012 bp, Artificial sequence
  DNA replication origin
gtctccaaaagtgttgggcagggctgggctgtgagttactcctgatgatgagtgacgggtgatgagcacacccgccttccttggactggagaagggagggctctctctggtgtcacttgtggagccggaggtgatggcctggggggctgcgcagggccgctgtgactgctcttctggggcagcagctcagggggtcttggggagcagctgcttctcggggcttcttgagtctttctgagggggcctgggatccagctcctggctctgcgcgctgtgggcggctgaggctcccaccatgtcaatgaggcgaccagggagaggcgcgggcagcgtctggccattcattattaatgaagcaggatgcacaagccgcctgccttggctggtcccctgaggccatcgctggctgctccgggctgacagctgctgagccaggactggcctgaggcctgggcaggcgctgcagccagggtggactctgcgggctggatgtctgagcttgtaggcagccagctccaagcaaggcagtgcttgctccggtcacagcctccctggcgcatgcccagcggcacctgcttggggttctccctccggagagtggggtatccgctgggggattggcacatggagaagcaacatcaccagaaatgtgaagaagccactgcgtcttgatggttatgacacagatggcccaaggaaggaaacgcgggggtcaaagggacagagagattccaacactcccagtaaaacttaggttacagcagacgctcaatacatactctgcaatcagtgagtgaatggctgaatgaagcccctgccctactttacttcatcctcttcagcatccggaggggctggctctgccctctgatcccaagtgtccccctcacaccctgcaggtggaccctggtcagagctgccttctgggccccctcttgtcctgccaggaggtactaagggcactggaaggtggtggggtgacgggggataggcaaccctatgcacagcccacccctccttgaggctggaccccaggattcaaaggccacagccctggcctcccgggagctcatgggctgctgaagaggcacagatggcaaccattccacctttggcccctacctagggctcaggttaagtcttttgccccctacccttctccctacttggaggctctttatagggtgtgaccagcagcaaatcttagcatccctacttcccctaaatgtgcaaagccagggccaagatggaatttgctcagactatctaacagaatttttcaacagcccccttccctatttataaaaaggatcacattgatttgttcaaagagcctctgggtgcctactgtgtatcacaaggcacctgctctcatggcgctcaccgtctaggacagggctgttcaacatctgatcatgtcaggggaacttattacaaaggcagggtcctgggcatccccctgacctacggaatcagtggctctgaggcccagcccagaaggcggtgttcagcccggaaggcggcgtttctaccaagagcttcaagtggtgctacgcatgctggcctagtgagacgcagaaatcctctacctcttccttacgcattctctgcactctggtaaaccgtcggatcccacaaaggctggcaacatcggatcccacaatggctggcatcttactcttccccaggggtgttcttaccccagtggtgcacgttaagcagcacagagttcagggagactcacgagactttcagtcaccaagtgtaaaatgtcatcggcctcaccacatgaccaggcaatccccccgctagctatgtcctcaaataactgaaaacatacgcccacacaaaaacttcaacacaaatgtccacagcagccttattcacaatagccccaaactggaaacaacccaaacacccatcaaccgacaaatggagaaacaggatgtagccctctccagaaaatgaagtgttattcagccataaaaagaaggaagtgtccagtgtggtgg

SEQ ID NO: 643 - DNA, 1164 bp, Artificial sequence
  DNA replication origin
taaacgaccctcagaaagaaaacagaggcagaaggaaggaagacggcgccctcaccatctccccctgaaactgggaagaaagaaacttagcactgaccggattctccacgctgtttctcatcatctaccaagcactaagcacagcccctcccggccctcagcacaaactgcccaagtctgacaaatggggatttgcagattttatgcgctctcgaaagtgaggaggtggggagttggggaggccgggaggtcagcccccaccctgcaaagctgtgtgcccccgtacctatatttcatcctttgctgcttcacgctggtgtcaccggcacacgggaggctctgcaccgacagctgtcccaggctccgggccaccatggccacggcgcggaagcggcctcgggagcccaggctgggactgctggccgccggtcggcccagccgatcctcagggccccggcccttgaggctgtgctccgagcaaacgaaggacacctgcatgctgaggccgggtgctcagatcctggctgcgtcccctgtccccttgggctcaggagccatctgtccccaagaaactcttctcccccgaccaggacgagactttatccagaagccaaggaagctgcaggcattccttgaggagtgaggatttccgaaggcaacggtggggaagaaggctgcacagctctgagggagggagtcacatttccaggcccgaggtacagaagacctgctggaagcgcggctggaggttggggggtgcgcattttctcctcccctcacatctctcgtctctgcaggtccttcctctgtccccaccctcaaccagccctggctgcccaagtcctcagcccaacagtctccaaaagtgttgggcagggctgggctgtgagttactcctgatgatgagtgacgggtgatgagcacacccgccttccttggactggagaagggagggctctctctggtgtcacttgtggagccggaggtgatggcctggggggctgcgcagggccgctgtgactgctcttctggggcagcagctcagggggtcttggggagcagctgcttctcggggcttcttgagtctttctgagggggcctgggatccagctcctggctctgcgcgctgtgggcggctgaggctcccaccatgtcaatgaggcg

SEQ ID NO: 644 - DNA, 1130 bp, Artificial sequence
  DNA replication origin
agtttgtggctgtttctgaggctggtggcctgcactccagtttcaggtcactgaaaagcagagttgtccccagttcggttcctgttttgggaaaactttcccaggaaacctgggaaccagagacctaatttagcttttccagcttctgtagaccacgtgttgtggagacttcctttatgcctggaggatggttctggacgcaatcaaggctctggactcagagacttacatggggagtgaggaaggccggcccccagaagggtgccccagaaccctgctcccgggaccctttgtacaaagctgggaccctcccttttccatcctgggcacattcacccagccttggagaaaggccccggcagggaagaggagggaggccctgctcctgacatgagtggtcggcatcctccccacatacaagtcacagcaccgggagccagatgggggctgagcccgggtggagggaagcaaggtgcctgggctgaccatcgggaaactccagatgcggcctggctgcctgtgcctgctggagcaagagtcccgcctgctagaggaattgggccctgggcctggctcaggtggaggagggaagattcattccatcacagggttcaccccacagtccctcactatcaaacggatgtttgtcatggtggcctggctggaaagatatcagaccacccccagggcatcttgtggagcctgtgtgcccaggggagggcaggaggatgttgggggggccctgtggcccatgcctcagggttccccaggaaaagggagcattggtggcttggctattgtaaacgaccctcagaaagaaaacagaggcagaaggaaggaagacggcgccctcaccatctccccctgaaactgggaagaaagaaacttagcactgaccggattctccacgctgtttctcatcatctaccaagcactaagcacagcccctcccggccctcagcacaaactgcccaagtctgacaaatggggatttgcagattttatgcgctctcgaaagtgaggaggtggggagttggggaggccgggaggtcagcccccaccctgcaaagctgtgtgcccccgtacctatatttcatcctttgctgcttcacgctggtgtcaccggcaca

SEQ ID NO: 645 - DNA, 1214 bp, Artificial sequence
  DNA replication origin
ggcccaacagcagcggcagagcctggcagcgtaggcctcctaaccaagcacagctgcccgggctccttcccggggccactgaggcacctgcccactgtggtgcatcccagggtccacaggaacaggccttgggccatcatgactgtccttaggaggtgaaggagggtggcagccctctgctgaggaccggcatgcccgtatgtcctggcacaggttgcctaggagcctgcagggttgcagcaggccaggcagtccccaggcatcctgtccccggatcctcccgggagccctacgcggcaggaggagccctacgcggcaggaggagcccacgcggcaggaggtgccctcgcggcaggaggtgccctatgcggcaggaggtgccctcgcggcaggaggtgccctatgtggcaggaggagcccacgcggcaggaggagcccacgcggcaggagggagccctcgccgcaggagtcctacgcagcagagccctatgcggcggcaggagtcctacgcagcagagccctacgcggtggcaggagtcctaagcggcaggtgccctacgcagcaggcgccttgcttgtcgtgacatcgattcccacgttacgatacctgcccagcacgcggaggagctggatcccacccaggcagttggctgccagctcacgttccccaccatggtggcatgcatcccacaccccagcctgttaagcagggcgtgatctgcccagatggtgaggttgacaagtggccgggtggatctcacagctgcagccaggccttgacccatctggggtcagattccacttcccttgtggaatccagctgccagcatctggtcaaggggcagctggttctaggcggtggggagtgagagccatgagttaccagcgggtgaggcccagcctcctggcccaagggccctgcatttccctggggccatgacacttccaacttcggaggatgcgatgtcctcagtttatcctctttcctgtccaagcctggcccctgggaaggcggcatggggctcaagcctcattctgaacccccgacttctgacacgagcccactctgtccctctcagcctcggtttccctggttataaggctcctggactcctaactcatgagtggatataatatttgtaagcagcttgaaaacagttgaacgtgtcaccaaactgaaggtactttaaaattgcctaggtttatttttcaat

SEQ ID NO: 646 - DNA, 1065 bp, Artificial sequence
  DNA replication origin
aggcatccactgctgggtgatggcaccagactcggcatcccctctggccatggccacctggctcacctttctactctcccctggggcagggcgccctcacaaaacagaaagagggagggaggctgctgcgctggctcccgggagcacgtgctcactggtccacgcggcagacttaaccatgtgctctggcgagcccgtgctgggttctggggtgctgggagagccccatcttacctcatcggtgatctggcctccgaaggtcacccatgttcctggaaggagacacaggggctcaagttaggaacctggcaggaagccagattatcccgtcggtgctcagacctcaggctgtagggcacagggggcagccacaggtgtccctctgtgctgctctgtggccagggtgtccttagtgtgtgtggacagctggccttcagagaaagtcctgctctcctggggtcaataaactgaggggacaaaagtctctagagcgggctgctggctatgggtccaggaggtctggggcttttgaaatgctggtcagagctgtactgaggcagctctagttccaaggacatgccgcaagaaatggcacaagggatgcctctctgaaaacacaccaggtctgacagccgcgtctgcgtgctcctgctgggacagagcggggagggcggtgtcagggcagtgggtgctggtggggggcggggtgtgtgtactgcagtgggcggtgtgtgtgtgggggtgtgtgtactgcatgcagaggggaggtggggactgcacattctggaaacaggccttgtatctgacaggagaggaaaaagggccaaatccaatggcgctccaggagggactcacgagctgagcctgccttggaaggtaaggtgtcttcgttgcactcccggggccctaagggcctctgattttgtggtgtggggtggggaccatgtgtggaggggcccctagtatccgcctcacctcctctgctgagactgtgtctctctccctctatcccagcccccctcccacctgcctctttgttgccatggcaaccgagcccccctgaat

SEQ ID NO: 647 - DNA, 1212 bp, Artificial sequence
  DNA replication origin
gccaacagtccttggcttgtagacgtgtcactctggtctctgccttcgtagtctcatggacttctgtgtctgcattttctctccttgtaaatcaccagtcacatagggtgtaggacccaccctaacacagtacgacctcatcttcgctaattacattgaagaaggccctattcccaaatgaggtcacctctaagcttctaagtagacatgaattctgtggggatactgttcgacccagtacaggtgctaagccctgtgatgaccccaactgatggggtccctgctctcaagaaattcacagtccttggcagtttcttcattccttttgccttctttattcttctcaatgggtttgttactgagagctgcctccatccctgtcctgtggcaggagagggcaaggagacagcccacaggggagcctgtcgggcccgggagggcagggcctggacacggggaggcctcccaggccgagagggtggtgctccagagcctctgggccccacccccggctggcaggacagtgtcggttttctcgtttcagatggcagagcagctcatgaccttggcctatgataatggcatcaacctcttcgatacagcagaagtctacgcagccggcaagtacgtgtcttttcacacgggaaaaagtggttcagaatgcctgggcagagccggagctacagggattcctgccgctcgcgttcccaagagtgctcacaaatgcaccttgcaccctgctttcatttttaaactctgaatggctttaggaggtgctattttcatggggctggaattgcagaacacttggacactgatcacttgctgaactccccgtggagccaccagggggaccacagtccctctggtgccaaagatgctgtgctgggtgagaggcgcgatggagctgctgtcctgggctctcctgatgtgcctgacattttgacatttcatgtctcacttgtgcaactagggctgcagggcctcagagctggggagggcaggctccggccaagtgctgtggggagcacttcccatcttggcggtgaactttcctgctcaattatgtaaaagctcagccttcttcagccaggctgttggcttcaattttaaagactggctgtaatcaaatcatccactctcctgcatcgggtttccagaagtcagcttttgtttgtgaaatcatttgttggccctctcttcatcctcctt

SEQ ID NO: 648 - DNA, 1018 bp, Artificial sequence
  DNA replication origin
ctgatggctgcagaaacaccagctctgcccctgctggggacaggaaatggcactgggccggggcctgtccaggacagaccccgaccactctcccttctcaaggaggactgtcctcccgccaccccaggagccttctaggtcaggggtctctggggagcacggggccgtggctgctgggccggggctggaagcatcgccagctgttgcacctactttccgccccagaagatcttggtggtgatgacgaggctggaccgcctgtggaacagaagagaaagaaggggtgtgataagcccggcccctggggggtcctccttcatccccgacgtcctcatctctcacacagaggtcctgaaagccctcccacccaggagcctggggcatgaaatgggcacttctccatcatatgatgtgtaccacgtgcccagccggggtgcgtgggctcctcatggagccaggaggcagccaccgaggcagtaactgtgagtcaggcagtgggagttggacagtggggggcctagtgtgaccggagtccggaggagatgccttccgcccaggatgtgggaggggggcctggctcagggactatgaggggtgcatggatttgatccaggtagaggaagtggcaagagccaaggctggaggaggccgggtgtgggccagggggcaggggcgggctctggggggatctggcaggagttgaggatggaaagatgtaggtgggaggcaggcagggaagctctctgcaacgttccctacagaatgtgacacgtgttgcagaaaatctgtgtgggacggcctggtcggggtaacttgaggggcaccaagggagggaggggaggcataaggacggcctggtcggggtaacttggggggcaccaaaggagggaggggaggcatagggagcccaagtgtggccaggccagtggggttctgggtttgagtagctgaggcagagaattctgaggatttgggcttgagcagcgcaaagggaagtaattcgttcttctgctctaag

SEQ ID NO: 649 - DNA, 1012 bp, Artificial sequence
  DNA replication origin
acccccagaccaagatgctgggtctctcggcccagtcagaggcaaggcagacccatcaggggcccctgtggtgggtgtttctccctcaccttgggtctcgccgccacagcctggtgcctgaggaatgagggagtcagctccgtgctcctgggggcctccaatgcggaccagctcatggagaacattggggcaatacaggtaagagtgagaggccctgctgggcagagggcccatcccagcccgagccccgtccagtgcatcctcccaggctcgtcctgcgtgccaggctctgttctaggcactcaggatgcgcccgtgaaccatcagagttgtgctcctggagagcttgctttccagcaggaacagacatgaacactaactgcacgaaacaaggaggttagaatgtgtgtcagggtggacgagcgctgtaggagagaagccagagataaagggagggagctggggccagggacggtggcgctgcagactcaggttcaagggggcctgtcaggtgggcttgttgagaaggtggtgcttgagcagtcttgagagatgcggagtaagtcacgcaaatgcctgcgggaagaaccttccaccagcaggaagagttgatgcaaaggcccaaaaaggcctggagcagaggggcagatcctgagaggcacgaaacacctccagggacttctgagtgagacgggagccgtggcaaaattgtgggcagaggagggcgagctgcagctcagcctggaaagggaggctgctctccggctgctccatcggggaggctttgggaagcaaaagtcgaagcagagagccctggtgggaagtggcagctgcgggtccgagacgggagtggtggttggatcctggatgtttgggaaggtggggcccccgggactggctgacaaactggatgtgggggtgagaaggcgaggtggaagtcggtccccgggtgtgtcacccggaagggtggcggtgctgtatgctgaggcaggcgcagctggaaaaagcagtc

SEQ ID NO: 650 - DNA, 2832 bp, Artificial sequence
  DNA replication origin
gccagcaatggggtggcggggaggaacacagcacccagcagccctcacctcagctggaaatgagcgctgcaacacagggaagtctcgaggacggctagatatctgtcaaaaaaagaggagagccgggcttgcctgacgttggcagcagcaggcaggccgggcccggcgggcacccgtgtgcatgctgcccggagcggacgggcacctaccggtcacatagggccccaggggcatctggttgtagttgacaatccctcccggtccagggccccggaagttgggcccaaagttgttgctgtacatctgggaggagccgaaagcgccctggaggcaaggactcagcttcacaggtggtctcaggccccccacccagcctccacccaggggcacgccagggggctcgggccggggcacacaggccgagcctgacctgctggatggtggggtccccggcgcggttggtcaggcggctcaggatgctgcgctccgacatctgcagccgggcggccaccggggggatgcgggacagcatggatggcagccgggtcacgtcggccttcatgtcgctcagcagctcctccagctggttcaggactgtggtgggaggcggagggatggtaggatgcagggatggaggggtggagggatggaggagtggaaggatggagggatggaggggtggaggggtggaggggtggagcagtggaaggatggagggatggaaggatggagggatggaggggtggaggggtggagggatggaggagaggaggggtggaggggtggaaggatggaggggtggaaggatggagggatgatggagggatgatggagggataatggagggaagatggagggatggaggaatgatggagcgatggaaggatgatggaggggtggaaggacggacgaatggaggggtggaaggacggagggatggagggataatgtagggataatggagcgaagatggagggatggagggaaggtggagggatgggggaagatggagggatggagggatgatggagggatggagggatgatggagggatggagggataatgaagggatgatggagagatggagggatgatggtgggatggcggagtggagagatggagggatgatgaaaggatgatggttggatgttggagggatggagggataatgaaggaatgatggagagatggagggatgatggaggaatggaggggtggagaaatggagggatggagggatgatggaggaatgaagggatgagggagggataatggagggatggagggatgatgaagggatgatggatagatggagggacgatggagggatggagcggtggagagatggagggatggagggataatgaagggatgatggagagataaagggatgtagggatgatgaagggatgatggatagataaagggatatagggatgaagcgatgatggagggatgaagggatgatggaaaaatgaagggatgatggagggataatatagggatggagggatgatggagagatggagggatgatggagggatgagggatgatggatgatggagagatggagggatgatggagggatggagggatgatggaagaatgaagggatgatggaggaataatggagggatggagggatgatgaaggataatggagagatggagggatggagggatgatggagggatggaggggtggaaggatggagagatggagggataatggaagatggaaggatggaaggaaggtggagggacgggatgatggagggatggaaggatggagggatgatggagagatgggggatggagggatgaagggacggtggagggatgggtgatggaggggtgaagggatggagggatggagggatggagggatgatggagagatggagggatgatggagggatggtggagacatggaggcatagagggatgatggagggatggaggaatgatggaggggtggaaagatggagggatgatggagggttggaggggtggagagatggagggatgatggagagatggacgggtggaaggatggagggatggagagatgacggaaggatgatagagggatggagtgatgatggagagatgatagagggaagatggagagacggagggatgaagggatgaaggtatgatgaagggataatggagggatggaggaatggaaggacgaagggatgatggagggatggacgggtagagagatggagagatggaaggatggagagatgatggagagatgggggatgggggtggaaggatggagggagaatggaaggatgatggagggatgaagcaatgatggagatgatgaagggatgacggagagatggaaggatgaagggatggaggtatgatgaagggataatggagggatggaggggtggaaggatggagggatgaaggatgacagagggatgagggatggagtggaaggacagaggcatggagggataatggaaggatggaaggatggaggggtggaaggatggaggaatggagggatgatgaagggaaggagggatgatggagagacagagggatggagggttggaggcatggaagaattatggagggatggaaggatggaggtgtggaaggatggagggataagggatgagggattgaggggtgaaagaatagagggatggaggggtggaaggacggaggcatggagggatgatggaggggtggaaggatggaggcatggagggatggagggatgaagggctgtgccaggggaggtagcccgagagctggggcttatttgcaagggtgtatgactgcacttgcccagaaccgggcaccag

SEQ ID NO: 651 - DNA, 1419 bp, Artificial sequence
  DNA replication origin
gtacagccacctgcccttctctgaacccaggcctgctgaggccagacatggcactggggtgggtggcctgcaagaagccccaacctctcggcagctgctccggggagggcggggccttctccgtctcctctggccgctcctctcgggctctctccttgctggctgggctctcgtgcttgtcctcactctccactctatccaaggcggctggaagggcctgcagaggaaaagccaggagaactacaaggcctggggcctcaccaggaacggagggcggggaacgtgcgctgggctgggaacccagtctcctggctcccgtcgcttgctcctagcctgctccccgccgattcagagccccgaaaagggagccaggaggcctgggttccacctcgctgtacagggcctgagaaggtccccagacccaacctccaccccacacacaccacaggcccagacgccagcaagttccacacctggacttccaggggctgccttggcttctgtgccccggggtctttctcatccatgtagcccagctgggcttccattttgtctgaaagatcaagggaaagagctgagacaggtgggctcagacgggaaggagtagggcagggagtggggtggcagagaggagagatgggggcttggccttcgggaggctccactgcagccaagcacctccaggagagacaagcaggatccccggctaagtcagagaggccaggccaggcctttgactcaggagtgcttggaggaccttgaacccagtaagaccaaagtgaggggctgtcaggacggggccgcacacagccgtggctgctcatctggaggcagggaagtgaggcagatggaggcccagattgggagccacgacacccgctctggtcccagctttcgggcgggctggctggtgtgtgcctctggacagggggtgaatttcctccctgccaagccagccgccaacacactgcaaagtgctggtcacttacacagctctgagaagccccgggaggtgggcacagccgggaaagcggaggcccacagaggttaggtgacttgcccaaggttagacagagttcaggccaaagccaagaagcaaaccaagatgtgtccacctccaagggctcccttgtgcttggaggtgcagcttctcagggcctggcctcacccatcaccatgggatagctatgtccgccccaggcctgtgaggcccaaccgacggaccaagtacttaacaggtatttgcttcacccaaataaatacctagatcaccaaagtgacacgggcacaaatgacccaattaagtgtgcaaagaatctgaaaagacatttctacaagtctacaaacagccaatacgcacaccgaacaacattcagcgtccttggcatcagggaaatgccaatcagaaccacagtgaga

SEQ ID NO: 652 - DNA, 2104 bp, Artificial sequence
  DNA replication origin
gatgaataagtaaatgattgactggataggggcagggagagaaaagctagctagggccggggtgatcagagaaggcttcctggagtaggcaggccatcccattaatccttgagccctgagggggcaaagggcaggtcaggtggaggcagcctgaggcttccgggagggcagagatggctccacccatggaacccgtggtgctgcgtccccaggaggaggtggagcgggaaatcatcaagcaggaggagaacgtggaccccgactactgggagaagctgctgcggcaccactatgagcagcagcaggaggacctggcccgcaacctgggcaagggcaagcgcatccgcaagcaggtcaactacaacgatgcctcccaggaggaccagggtgcgtgccgggagggagggactggtgcccctcacccagaggcggagggtggggcaggattctgtcagggcatccctgtgcagaacccccgggaggtgcgggccgggagagctgggcgagtgtgccaggagggatgggtgtcccatacccagaggcggagggtggggcaggattctgtcagggcatccctgtgcagaacccccgggaggtgcgggccgggagagctgggcgagtgtgccaggagggatgggtgtcccatacccagaggtggagggtggggcaggattctgttggggcatccctgtgcaggacccccccgggaggtgggggccaggaacgctgggcggcgctggttggagctgggaggcagctttttggaggaaaggggactgggggcaggtgcagaggtgctgggtgtttgggggaacaaggtgtggctcagttcagtgacttcaccactgctcgtgacgtggccttgggcacgtcccttgcacacagtatgtgtaatgtgtgggtacacatggtacccttagtgtataacgtggtggtgttgggattactaaatgagcccacaggaagtatgtgggccattgtcactgcttttttatggagctggggtgcaggggctcggcgtggccctgggcatgcttgaacttgagggtgggctttgcttgtacagctcactccgtgcccctctgtctggccccctgcagagtggcaggatgagctctctgataaccagtcagaatattccattggctctgaggatgaggatgaggactttgaagagaggccggaagggcagagtgagtctcagtgttagtggtctgggctactgctgaggccatgtcaggggagctgatggcagcaggagcggggctggtctggggtcccgctgtccttggggatcaggaatctctgggctcccacctgaggaactgtggcgggctgctccccaggtggacgacgacaatcccggaggcagctgaagagtgacagggacaagcccctgcccccgcttctcgcccgagttggtggcaacatcgaggtggggcctgtctgttcccgcatctctttctgcccctgcttcctgctgcccctggggtatggaggagggctgggggactgccccgggtctcatgccaggtagaggcggagcttggacagaacttggtctggtcttcgccgtcagggtcctgccccaggtggaggcccctgccttctctgtgcccccttcctaccttctcctcctcccatgcttttcttcccccatcccagaatcctccacccccacccctctctgtcctgggctcatactcccacgctccactcgcccaggtgctgggcttcaatgcccgacagcggaaggcctttctgaacgccatcatgcgctggggcatgcccccgcaggacgccttcaactcccactggctggtgcgggaccttcgagggaagagcgagaaggagtttaggtaaaggggctaggtggtggcccagggtgtgaccacctgcccctgagtagggcagggtcctgcgggtgagccccacagagggcagcatttgcttccgccaggatgaggccgtctggaaagttcactgccacttggactttgggtggctagagtcctggtgccgggcagggctgatttgcaaacactgaccatccgcccctgcccaaaccagctggtgttatggcagcgaggaagatcccggtcac

SEQ ID NO: 653 - DNA, 1388 bp, Artificial sequence
  DNA replication origin
gacgtgcccaaggccacgtcacgagcagtggtgaagtcactgaactgagccacaccttgttcccccaaacacccagcacctctgcacctgcccccagtcccctttcctccaaaaagctgcctcccagctccaaccagcgccgcccagcgttcctggcccccacctcccgggggggtcctgcacagggatgccccaacagaatcctgccccaccctccacctctgggtatgggacacccatccctcctggcacactcgcccagctctcccggcccgcacctcccgggggttctgcacagggatgccctgacagaatcctgccccaccctccgcctctgggtatgggacacccatccctcctggcacactcgcccagctctcccggcccgcacctcccgggggttctgcacagggatgccctgacagaatcctgccccaccctccgcctctgggtgaggggcaccagtccctccctcccggcacgcaccctggtcctcctgggaggcatcgttgtagttgacctgcttgcggatgcgcttgcccttgcccaggttgcgggccaggtcctcctgctgctgctcatagtggtgccgcagcagcttctcccagtagtcggggtccacgttctcctcctgcttgatgatttcccgctccacctcctcctggggacgcagcaccacgggttccatgggtggagccatctctgccctcccggaagcctcaggctgcctccacctgacctgccctttgccccctcagggctcaaggattaatgggatggcctgcctactccaggaagccttctctgatcaccccggccctagctagcttttctctccctgcccctatccagtcaatcatttacttattcatccatccattcacaaagcaagtatttcctcgcctcctgtcaagcactgaggtactgagttgaataagctcccccttgcctgccctcaggaggctcctggtttcaaaggaaaaggtcatgggctcaccaggtctgcacggagggtggggagcagaggaggaaacggaaaggcctccaggagagacccacaaggagctcttcggggacagctggggtttgcccggtagagaagggagaaaagtgtggggtggaccaggcgtggtggctcattccttaaccccagaactttgggaggccgaagcaggtagatcacctgaggtcaggagttcaaaaccagcctggccaacatggcaaagtcccatctctactaaaaatacaaagattagacaggcgtggtggtgcatgccagtaatcccagctacttgggagctgaggcacgagaatcacttaaacctgggaggcgttggttgcagtgagctgatactgcgccactgcactccagccggggcgacagagcg

SEQ ID NO: 654 - DNA, 1358 bp, Artificial sequence
  DNA replication origin
tggaacgttggcggtccaggtgcagggccgagatgcaggccctgaggaaggggcgggagggtgcagctgggtagggactgaaaccagaccccggggacagggctctgtgcaacggggtggcagatcagcttgcacttcagagagtggggaagctggactggagccgggatgacgccacggagcaggcggctgatgtgtgcaagggcagtggccggcccatgtggctgtactgccctcagcgctgcctccgtcccttccctcactgttgtgtctctagtcctgagcccgcgggtggagcgacagggccgccctgcagaggccggagcacgtggttggagggcggagcacacgctggagtgcggggcacagcagggagggcggggctgcggctggagggcggggtcacagcttggagggctggctgcggcgggagggcggggtcacagtggaaggcgtggacacagtggggggcggggctgcggatggagggcggggctgcggatggagggcgggccggggaccttaccacgccgtcctcctcgcgcaccacgtactgcgccaccttgaaggagctcaggtactcgttcatgttctgtagctccgtgtcatctgtagcgtcctggttccggtccagcagcttggagatggccgcatcgtcatagtggatcacactgctgtcctccacgtccttgttgtcacctggggagcaggcaaatgcagtgtgaggacaaagactgccctggtccagccccggggtcccaggaacagactcccaacaatggcccttcccatccccagcaggggctgcagctgagaggcatggtgaccagacagaggaaactgcgctgtaacagccccactcgccgcccacctggcagtcccaggacgcccaagtgagggcaggtcagggaacccctcctctgcaggagcagccacctggtcggaggaggagctgaggctgggctgggttggcccctacctggcggggtgctaccgtgcttcttctttgcactggcggccaagttcccccctttggaggactggacatcagggatgggtgtgaccggcctctggccctgagacatcatgcctgtcagacagagaaggaaagcactggtgcaggaccacagagggctgcagggttggcgggcagtgcccagagacaccaccctgggctgtcctagccaggagatacaggtggggggtgcagaagagaggctgtgtgttggagcgggcagggacccaagcaagccctggatgggtgtctcagccgggccaccccagtcccctgccacgctccctcggaacagaggcccaccctccacgtcgtccttgaagagttcctccgtgccgaactt

SEQ ID NO: 655 - DNA, 1179 bp, Artificial sequence
  DNA replication origin
ccaaacactcccatctgctggcctctctttttcagcccccggggcccagcagttctgcttcctcctctcaacccgggcaggtggtctgggcatcaacctggccacggcggacactgtcatcatctacgactcggactggaacccgcacaatgacatccaggtctgtgctgctgccgcccaccaccctcccagggggcctctcatcccgggcctcaggcaggttctgtccttcatgcccttcttgccatcaccccctcacctatcctggtgctgtgggcctccctcccccgtggagtctcggccccaagaggggctctgggagtgagtggaagcttggcccccatccctccagctctgtccttgtccagaggaggaagcaggcttggagagggcaggggaagtgtcccagggcgcacagcagttcctagtggccactgatctggtctttcccatcatcctcaggaccaaggccgtggagggaggcaggaagagggagccctgggacccagaggggcacccattttgaagggggtggggagcagagagtggggcctgttggaggtggaggggaggataagatagtgcaaggggcagatggggctgtaaggaaggatggaagggctgtggggggaggggtatgggaatagagccaccctagtgtacctggccacccctctcgggcgctgggacacacacattgaatgcttacaaatgtaggggaacacatacaaattgatgtctcattcacatgtgtgtgcgcccatgcacatacacagatatacacggccacacccaggtcacctcatgtagggctgcacagagtctcaggcacttccttgtattatactgggcagattcagctccttgctgccctcagaaggtggctgcgtgtctccagcacatggtcttgtggtcccattagtggttcgctcacagggaaatgcagcctcctacctccccgtggcccccacgaagctctgtgtggcttcagttacacccagcacactggccgtatcatccctcacacactcttgcacacctgcagtcctgcctgcttccaatggctagaagcttttccactccaaacccagcctggcacccaggcttgtgggaggctccgcagtcagggagggagcccagctgcagtggtgggctccacacacctggacgcaccacacg

SEQ ID NO: 656 - DNA, 776 bp, Artificial sequence
  DNA replication origin
cacctcatcggcctggccgcagcctgcagtggctcagcctaggccagcctgggggtcccacagggctgagctggcgcatactgggagctagagaggggctgagggagctctggagaaagcagcagaaggtgcctctccttcctctggtcgacttgagccccaccccgcctccacccccaggaggtgggtgatcacagggtaatgggtcttaattagagcaggcttggatccgtggagcctcaggccctggagggttagggctggtgcatgagggcactgccaggtgggccaggagggtggtggggcagccacgaggggccaggagctggcaggacaaggagttctgaggtgaggttgctcctccctggagcccctcacccgggacgggcaggatgccaccttaacactggctgcatgctctgcgtcttggaaccctctgggcctctgctctgtccccaccagatggagccatagggaggagggactggtgggctcaagggcacaggctgggcttggggaaaggctgaccgtgcagttgcttgtatggtgacccccagatctggttttagaaagctcaggacctgctgcgggagcagagagtgtccaagggcagaaaggggctggggcttggctgaagacgggagcgtgtgaggtgttggggggggcagtgtcatagagaatcaggcgtgtggtgacctcagggccacccaccagaagccatctggggagaggaagggcccatcagagacagggttaggcagggctgagtccccgtc

SEQ ID NO: 657 - DNA, 1597 bp, Artificial sequence
  DNA replication origin
atgaattgatggatagatggtgggtagatggatggatagatggatggatggtgggtggatggatggatggatggatggatggcagatggatggacactggacggatggtggatgggtggatagtggatggatggtggatgggtggatggacgaatggatggtggatagatggtgaatagatggatggatgatgaattgatggatagacggtgggtggaaggatggatggtggatgggtggatggatgaatggatggtggatggatggtgaataagtggatagatggtgaattgatggatggatgatgaattgatggatagatggtgggtggatggatgaatggtggatggaagatggaggatggacggatggataaatggatgaatggatgaatgacggatggatggatgaaagatgaatggatagatggatggatagatggtgggtgggtggatggatggatggtggatgaaggatggatggtgggtgggtggatggatggatggtggatgaaggatggatggatggatggatggatggcagatggatggctgaatggataatggatggatgatggatggatggtgggtggatgaatggtggatgaatggatgagtggatggtggatggatgcatggatggatggtggattgatgaatagatggacaataggtggatggatggatggcagatggatggatggtgggcggatggtgggtggatgaatgagtggtggatgaatggatgagtggatggtggttggatgcgtggttggattgtggattgatggatggatggtgggtggatggatggatggatgcatggatggatggtggatggatgaatgaatggatggtggatggatgaatggatggtggatgaatggatgagtggatggtggatggatgcatggatggatggtggatggatgcatggatggatggtggatagatgaatggatggatgacgggtggatagatggatgaatggtgggtacaggaatggatggatggtgggtggtggatgaatggatggaagcatgaatggtggatgggcagatggatggatggtggatgggcagatggatggatggtggatgggtggatggtggatggacagatgaatgaatggtggatggatggattggaggatggatgaatgaatggtgggaagcatggacagatagtgcatggatgaatagtggataagaagaacaagaacaaatggatggatggatggatggatggatggacggacggacggatggatatacatatggatagataggtggatggtgaatggttacttggttggttttgtgggtcgacgggtagatgtgggagagcaggtagatacatggatacatggatgcatggatggatggatggatggtgggaagcatggacgaatagtgcatggatgaatagtggataggaagaacagatggatggatggatatggtatggatatggattgataggcggatggtgaacggttacttggttggttttgtaggtggatgggtagatgtgggtgggtaggtagatggatggatggatgatgggtgagcgactgaatgaactgataaaatgataga

SEQ ID NO: 658 - DNA, 2537 bp, Artificial sequence
  DNA replication origin
ccagaagaggcacccgccctgccttcctcctagaagctggctcagacacctgcctcaatgccagagctggccagggcaaacctccccctccccaccatcactgcacgggaaacaataattcactgctgagagtgagcaactcccagggggaggtgggagatgagcagagtcaaagaaaaaagatcggacaagtcatgagtttaatagccgtagactgaaaaatcatcatgacagcttccaaaacactagctcctccagccacaaacttccatcttttggaaccagctggttctggtctttgggggtcaccgccactgagcttggactcagggctgcataggggctatgaggaagagctcagggtgagtggggggccagcagtgcgacttgacaggaggcctggctagggctgtcttcacagccagaagctggggtgacctagagagtcccagccctcagacactgaaaccacaaccatctctcaggaacgcatggtttcaggtgctgggcatggcaggttatcgagagttacattcgaaggggaacccacagatccaggaggaaactgatgacaacgtttcgagtatgtgaggtgtggtgacacaagcatgtagtcccagctactagggaggttgaggcaggaggatcgcttgagcacaggagttcaaatccagcttgggcaacacagcaagaccccatctcttccaaagaaagcatgacaatgtgtctcagagtgactggaaggcccttagcaagggtgtccctccccatcataacattcgagctgggacctaaatgaccaggaggcagcggtgagcagaggaaagagcaggtcaggcagaggtcacagccagggccccatggcaggatggagcgtggagcgtggagtgttccagaagcagcaaggaggccagcgtggctgctgtgaacaaaggggtacaggagtggacccgggacaagggtttcagaggcgactggagccatgcgggtcgggatctgacttgggttcacgaggtgaccccagctgctgtgcagtgggtggtcagaaggagtgggtagaaggccctggaggggaccggcaggaggggacagaggcttggacccagaacatggagagaagccaggagcctggaaaggctctggaggtggagcagctggccttgctgatggatggggacagaatccccaggccagaggtgccagagcagggcgtctcttctgcagggctctgggggcactcctggaggctctggggccaacccaccgagggggagcacgggtggtgggcaggatgaccagagccccgcctctctggcccaagcagtgagtcgggtgcctactagactgggggcaccttccctggcctcttcccctccccaacctctaagtccccacatagtcagagagagccggagtgtaagatgggaaagacagccaggggactccaccagcgggtcggtgcaaccccagaaatgccactgatcccacaaaagggccacaccccaaacaccataacaaacaacttgctgagaaaaccagtaaactggcttactggggagccagcctcctaggtggaaaatggccactgatttttttttgtgcctgtgcggggcctcagagttcccctccggagaatgggtctaattccaaggacccaggatatgacagtcaactattgtccaggcaactccaccccaagagaggactcccctattccccgtccccagcacgctcgctgccaacttggcctgtctaacaggcgaggtgagtgccgggctcctgtaggagctcagtgacagcattaaagccaccaactaaccaagcaagcaaacagaagggggcagggggtgtggccacctggtgggaataccctccccagaagacgctggctgcttcctccaacaggagctggaggtgtccatttgtggagtcttctcacccctggaagtcagaaggggccagatgcacgttcctgggcccgggagggcctccagcctcccacaagtctctccgaagtccagagaggccacagacttggcgcagggaagccgagaagtaagagtctcccagaaaggagggagggtggctgacagggtggggccctacccagctgtgccaggagggaaaacgtcccaaacaaatggtgagcagttaactaaagaactgtcccgcaaggcaacccctggcgcacagccctgtgtatactaaattctgagagagataaaaggagagagatggtaggggcaggggcggtggccctggggcgtcaggcccgtagccaaggcagggtgggctgggaacggccaccaccctgggcgatggtgaggctggagacagcggcgggcgctaggtcgcgccagaaggacgccggcggcccgggtaaagtgcttgggagcggcggtcacagcgcacagaggccaggaaagaggagcaggggtccgagcccgtgcgtcccagagcggagtcctcctgggccgggagggaagccgccccatcctgggcgctcaacgcgtccccaagcaccgccggtcctcgcc

SEQ ID NO: 659 - DNA, 1708 bp, Artificial sequence
  DNA replication origin
tgcttttaacgtcatgcatttttggtccgttgtcattaaaatacccatttaatagtttaacaataataagggctcacctttaaaaatgactggagagccgggcatggtggctcacgcctgtaatcccagcactttgggaggccgaggcaggcggatcacgaggtcaggagattgagatcatcctggccaacagggtgaaactctgtctctaccaaaatacaaaaaattagccaggtgtggtggtgcgcgcctgtagtcccagctgctactggggaggctgaggcaggggaatcgcttgaacccgggaggcggagatttgcagtgagctgagattgcgccactgcaccccagcctgacgacagacaccatctcaactcccccccttgaaaaaaaaaacccaaaaaacctggagatttgtagtaaaaaaatccatttgtttctagcattccagtttttgtttcattttgcttttggacattaaataatattacctagttgcagtcatcgggaagaacaggatggggagaggattatgactgatgagcatctcggctctaatttgttgccagattaagcagttagaactgttctttcttgaacgatatcttgactttcagcctcgccttgggaattggagccagggttaatgatgggggcggctttctggtgatgagaagtattgtaaatcagagtttttctaccgaagggcaggggacctttgaaagggattagagaggtgttggggggctggtaactgaggggtgggcgtgtcagcttagggctttcttcccttgttggtcaccattcatggaggcagttggtctggaaagaacgaggaagaggcaggtttggttcaagcctcggtgatctggggctccccctggctagctgctctgtggggaaacacggccttgggaggggaggccctttggtttcctggcctgcttccctgaagagtgttcctttccccttgcaggcggccagcactgggctgacccggcttctctatctacagcgtagttaaagcggatctgggagatggaggggttcccaacaccccagtctttggttccagaaggctggaccgacctctccttgcccagggatgaatgcagagggtcttttgtttggggtttgctggcaataaaattgaacgggaagaagggaaactgctgccgatcctgcgtgtctcaggtgggttcccccagtgcccctgcgaggcagtgagagggggccctcccttcacgggccttctggggttagagagctggcggtcggccagcccctggaacttttgcgttcttaaggtagctttaagacttgccgccgcggagactggaggcgctcatttaaaattccagtcttgctcccgagggctttggcctccatcttcacctttaacgaccgagggctggtggcggcggctccttcctgctctgcgacaggtgtcgcttctgagcgggagttttgggcacagacatcgcagatccgcaccacccctaggggtctgcatgggtttcagctgcacccagcctggaggggctttttggaagggggcacgtgggcggtgggagcggggaagcaggtgaggggagcccgcctgcgcggatttttctgctgtaaatcagacccacagtctccagagcgtcttttccccaagtgtggaacacatttttcttctaatcctctttggagagggggttaggaa

SEQ ID NO: 660 - DNA, 1275 bp, Artificial sequence
  DNA replication origin
ctgggcgcagtggcccacacccgtaatcccagcactttgggaggccagcgtgggtgaatctcttgagcccaggagttcaagaccagcttgggcaacatagcaagactcccccctctataaaaaatactaaaacttagctgggcatggtggctcgtgcttgtagtcccagctacttgagaggctgaggtggaaggattgcttgagccaggaggttgaggctgcagtgagctgtgactgcacctctgcagtcccacctgggtgatagagtaagaccctgtctcgaaagaaaaacaaaaatagaaaagctgggaaaagttccaagcagaggcaagagcaagtgcaaagccccagaaatgggaagacatttagagactagcagatcaatgtggctggagatgaaggagctcagggtggggagtagggctgaacatggcatgggagtgaggatggaggatgggggtgaggctggagaggtgggggcggggcagggggtgtggggtgagggatgagggtttgagtgtggggaggtgggggtgagggtgaagaggtgagaatgggctcatgagggtcagggtgatctacgggacactagtctagagatgccaaggatgccactggctgtacctgtggggagtccagggaggggtagaggctgcacacattggcctggggagtcatatttaaagggaagagcatgtgggtcttgtctaaagatcaagtgtagataaggacgggaggaggctgggtgtgatggctcccgcctgtaatcctagcactttgggaggctgaggcaggaagattgctttagcccaggagttctagatcagcctgggcaacatagccatagtgagacaccaactctctacaacagcaaaacaaaacaaaacaaaaaaacatgcagctgggcatggtggtgcacacctgtggtcctagctactcaggaggctgaggtgggaggattgctggagcctaggatgtcaaggcttcagtgagccgtattcgcaccactgcactccagcctgggcaacagagcgagagcctgtctcagaaaaaaaaaaaaaaaaaagaaagaaaaaggaaagaacaataaaagtcaactgctgagagggaggtttaggaagaaggggctggcattatgactgaggtgtgaaatagtcttttgggccaggtgcagtgccttatgcctgtaatcccagcaatttgggaggccaaggtgggaggatcacttgagcccaggagtttgaggctgcagtaagctatgatcacaccactgca

SEQ ID NO: 661 - DNA, 1558 bp, Artificial sequence
  DNA replication origin
agactcagtctcaaaaaaaaaaaaaagaaccagggctagggacagtcctcaaaagaacagctagtttctctctagaattcacttccttctcctagcaaactcctactcctacgcatccttcaaaacccagctcaaggccaggcaaggcggctcacgtctgtaatcccagcaactttggaaggccaaggcaggcagaatgcttgagcccaggagttggagaccagcctgggtaacacagcaaaacccccgatgtgtgcagcacattgtactttttatttttctactaaaaatacaaaaaaaaaaaaaaaaaaaaggctgggttcagtggctcacacctgtaatcccagcactttgggaggccaaggtgggtggatcacctgaggtcaggagttcgagaccagcctggtcaacatggtgaaaccccgtctctactaaaaatacaaaaaattagccgggcatggtggtgcgtggttgtagtcccagctacttgggaggctgaggtggaaggaagccaaggctgcagttagatatgatcacgcggcgacagagtgagatcctgtcttaaacaaaacaaaacgaaaacagctcaaatatctccgagctttttctaagcctttattgagcactactgtgggtcaggctctgggcttgactttgtaatcgcaagaggggcagaaacgggctgctctcaggacactcaggagaacacgggcggagaaagctcactgatcacgtcgacctagcaagcgagcgcacgctggagaaaacgctgggatcaacacgcatctgccaggcccagacggcagagggggcactgctggaaaggccgggaacctcccctctcaacctcccacccaaacccatccctcttttgggaacttggcaggcaatgaggatagggccttaattaagtggacgcccagtatgtgtatttcacgtgcgttattccactggggcctcacccattatcaggacaccagttctattttaacccagcgctgaggctctgagaggtcagtaacatggccaagagctcacaaccagcgaaaggcagggctgggattacagggcgtctcactccgcctcccaagcgctggaaagtcggtggaggggcgtccgctgctctctggcgcccccaattggccgccgaggaaatgaggcggcgatgacctgttcagacccaaatgggatggaagagtggggattagcgggggtagggggtggggtttggactcttttttttttttaagacagtctggctctgtagcccaggctggagtgcagtggcgcgatctcggctcactgcaacctccgcctcccgggttcaagcagttctgcctcagcctcccgaagggcgccaccatgcctggctaatttttgcatttttagtagagacagggtttcgccatgttggccaggctggtctcgaactcctgacctcaagctatctgcccgcctcggcctcccagagtgccgagattacaggcgtgagccaccgcgcccggcctacccttgaagaccccgcagccaaggtcctccggccccgctctgcgcggcg

SEQ ID NO: 662 - DNA, 1927 bp, Artificial sequence
  DNA replication origin
cagcaaagcggcccagcgggtaggtacaaggccccgcccctcgccagtcctcactgcctgttctccctgcgccggggagctccaggccccagccctaacctgggccctagcggctccccactccatgacctctggacgcccagtcgggtccaggcgcgatagggagggcgcgggcgcccgggcagaggggccgcgggagctcaagcggggctccgtgcgtgccccagccgcccgcttgcgctgtcgctgcagatgtcgggagctatcttcgggcccctggagggcccgagctccctggatgccccgagcatccacccgctggtgtgcccgctgtgccacgtgcagtacgagcgcccgtgtcttctggactgtttccacgacttctgtgccggctgcctgcgtggccgcgcgaccgacggccgcctcacctgcccgctgtgccagtaagtgtcccaaagttccccaaaaccccccagaccccatcccccgggcccaaggttggctctgcccgagctgggacccaggtgccaggagagtaaggctccaacttcaggcagaacgactgggagatactgcacccggtccttagctctccccgccagaagttgcaggcttcggtccattttatagatcagcttaactgaagcctggagattgcagttactggcccaagacctcccatcaaaagtcagagggtaagggcggggctccagcactggtcaggacgctcccggttactcgcttgggggtcctagaagtcttaggtccacaaaaccacagtttcagttatgtgggctcaaggaacccaggagtggctctgatttgcccaatgccgtgagaagatgtcgaggagcagcttctgcttttgatactaggggaccaaccccactgtctgcaggagtgcccaggactgggcaagggtagggaccagggcagggtgagtgctggctgtgatatttatagcagaccccagagctgtggtgcaccccacctcccaacacagctatttttagctccagcctggaatgtgaggggtgggggtggggagccctggggaaggggtatcagaatctcggggcctgggcttctctgcagacaccagacggtgctgaagggtcccagcgggctcccgccggtggaccggctgctgcagttcctggtggacagctcaggggatggcgtggaggcggtgcgctgtgccaactgtgacctggagtgcagcgagcaggcaggggcggcagggcgggtgggtgaggagcagagggtacccggttgcacagtccccaatgcttgcacatgcactcagcatgtcttcagaggacgacctggcagtggattctccagcacctccctagggcaccttggccccaaatgtgaaccccattataccggtggggagactgaggtccagaacaagggacttgagccagtgtccagacagtggcagaggctaaggccattcgatctggggagagctcactggtccccaattcagggtggagttgtggacctgcacaggaggggcagtccagtttgcaggcctgggccgaccctgaagggcctctgctacccaagtggcatagaagcagctacagcccaggggaggtggggacagcatgctgttccctctgggctgtaaaaggcacaggggactctggcctgcggaggccagaaaatgtatcgggaatcccaggaggacggcccgactggggcaaaagctccagcgttctggacaagtgctgagcaatgtgtgacccagacgtacagagaggattagcaggaggtagggactgcaggtagggcctgttatgtccatcattgcatgcgtccataccagggctgcaggccaagccctggaatcccagccctgggtctggcttggggaggagaaccttaaagccctcactgctcttcccctccccccgcc

SEQ ID NO: 663 - DNA, 1934 bp, Artificial sequence
  DNA replication origin
agtgaggcttgcggggccggggacttgggggtgggggcggggcgggcactgaccggagccctcaccaccgcccgccgcccccgcagcgctgcacgcagagccctacctcttgttctccaccgacaagaagttgctgttgtgcatccgctgcttccgcgacatgcagaagtgcgtacaggggacgcgaggggagggggctgggggccgctggagcgggcctcacccgccgccttctgcagggagagccgggcacactgcgtggacctggaatcggcttacgtgcagggctgcgagcggctggagcaggcggtgctggtgagcgcaggggcctggcgcgcggggccgcgcggcggcgatcgcgagcctgaccacgccctgtccccaggccgtgaaggccctgcagacggccacgcgggaggccatcgcgctgctgcaggccatggtggaggaggtgcggcacagcgccgccgaggaggaggacgctatccacgccctcttcggcagcatgcaggtgaggggtgggggttgggggataaacgacccagccgggacctggtgacacagggctggtcccttgcccttgtggatttccagtgtagtggggcagcaggccttgcaccaagcactttcctggagttgctaggagagctgggaggggaaaccagggcctgccgcaggctggtggtgggggtgtgaggtggtcaggaaagacttccctggggaggtgacatttaaggtgacgggacccaagccctcaccaggcagcagatgcagggctggtaggttggagagatacctagtgtaaccagcaggtggctggggtccggggggtaggcatggtgggaggtggcagggctggggcgcaaatcaagagcatgctcgccatctctcccaggacaggctggcagagaggaaagcgctgctgctgcaggctgtgcagaggtgagttggggggagcggggcttgcttcccttaccccttggcctccatggcctcagctcagagcctgggcaggccctgccccaccctgaggagcaagacatccgaatgtcctcccagctaaggagggcagcatggctcagggtgcagagaaggggttcagggacggacatgcgaagctggaggcgggtgggggatggaactgcccggccctgctcctggccccctggaaaccaggcagcccccctcccccagccaatacgaagagaaggacaaggccttcaaggagcagctctctcacttggccaccttgctgcccaccctgcaggtacagggagctcggggtgcgggtgggtccctcctcctccccggccaggcactgagcagcatcccctcccccaggtccacctggtcatctgctcctccttcctcagcttggccaacaaggctgagttcctggacctgggctatgtgagtctcctctgctcctgcagatgccccctccccaccaggagcccaccctgcagaccaaagccaccaactcaggggtgggcagcctgtcacctggagcctggaccagggatctcggggctgaccccctcccaactccatcatctgcaaacctgttagggtcactgttacaaggacagtgaagccaggaagggggcatgagcctacagtcccccgtggggcggagtgaccactggagtccagccgccccctctcctgtggatttggggatgggatgggggtttgtccgggtgagtcccagaagagggctggcgctgctaagggacaccaagtcaagtgccaaagacagacgtgctccgcctccatctcccctcttcctgccccctggctgccacacctccaccggcctgaggccctcctcactgccacaggagctgatggagaggctgcagggcatcgtcacgcggccgcaccacctaaggcctattcagagcagcaaggtgtgcagtggcctgggtgggcca

SEQ ID NO: 664 - DNA, 1387 bp, Artificial sequence
  DNA replication origin
gctgaggccgcgttgttcctgctgtcgtcgtgcgtgttctgtagactctctgactgctcatccacgggtgcctgaaacctggcaagggagtgggcaccagaatctcaagggagcagagccagctgctgcacggccttaagctcagaaacctcagaaccagactctgccaccactcatgcacccacctagcgtttcattcttttgctcctcaaatatttactaaggtccagtggttggcaagggccaggcctgcatggcgtgcaggagaggccaggccctgccatcatggaagctgcgtgctggtcgggccagacacgctgagggagggaagggtgtgtggtgcagggcgccaggcagacctgctttaatccaggtggagtggggagggcctctgctgacactcatccaagctggggcccgactgagggtctgtgaatactccaggcagaggcccagaagtgggaccagtctagcttttttggggaactgaaagggcattgtgactagggtgttatgaggggcagacacggtcacaggtgcacagggaaggtccccaagagagctgtccagccccgcggtgatgggaatcatagacttctaaaggactcctggcttcatggcggctggaggggtaggagggttggccatgatgatctggattcaggggagcaatagagaccaaagcgggtggattgaggcaggaacagtagagccagcaggacttgggggtgggttggaaatgaagtgggtgaaaggaatccaggctttctcccaggcttttcacctgagtgaatgtggtgctattcactgagatggggagatgggaatagcatgtctgcgggaggacgtcaagcattctggccactgctgaactcgcggtgcctgtagacatccaggtagggctgcccaggaagggggcagtgggagatgagtctggagctctggtaagcactgtgctggagcgggagctgggggtctgcgtcatgatggggtcttaaagccagggactgaatgaggtcgcccaaggagtgagcgtaggctgtggagaatgcctaaggctgagccctggggaaaaacatatctgggcactgagctgaggaggcagagccagccagagaccaggaaggaacggctggagaggctggcaggagcatgggagcgcggggctgtcagcaaagagaaggtgtactgaagactaacatggctaggcacggtcacgtctataatcccagcattttggaaggctgaggtgggaggatcacttagcccaggagttggagaccatctttggcaacatagcacaaccccatctctaccaaaactataaaaattagccgggcatggtggcacatgcctgtagtcacagctacccaggaggctgaggtgg

SEQ ID NO: 665 - DNA, 1278 bp, Artificial sequence
  DNA replication origin
gcagctgcccttcccgggccggcatcggcggcacagtgcgcaggcgcagccggcgcgtttctccgggctacagccggcgccgccgcccgctagtccgccgcccggcgccatggcgggctgcgcggcgcgggctccgccgggctctgaggcgcgtctcagcctcgccaccttcctgctgggcgcctcggtgctcgcgctgccgctgctcacgcgcgccggcctgcagggccgcaccgggctggcgctctacgtggccgggctcaacgcgctgctgctgctgctctatcggccgcctcgctaccaggtgcaggccggcgggggccggcgggggccggcggggcgggcggcggtccgcttggcgcggcgcgtgggcacctttctccccgggcccgcagtggcctcccacgcgcgcgctcttcatccgcgagttcaggtcgcaggaggggaccctctctctccgggctcgggcgccctgcacccgaggagtgggttgttaaattgcagcttgtgcagctcagcaggtgcgcgtggggtggagtgagcgagcccgcgagtgcttttatgtaacttaaggtgcagagacctacctgctgccctgtctcaggtcaaaggccccgcagtgacgtgggtggggctgggcgcacaggcccgggtgccctgacctcataaactaggcttaagcagttttcctacagccctgaatagtaatcacgaataataataataatgacagctaaaatgtaggtagcagttagtcttaagtgttttacgtgggtaatccttactgcagtcctaaaaggtaggtactgttatcccctggctgtagatggggaagcaagctcagagaggttaaataatttgggaggccacacagccagagagcggtgggtgcagaatttgaacccaggtcgcccacttctccctttcaacctcagcaaatcggctctatctgcttgcctgtgggttgcctattccgggaaggtcagcagcccagatctgtactctgaggactgtgaatgactgagcttctcttgggttcctttcagatagccatccgagcttgtttcctggggtttgtgttcggctgcggcacgctgctaagttttagccagtcttcttggagtcactttggctggtaagaattccttcggaaatactggttttcaggcgagggtggacagatcagagggtctgtagcggcatttcctcatccctgtctcatctgtgaccggcagaaggctgttcagggttctctggaaacgaagtctcctggcttcc

SEQ ID NO: 666 - DNA, 918 bp, Artificial sequence
  DNA replication origin
aagcggaccgccgcccgccccgccggcccccgccggcccccgccggcctgcacctggtagcgaggcggccgatagagcagcagcagcagcgcgttgagcccggccacgtagagcgccagcccggtgcggccctgcaggccggcgcgcgtgagcagcggcagcgcgagcaccgaggcgcccagcaggaaggtggcgaggctgagacgcgcctcagagcccggcggagcccgcgccgcgcagcccgccatggcgccgggcggcggactagcgggcggcggcgccggctgtagcccggagaaacgcgccggctgcgcctgcgcactgtgccgccgatgccggcccgggaagggcagctgcccgcagctgcgcgccgcctgccagttctcgcgagaactccggcccgccctgttgctgtccggaatttggcgggagcgccccgcccgcccgcccctccccgcccctcggggacatccgggctctgagccagactctgtgccgggcgggggccgggaagtggtgggagaagtcgccgcccgcgtctgtccaaacttagtcccaaactcaggaggttcctgtcccaagaagcaatgtaaagtttgaaacgagccgagcgcggtggctcacgcctgtaatcccagcactttgggaggccgaggctggcgaatcatttgaggtcaggagttcgagaccaacctgggcaacatggggaaacgccgtctatactaaaaatacaaaaattagctgggcgtggtggcgcacgcctttaaccccagctacttggtgaggctgaggcaggagaatcgcttgatccggggagacggaggttgcagtgagccgagattgtgtcactgcactccagcctgggtgacagagtgacactccatctcaaaaaaaaaaattttgaaacggccgcaccct

SEQ ID NO: 667 - DNA, 1497 bp, Artificial sequence
  DNA replication origin
tccaaccgcatctggagacaattggctgagtcatttcagagcttttgctgtgtgtcccaatagttaattacatggagcaatcacttcatttcactttgaaatgcatctgcagagggggacaacagatttctccctcgtcacctgcatccacagtagcctgtgcggcactcaccagttagcactggttgaaacctctggaagtacagaagggaaggggctgccacacggagccacacggctgtcctctgggatgggccgcaggtagggctcttgtcctggggcccgaaaacctctccctactcttggttccagacctgacataatgttcttttttttttttttttttttttttttttgtcaaactcaagaaaaccaaatgaggggggaaggggtggcacagacacttgtcactttctgcattaaattccccaacatgagacaggagggggccctgagcagccttggaggctctaagagccctcagaagttagagaaggaagtttttttccttgaatgagcataggggggcctgggtctccccacttctcctcctggacctgtgctcctttccaggccgccttggggaccccagatgctaaagatggaaagggaattggtggcctacatcccagcttgcgtaagccccgcttctaagttggtccatgcccttcctggcagcccgagagcactttgtcctgcttgccctcagaggatagggtgaacccactgccattccccctccagctctgaaaatacctcctggtctctgtgagcccctttggagccaggcctgcctgaggctgtgcgaggatgcccagactcagggcttgtaatcagcgtgacaggctggggtggagggtggaccccgagtcttcagcctgggtttccgggaagggtccctgtagagactagtctgctgtctttcccaatgaccttgtcagatgcaaagcacaatgactttaacttagtaggggaagtggctgcccagagataggagcaagaagtgagggtaaagtggcgatggtggggagaaactcggctcagagctcgggaaaggggagggtggaaatcgcaccaagatctctccccaccttgatcctgcgcgaccctcggccagtgtaaggcgagtagcgggccaaggaggctgtttgtgatggaggagccacgggtgggggcgtcagaaagtagggggatcattccaggtggggagaccactgaccgaaaacgggccacaggacagggggcgcggcgggcagtgtcggggttggggtcggggggcaacggaggcggaagtccattcagtggaccagggcggagcgacgcctgagaattccgcccaggccttgaggcgggcctcgcctcccgcagccaaagcagaacattgcgaattagagcattttgcggtcaattttccactgcttaagaaacactaagctatccacgtgagcgtccccccgcccccggcccgatgcgcctggaatcccaggggacgggctt

SEQ ID NO: 668 - DNA, 1870 bp, Artificial sequence
  DNA replication origin
tccccctcctccctccagccctcccctataccttgcaaggagttctgaaggcttctcatgtacttcacgctcaactccaggatgtcggccttctccaatttgcgcttccggatctacccgaccatggaaaggtctattagaccggcctcccgaggtggagagagggaggttgggatcgtatcacccacccacccccaccccgcctgagtctcacctggtgcgagtagtgtttctccagcagcgacttgagctgctccagtgacacattgatgcgtgcccggcgctttttctccatcagcggcttggaaatctgcagatgaacagcctttagagtgcaggactgccaccctcctgccctcggcacccccccacacctcccggggaagggtgcctgcccctagtccctcaagaccccagacctttcggaagttgccggggaggctgccccgggcagcaggctccgtgcccatgttgcagtccatgcaccagtgcgaggcagcgccgcctttatagggaccctcgtttacatgtcaatgaggccctctggactctagaaaccttgaggaggaggggaccgagggaggacgcactgggaagctccccacctccttccctcagccccctcccatagcctaggcttcctctcaccttcaggaccccccctgtctcccgagggacccccccctcccctttatctgtcttttccttatctctctggcctccaccacttccccagtctgaggacccctgccatgcccaccccctccatgcccatcctgtcccaatccccgtaagttctccagtcccacttgccaagtccttgataccctggagtgcaagcattccaggggtcacctactggggaggtacatgggccagctggccacaggctgcctcactgactatgacagggctctgggctccctcgggactgatgaagatgccaaggcgacgcctctttatgcacttcatgctctggttatacccgcaacgccgcattagttgccctaatgtcgggacaatgcagcaattttctgcctgtggctgctcaaagccaggcacaagctgagcccgcgggggccatgcagcagcctgtgtcccattaaagcatgcagcccacccgcggggccacagccagcctcatccttgctggggccttgggattgggaggggtcctggtgagggtgcagcctgggtcctgtgttctctgacactgctaggatccaacgcggacttcccacaggaggcaggtggggtgaacacggctgcctctcccttccttacagccctgggcttccaggctgggtggctttggtggtagaccctgtccccatggagaagcactagaagtctactcccatgagcctgctctcagctccacgcacaggtggtggtggcaggagaccactgacattctgggaagagctccaggccacacttcgagagatccagggcccgcaccccaatctatgattcagactacggcggacccagtggaggaggcgcctggagcacttgccccaggatgggctaggcctacagcaaggctctggggccatccccctggttggactccaggaggctgaactgtagctgctgtgatggacaggaaggctgacctccaggaagtccctgggttcaaacctagacacctcccatgggccctcatggctttagtttttggggcttgtaaaattatattctgaacaatgcagcccccattgcttctgagggtgacagggaagtcgcaaaaattctgcagctgagccctgtggcagaggaatgaacaaaccggcttctgtgtagggactcagggtggggtgcgccccccagctctatcaagccagggcatctccccccagcccgcccc

SEQ ID NO: 669 - DNA, 1011 bp, Artificial sequence
  DNA replication origin
ggggcttccccagggccgccacacgcgcaggcccagcccgggactctcggcgcagcgactcgacgctggctgcggcggggggacgctggcggacgagccagggagactttcggggaggaggagcaggggtggtggggaccgcgggccgccggcggccggagcaggagcccagacggcaggggtgcaagggcggaacagcgcgggcgcctcctggcccaacccggcgctgtccatggtgctgccggcggcgctctcgggcaccagggggcagcgcaggccgctgccgacctcatctccgcgccgaaggagctggctcacgccgggcaggcagctgcggaagcccgacggttgctcggctcccctgggcacaggccagagccctgtggggaagagcggacgcgagaaacagggaggggaagagagggaaggggaaggggagggggagggagaggaggggaagggggagggaggggaggggaggaagggagggaggagaggggagtggaggtggaggggaaaggagggaggaagcgtgttgaggaagggaagaggagggcggaggtcagacgacccgaacgtctcccccggggtccagacctaccacccagattgcaatcgcacagccagcccgggctttactgctcctccctcgccccctagcgagctggggccccctcctcaccaactgcacctgcctccgagttgtcctctttatatttgctgtcttgccatgttgcccaggctggtctcaaaagcccggggtcaagcggtccttgaggtatccctctttatttggccttgtgcatccctggctctgatcccacaagcctccccctcctccctccagccctcccctataccttgcaaggagttctgaaggcttctcatgtacttcacgctcaactccaggatgtcggccttctccaatttgcgcttccggatctacccgaccatggaaaggtctattagaccggcctcccgaggtggagagagggaggttgggatcgtatc

SEQ ID NO: 670 - DNA, 1315 bp, Artificial sequence
  DNA replication origin
caataaaaacttccttatgatttgcacctggcattccaaggctggtttcgtagaaaacccttctacaaccccacagcagggctggccagctgcccttaatgtcttcctctggaacctgagttcttctggtagtgtgacatttttggggggttggacttgctctctgtcttcagacaaatgctcaggtcccaccagcgagtgaggagtgagatggtcctggagtagcaacaggatgaagcagtggggtgggctccacagcccaccagtggaggaaaggccctattagcccaggtggcaacccctgccccagggttggcacctggggctgctagtcaccgtgagcttgactgaagagacagaacagggcagggcaataggagctgggcctaagctgcttgggacttgtcgagcccctgtccccccgcgcgcccgccctggagtttggaggaaggacctttgggtctgcagtgcaacaccgccacctggtggactgcagagggatttgtcctggcctctaccccaccccacaccgcgggaagcagaccggagaggccaccctggacggcgacagccgggactcccaccctcgccccagctccagcgagcccattaggtgcgacagtggagctgggtttttgaaggaccgtgggtccttctccacgcgtttggaccaggacgggtttagtgccctgcaggtcagggccgcccaaaaagagaagagcttctgtagaaagttggtatttgtggttacaaaagatgcacctaactaggcatcgcaggggtgggagacattagacctctggtgtcctcttgataccgacttcgcagattcgcgctggctttattctgaattacaaggtgtcgggagagggtgccaggatctctgaccccacaacccaagctgcccctcgctggcccggactcctgggccagaagcccaggggaagaaaatctgacttgagagcctcccaccaccgaagtccgtgcgcagcagtgacctcattatggaccaataaagtggcgcagcgcgctccgagagccgtccagggattggattctccggcagccctagggatctggagctgcggggtctacggggtccgggcttggaatgtgggccagggtctttgtcgagcggaaggcgttcccctctcccacgagaggcaccgggttcacttttgcagccttcaagctggtgccaccaagcaatgggtcccttccaggaaccgcgtgggcggggcgtccggttggggcggtgcatcttaggggcggggcttctgagaagggtgggcctcggggaatgcgccagcccggt

SEQ ID NO: 671 - DNA, 1143 bp, Artificial sequence
  DNA replication origin
cccacagccagggactggaggggcctctgaagcacagacaggcttaggcagcctcccacccccaccccagcagcttcttctgggagtgggaccctatctgaaggatgaagagatgggcttggccacctgagggccagaaggaactgggcacaggcaggctctatgctcaccttggaattaccccaggtcttcatattgtggggccactgtgtaggggtaggggtctggaggagacagccttctcatctaccctatttcactagctcaaggttatagctgttcctggttctccttagcctgggaagacccagggcccatggcaatgcccaggcctgtaaggggtctgcccaggatggaaggcaaagaaatacattgctcccaggggttggacgcctgcccgggaccaggccttgagctgagaacctggaagcccctgccaggatcccttcctggccaggcctgcacgggtggggagtgaggctggggatgacgcagggacacggaaggccaggccctgctgccctcgtgctctccgcttgcacctgccagcgtcatggtgggagccatggagggagatgatgtggtggggacaggcaacgacggcagagtaatgagggtggggacactaatggtggtcaaggtggctcaggtgccattggtggtggtccacagtgttgtgcttagctggggtggagtgtgggttcccaagggggcagggggcactgagagtgggaggcctcaggcctagggagccacaccaggccacatgctgaaaacggacctccacaaaggccgcagagggctctagactacctctcacacctgggccactcagtggcgagggcctacaaccaagagacttcaaacagccctgagagttaacgtggtcacctgctcatcacagatggggaaactgaggcaggacaggtcggaagcagggaaacctgatcaaagcttgttcgggctctgaacacccctgtgcttagagaccctctgtaccctccccccccccgaagggtgtggcggttatggtgcagtgtgggtggaaagcccctggggaggccaatggctccagctcagcctctccaaagcggggctttgtccgatcccgcagtggccctgtctcaggttccctgctcccga

SEQ ID NO: 672 - DNA, 2034 bp, Artificial sequence
  DNA replication origin
ggggtggtagaatcttgaacaggcttgagacctggttctctaagcctcagtttcctcatctcaaaaaggggatggcagccgggcacagtgattcatacccgtaatcccagcactttgggaggccgaggcaggaggatctcttaagcccaggagatggaggctgcagtgagccatgattgagccactgcactccagcctgggtgacagaatgagactgtctcaaaacaaagcggggaggaggtggtaatccatgccccacttctctccatgggcagccaggaggaagacagagcaaggccacccagtgctgcccagtagccaggtagctcccggaaggcggggcctcccactgccacgctccagctcttttctccccaagggccccttctccttggcagatacccacctgtcagacctgccgtacacatggggagaccgagactcagggggagcttgtgtgatggtggggggtcctgcaggtgccaggccgagccctgtgcccacaggtggtgagcttcagcagcctgcgggccgacgcctcagcgccctggatggcactctgcgtgctgtggtgctccgtggcccaggccctgctgctgcctgtgttcctctgggcctgcgaccgctaccgggctgacctcaaagctgtccgggagaagtgcatggccctcatggccaacgacgaggagtcagacgatggtgaggatggcctgagagtggccccagggagagtggcgtctaggttaggtcattggggttggcaggaaaacggctgtcaggcaacgccactaaggaggtgacttcattctcaaccaccagacaccccgtgtcacccccaaatgtacttgaatgtccaagggacctaagccaggttcccacagggcactctcctatctggcttggctgccccaggttccaagtaatgggatgttctggttaacagagagcagggtagacatgtctgcaagtgctccagcggagctcctgggctcaccccccaacctcagggatccccagcaagctgccctgggggctcctgcagaccgaggtcctgtctggataccgttaccagcaatcccattaccctcagcccagcccgtgctctgtccaggcactgccagccccttgcgtgtgttatttagtcctcccgaggtcacctctggtcccaccccatgtcctagataaggaaattgtctcagtgagtgacctccctgcccagtctcacagctaaagggtggcatatttgggatttgaacccagaacccctcccattcccttttcagctaaccagccccctaccttgtatatgtctgttgggggatctcagggggatccctgggattccctcccagatgcccccaagtttccatgaccctaaggctctgcccccccacccaccccccaccctacagagaccagcctggaaggtggcatctccccggacctggtgttggagcgctccctggactatggctatggaggtgattttgtggccctagataggatggccaagtatgagatctccgccctggaggggggcctgccccagctctacccactgcggcccttgcaggaggacaagatgcaatacctgcaggtgagcgcagggctgggggagaggccgcacctgcgggtgacagggtgtcctgagctccccgaggcctctccactcggagcccatctcacgccttctgcagtcgcaggggtggctgtcaccatccgaggacgggctgtccaaaggtcacacagcttgtgtgggtgggccccaaccgccacccccatggtccctgtcacatgagttatctcctgccggctcagtatcctcaacgagcgccctccccaaccgaccccagctgtctgacacagccctgcggctcgaagagactgcaccaaacctcacagctcccagccagactgccccagcgcgcagcctggtccctgacccacggaaggcctttccccagggtggagaagggtttgtccccgtttcccaggagggcagctcggggtaaaagccagccgcgtcctgacagg

SEQ ID NO: 673 - DNA, 1315 bp, Artificial sequence
  DNA replication origin
cagggcgggcctcaaatgtctgttggggagttgcacttgatactaacggctggggaaggccaaggtgagggctgctgtgagaaaggccttgccgacaaaggtctgaggtccagaggggctgcctggggtcctcttggtgaagctgggaccagcttggcccaagaatgaagtctggactcagtagccaacccctgccccctgcaggactctacgcccatccccgaaaggtctgcagtgagacagggagaggactggggcaaagaccagcctgaggggtttcatccaagcagcaggcaagactgccttccctgagccattgcaggacatgaggacatgagctccagaatggtgactcggggggtggcagcttcagagtcagggccttgctcaggaggcagcccccactgccccacccccagcaggcctggttctccccagctaagggtcctcatgtgtacagtgggggctggcagcccggtccctgtgcagatggagggcaggggcttcatgaaacagcagagacccacaaggcacctcgggagcagagtgggggcagtggtggggagaggcggggctgggagggagtcagaaccacccctgcgtctcttacggacggggaagagggtacagcttgtggggccactccatgctgctgttataaagcgtccggagtcttcaccctctagagcatggcctgttcttagcccattttccagatgaagaaactgagccccaaaggggtttagcagctttctgagggtcacgtggcccacaaacggcagaatcaacatacccacatcctccacactttcactcttttgtggcagtcacttaagcatcactctttgggacagagcaacgagggctatcctgggagaggaggaatgcagggacccaaaagcaggggtagggctgaggaggccactggccgggaagggggtggtagaatcttgaacaggcttgagacctggttctctaagcctcagtttcctcatctcaaaaaggggatggcagccgggcacagtgattcatacccgtaatcccagcactttgggaggccgaggcaggaggatctcttaagcccaggagatggaggctgcagtgagccatgattgagccactgcactccagcctgggtgacagaatgagactgtctcaaaacaaagcggggaggaggtggtaatccatgccccacttctctccatgggcagccaggaggaagacagagcaaggccacccagtgctgcccagtagccaggtagctcccggaaggcggggcctcccactgccacgctccagctcttttctccccaag

SEQ ID NO: 674 - DNA, 1123 bp, Artificial sequence
  DNA replication origin
cccttcccggccagtggcctcctcagccctacccctgcttttgggtccctgcattcctcctctcccaggatagccctcgttgctctgtcccaaagagtgatgcttaagtgactgccacaaaagagtgaaagtgtggaggatgtgggtatgttgattctgccgtttgtgggccacgtgaccctcagaaagctgctaaacccctttggggctcagtttcttcatctggaaaatgggctaagaacaggccatgctctagagggtgaagactccggacgctttataacagcagcatggagtggccccacaagctgtaccctcttccccgtccgtaagagacgcaggggtggttctgactccctcccagccccgcctctccccaccactgcccccactctgctcccgaggtgccttgtgggtctctgctgtttcatgaagcccctgccctccatctgcacagggaccgggctgccagcccccactgtacacatgaggacccttagctggggagaaccaggcctgctgggggtggggcagtgggggctgcctcctgagcaaggccctgactctgaagctgccaccccccgagtcaccattctggagctcatgtcctcatgtcctgcaatggctcagggaaggcagtcttgcctgctgcttggatgaaacccctcaggctggtctttgccccagtcctctccctgtctcactgcagacctttcggggatgggcgtagagtcctgcagggggcaggggttggctactgagtccagacttcattcttgggccaagctggtcccagcttcaccaagaggaccccaggcagcccctctggacctcagacctttgtcggcaaggcctttctcacagcagccctcaccttggccttccccagccgttagtatcaagtgcaactccccaacagacatttgaggcccgccctggccttgctctgtctcctgatcctgcgcccctacctacctacctacggcaccaaagctccctctgtccatcctgggacctggacccaccaggaaacccatgggtatgctatcctacctctgcatcaaacggcccttgaggccagatgcagtggttcacgcttgtaatcctagcagtttgggaggct

SEQ ID NO: 675 - DNA, 1436 bp, Artificial sequence
  DNA replication origin
ccgcccctgctcggcgcaacccagaggggtccgggggccgcagtcccgccaggtttcccagcctgtcgctcggacgcgccctcggggtggggcaggactcggggcacccactggggaccagcaggcgagagcacgcgagtcggagcggggattgcggggggggggggggatcggagccccagggggttgggactgtaggggcgggggctggggggggcgtgccggagatgtccaggcctcgcgctgcgcgtccctccctgggcgacggccaggccgggccccgtggaacacatcggctgcagcgcgggcggagaccggcgtgggggcggaagccggggcgcagccagagcccggggaatcctttcaagttctgggttctctttgttgcgcaatggggcctcggggccgcgcggcctcattggcccggagctgtgacgtcacgccccggccccgcccgcatgtcttgcggagggaggcctcatggcccgggtgggtcccaggctagttgcacctgcagttggccctgcagtgggcggggaagtgggaagccgggtcctgagatgctgcggaatgctttaagtgccctgcaggagaaacttcccagcagaagacagggctttaagtgccctgcaggagacacttcccagcaggagactgggtcccgtcggcactgtggggagcccagcctggggtctggccctagtggccgctccattctatgaagaatgaacagaaagggtgcaatccgtggatctgtggtcactgacccagagccagagggacactttgttcccacacaaccagtcctctgtcactctgcacttggaacccggtgtccacgccctgtcccccaggacgttcctctcccatgccaagactacagtgcccaggagtgcctggccccaaacccagccctgacactattctctccgtgttgccctgagcttctgcctgaagtgttcccatctgcagtgtggggacggtgagacctgccctgcagacctgaggctcagaaagacctcagctctagggacaaaaaaaaaaaaaatgcccttttccccaacattttagggtttgagaggccaggactttggtgtcaggcaagtggagtttggatcctggctcaggcaagtgctggccgggcaaacagctttacctctccctgcttctgctggacaaactttacaatggggatgaattgtgggggcactcactggaggagcatgcccgtgtgcaagaggatgcacgtgcccctgcccacagacctagagcctttttctttttaagacagggtctcactctgttgctcaggctagagtgcagtggcacaatcatggctcactgtatccttgacctccccaggctcaggtgatcctcacacctcagccttccaagtagctgggactataggctcacaccactacgcctggccaatt

SEQ ID NO: 676 - DNA, 1795 bp, Artificial sequence
  DNA replication origin
gcgggggtggctggcggcggagcggcccgcgggccggggcatgctggcggcggccaccggcggccggcgcgctccgctaggtgggctcggccccgccgcccctccctcccctaggcgccgccgccgccgccgcgcttcgctcagctcccgccgctccgctgctgcgccgggcggccgggggcggggggcggagcagggcgcatgtctccgccggggcctccgcaccgcccctcggcccgccccgcccccgcccgctcagaggcgcggccgtctgtcggtctgtcagcccgtccgtccttccgtcagtccgtccgtacgcagcccacccgtgtccccgcgtccgcccgcggccggcccgagcctccctgggctggtggcgcctcctgacagcgccgcgcccctggctcccagctcggctcggtgcacactccggacgccgccttcggacgccggggcaagacccaggcccggagctctgggggcccgggggccagagggagctggggcaggaatggacactgagaacctggggccagggctggggctcagggagaccttcctggaggaagccgcatctaagatgaacaatcggggcggggcgtggagaggacaagggacgcatggccagcggcttctaggaaccgggaatccagtctgaagcaggggcagcgaggggcaaggttgggccagttacggattcacgctgctccccgggcctggggggtccactgagggaataaagtgcacgggccaccgggctgccgagtggtccccgccacccccacaggctcagaaattgttctctctgaaactctgagcaccaccgcccagccgggagaggccagggtctgcagcccagcgcctgaagccttctcctactcccctcctcccctcctcccattcttcccgcccctccgcccctccctcccaagccctcatgctatcaccactcctcatagagcacaggctgtcacccacagactgacagcctcagctggccccatgcaggcggaaagcctcctgcttcttgatgggggccctggagaggacgcctcctgaggatcgtgcctgtcttttctagaaagcacctgaccacacacacaatgggcacaaggcctctggggctgcctggcatagtgtccttccgtgcctctgggacacatccatgactaggcacccctgtgtctggaggaaactaggcacccgaccaggaggagacccaaaccaattgcagccaaaacggatgcttggagcttgcccagtccgggcagggctgctccacagcctgcacctgcctaaaccgtccccacaccccaggtccctgagcagcttttagggggcccaggatgggtcttagggtccgtcccatgagacaaaaagaggagtgtctgtagagaaaggccccgcaataacgtgtggggctgagcaagggggaatctggggccatgcacacctatactccctgtggtttctcgggcagccagggccctcagtgtccccagtgagccctctgtggacaggttggctccccctccaggtggtcctggttataaataggccaccagcagtgggaggctggcacagggcagctgtaatcaagggtggtgtttctaagtgtctcgcctgtgactcggggtgaaacggtagaaacgccacacttaattacatggccaccgagagccatgccgcttagaaacaccacggttaagattgcacacacagccatggagagccatgcctctgtctgggcctggctcccctctgccagcccagctgacccactgcctggaccagt

SEQ ID NO: 677 - DNA, 1872 bp, Artificial sequence
  DNA replication origin
tcttcgtgaccctggacaccattcaacttcctctatcttcactgtttgtttactcctccctctgagagggtgtgaggccccagggagagcaggtgaacagcagcagatgatgaaggccccccatcttcacccaccccacatggtgggcaccgtgtccatcaccaccgtacagatgaggaaaccgaggcacatagaaagtgcgtgcctaaggccacacagctagtaagtttagagctctggctgacccgggcagccaggcgcctgctcctggatatgtgagcctgacagtccacgcagcgtctgcagtggcggggggtggttgggagggggtctggggtggcggaggcgacgcttctctagagcggttgtgggtgcccttctaaggaaaaaacgtctgagaagtgctgtagctccaggaggctctggggagggtggtccagatgggagcagcaggtgcacaggcgccgggcaggagtgagcttgctgcacccacacccagggcatggaggagccaccgtgcatttcggtgggagagggagcaactcggattttgatgaccagtttcctgggctgcagggaagggtcacattgagagcaccaggaacagaggaaggagcagctgaggactgagcaggggccccatggggacggggcagtaagagctgttcgggagaggagtggagcggcactgggtgggcgtgggcatggggggagtagggaggagccagctgggttcccagacttccagagcagcacagaggcggagagggatttttttgcgggtgtgataatgagttccattcaggacaaactgtatttgtgatgcttttgggaaccctgttgaggggcagcactggccaagtcaatttgggagtcaatacaacacacaggcgatgctcgaggcacagaccatggatctgaccaccccaggagagaagggccacaggttaggacatgtcaaagccaagggttcggggaccgtgtggtggccggggaggctggagtatccctacagacactacagggtcccccatccagggagcgcaggcttcactgagggcctggtcagctgtgctacagacagggagcggacagcagacagggcgtgtccttgcgtctgtccatgctgcccgcagagggaagacagaactgggaaagtttgtccaggaggcaggaagaggtagggggcggggaaggagagagcttcggaaatgtgcctgggtcaggtgggggattcagcatcaggacagacagcagccacgctgaaaagcgtcatgggaggggcgtcgggtccatggggagagaccagagcgggcccaggtgggagtggagcccatacttcatggccgagaaaagcaggcaagtttggagaaggcgtgtccaaggtgaaaggagaaccagacacagggctgaaggtcaaggacagaggaggctggagcctcatagcagggtcaggggctgaggaacgactgcggaccagcccaggcgacgtggagggaggacaccatcctgccaagggccgatgggtggcacggtgggccagggcaaggcgggtaggcttacaagtaaatggggaggggtgggggcagatgagggaggaaggagcaggcagcagagccagccctgatggggcaggagggtggcagcctagggtactttgccacagaagaggctgtggggctgaaggcatggagcagtcctcgcaccagaaggggagcatgcctcgtaagccccaagtcaaagaggggcctggtcacgagagtcatgcaagggtgggtcacaggcattgtgttagtgccgtgctgggggcacccaccactcactttccttcctttcagcctggccgagtcctcctcatccatcaagtccagg

SEQ ID NO: 678 - DNA, 897 bp, Artificial sequence
  DNA replication origin
ccccttccgggaggtgaggggcgcctctgcccggccgcccctactgggaagtgaggagcccctctgcccggacagccgccccgtccgggagggaggtgggggggtcagccccccgcccggcccgccgccccgtccgggaaggatgtgggggggacagccccccgcccggccagccgcctcatccgggaggtgaggggcgcctctgcccggccgcccctactgggaagagaggagcccctctgcccggccagccgccccatccgggagggatgtgggggggtcagccccccgcccggccagccgccccatctgggagggaggcgggggggtcagcgccccgcccggccagccgccccgtccgggaggtgaggggcgcctctgcccggccgcccctactgggaagtgaggagcccctctgcccggccaccaccctgtctgggaggtgtacccaacagctcattgagaacgggccatgatgacaatggcagttttgtggaatagaaaggggggaaaggtggggaaaagattgagaaatcggatggttgccgtgtctgtgtagaaagaggtagacatgggagacttttcattttgttctgtactaagaaaaattcttctgccttgggatcctgttgatctgtgaccttacccccaaccctgtgctctctgaaacatgtgctgtgtccactcagggttaaatggattaagggcggtgcaagatgtgctttgttaaacagatgcttgaaggcagcatgctcgttaagagtcatcaccactccctaatctcaagtacccagggacacaaacactgcggaaggccgcagggtcctctgcctaggaaaaccagagacctttgttcacttgtttatctgctgaccttccctccactattgtcctgtg

SEQ ID NO: 679 - DNA, 1212 bp, Artificial sequence
  DNA replication origin
gaggcgcccctcacctcccggacggggcggctggccgggcggggcgctgacccccccgcctccctcccagatggggcggctggccgggcggggggctgacccccccacatccctcccggatggggcggctggccgggcagaggggctcctctcttcccagtaggggcggccgggcagaggcgcccctcacctcccggatgaggcggctggccgggcggggggctgtcccccccacatccttcccggacggggcggcgggccgggcggggggctgacccccccacctccctcccggacggggcggctgtccgggcagaggggctcctcacttcccagtaggggcggccgggcagaggcgcccctcacctcccggaaggggcggctggccgggcggggggctgacccccccacctccctcccagacggggcggctgacccccacctccctcccggacggggtggctgccgggtggagacgctcctcacttcccagacggggtggctgccgggcggaggggcttctcacttctcagacggggcggttgccaggcagagggtctcctcacttctcagacggggcggccgggcagagacgctcctcacatcccagacggggcggcagggcagaggcgctccccacatctcagatgatgggcggccgggcagagacgctcctcacttcctagatgggatggcggccgggcagagacgctcctcactttccagactgggcagccaggcagagaggctcctcacatcccagacgacgggcggccaggcagagacgctcctcacttcccagacggggtggtggccgggcagaggctgcaatctcggcactttggggggccaaggcaggcagctgggaggtggaggttgtagcgagccgagatcacgccactgcactccagcctgggcaccattgagcactgagtgaacgagactccgtctgcaatcccggcacctcgggaggccgaggctggcggatcactcgcggttaggagctggagaccagcccggccaacacagcgaaaccccgtctccaccaaaaaaatacgaaaaccagtcaggcgtggcggcgcgcgcctgcaatcgcaggcactcggcaggctgaggcaggagaatcaggcagggaggttgcagtgagccaagatggcagcagcacagtccagcttcggctcggcatcagagggagaccgtggcaagagaggg

SEQ ID NO: 680 - DNA, 1582 bp, Artificial sequence
  DNA replication origin
cagacggggtggtggccgggcagaggctgcaatctcggcactttggggggccaaggcaggcagctgggaggtggaggttgtagcgagccgagatcacgccactgcactccagcctgggcaccattgagcactgagtgaacgagactccgtctgcaatcccggcacctcgggaggccgaggctggcggatcactcgcggttaggagctggagaccagcccggccaacacagcgaaaccccgtctccaccaaaaaaatacgaaaaccagtcaggcgtggcggcgcgcgcctgcaatcgcaggcactcggcaggctgaggcaggagaatcaggcagggaggttgcagtgagccaagatggcagcagcacagtccagcttcggctcggcatcagagggagaccgtggcaagagagggagagggagaccgtggggagagggggagggggagggggagagggagaggacgttcttacggttcatggcaagacctcaaccaaatactccatatttctggaaaggggtcagtgccccatgatttgagagggatgacgtgctggccaccagggacccggctgagaggaggacccagtgtgggcaggacaaagtgagttcctgggacaggtgcctataggatgcttggactggagtgatatgaaccccacgcccaggctttcagggttgacaccatctcggggttcaaggttcaagttcaccagtccccacgtcccgctcccccgctgaagcatcaggatggacgtgaagctgttcttcagaacagaagaacctggagaacgatgttttcaaacaccaagatcctagaaggcgagtactagaaggaatttaactgcagcctgtgccactcagcttcacgaggaagaaagcggcgtcccaaagcatttgtttgttcacctcttgatccccctagaccagaagttcctcaagagtagggaacagctcttcgtccacctttttccttccttgccccaacactgagggtctggtgtgttgtgtcccacgtagcagtgggggctccggccaaacaaggtcacggaattggaaaagagtaactgtgccctcttttgcatttttcagtgaaagtcaactcctcctgcaggtgcaaaagattgttttttcacaactgccccaagaagaccaagtgaacaagagcgtcttggtggaggcctcacttgcgtcccctcccatgttttctctgccttccctttcctctgcctcctcctatagtctcaggctaagctgtgctgtcccctggcctcaagacccccagcagcgttgtttggctccccagcagctagacacctgcatggatgtttgtcgcagaaggtttgactcccaaccagccagcagggctgtgtcttcttcacagtgtccctggtggagcacggcggggctcggcacacaggaggtgcctggtcactggttctcgagttagagagcggtcattacgtgtttctcacgtgcagcgcacgtgcagcctggcacaatcctctgggtggggctgactgcgcggcaccagcacagtccgcagtccttcccacgcaggaccttcatttttcccagtccagt

SEQ ID NO: 681 - DNA, 1446 bp, Artificial sequence
  DNA replication origin
tgggtcaggcgttgctgggacaggtagaacggtgggaagggccaggcgtgcctgctaagcagcagtgctctggcaggtgcaggtcggagccccgcagggcagtgagagttgaggcggaaaagttcccaatccctgagagctccagatgccttactaggagattgagtctttattctgtagatgggaaaggccctggaaggtatggataagggagtgacttggtcctggggctgtgcagtcggggccagttaggatctcagccaaggcaagaggcaagtgcagaggccatggggggtgaggggcagtgcagaggccatggggggaacaagaggccagtgtagaggccatgggagggctagaggccagtgtagaggccatgggggggctagaggccagtgtagaggccatgggggggctagaggccagtgtagaggccatgggggggctagaggccagtgtagaggccatgggggggctagaggccagtgcagcggccacggggggtgagaggccagtgcagaggccatggggagtgagaggccagtgcagaggccatgggaggtgacctccccaaacagtgtctgattgtgtggttcctggacttcagcctccccagcctcccctcctttcaggatggatccagactttgtctcagccctgaggccctgcatgacagctgcgtccctgtctcaggacatcgcttcttcacccccttttgggccatgcgccagctttgtggggttgctttctgtttctggagctcgctgggcactcctggccttgggccccgaacattccctctcctcgtagccttctcggacctctgctcctggctcacccttcaggacttggccaaggtgtcacttcctctgggaagctttcccagagattaggtggggtggcgcccttctgggagtggctccttgacccatgtgtgctcagcttcctcagagcccttgtcatcagctggatgccacctccagaggggacaccggccgggagtggggtggctgagagtgggttggcagcatctgcgtccattagccttgggccccagcacctgccactcatgctacaaggactggacagacatggttctgatctgggacaggagcagctggaacagaaaaagggtggggctgtgggcccgggtgacattccagacctgcagtcagcccgggtcactggctgccaggacccggcaggcagaagatagagcgggggatgtttggggccaggcccagagaaagaaggcagccacgtaggaaaggccccaccctgggcagcttgctttctttccttgaagtttctggggtcagaggagggggaagaagtgcaggattagcgtgttgggggctgggggaggaataacatgtcagactcagcagtaaacagtcctccagaactgggccaggcctgtgccgttgcccgagctggcctgtgtct

SEQ ID NO: 682 - DNA, 1726 bp, Artificial sequence
  DNA replication origin
gccgggcctgccagacacctgcgcccttctgcagccgcccgccgcatccgccgccgcagcccccagcatgtcgggcccagacgtcgagacgccgtccgccatccagatctgccggtaagagagggcccgcgcgcagcctgcagcggccaggcgcgccggtcaccgccccaggcctgccccgcttggctctgtggtccccacccgccgaggccgcccccgcccgccgattccccgcacggccttccgcgccgccgccccggacgcccgcccggccgggatgcgactcgcgatgccgcacaagccgggcggcccccgcccgcctccagccggctcctcctggccgcatctccagggcggcggccgcgccacgggccgtttgggcgagaaagccaggcagggacggggcgggcggaggtcaatgcacagctccagagcccggcgaccggcgcccgtgggccgccccgcctcgggcctcgcccgagcatcccggagcctcagccccgtggtcctgcttagcctcctcgaggattcgggatcattacctcggcggttgtgctgcgctaaccaaagcccccagaggtggaggggaggtgcccagagccgcgcgagcccctcggtgggtgcccctgtgggaggaggttgcagagctaccgtcttcagtgcactgcttcggtttgggggagggcaggtgttgaaaggaagaacagataatactgtctacctctaacagtttactatgaagaaaagggaatcagtggtctgttgggcctgaaagcatcttacacaatagaggcaaagggttgtccttctagagcaccccctcttcttccaccaggtactgagtagatagatgcaggcccccagaggaagctggaggctggagatcatgaacaagctcatttcccataggaggtggggagggcagcctgaaggttactctgcagttctcttcggcagaatcggaagcagcaggctggcatttgtgcatgagctaagtgaggacaaggagtctaggttttcagccactgcacacaggctctgtggcctgcgaccggtcctatcctgcttgatgaactaccaggagtgagagctgctttctgttttggtagtgggttcctcacatttgggggttgggcatcacagactgaccttgggctcaagccaagtccaatagaagcaagttactttcctgtagatgttgacatctccaggaaggctgggcatatagcaagtcctgggtctatggcgattcttgactctcagtctcatcttctggcctggtcgagggcctctccttacctcaaggtcggttttgacttttccagagggggaacgtctttgggggagccctgcccctttgactttggctctgtggctgttctggtcccatcgactctggaggtggggaaagcggggcaaaaaaaaaaaaggaaataactggagacagacagcctgcatcaggttcctgaatcagctctgctgagtattggctgggaaacttgggctccatggtttgcaaagagcttatacctgtctcatcccacttggtttgcccaattccctgggaggttgatggtcggtagtgccacccttacctgtgtggaggaggaaatggcagttttgggagttgagtaactgtgtaaggtcatcctgctccaggagatccagggacagcccctgcccaagtcttctgactccagatccagtattcttcccacccctctcc

SEQ ID NO: 683 - DNA, 1071 bp, Artificial sequence
  DNA replication origin
ggggagggcagaggtggagcgatggggctggtgaggcggggcctgcgcgccgggggcaatcgaacgcggcctccccgcgccgaccccgcccccgcgccggccccaccccgagccccgcctcccaggccgccaaggctgcagagagctcgcgcgggcgtacgattctggcggcgtgggggcccaggcagccgccgcttccagaaggttcggtggcggttgggccgcgccggtgcggggaaggcccgctagccgcggcagccgcgcccgacccggtggcagccccgagggaagcgtctggggcggcctaagtggcggagcagggcggacttgggccctcactctccgcgcggcggtaaatatttgtgctgggcgttcccggccgcccgcgccgccgattcgctgccgcgcccagtgcctgggcggccggatgaggtcagagcggaaggcgcggcccgggctcctggcagtggggcctgattcccacccccgcccccaacccaccccggcaccagtcgcccgcatcgcggctctcgctaagatcggccctaagagagaatggaaggctgtttcctagaaaggagcattggtggcggctgctgggaagacacggggaatggaacgggcctttgcttccgcagcacaaagcgtcacgaggtggggaggaggaaaggccggcgactatctacaccgccgcctgcagcttttactgggagcgctgagcgccagcctggaggtgcacgtgttgcagtgaggagccctgaaacatgcgtgttttactgcacaagatgtgcccttgaatggagtctaggccagtcggggtcaccaaaaaaaatccaccaaaaaacacccaagaagggagaagcggtcaccccccacgtgctggaatgacagctttttacttgctaggcagttggaccttttccgaattttctacaatgcacatagatttgtacttacatctttaaattaaaacccacgcaactccggctccctagtgcaatttgaacaacccatttacactcagctaggtagctctgaaggaactgtgcctcaccccggtcacccttgagt

SEQ ID NO: 684 - DNA, 1273 bp, Artificial sequence
  DNA replication origin
cctcagcttgcggtgtggtgtggagggagagtcgtgggcggaaccggagctgcgagcggtgcttgcgggccagggcgagttccaggtgggcgtgggctcggcgggcctcgcactcggagccgcggccgtccccgccggccccgggcagtgaggggcttagcacctgggtcagcagctgctgtgctcaatttctcgcagggccttagctgccttcccccggggcagggctcgggacccgcagcccgccatgcctgagcctccccccactccatgggctcctgtgcggcccgagcctccccaatgagcaccgccccctgctccacggcacccagtgccatcgaccacccaagggctgaggagtgtgggcacacagtgcgggactagcaggcagctccacctgcagccccagtgcgggacccactgggtgaagccagctgggctcctgagtctggtggggacatggagaacctttatgtctagctaagggattgtaaatacaccaatcggcactctgtatctagctcaaggtttgtaaacacaccaatcagcaccctgtgtctagctcagggtttgtgaatgcaccaatcaacactctgtatctaactacgctggtggggacttggagaacctttgtgtcgacactctatctagctaatctggtggggacatggagaacctttgtgtctagctcagggattgtaaacacaccaatcagcaccctgtcaaaacagaccactctgctctaccaatcagcaggatgtgggtagggctagatgagagaataaaagcaggctgcccgagccagcagtggcaacccactctggtccccttccacgctgtaggagtgttgttctttcgctctttgggtccacactgcctttatgagccgttaacattcactgtgaaggtctgcagcttcactcctgagccagggagaccacgaacccaccagaaggaagaaactccagatgcgccaccttaagagctgtaacactcaccacgagggtccgcggcttcattcttgaagtcggtgagaccaagaacccaccaattctggacacatctgtactaaaaatacaaaaataagccaaacgtggtggtgcatgcctatggtcccagctactcagtgtggttgaggcaggagaattgcttgaaactggatggcagaggttacagtgagctatcacaccactgcattccagcctgggcgacagaacgagactctatatcaaaaaaagaaaacaggccaggcgtggtggctcacgcctgtaat

SEQ ID NO: 685 - DNA, 1475 bp, Artificial sequence
  DNA replication origin
ggcgcagaactccaactgctcgaagctagagaaggcagacgtcctggaaatgaccgtgcgcttcctgcaggagctgcctgcgtcctcatggcccacggcagcgccccgtgagtgagccctccctgccctgccgcgcgctctgcaccccgcacccggcaccctaccccgcgcctcacgcggctctccgcccgcagtgccttgcgacagctaccgcgagggctacagcgcctgtgtggcgcgcctggcccgcgtgctgcccgcctgccgtgtcctggagcccgccgtgagcgcgcgcctgctggagcacctgtggcggagagcggccagcgccaccctggacggcgggcgcgctggggattccagtggcccgtctgcccccgccccagcgcccgcgtctgccccagagcccgcatccgctccggtgccctcgccgccctcgcctccctgcggccctggcctctggcggccgtggtagcccctcggccgatccacagaccctgccgactgcttgggaccttggggcactggacaggttgaagctcttggtggcggctgctgttcccatcattaggggccagcccagtacccacacccaggccggaagccggctgtttgtgactggcgtggcagactgaaagccctggggctggggctcggctcagggaataaaaggagcgtccctgcttcacccccaacttggctggagaagaaaggacaagaggcagcagggtgaagaagaagccccccatcccagctggtggagatagttctggaactggaccccgcagctgcgtgggcagccgacacacccaccccagcactggcaccagaccagagccagagccaggacctgggcaaagtgcagccgtgcaccctgcctggtcactgctctcccagccctgcctgggcctacctcctgcccagctctgcttgggaccctctgggcatgcagcagcagtagcctaagggctctggtcacttccagggctctacagggcagcagagcagagcaaaagggtgcatatgctgggagctgtcacctccactcctaggcttttctgcctagagcagaattataggggcagtatacatccaggggtctgtgcggtggggctgggggattccttaagtgactttgggaaggatttgttttcccgagcatcaatttcacacctgggcattgcaccccaggctatgcagtctttcagtgtgaggaaggggcagaacaagaatgaggcggccccgtggcctcaaggaagcttgtggctttggaggatctgactccagcagagtctgtgccaatgtggggtgagcagggcccctgccatggagcagcaggaatttgagggatggagcaggttaaagaatgggaaacatcttcacttgtttttttttcttgcaaactactccctgctactcattgagactggttactggaagcaacttgttaagatttttctttctgggcgggcgcg

SEQ ID NO: 686 - DNA, 786 bp, Artificial sequence
  DNA replication origin
ccgagccccagccccagggctttcagtctgccacgccagtcacaaacagccggcttccggcctgggtgtgggtactgggctggcccctaatgatgggaacagcagccgccaccaagagcttcaacctgtccagtgccccaaggtcccaagcagtcggcagggtctgtggatcggccgaggggctaccacggccgccagaggccagggccgcagggaggcgagggcggcgagggcaccggagcggatgcgggctctggggcagacgcgggcgctggggcgggggcagacgggccactggaatccccagcgcgcccgccgtccagggtggcgctggccgctctccgccacaggtgctccagcaggcgcgcgctcacggcgggctccaggacacggcaggcgggcagcacgcgggccaggcgcgccacacaggcgctgtagccctcgcggtagctgtcgcaaggcactgcgggcggagagccgcgtgaggcgcggggtagggtgccgggtgcggggtgcagagcgcgcggcagggcagggagggctcactcacggggcgctgccgtgggccatgaggacgcaggcagctcctgcaggaagcgcacggtcatttccaggacgtctgccttctctagcttcgagcagttggagttctgcgcccggccacgaggaagagcgacagagaaccaccaagacagaactttggccggctaccgtgcgcaccctcgctctagtcgggagctgggtgtggggcgcgccgtggcctgctgggggtccgctccgacgcgc

SEQ ID NO: 687 - DNA, 1176 bp, Artificial sequence
  DNA replication origin
tttattcttacttgttaggtcttttatgagggttaatgcaggttagcgagccttaaagcgttaagccctgagcttggcacacagtaagtgtccatgaaaggtggcctacattccttcccatgccacagataggtatgggtggcctgggctcccctggcccaggcttctccgggcccctcagtgtgttcgctggccttcttccaccctgcggcgagaaccctgaaggagggagacgtggggctagcggcaggggtggagctcggaagtggggttcgggggacagggggttcatccaacaccctggacagagccctccttggccccgccccataggggaactcctcctggctggctctgtggatccctccagtcatctctctgcccggcagttcgcagtgtggttcgcgggcgtggccgttgccccgccagccggtcgggggaggggagcccggagcagatgggcgggggacgccagccagtttgccgcagcaacggccacgcggcgcgaaggcggtcctgggcgggccactggggcccgcacccaaaactgtcctgcccgcgcgtcacatgagccctgactgtcttgcgggcgagaacccggacccctagccggtgggaatgaaaacgagctccgagggctccagggctgcctctgcttctctaggattccgtttccccacccaaagcctggagtggggtaaccaaaagactcttaactaggcaagccgccgaagggttctacgggctccttagagccgggcgtccagcgactggggcccttgtccaggctcggcctgttcccagcgtcgaggactggagcaagtcacgacctttctccggaactcggatttcccgtccagctcagcccttcacccgataaagcagctgggggtgcaagtccctcccgctgctgtccctcatgggagctcccgtaaccgctgggtcccctgctgcggcccagggcggggctcagagaagacgctgaacccgagcctggggaatgaatgaagggcagcattggagaggagggaccgtagctccagtcaggcaaggcctggccccacctggccctcctgccctcggggtcacgcagcgaaggcccccgatggcgcctttaccactctcccgcaggtgctcggggaaaactgggggccgccaccccgcggtagacaggac

SEQ ID NO: 688 - DNA, 1815 bp, Artificial sequence
  DNA replication origin
gcgggagggacttgcacccccagctgctttatcgggtgaagggctgagctggacgggaaatccgagttccggagaaaggtcgtgacttgctccagtcctcgacgctgggaacaggccgagcctggacaagggccccagtcgctggacgcccggctctaaggagcccgtagaacccttcggcggcttgcctagttaagagtcttttggttaccccactccaggctttgggtggggaaacggaatcctagagaagcagaggcagccctggagccctcggagctcgttttcattcccaccggctaggggtccgggttctcgcccgcaagacagtcagggctcatgtgacgcgcgggcaggacagttttgggtgcgggccccagtggcccgcccaggaccgccttcgcgccgcgtggccgttgctgcggcaaactggctggcgtcccccgcccatctgctccgggctcccctcccccgaccggctggcggggcaacggccacgcccgcgaaccacactgcgaactgccgggcagagagatgactggagggatccacagagccagccaggaggagttcccctatggggcggggccaaggagggctctgtccagggtgttggatgaaccccctgtcccccgaaccccacttccgagctccacccctgccgctagccccacgtctccctccttcagggttctcgccgcagggtggaagaaggccagcgaacacactgaggggcccggagaagcctgggccaggggagcccaggccacccatacctatctgtggcatgggaaggaatgtaggccacctttcatggacacttactgtgtgccaagctcagggcttaacgctttaaggctcgctaacctgcattaaccctcataaaagacctaacaagtaagaataaatccttcaacagatttggcccagcagggcttggaggaacctgagaccttgttctccgtggttgaggccagtttgactccataggcctcccctaagacaattaattgttctttaagagctcaaaaaactctgtggatcttttccctctcatccccaggccaagcgacttagcttggctgactcaggtctgcacccacaagtccgcctgcagcatctgcatcttggggagggactgaccctagctcctgggagaaaaaggctgaaggaggaggctccccttagaacatccccctccaggtttgcggaccaccatttgaagactgaatggcaggggagcaaacaccatttccattgccagttacccccagttaaaaatatttcttcctctactctcccattgggtaaaggactttaaccaagtaacccacagttctcttcaactcaaggattttcaggttttgctggttacttggaaggagtggtctggaatcagaggaacgttaaagacagctaggtgggcaaatgtcgggtgcaggctttaggggaactgggaccacctaggatacagtaaggatacactccacccctggtccctattcttgggaagtgccctggcccttgggttgaggagaaacctggggtgggctggggtgagcccagcagaggggtgagagaagccctcctggggagagaatccctaagctgatagctggagggtgggagactctaggggtgctgtgggcagaaggaaccttgggtggagaggaaagaagagcccagaaggctcagccagggagtgaaagctttgccacttcccatctgtgtcatctcaggcaaaatgctttaaaaaaacaaaacaaggctgggcgtggtggctcatgcctgtaatctcagcactttgagagacca

SEQ ID NO: 689 - DNA, 1249 bp, Artificial sequence
  DNA replication origin
actttgagagaccaaggtgggcagattacttgaggtcaggaattcgagaccagcctggccaacatgatgaaaccccatctctactaaaaatacaaaaaataaaaaaattagctaggcatggtggcgggcagacacctgtaatctcagctacttgggaggctgaggcaagagaatcacttgaacctgggaggcagaagttgcagtgagcctagattatgccattgcaatccagcctgggtgacaagagtgaaactccatctcaaaaaacaaacaaacaggccgggcacagtggctcacgcctgtaatcctagcacttcgggaggccaaggtgggcagatcacgaggtcaggagatcgagaccatcctggctaacacaatgaaaccccgtctctactaaaaatacaaaaaattagctgggcgtggtggcaggcacctgtagtcccagctactcgggaggctgaggcagaaaaatggcgtgagcctgggaggcggagcttgcagtgagctgagattgtgccactgcactccagcctgggcgacagagcaagacttgtctcaaaaaaaaaaaaaagaaaaaaagaaaaaaaaccctccctatctctccatgcctcattatccccgactgtgaactgggaacaatagttgtacctctctcatagcacctctggattaaatatccatgtgaagcatggtgagcacttggtgggtggtacagatttcataaaagtgctactgctgccgtgagctccctagggctgctggggaggacccaattggcccggtggacatgggagagcccggagaggacagaagcctggcaggaagggcctggctcacagcctgagtttgagtcatgtcccgaaaggagtctgagaggttggtcagcaggggtgggtgctcacatgtggcactaatggagatgtcattaacaacagtggcaggggctcaggggcatctgctcagcccactggaatagcaataaagcatcacctagccctggcccacaaaatcacaaaaccatgtgctagatgagctcgtccatgaccaaggtggccaccttaggagtggagaacacaaattgcagggccttttggaatggaggaggcccaggggaggggtgcccaagacaagccattttagcacctcctcccaacagtacccctgccacttgctggcctcacggcacacctgcctctgggcacccagaggagggcagcgccagccgcagtgagcctgttgctttggccac

SEQ ID NO: 690 - DNA, 1522 bp, Artificial sequence
  DNA replication origin
ggcttcctccaccaggaagcgcagacagtgcagcttcccagcgcgggccgcgtggtgcacgggcagcgcgtccagcgggtcgcgcagcgagggccccaggaggcctgcggcgtgcagcgacctcagcacgtccagctcgccctgccgcgccgcctgcagcgcctgctccagggccatggtgccgcgtgcggcgccgcgactccgcactcagcgccttccccaggacgccatgcacgtgttcttgcgggccagaggagcccgcggtgcggccgtcggggatctgcgggccgggaggcggagcggctgtgggcctggcctccgctccgcgctgcctggcgctccgctccgccgcgctctggggccggagcccgcggacgccggcttaagactcgggcccgcccccaccccgccccgccccgccccgcagcctccgcccgagttccccgcccgcccccgccgcgacgcggggacactcgtgcgactggggcaaggtgcccaggggcttctctcctaatttgcctcacgtaacagttgagaccccagagggcagcaaaactgggttcgaattggagagccgtccaggcacagacaaattcattcatctgcccagtgcccgctaactgcggttccaggcgccggcgacgcaattccagaggtgatggggagtgattgtcgggaccgcgtgggcggacagggaaaggtctctgaggaggtgccgtggggctgggtttgagcggcgagaagggtattccaggcggggtgaggagcacgaggacaacggccctgaggcaggagcagccctgccacgtccctgaagggctctgggtcgaaatccccggagattgcaaagagccctgccttccagggtccctccagatccgagaactgcccccagaggttccagcggggagggcaggaaggcaggacgggaaccactagtgcgctgggaacgccatggcctcaggccgcccgcagccgctgtcggtgtggaggggcttccagccacacagaaggcagggatgggtgggaggttagggcttgtggggagacgcgggagcgccggcatccagagagagggggctgagacccctgcaggggctcaggaaagtgccagagggcgcgggcaggagagcgaatgtgtgccaagccaccctgcaggctccactgaacaccagccgtgggagcggctagtgcccaaaggacgcgaggaaaagctgacagaaggtgggagctacatggctgtgggagtgcaggcggcctatcagcgatcttgaagcaccctgtgcccttcctgtcccaacacccaccccctctggagtcccgtgggggcttggccccaccccgggctgaaggtttcactccgccccagccccagcctggcacagtcagcactggaaatgctgtagaatgaaggaagccccttccaggaacagtgggagtcatagtgctaaactcatagtgctaaactcggcagctgcctccggtcctttccctgggcctgccacctagtggcgacctgcgt

SEQ ID NO: 691 - DNA, 1540 bp, Artificial sequence
  DNA replication origin
gcggagcggagcgccaggcagcgcggagcggaggccaggcccacagccgctccgcctcccggcccgcagatccccgacggccgcaccgcgggctcctctggcccgcaagaacacgtgcatggcgtcctggggaaggcgctgagtgcggagtcgcggcgccgcacgcggcaccatggccctggagcaggcgctgcaggcggcgcggcagggcgagctggacgtgctgaggtcgctgcacgccgcaggcctcctggggccctcgctgcgcgacccgctggacgcgctgcccgtgcaccacgcggcccgcgctgggaagctgcactgtctgcgcttcctggtggaggaagccgccctccccgccgcggcccgcgcccgcaacggcgccacaccggcccacgacgcctccgccaccggccacctcgcctgcctgcagtggctgctgtcgcagggcggctgcagagtgcaggtgggtccgcgcggttcgccaggggcactgaggcttcctcctcaggacagagtcctggcccagagtcccccggggctcaaggatgggtggggtttggcacctcctggcccagctgaaccctgcacggagctccttccagaggccctcaagtgaatgggctccctggcttgccagtactggggcagatgccctggcgagcctgggtgctccctggaagcgcacctgggtgatgggagccagaagggaggggcctccgtggggcttgtggttactagtgtgtaccgggagaagcaaagcactgatcctgtagtcctggaagtgggtgggacgtgaggcctgggcagcagagtcagacgcccgtgtcctccaggaccggatctgaaaggaggctgggcaaagtcccacagcccacccgaggctgagattcaggtgtcccagccagggtgtgggggaagggtgatgagccgtggtaaatgggggtctccccataacccaggctgaccccaggacatcagtgctgtcaagctgtcagctgcttctccaacccaggctgattcttgctgcctccagaccccacctggtcactctgagcagtgacctccaaggggagtcctggctgctgagaagcaggtagccaggcagcggtgggacagttccaggcacagggaacaagaagtgcagagccctgaggcatgcacgctcttgtcctgtcggagggccagcctcaggcatcatgttcagagtgggtgaggaagggaaaagctgccagggccaggccagagagtatcataggccgaggttagggatttggatgaaattctgggtgtgggggcagccatgggagggaggaaccacaaccgatttccacttagaccactgggtgacctggagatggaaggggaggagtcagggtaactctaaactggcttactatgccccaaagatggccaggccaaccccaccttctgccttcagatagcaagcccctcttcccacccttcctgggagatggcccacctgctatctctcagtgggccctgttaccagggcttcctggccaagtggcccatgccc

SEQ ID NO: 692 - DNA, 1517 bp, Artificial sequence
  DNA replication origin
ctgaaccgtagccaataggcagcaccgtgcagggttttcagaggctgcaggtcctgactgcgagctgcctacacgacaggcacctggttgtcacggcaggagactggcaccaggcccagggccacagccctgactcccagggactcagggaatgcctgaaggagtgacacagggttactgggctgagcagggccaggaaggggggctgtggggctgtaccaagctagcatcaggattgggggtcaccccctgcatccaacacttgcccccgatctctccacccttcctcggtgtcacgtgggaacagagacctccaccttggtacgcctccaggaacccaacctcagtgcagaaaaccggcccctcccccagcagactcgccagtgcccagccacaggagcagcctgtgttctcgcccctgtggaggtggaagttgctgggtactggtgggcgggtccggggcagtcagccaggggtgctaggtgcaggctagtggtggcctctgggagggcttggacaaaactccccccggggacctcagagcaggtggggccagaggtctgggcccagaactgctgaatgtgtcatcagtgcacaccccattgtgtgtgtctgctgagaaaggggctggaggggagtgcttacaggacctgtgctgggaggagaattcccgggaacatctagacacagaggctgccgcacttggcagagtgggtactggttcgggaacagaaccacctcccagcaccaagcacataggatgacagaggggtgggcagggttctgggtgcaggatgcagtggacacacttcactaggatcagggagtaaagcctctctgccccgccttgcccagagagagggcactgtggttacagactggcagaggcggcaggagctggcaagagaccccaggcctcaggaagtcaaatcacggtgggaagagaacctctgaggctcccgtgagaaatgcaaggaaaagagggcacggagggagctgggggcgccggggccactagtagggtcttcaggcagcctgcggggtgggggcaattgtctggctgtcctgctaaggaggcagggaggaagatggggcagagaatgtgatggcccataggaagctgaggacaacaccgaggcccctcctgtgtgctagaaagctgggagtgggggggccagagactggttcagtctgtcccctccgagcccaaaggtcggggctggctagcgggcacccaggcagaaccatggtgaaatgtgacctaagccccagctcctgagaaaggcgctcccttcctattggccttggggactgtgggtctgaagctccaggggtcccactggctctgggcctctaagtggtggaaactgtaaggagagggccacaggcctgtgggctctggcctgtgcctgtccaggctgtccaggtgtccaggccccaggagcctcgtgcgtggtggaccacaccctaaagcagcttatctctctgggctgggcaagcccaaggatccaggtcat

SEQ ID NO: 693 - DNA, 1020 bp, Artificial sequence
  DNA replication origin
gcaggtgctcccagcatcctcagctgcccggccgcacacagctggacctgggaggctgggcacacaggccaaggtcacctgttccccttgggctgcttctgccgcaggggctctctctggctcaggctgtgctcatttgcaagactgttcaggatggagtcgggggcagcaagggcaggagcgcctcctaggccctagtcaaacaggcagaaagggaaccccatcagttaccaagcagttaagggagaaaggcccctcccagacccccaccccacctcctggccccagagcccctggctggaggccatccagagagcatcttgttatctcctgtggcccctcagcccgttcctactatcaagggaagcatggggatcccaaacctcctggggagtgggctgggagctcccctgggtggggtggggggtcacacagagcagggggcatgtgtgagtcttggggagggagggagggagggagggactcaggtgttaggtgcgcctggggaggcagggatcctggggaaagctgcccagggcctgtctgagagggtagggtgccagatgccacaggggtctgagcggggagtggggtgctctgatgggtgaccctcattagtctaagtgggagcctgagatgtaaatgtgaatgtggacccagcctcaggacgagagcagctttggtatgaattcactgcttccaaacaaactaggatttggatcatgtcaaagtcagtgggatttagactaggagggccccagggacccttgagtagagggttccaactggctcctgtcagcacctcttggaggctgtcccagattcctgagttagactctccaggttggggcgtgggagccacacctgggacatgtccccaccctcacggcggtgattctgatgcacctgtcccaccccctcacttcaagcagaggagaaggacaggtcttgagaggggcaggtgcccctgatggcgggaccaatatggcccaagtgtgaactggaggacgctgagcccac

SEQ ID NO: 694 - DNA, 924 bp, Artificial sequence
  DNA replication origin
tccggctggctgggcacccctgggtcatggatctctgccaagtggggggtgctgggagagcagagctcaccgcaggtctggcccccccaccagctgtgcagaccgccgtgggcctctacagatagaacccagtgggcccccaccagcccctgatccccaagaccccggcactcactgtgccttggttacggggtgaataatttaggccgctgagtgtcagtcatgaaatattcaacagcctgttcctgacgcagcagcatgtgagtgtgcgtgggggtgacgctggcgctggggtgtggaggctggcagccacgagccagcatgtttctgaagatagatacgtagctgtgtcttctgtctccctcatctatgtcgacgggaccccctctggatcaccaggcatggtgcctgctccccgcaccatcgtgaagtgccgggctcagcatcagccccagcaaatggcagccctgtgtctagggagtggggagggaggagaaatcagtgagtggaggtccatgggggctgcagacagccttggggtctcaggagtcagggaagtagacagagaaccagggctttagggacagggagatgccagctgggagggtctcaggatgtgtgtgagagggagggagagggcacacgtgacaggggtcagaagaggggctaagtcgtgttgggaacaagagggtgggtgggcaaaggggggtagcctggtgcccattgatgggcaggcaacaagcggatgggcagttggatgggtgagcgagggatgaatgcggggtggagcatgtggttgatctagggggtgaaacactgggggaggtagatgggcaggatgtgaagtcctgtgaagaattggcctcctaagcacaaaaggtgaattggaacccaataggtcgcggcccccaacctggagcttct

SEQ ID NO: 695 - DNA, 966 bp, Artificial sequence
  DNA replication origin
ggtgggtgggcaaaggggggtagcctggtgcccattgatgggcaggcaacaagcggatgggcagttggatgggtgagcgagggatgaatgcggggtggagcatgtggttgatctagggggtgaaacactgggggaggtagatgggcaggatgtgaagtcctgtgaagaattggcctcctaagcacaaaaggtgaattggaacccaataggtcgcggcccccaacctggagcttctcctgggtctggggatagattgtggctccacctagtgtccttcggtggtaactgcaccctggctgttcacctggacacaccaggccagccatagaccctcctggtggctggtcctcccaggcacaaggaaggatcctaaagttcagcaatggctgtgcgccaggcaccaggcctgtgctcagggctctgcaagcacttctcaggcactctgcacaaggtcaggatgacaactgttgtccccatttcatggatgggtttgggaagacaaagagacaagaagcaagactgtggcacagctcaaaggcccccctctgggctgggagagcaaggataagggacagtgacagccgaaagctaggccctaggagaagcccctgagacacattccagctcttcagtccctgcatgcccatattgccggccaggccctgcatgcacagacagatgggtgttcaaatgccacttaccagctgtgtgaccgaggagagagctgagtctgtgcctctgttgtgggactatgggtgatggcacagagtcccagccccacctgtgagcctcctcagctgcagctgcaccattgactgaattctgattctggcaggtcccctgctaggtgccttaccggtgtaatctcagttgatggtcatagtaatagttgatggccgggtgcggtggctcacacctgtaatcccagcactttgggaagctgaaacaggcggatcacttgagctc

SEQ ID NO: 696 - DNA, 909 bp, Artificial sequence
  DNA replication origin
ggagtccgagactagcctggccaagatggcaaaactgggtttctactaaaaatacaaaaattagccaggcgtggtggcacatgcctgtagtcccagctgcttgggaggctgaggcaggagaatggcttgaacccaggaggcagaggttgcagtgagctgagattgcgccattgcattccagcctggatgacagagcaagactccgtctcaaaaataaaaataaaaaagaagaacctgcttgctagtgccgtagcccagagctagcacagcagaagcattcagtacatagtggacatcctgagggctgccagattaacaaaaacagcaacaaccaaacccaggacgtttgactagctttgaatctcagataaacaagctgtactttagtataagtatgtcccatgcaatatttgggatatagaatactaaagcattatccgtttatcagaaattcagattgaattgtgtgaactgccttttgtctggcaacccttaccaccctgccctctgggaactcagtcttctgggggaggcaaaggtcaaaatcagttatggtcaaccaagcatgacaggtcatgctcaagtggccctgggcagtgtggggcggaggccagcaagggggaaataaatcagggtggccctcatggaggagggatgggtactgagtcttcaagagggaggagaaggacattccagatggagggggcacacaatgaaagggatagaggtcagacacagcaggtgtggggattcatggtgacagtgggtgagaggggagaagaggccagctcaccacatctttgtagacctcggttaaaaagtgggactgagcctgggtgcggtggctctgtaatcccagcactttgggaggctgagatgggcggatcacgaggtcaggagttcgagacc

SEQ ID NO: 697 - DNA, 1303 bp, Artificial sequence
  DNA replication origin
gggccatcaggggtggggcgggggggcgggggcgggccacggaggtacagggggcgggcctacaggggcctggcgcccagcccccgcccccctctccccgcccgtcccgcccaggtgagctgcaccgacgtgagcctgtccgagcaggacaaagacggcgccaccgccatgcacttcgcggcgagccgcggccacaccaaggtgctcagctggctgctgctgcacggcggggagatctcggctgacctgtggggcgggaccccgctgcacgacgccgccgagaacggggagctagaggtcagcgcgggcccggggtgggggcgcgcgccctctgctggcaccgcgctttcagcacggccctgcccgggcgcgggggtcccagctcgcggccgcggccgggtcctcactgcgtgcccccgcagtgctgccagatcctggtagtgaacggcgcggagctggacgtccgcgaccgcgacgggtacacggccgccgacctgtcggacttcaacggccacagccactgcacccgctacctgcgcacggtggagaacctggtacgatccctgagctgctcctgtcgcattctttcttctcgcccctccaccccagtggtgggtgtcgtcaccccttttaccaaggaggaagctgaggttcagggacgtgaagcccgctaccccacacgacctctcagcccagaaccactgcctactggggactgagggagtagaggcacaaaggtcaacggaaagaggacagggaagaccagagtcaccccaaggggtaaggctggagaaatcacaagacaggacccactgggaataggcaggctcattcacctacccatagacattagcttgggtataactcacagccaccctctgcagaaaagagtgtttaagtgtcccgttccacatatggataaagtgagtctgcggggcaccaagatggcatcaccagtaactgttagagtggagaacctaccttgatggcctggccaggaggcacctctcagcccctgcaccatacatttgctgacttcatggctgggtcataactggaaacccacgctactctttttaaattatgttattatggtgagacagccatgaagtgacccaatgggacttgaactcagctgtggatgtctccaagtgcagggctctgcaccatctggtacaatgcctgctatgaggcaataggcagggaagagagtgggcctcgcagtcaacccgaaaaggatgcggaccaactccatggggcagcctggccatggaggggctgtgcaatgaggcccggagggaag

SEQ ID NO: 698 - DNA, 1273 bp, Artificial sequence
  DNA replication origin
aacccggccactctgtgcaagaggtggcacaggcccagttcctggtgaggcacagctgtctggacctgcgtccttcaccccccagctcccatggagggcaatgacctgctcttactctcctcccagtccagtgtccagccctgaccccttgtgggactcgccaggagctttgactcttgaacatgccatggacccagggatccccaccctatgcccactagtgaggccaggcctttggcctcactggcccccatcagcccagtccccctgctgggaggcaggcagggggtgagggctcactacctccttcttgagggcctctgtctccacgtggcggagtttgttcttggtctgcatgtagatgtcagctgcctgtggtcctacaggaggcttgggagctgggtagccaggtgggggtgggggcagttgggtgcctgggggcgggggtggcggggggaagctgggtgggggtggtgggggtgtgggcttcccaatcgtgccccgaggcaggcccagctccgggttcagcatgtccatgtagctctgtatgtctgcagctctagcgctggaaagccctggggaggcagaaggaagggccagatttgggagcatgcagacaggctgtcccccaagactgagactctccaccacctggaaacaacttgccgaggggcaaggtgggctccgggcaccacttggtacacctgctgtggcccctggcggtgctgggcttcccctccctggccctaccctgccccagcccagcacttactgggggaagaccaggcactccggtttggaggggaagcactggaggctttggtgtgtctagagggcagggtcacctggaaggggagggtctactccttgggagtacggatggccacatccaatctttgcagggcacccctgccaggtctggaggccaccatctggcggcgtgaagcaggcattgcaagtggacggacgcccatgctcagggcacggtcagggtgtgtgtacacacaagcctgcagtctgccgaggcgatcgtgcatttgtgtatgtttgagggggtacgcatttgtgcacatgcttctttgtactgatgaatgtgtgtgcattgctctgtggacatggtgtgtatgtgtgtgtgtgtgcgtgcatatctgtagtatggaaatagagcactgtgtgcttgcttgtgtgtagggtgggtgtgtgcagatattcgcatggctctgtgtgttcatatctgtatgctgtatgtacacatgtacaagtgtgtgctttt

SEQ ID NO: 699 - DNA, 1680 bp, Artificial sequence
  DNA replication origin
agggccagggaggggaagcccagcaccgccaggggccacagcaggtgtaccaagtggtgcccggagcccaccttgcccctcggcaagttgtttccaggtggtggagagtctcagtcttgggggacagcctgtctgcatgctcccaaatctggcccttccttctgcctccccagggctttccagcgctagagctgcagacatacagagctacatggacatgctgaacccggagctgggcctgcctcggggcacgattgggaagcccacacccccaccacccccacccagcttccccccgccacccccgcccccaggcacccaactgcccccacccccacctggctacccagctcccaagcctcctgtaggaccacaggcagctgacatctacatgcagaccaagaacaaactccgccacgtggagacagaggccctcaagaaggaggtagtgagccctcaccccctgcctgcctcccagcagggggactgggctgatgggggccagtgaggccaaaggcctggcctcactagtgggcatagggtggggatccctgggtccatggcatgttcaagagtcaaagctcctggcgagtcccacaaggggtcagggctggacactggactgggaggagagtaagagcaggtcattgccctccatgggagctggggggtgaaggacgcaggtccagacagctgtgcctcaccaggaactgggcctgtgccacctcttgcacagagtggccgggttgtcatggagttgacagagaatgcatggagactgcccctccccaagcatgcccccccacccccacagccccaggctcagtcggagagtgtcacccaagggaggtggctgccaggtggaaggtgccagtggcatggctgtggaggtgagggctggaaggagggtggggggaaggtgagcaggcactagcagggctgggtggaagtgaagctgtggctggttccagtttagggcttgagctcctgggggaaagggccaggcctgagctgggagccctggaaggaagcgagcctgtgtggagaggatgaggccagggtgggcaggtggagtgtgaggtgcctagggatgtctggggcctgcaggcccctggctgaggctctggagcaggggttggggcagaggtctggtctgagcaattccgggtatcccgggcagggtgccctggggaacactggcgttctggccataggaacagagcaaggatggtctaagaggtgaggggacagcctgaggtcacaggtggccagatgtggtgtggcagccccctggggtcctgctggagcctgggaccttgcagttctcaagcccaaggcaaagccaccccagggccaattcataaaaggtgactcgggtcacaaggccactgggcaagggaggcatgggagggacaccgaacctgcaggccagctccagtagctgccctcttcatgccaccttagaccaagctcccacagtggcttcccctttcatctctgggaggcagagggggccctggaatcgctgagttcccaacgcagactgttggccccgcccaaatccacaggacaggtggcccagccagtgccccgtctccaccgttgagcccaagtgccaggtctgcgtggtcccctcctggctgtgtgagccccctcccggctgtgtgcgtccctccgggc

SEQ ID NO: 700 - DNA, 1276 bp, Artificial sequence
  DNA replication origin
ctcgggtcacaaggccactgggcaagggaggcatgggagggacaccgaacctgcaggccagctccagtagctgccctcttcatgccaccttagaccaagctcccacagtggcttcccctttcatctctgggaggcagagggggccctggaatcgctgagttcccaacgcagactgttggccccgcccaaatccacaggacaggtggcccagccagtgccccgtctccaccgttgagcccaagtgccaggtctgcgtggtcccctcctggctgtgtgagccccctcccggctgtgtgcgtccctccgggctgtgtgcgcccctcccggctgtgtgcgcccctccccactgtgtgcgcccctcccggctatgtgcgtccatctcggccgtgtgcgtgctgggccgcaggcgccagggccggggcccggacgctccacaaagggctctttgtgtcgccgcggcgccccccgcgcgggtgcctgaccgggggcgggagcagggtcgtggcgtccgaacctccgggctgcagggggcgcggagcgggcgggctggcccagaaaacaaatcctgcggtgtcgcatttcctgcaacgtgagccaggtcgggcggggtgaagggtctgaggccaccgcagggacgcatgggctggagagtggggcagaggacagcccccacccggtcactcagtctttggcccggccgcctcactctccctcactgagctgggcctagttgggggcagctgcgatggggtgggaagccacgctgtcacccgaccccgccttacggcccctgaaatccgaggcttgagcgcgggtgtcggtgtcgctttcgtggatggcgatggtttccagatgcaggaggggaagggtggggacgcgacccggagccgggggccaaatatgagaggcctcctctgcccacagtcagccctctcccctctcgggcggggatgaaggtgggggctcagctcccagcttagggagaggcgcagggggcggggtcacatctggccggggacgggtgcagagccgcggccaggtgtggcaaagtagttggcgccccctgtggcatccgcgacggctgggggggttcagcctgggattggcgggccccgggtgatgtcaggccgtcggagcccataggctggctgtgcgcgggtggctgtaacctgagaggaagtatcaggtaacgcaggtgtcgggtcctgccgcccccacagccaggtgcacagcgggggccaccagcaccgtggcaggtaggagcagcccccggacg

SEQ ID NO: 701 - DNA, 1562 bp, Artificial sequence
  DNA replication origin
tgagggtaggtatgaggtgcaaggccccacccattcttcgaggttctctcgcctgccagcccctgcccctgccctttcctcaagtctgggccccttctgccttgcttttcctgcctcttccccccaccccgcgcctcagcctcagccaggagccgcgcacgcagctactcactcttcctgtgcctcaggactctcacttctagggaccaagaggagagaagtgacagcggagttaggagggagggggggcaggatgagactgggacagcaggggacagggagcgggccagggagagcgggcgggggggaagtggagaagagaggaggagcttttctgcccatctgaccctggctcaggctgctctggggccccatgagggtggtccatcgagttcctggcttggctggtgcccctgagggctgggcagggccaccactggctctagcccctagcaagggcctccaccttggcactgggttggggtagggcacccagccctggctgtgctgggtgagggtgtctcgggaagcccagagtatgtttttctctgcccttagcttcagccctgctgcaggctgtggagggaagaaggaggttcggcaggtgctggacttgcttacatgggctctggtctgcaggggctggggctccataggaaccgtagggggactagctctgctctgcacttctagtcagggagatgaagctttgaggggtgccactaagcatgatctctgccctgagtggctgggtgaggaagacaccccagccaggctgggatgggagcaccacatctaggcactctgtcctgggccttctaggtgtcctggcagggggacactgtcccaccctacagaaaagcagcccaggaatcctgcaccagtctagctcttaaaaaaggttgcctagggaagtcaccggggagggagggggaaacacggtgggtcacagctttgcccccatagccacgccttggctggcccagggcccctggcagaaactggctaggaagagttcctggcatatctaagaagacttcaggtctgtgctgcttggaaggacaagagaaagacgtggagagaggaagagaggctcaggatagacgggcagggggaagggtggctagctgcggggcctctctgaagctggttctacttcgagtgtccctccagtaccagctcatcagaaacaccagcaccagctcatgggaaacaccagcgccagagctgggaggccctttctagctggtgggaggaggcccagagaggggaggggacttgcccaggccacacagctagggggtgggaggcaggcccagattggggaagggacttgccccaggccgtgcagcccggtcgtgctttggcaggacctcaagcaacccagagccctctcttagggtcaagtactcaatggggtaggggtggccggaagaccatgtagaagaggaaggacccgggcagtgacagctggggagggggcggtgtctagatttccctcccctttcagggctagcgccgccccacgcccctcaacctgcccctactcactgccggtggac

SEQ ID NO: 702 - DNA, 1369 bp, Artificial sequence
  DNA replication origin
tcttctccacttcccccccgcccgctctccctggcccgctccctgtcccctgctgtcccagtctcatcctgccccccctccctcctaactccgctgtcacttctctcctcttggtccctagaagtgagagtcctgaggcacaggaagagtgagtagctgcgtgcgcggctcctggctgaggctgaggcgcggggtggggggaagaggcaggaaaagcaaggcagaaggggcccagacttgaggaaagggcaggggcaggggctggcaggcgagagaacctcgaagaatgggtggggccttgcacctcatacctaccctcatacccacatatgcacccaagcattctgcacctggctgatggttttgcctaaataaatgagccagccacaccgattttccctttctcctactcttctcccccaccacccccacccgctgtgactgcattctgggatccccagcctgggaatccaagagctgtcggcccattttattcctccctcccagacctgaccccttcatcggggctcaagagacctctctctccaaatctccatttgcctcctctggctaagctggaaaatgcacactctgccctgggtgtttccatattatccgcctgcccttcctcctgggtgcctcccgtagccttagtaagggctctgctttcctgggcccctagagctgagccatgctttgccataaaggtgctcccggcttgcaaccaatgtgtctgcttgtgcatctgtctgtgggtgtggtggggagggaggggaccaggtgggtactggcactctggggtccggactttatgtccatggaggccccaattgactcagttcaagggtcactgaggctttgctgatgtagggagagggccagagggaggctccaccccagccgggctgagccagggaacctgggacaaaggtcaggtggctgattccaggtagtgttttggagctgggcagtcagtggctgggcggggacatatgcccaagagccaccatgaactcccaggggcctccaggcaggggccctccatcccgtgagtagggtggggaagatggtggggttgccacagtcagggaaccaagggcccgcctctgggggccctgaaacctgcctgcaggacctgggatctggagagctgcccgctggcccggaggatgggcacccatccaatcttggcttaggaaaggggctgcagaggggcgggtgaggggtggcggggatgcagccccaccctggccagtgcctcatctcctgcctccgcataggcaccaagtctttcaacatgatgtccccgacgggcgacaactcggagctactggctgagattaaggcaggcaagagcctgaagccgacg

SEQ ID NO: 703 - DNA, 2019 bp, Artificial sequence
  DNA replication origin
aggcctgttcggatttaggaggtctgggcggggctgaggctcgcatttctagccagctcctgggtgaggctgctgatgctgctggtccaaggaccacactgagtagccaagagggctttggtctcagtcttagggacctgggctccattgctgtgctgccgccttccagctgccgatactgagcctcatccagcctcagtttccttctctgtaaggtgggctgatcagcaccagctggcaggatgagttgccttttattcatccaacaactattccccaaatgccatttatttttattttttattttttgagacagggtctcactctgttactgaggctggagtacagtggtgcgatctcgactcactgcaacctccacctcctgggttcaagcgattctcccgcctcagcctcccgagtagctgggactacaaatgcccgccaacaatgccctgctaatttttgtattcttagtagagatggggtttcaccatgttggccaggccggtctcgaactcctggcctcaagtgatccgcctgcctcggcctcccaaagtgctgggattacaggcgtgagccaccacgcctggcccccgagtgccatttatgtgccccacacactgttgtagcctctggagattcatggtgaacatatcaaggcctgctctaaggtggctgcggacatgtgtgcgagtcaccaagcacacaaaatggggcagtgtgagagagtgggtggcagtggagagaagtacctgggctgatgcaacacagccagctgcaatggggaacgcaggggactggggcagccctaaccggccaccttatacgtgggctggggggcgtgttagggaaggaggaggtgatgtctaaggtgacacttggaagacgagtgaggggtggccaggaggagagtgggctgaagagccgcaggtgagacagagcagtctggaagtgagagtggatgtggccctgactgtcctggaggaagggggtcgctgagctggagagacctcagtgggggccaggttaccaagacctggccagaggcccagaagagaacggactttctcctggagcactggggagccgggtgcggggagtgttaagcagggaagaggctgcttcctatttgtatgtggggagtggatcgcatagggtcaagatgaatcagggacctctgtggaggcgatggcaggcccagggggaaaactggacatcagaggtggagaaaagtgagcaaatgagaatattacggtgcccagctgtccagcaggacgaagggaggggaagggtgggcagctcagtggaagctgcagctgcagcctctttaagagcggagtggcctctgattctgcacagaaaacattgagcacagggagcgggaaggcttgggccacaggggagctggagaaggggtcatgagtctgggaggagaggcctcaatagccgccctcggatgggttggggagggccaccgcgcctctcagcttcaacgcctttcgcaagttccttgggtggtgtaatgagcgaacaagccaggcatggagaccccgtctgctggcctgttcttgccgccgcagcagcgaccagcgaccggccgtgccccacgccaccgaccaaagtggacactgcccagagcctggagcggcggctcaggccgaagcctcaccccagcgtcaccccccgccggccagacgcggtccctccctgcagacgcagccccgcggagccattacaccacccgggacatgcaaaaggctcccggcgccacggcgggagctaggccagagggagacgcgcctccctcccctctcttgtcttccccgccttagctgacggccgccagctcgtgctgctacccccgcgagggctggaggtactcccgcgagcacaacgccatcctcgggccctttggcgagcttatgaccgaagccgacatcctccgcatcgagcagcaaatcgagaacctgcaggtgctgcacaaggcgcagaagctggaggcgcgcctcgagcaactgg

SEQ ID NO: 704 - DNA, 1613 bp, Artificial sequence
  DNA replication origin
gcaagcccgggcctggcgcacggcctgtattggccccagcacttcctgccgcccctggacggcggcgcacccccgcactacgacagcctcacgctcgacctcttcatgctcggctacttccagctactcgagatgggcctgagccgcgaggagcgcaagttccgccacctactgtgctacgagatgttcgaccgactgggcagccacccgtgggagcgcatccgcctcttccaccgcgtggtgctggaggaggtggaggccggccggcgcggctggagcgacggcttcgaggacctcaggcaccggttcttcggaaacggcctggaggctgagccggcccccgaagaacaggcgaaggaaaaggaagaggaggggaaagaacaggagcggaccgaagaggctgctccatttcagacgggggacccgcctgaggggcagcccgaggccctggcccctgcgccgcagccgccgccgccgcccccgcccgccgcgcctcccccgacctcagactctcctggttccgaagcccccgccgaagaccccttggaactggtgtctgagatgggcgagttcagcaacgaggacatctgccgctacatcgaccgcagcttctccttctggaaagagaaggaggcagagctgtttgacatctgagcagcggaattcggaattctcagttcaccctcgagcgtcttaacgtgggcctggacgcctgtctgacgccctccagaggctggaagcagcaggaagagcccaggactgtggccttgagcagcccggagggcccaggaccaggctgcctcagcctctgaggtcccatcgtggcgggctgtggggcgttggtcggataggcagggcaggcacagaacagaccaggtgtccgcctctggccccgtggccttgctgagctctgtgtggagccaggcagcagaagaagcccctctgagtgaggggctgcggctcctccttgcggcagtgtggcctgctctttggttttccactggagttcacagctacctccttggctgaggtcaagggtgccacgtgtgcagtgttctgtgtgaagtgtgccgtgtacagacccgttctcctctgtaacattcaggaaataaaactctttgctgtaaactgcctgcgttggacaccacacctgcccctgatgtcattgtagccccacgattgtagtgcccgtatccactctattgggaagatggcaaccatggggtgaaggtccttcacaggggagccaggggcagcctgagtctccctgagccaagaggctgggtgggggctggctggcatctgcgtctgcccagaggtcttgggcctgtggccattggccacctgcctctgcggggaatcaggctcaggacctctgggtcccagctacttgttctctgcttctgtcccattcagctctgatctctctggtgcctcctgtaggacatgagggtctgggttactaggggaaaggaggccagctctgagggggtgtgaccaggcacctccatccacttgtcacacagatgtgcatcaaaaggatgtcttcctgtgaccctgactccttcaggtcccgaggttgagggtgccccctatctcccagcccctgcagg

SEQ ID NO: 705 - DNA, 1131 bp, Artificial sequence
  DNA replication origin
tctgcactctttgatagtcaacgaacatgcaaatatatgtaagtcggcatgcaaataagcagcatttgttgttgtttgcgtcagcagcttgggcactttttctgggcaaccgtggcggcgtgtgcactccagtgttgccaagggctggggatacggggggccagggtgggggtcagggagggtttccagcgcaggaggggagggctgtgcggctcccagcctttccaccagggcctggctggctggggctggggcggagggccccacggagctgcgaggctgcggacaggagtctgcggcctctagtacttagcgatgtcccccttcttcaggatgacctgtcgctgccagggcgccagcttgctctcatcgtagcccagcgtccgcagcttctctgactgttccttctcccgccgcagctcctcctgcttctgtcgctcctcctctttcctgaggcagtggggaggggggcagacccggtgaagtctggggccagatacccaggctggcagaaagggtggggccaggcaccaggcagaggccaggtcacccatgcaaggggtgggttactgagggctggggctcggttgctgaagacagaggggctagattgggggcagaatggggttactggagcacaggggagctgggtgagtgggaggttaaggctggattattgtgggctggggttttactggaaacagaggtgctgggtcactgtgtggcaccatgtgaggaggtggtattgctgggtgcagcagcaagattactgggaccaggacttgagttgtgggggagctgtcaatatgaagtattgaggactggggtggggctgctggggagcagagagaccatataattgagagagggactgagaattagagacaagttattagaacatagagggtagatctgcctgttgacagagtagtcactaagcacatgtggctgctgaacatttgaaatgtggctggtctaaattgtgatggattgcaggtgtaaaatgtgcatgatatttcaaagactaagttttattattatttgagtcagggtctcgctctgttgccagggtggagcgcagtggtgagatcatggctcactgcagcctcgacctcctgggctcacgtaatc

SEQ ID NO: 706 - DNA, 932 bp, Artificial sequence
  DNA replication origin
gagcaagtcgcggccacagcgagtgagtgaaccggagcccagatgagagcgctttaatggggctgcgaggtggcggagacagggtcgggatggggtgcagcagttggagacacagggtcagggcccctcatcctctattcactccaccggggcagtgaaagggtcccggcagcgagtgggtctggctggggacggggcgcagacttgagggaggtggggccagaggtggggtcccgggggccacaagtgcggcccggccagacaggcagttttcatgtttctggtaaacaaatgactgagaggaaacccttggcggggataagaaatgaggcccgggctaggccgcgcgcagatctgggtcagagaggaagggaaaaccccttccccgagctcggggcctgcctccacccaggatgcgccagcgacgccggttccggggtgcgggggagggggctgcatcctggagggggctgagccccgcaggaaaacaaagtcaccacccacggggctggggagagctctgcactctttgatagtcaacgaacatgcaaatatatgtaagtcggcatgcaaataagcagcatttgttgttgtttgcgtcagcagcttgggcactttttctgggcaaccgtggcggcgtgtgcactccagtgttgccaagggctggggatacggggggccagggtgggggtcagggagggtttccagcgcaggaggggagggctgtgcggctcccagcctttccaccagggcctggctggctggggctggggcggagggccccacggagctgcgaggctgcggacaggagtctgcggcctctagtacttagcgatgtcccccttcttcaggatgacctgtcgctgccagggcgccagcttgctctcatcgtagcccagcgtccgcagcttctctgactgttccttctcccg

SEQ ID NO: 707 - DNA, 1119 bp, Artificial sequence
  DNA replication origin
cactctcgccagagtccccagccggctcgccagccatgatgctgcagccgggcccgcagctctacgacgtgatggacgcggtcccagcgcggcgctggaaggagttcgtgcgcacgctggggctgcgcgaggcagagatcgaagccgtggaggtggagatcggccgcttccgagaccagcagtacgagatgctcaagcgctggcgccagcagcagcccgcgggcctcggagccgtttacgcggccctggagcgcatggggctggacggctgcgtggaagacttgcgcagccgcctgcagcgcggcccgtgacacggcgcccacttgccacctaggcgctctggtggcccttgcagaagccctaagtacggttacttatgcgtgtagacattttatgtcacttattaagccgctggcacggccctgcgtagcagcaccagccggccccacccctgctcgcccctatcgctccagccaaggcgaagaagcacgaacgaatgtcgagagggggtgaagacatttctcaacttctcggccggagtttggctgagatcgcggtattaaatctgtgaaagaaaacaaaacaaaacaaaaacggcttcttggcgtttctgcggggctggggtgttaagtggactggacttttctcgagggattcgaaggggacgggaatcttgtcaccccgggatctggcacccatggtggagtccagtgtggccttagctcccaagcctgcccctcccgagtccactctggctcaattaccccgagaaggagagagcaagtcgcggccacagcgagtgagtgaaccggagcccagatgagagcgctttaatggggctgcgaggtggcggagacagggtcgggatggggtgcagcagttggagacacagggtcagggcccctcatcctctattcactccaccggggcagtgaaagggtcccggcagcgagtgggtctggctggggacggggcgcagacttgagggaggtggggccagaggtggggtcccgggggccacaagtgcggcccggccagacaggcagttttcatgtttctggtaaacaaatgactgagaggaaacccttggcggggataagaaatgaggcccgggctagg

SEQ ID NO: 708 - DNA, 2144 bp, Artificial sequence
  DNA replication origin
ttctctaggggatcttgggcaagtgcagagaattcgcgtctctgatgtgtggtgtccctttctcaacatgggatgttagcagctaattcacaggcctttgatcagaggtaagggactttctgtagctattcaagtcttttttttttttttttttttttttttttgagatggagacttgctctgtcacccaggctggagtgcagtggcacgatcttggctcactacaacctctgctgcctgggttcaagtgattctcctgcctcagcctcccaagtagctgggactacaggagcccaccaccacccccggctaattttttgtatttttagtagagacggggtttcaccgtgttagccaagatggtcttgatcacctgacctcgtgatccacccgccttggcctcccaaagtgctgggattacaggcatgagccaccgcgcccggcctccattcaagtctttattgaatatctgctatgttctacacactgttctaggtgctggggatgcaacaggggacaaaataggcaaaatccctgtccttttggggttgacattctagtgactcttcatgtagtctagaagaagctcagtgaatagtgtctgtggttgttaccagggacacaatgacaggaacattcttgggtagagtgagaggcctggggagggaagggtctctaggatggagcagatgctgggcagtcttagggagcccctcctggcatgcaccccctcatccctcaggccacccccgtcccttgcaggagcaccctggggagctgtccagagcgctgtgccgctgtctgtggctggaggcagagtaggtggtgtgctgggaatgcgagtgggagaactgggatggaccgaggggaggcgggtgaggaggggggcaaccacccaacacccaccagctgctttcagtgttctgggtccaggtgctcctggctggccttgtggtccccctcctgcttggggccaccctgacctacacataccgccactgctggcctcacaagcccctggttactggtaagtacacacacccacacacgcacccagaagcctggggtcaggatgggtagcccagagtctactcaaccctgatacagaaggggaaactgaggcagggagtgtggggtgcagaggaaccctagaggagctgtaccagcacccaggtccaggaggcttgcctggtggctgaccgcaatctctctgtgtctgtcagcagatgaagctgggatggaggctctgaccccaccaccggtaagaacctcactgtgtgattctgggctgccttctggagctggaagatcaagccttactatgatccctggagcttggcacgcggccagcaccgggtagccctagtggacagaggtgttgggagcagagtcatcagtggatgagaccagcacagtgcctgccctcaaggggtgctcagtcagctggagttcagattcgtacacaggagctaacagttcaatggaaggagagccccatggtgctgggggacaagaggaaggaggcgggggcaggggactcaaggcagaagcaagagttctgctgggctacagtgagagcagggccaactgtgggaggtgtcattgcgggggtgtctgctgactgaaccagggactgtcccctcctggagaggcactgcgggtaaggggccttacttggcaagcagggctgacctggggcccctcttggcttccaggccacccatctgtcacccttggacagcgcccacacccttctagcacctcctgacagcagtgagaagatctgcaccgtccagttggtgggtaacagctggacccctggctaccccgagacccaggaggcgctctgcccgcaggtgacatggtcctgggaccagttgcccagcagagctcttggtaagggacatcagtggcctgaggccttgaccccattctcctgtctgcggtgggaagttgtggtttcacaacgtgttccctttctgccccctaactgacggagtccgccctatgccctgacccaccggatccagcgggcttcagccctggggtacccgcacgaacgcccctgactctgcctcccgaccgcggcccacgtaccccaattggctctctctggccctgccccaggccccgctgctgcgccc

SEQ ID NO: 709 - DNA, 2239 bp, Artificial sequence
  DNA replication origin
ccgggggtggtggtgggctcctgtagtcccagctacttgggaggctgaggcaggagaatcacttgaacccaggcagcagaggttgtagtgagccaagatcgtgccactgcactccagcctgggtgacagagcaagtctccatctcaaaaaaaaaaaaaaaaaaaaaaaaaaaagacttgaatagctacagaaagtcccttacctctgatcaaaggcctgtgaattagctgctaacatcccatgttgagaaagggacaccacacatcagagacgcgaattctctgcacttgcccaagatcccctagagaactagcagcacagtcctgactctcagccctttgtatttatttatttaatagatttaatatttaatatttaatagatttaatatttatttatttatttaataggtctcgctctgttgcccaggctgaagtgcagtggcacgatcatagctcactgcagcctcaacctccttcagcccaagttttaaagctatatcaatgtgactctctgtgtaagtgacaaatcatctgtaatatctggctaggatcgctggggggaatgctggctgaaagtgaaggcaaatacccttatgtatctggctaaggcggatccagattgctcttttgccatctaagtttgcctgaagtggggcccacccatcacagggccaaggctccctcctccctatcccctcttcctattcctgaaccagcagcacctgccccaccccaggcccctgctctgctcccagccgcccttccctccatcccacgacagctaggaattacgtggggcaggacacgcagccatcgccatgttcatagaagccaggcaggcaggtcccacagtcagtatctctgcgggaacctgcaatccaggagaggcatgcgtcaccatgggacaggagtgggtcaggcagggagaagggggtctgggagtagagagccctgggtgggggtactcacagagtagccgtgtgtggcggtgcagggccccgcagtctaggcatggttggcagtagaagggtgaactgctgacacattggctgacctggcactccacaaaccagcctggcttacagccacagcgggtgtcggccactgctgaacagttctccagcgccacctgggaggctggtgggggtgcagggagatggggagtggagagttagtcagggccaaaggctcccatggagaggcagaggcattatcccaagataatggagacagaaataggcgaaagacagacaggtacagggctaccctaaaaaagagagaagctcagagattaaggccgaccagaggccaaggcacatggagagatgggaaggtcaccaggaagagagaaggggcaagggcaccctgaaggaggatcagggtggagggttctggcaagggtgggtgcaggaccctcacaccccaagtttgggcccgagccagccacttccttcagaaaggcctgtccttaggaactccctgccaagcactgagaagcccctcaccctgctcatcacaggcctggcagcgggcacattcagaattatggtggttctcccaggccaagaaggtgtcttggggacacacaaggcaggtggagttgccgcagggctccgtgcaaggggccttcaggtagtgccctgtggaaccaggcaggggtcaggcaggcagaggggctgcccagcaacccccgacctgcttcccaccctgccctccctccctctttctctccagctccctacttctctgtcagcctacccctacctcccctgccagcctcctcttacctcccgggcctgcccgccacctctccagccctgcctgccccatgcctctcccacccctgtggccacttacccgctgggcagcctctgcaacaaaacagaccaatcttcttgtggaagtcaccggcacagtcacacctggggctacgagtgccgccctgggcccgggcccccagcagcaccaggaggagcgcctgggggacaggtgctgctgactctcagcgcagctgcccacgtggggcctctccctgctgcgtctcctccatttcagaggccccagcatttgcccacagagcagcccacttcccaggccccgggcagaaggggtgcccatgggtggagaggaaactaacttccttccccccgcgcacacaccaggcttcggagggggcgcttaccagcccctcacaagtttcccctccaccagagcaggaatccagcagcgcccccacc

SEQ ID NO: 710 - DNA, 2140 bp, Artificial sequence
  DNA replication origin
gagctgctgcccctgggtccggtggacggccgctcctgctccatggactctgcctacggcaccctctccccaacctccttacaagactttgtggccccaggcccaatggcagagctagtgcctcgggccccagagtccccacgagttccttcccctccaccctcgccccgtctccgccgccgcacccctgtccagctgttgagctgcccgccccacctgctcaagtctaagtccgaggccagcctcctccagctgctggcaggggctggcacccatgggacaccctctgcccccagccgcagcctgtcagagctctgcctggctgttccagccccaggtattaggactcagggctcccctcaggaagctgggcccagctgggattgccgaggggcccctagccctggcagcggtcctgggctagtcggctgcctggccggggaacctgcaggctcccacaggaagaggtgtggagacctgccctcgggggcctctcccagggtccagcctgagcccccaccaggggtctctgcccagcacaggaagctgaccctggcccagctctaccgaatcaggaccaccctgctgcttaactccacgctcactgcctcgtgagtggcctggactggggtagggcaggtggctcagggcactggcatgggggcccactcatgcctgggagcatcgcatttggggagggtcatggcggagggagcctgaaccctgcccagtgtctgggcgcagggggctgtggtgggcagcagtgaaggggcctgaggagtgccgtggggaagagagggtgaccagagccactctgaatggcgtcagccaaagaaggactctgtcccctccccaccctgtagggaggtctgagcagagggaggcccccaagagtgccattgaccaagagacagcagacagcctgcctcctggggcgtgccggcacctgcttcagctactgcctcctgtatgcatgagccggatgctgggcaggatccctgcctacgcccgggcccgatttgcgctttgccggactggatggagtggaggaggcccaggccacagtaccaccccacctgcccaggcagcccctcgtcacctactccccgaagttaccagctcagctcgagtcttcagggctgggctcctaggctgcccatcctacttctaccctcactggcctccagtgggattcactcctgccctgcccccaccttcccagtcccacaggccacccctggcttgggctgggttctgtgaagttacgtatttattgagcttttggttcttttataaagacttgtctagactccactgggaagagtcctttgctttggggcccagtgactcggggcacttgagttcagggcggcctccttgtgttcctgtgctcctccacttgccacggatgggccacggatggagcttgccatgggaagcactgggaagtaatggggtgtggggtgccaccagaccaacacccccagacttccccaccttcagccaccatcagagcctctccccaggtgccccccggggattcagggctgaatctgcccagttcccacactcaggccagccctcttgggaaggtgggtcctccatgggggtcccttcaggaactttttttttttttttaatacagagtctcactctgtcacctaggttggagtgcagtggtgtgatgtcggctcactgcaacctctgcctcccgggttcaaacgattctcctgccccagccactctagtagctggaactgcaggtgtgcaccaccacgccgggctagtttttgtattttaagtagagacggcatttcaccatattggtcaggctggtctcgaactcctgaccccaagtgttccgcccgcctctgcctcccatagtgctagaattacaggcctgagctactgcgcttggccccttgcggtacttttggcccaacctcctccatggctggggacgcggaggccgagagagaagtcacttgccctggctctaccttgaagtggttctcagggttggggcgagagtcggggtggggaccgagatgcagctctatcctgtgcccctggtcgcagcaggcagcccagcgcttcgcgtgttctacttggcctgtccgctgccgcctaatgagctcag

SEQ ID NO: 711 - DNA, 3256 bp, Artificial sequence
  DNA replication origin
aggccccttcactgctgcccaccacagccccctgcgcccagacactgggcagggttcaggctccctccgccatgaccctccccaaatgcgatgctcccaggcatgagtgggcccccatgccagtgccctgagccacctgccctaccccagtccaggccactcacgaggcagtgagcgtggagttaagcagcagggtggtcctgattcggtagagctgggccagggtcagcttcctgtgctgggcagagacccctggtgggggctcaggctggaccctgggagaggcccccgagggcaggtctccacacctcttcctgtgggagcctgcaggttccccggccaggcagccgactagcccaggaccgctgccagggctaggggcccctcggcaatcccagctgggcccagcttcctgaggggagccctgagtcctaatacctggggctggaacagccaggcagagctctgacaggctgcggctgggggcagagggtgtcccatgggtgccagcccctgccagcagctggaggaggctggcctcggacttagacttgagcaggtggggcgggcagctcaacagctggacaggggtgcggcggcggagacggggcgagggtggaggggaaggaactcgtggggactctggggcccgaggcactagctctgccattgggcctggggccacaaagtcttgtaaggaggttggggagagggtgccgtaggcagagtccatggagcaggagcggccgtccaccggacccaggggcagcagctcactggtgggcgtggcagatgaggcagtggtgctgagagaggtctcatcagactgggagctgaaaggaccgctgtcgaactcgggggaggacagcgtgtccccaggctctaccacaaccatggccagggtctccgtggagccatctgaggcactgtggggccaggagcagagtcagcccaggccatgaaacctagatggcctgaggcagccccaggctgggcaatgcacggtggtttataccctctgccctcctggggctggaggctcagagatggcagcatgtggcaggtgtggcagatcttccagctccagtgcccacaacagacctcagtagcgagcccagcactcttccctgccaaggctggatctgccctaaggatcctcagcacagcaccccaggcagctaccacgaatggatcagggctggcagcacatggaaaggtgtctgccctccccacccggactctgggggagacagagccccgctcccacagtgttcatgacaagaggccattgggaggaagggagcgtggctgggccttcaggagtcctgggctagagtacttgtcctggtttgacctgctgggtggtcatgagcagacgtaccagtgctgagagtcggggctgccgctgcttttccgcatgatggtaggggagctggcagctgaagtgccactgtcctcgccttcctcctcctcctcctcctcctcctcttcctcctcctgctcatcctcctcctcttccaggctctgcaggggctgctgactgcctgggggctcctgtgcacgcagctgttgcagctggttctgcaggcaaggttggggtacatgggacagaatgggttgtgaccagcatctccctaatctgccttgcccacccactcactactctgcactcacctgggcattgtaaatggtgtccacccagccacggcacaaggcctggccactggcctggaacgtgtaggcccctacagcactgtgaaactcattcaggtagataaggaggaaggaccctggttagggaaggcccaagtcagtgtcagcagagacgatggcccccacccatcacagcccctgaccaggaacaggggaccagggctccttaccagggtcccgtagctcccggcacacaatcttgtccacgagcaggggtggcctgatgaccctggtcctctctgccttcttcactgctttggtcaccaacagcagatccgtgaagaggaagcagtacacatccatctgcagtggcaggagggggggtggccagagaggccagcagggtcagggccagggactgtggcaccagcctcccctgggagcactcggtttttgtcaaacactcctcccaccatgaaccttcaagtaaaattaaaatgaagaggaagatgattctctttcactgagatgtacgttgatgacttatctcaatacaagtttacattaaaaagaagactggtgactttgaagtcaccgtgtgcaagctctcagcctgccccatgcctgaaggggccatggcacagtagcaaggctctggggttcctggcccacttgtggaatatggctgccctcccaccaggaacccatgtggcaccaacaaatgggcacaactggtgccttcaagggctaggaccctactgctggatttgtgaatggcaggcagagaactgtcattcactatgacaaggtcactggttcttgagtaaccaccgaagggactgcagagctgagaaccagtgactggggcccaggaggtccctaggaagggcagggcacaggggtggggtggccctggaatcaccttgctgtccttcccctccttcatcctcaggctcccctccagcagcagctgccgcgtctcctccggggaggcgccagggatgggcgctgtcaagtccaggtgcagaaattccttcaggagctggggacggatggcgtgaacgtaggggaggccagagactgactcccatctcagctaggcatcctcagtgagatgcccagcacagcccctgcctgccagctgggccttcctctctcccagccggcaacccccgcagacacacacgcccaccttgtccacttcgtcgctgctgctttccaccacctcgtaggcgtcgatgcggctcaccacggccgccagccgctgccgctcctgccgctgccgcatgcacgcgttcacgtggtggatgaagcgctccacggagccgatctaggggcaggtgagggagcttcaggtccagggtcatgacggagcagagagccgcgcaggggggacggctcccgctggccatcagggttaccatggcgacgacggcctccttggcgcgcggctcctcggtcttcctcagcaccgacttgagcagcagcgggtacttggtgagccgctggtggggtttggccagcatgtcgctcagcttcagcctctggcactgtgggtgcttctccgcccactgcggtgggggagtgggggcgggctcagggc

SEQ ID NO: 712 - DNA, 2378 bp, Artificial sequence
  DNA replication origin
agaggggacaccccagggtagagatgcagagaccctcctccatcccaggctggcctgaggccctggaaacccgccctggggtggggccatgggggctggcagggggtcccggccctgaccacccttccctgaccaggcccctggccgccgccgcaagaacatgtcggagttcctgggggaggcgagcatccccgggcaggagccccccacgccctccagctgctctctgcccagcggcagcagtggcagcaccaacactggcgacagctggaagaaccgggcggccagtcgcttcagcggctttttcagctccggccccagcaccagcgcctttggccgggtatgtggccccatctgcccagggtcaggcagctggctggccatgacccctgaccctgaccagggtatctttccaggaggtagacaagatggagcagctggagggcaagctgcacacctacagcctcttcgggctgcccaggctgccccgggggctgcgcttcgaccatgactcctgggaggaggagtacgatgaagacgaggatgaggacaatgcctgcctgaggctggaggacagctggcgggagctcattgatgggcatgaggtgagtgcgggccacagtgctgctccctccttgtcccgaaaggaggacagccctcgggaggacccagtgatcagatgttccatgggacgccccaaagaggccactgttaccattagcccactttggagacactgaggctagatgaaaatggtgtgctgcttggctgttttaatggcagaggagggcccagatcttgggtgtcttaactgtgattactcatgtggtgtcaagggtgaccctgctcctcttgggacctccatgtccccattgggaaaatgagagttgcatgcaggttgcttatcctccccggccaccctaaggtgctccaggcctcgtgaatgacccatcctgccctccctctagaagctgacccggcggcagtgccaccagcaggaggcggtgtgggagctgctgcacacggaggcctcctacatcaggaaactgcgggtgatcatcaacgtgagtaggggctgcgctggtccccgtggccaccctgcccccctctttctgacagccctcagctgagtctgagcctttgcagaaggagcaggtgcctggcaatgaggtgggggcaggaaagtcagacaagggctgcgcccagggaggaggtgcctcctagaggaacctgggagggggcttcgggcaggtttgtcaggttcagctgaattagcacaggtgaggcctcattctttcactttcgttcagtggctgtttcccaacacttgctgtgtgctgggtgcccagcaggccacgccctggacgggacagagtgagctggcagtgtagggatttcggctcagggaggggagcacctaccctgggcttggagcttcctggagggaggaagcaccctcagaggtgaaatctggaggctaagccagggcagaggtggagaagggaattccaggcatggcttcaaagccagtctcccccgagcttccctccaggagggaccagggcagtgtgacctcgggagggctatgaggactgggtctttcctcagggtctggactacccaggtgcgaaggccaaagggtacagccttcttatccgtggctgctgtggggcctcctggaacggggaaggggaaggagtggcaggggagcctgaggctgggtggggccctagggctgagacagcctcccgaccccagtcacaccatcccctgatcccacagctgttcctgtgctgcctcctgaacctgcaagagtcagggctgctgtgtgaggtgcgctgggattcgggggcggcggcgggtgaggtaccaggaaggagggcgggacctggacctggggcggggctaacctggcggaggggcgtggccaaccgcacctcccgccgcgcccaggtggaggcggagcgcctgttcagcaacatcccggagatcgcgcagctgcaccgcaggctgtgggctagcgtgatggcgccggtgctggagaaggcgcggcgcacgcgagcgctgctacagcccggggacttcctcaaaggcttcaagatggtacgggcggggccgggcgcaggcgggggcactgaggcagggctggggcgccgaaaagcctccacggcccgatccggtctgcccagcatccccaacctcccccaggcccgtaaccgcacttgaccccttgtggccaagggtgaggaattacgaggcggtcgcccgggtttgagcctccacctgaccatctacccctgatccctggccacgggtggtcactttggctgaggctcagtttcctcatcaggaaacagggatcataagcttgctgcccc

SEQ ID NO: 713 - DNA, 987 bp, Artificial sequence
  DNA replication origin
ccaggtaccgttcgatgtgactcccgtgttggccaccagagggcgcacagccctatgcgggcctggccgggttgaatccacgcgggttacctgtcacctggggtgagccaagggcggggaggccacaggcccactcgccgcccacgctggcgagggccacccacacctccagcctctgccctcctcgcttccctgcagggaccggaagagcacaggcctgaaactctccaagaagaaagcaaggaggagacacacggatgtgaggagccccccagagccggcagatgcgggttccctacagcctgcgcccttccccgagcctgggccttcctccgggatgggggtggggaggtctgcatcccagggtgcagaggtctgggagatcgctggggttccctttcttgctggggttcccatccgagaccggagggtggggagggtggggaggagggttgggaaggagggtgggaaggagggtggggaggagggttgggaaggagggtgggaaggagggtggggaggagggcgggaatgagggcggtgaggagaagctcacagcccccacccccaccatcctcccaggacccaagcaaggaatgcttcactctgaaatttgacctgaatgtggacattgagacagagatcgtcccagccatgaagaagaagtcactggggtagggcttgatggggctcagggtggaagtgggactgggagtaggggtggccccatgttgcaggctccgggtctctgcaggtgtgacgtgtgtgtctgtgtggtggcccgtgagcgagcgcatccctgcgtgggcagacccgtgctggtgtgcacgccagtgtgagggagtgcggtggggtctgtgtacttgtgcattttaatcatgtatgcaggagccaggcctgcgtgtgggcaggcgtgtgacaggtctgccgtggtatgcagatgcgcctgtgtgagcacctctgcgggcaggtgtctgtggacctgcg

SEQ ID NO: 714 - DNA, 1429 bp, Artificial sequence
  DNA replication origin
tgggctctctcctcccttgggttgagacctgggaacattcccccccggaccctggtgtccctcctgcaggacagaggcaggacatggtgggcaggcaggcaggtgagggaggggcagttgggtctgagagaaggggctggagtctggcttcaagaaggggccattccgccctagtgctgggggagtcctgcctctggagggagctggggagactctggggtttgggggtgggacgtgaggcagaacggggagcagaaactgcaccagggagctctgcccaccccagcttctcagttgggctcatggttctcccggggggcttccagaacttcatcgtcaaccagatctgctcgacgaagtcggaaaccacctggttcagatcctggggctgagcctcactgtgcccccagtgcccctgagcctggggactgctgagaggagggaagcagatgaggtcagccgggcctgggcaccagcccctggcagcagctggaggagtcgagcagcctcagtgatggtagtggccacccagaccatcacagcagggaaactgatctcgaggctttcaagggatccagggtggggtgcgtcatagggctcagtccgtatttgttgaatactgactcttccgtaaggagcgaatcagggtatcaaatctgctgtctgtatattggattgatttaaaaacaagatggtggcacagagtcagacttggactggaagggtcccagagaccctcccagaactcctccgacctagcacggctccttccttgtcaccccctacctgcggtgagaccagggcttgggtcatgggcaggtctgccgccccagctggcactaggaaatctcaggaggcctggaagggattggagctgggagcctctgccatgctggctgggttcacagagggccagagggctgcggagcccgcagacggggggctcccaggaagaggggacaaggtggggcagggcccttccccagatcattctcatgaggagacacctgaagcttgggctcccagaagctgcaaagcctgatgtttctctcagcagtgcgctgtggattcagggtgagggtgtgggtagagccctggctgaggacagcttagtggtctctgtagtttttaaatttttttctgagacggggtctcactgtgtcgcccaggctggagtgcagcaatgtgatcatggctcactgcagcctcaacctcctgggctccagcaatcttcccacctcagcctcccaagtagctgggactacaagagagcgccaccacacccggctaattttgtttgttttttgtagaggcaggatctcactgtgtggcccgggctggagtttttgcactttgttttacgatagattaagacagaaaccagaaagagctgcaggggttgagggatcaatcccatcaccctcacttc

SEQ ID NO: 715 - DNA, 1166 bp, Artificial sequence
  DNA replication origin
tggcgagggcccgggcgggagggaggtgtccgccttcctggggggctgggggctgttccgggcccggccctccccggggtccccgcgctcggcgggggcgggcgcggccgcacaatggcaggaagcggggctccgcgctttgtccggcgggcggcgcagaccgcggcttcctccggccgccatggggacaggacccggtgtctccggacgcctagcagcctccaggccgggcccggggctgcccctccgggactcggagccctcctgggccgggggtcgtgcccgcgacggtgatagccaggtacggggccgggacggggcgggaacggggctgggtgcccagttctcgcctgcagccgcccagtcctgtgcgggaggccagggagggggtgcccgtgactatgggccccgcggcccccaggggaaggatgcggcccatggcggccgagccccctacctgggcagctgcaccctggtgacggggacctcggactccggggtgtgtccccgccggctgagatgtccccgccaattcttggcgctttgtgtctggggccagctccggacacacctgtgggtcccgggccctatgctgggccgcccctctcctttccttcctctgccctggccctgcccacagcctcctcctaccccagaggcctctgtttctccttgtgcctctggccccagcccttgtgtgagggtggacgcctggttctctgtccccatcctcacatgcgtgtattccccaaagggcccccctctgttattttggctgcctggcgttagagggggtgggagctggctgttcccatgggtgggctctctcctcccttgggttgagacctgggaacattcccccccggaccctggtgtccctcctgcaggacagaggcaggacatggtgggcaggcaggcaggtgagggaggggcagttgggtctgagagaaggggctggagtctggcttcaagaaggggccattccgccctagtgctgggggagtcctgcctctggagggagctggggagactctggggtttgggggtgggacgtgaggcagaacggggagcagaaactgcaccagggagctctgcccaccccagcttctcagttgggctcatggttctcccggggggcttccagaacttcatcgtcaaccagatct

SEQ ID NO: 716 - DNA, 2011 bp, Artificial sequence
  DNA replication origin
taaaggaattgagagtgggagggtaagggtggtttattttaagatgagggaaaaggacgtcttagaggtaacatttaagttggggcccggtgtcagctgtttcaagatagggtgcgtggaattccagacagaaaatacagaggagaaggccctgagcttggcgagctgtagggagagaaggaagaccggcaggtggaccctgtgcggaccagctgggagggaggcgggagcccggccatggtgggatttcactataagcaagatgggaagttttagttttcaaaactctgcctgttggccgggtgtggtggctcatgcctgtaatctcagcactttgggaggccaaggtgggggtggatcacttgagatcaggagttagtgaccagcctggtcaacatggcgaaaccccatctctactaaaatacaaaaagtagctgggtgtagtggcgggcgcctgtaatcccagctactggggaggctgaggcagaagaatcacttgaacctgggaggtggaggtcgtagtgagctgggatcatgccactgcactccaacgtgagtgacagagcaagattccgtctcaaaaacaaacaaacaaaaaacaaaaacacaactctgcctgtggtgtagacagtgggtgacctgggctttgggagtggagacagccctggaagtctcccagcctctaataaaacgctgctgccctcccaaagccatctcacggaccctggcccccttcccaccctctttccccatggaaccaggtggaggaggagcaattaggggtgggtgggctgatgacagacagcatggccacctcacccccatgggttctgaggagtgtcccaaggaggccatcccagaatcccagagccacagtctgagtttcagtcttgcctgtagacttttgtctctttatgtcactttatcccccacgccgtgaatggggctaatggtgcctgccctgccttcctgggaatcagtgtaaaagcgctttgacagccgtgtagtggtgactccagcaccagagtctgggcgtttgcgtcctctcaggctttgctgagtgccccctggcggtggggacctggcctagaactgcagggacctgggctgctgtgccatgtgggtcgccagggtttcctgatgcctccacctcacccagctcctgggggctgccaaggatagcctctcagagcagcccgccttctgcccacggccctttccagaggccaccggcctttggctctcggcctctgccgtacctgggcagtgagcagtcggtgtgagggggtgtccctggggctcaggctctcgggcaggggtctccaggttgatgggaggggctgagatgagagctggttgtgaggttggggtgggtgtgtgactggggctcaaagctggtgttggagcagagaggggtgtccctggggctagatggagagccggaccaaggaccctgaggggagtgtgccccatcctggcctcccccttctggtgcctgtattctaagagctcccttgctgggagtaagaaggggtcccctgggctgaggctccgaggcgggggtgggggtctccaggaggaagggaggagggaaggtacccttctggctgggagggaccgtgcgtgttggcgctgagggtgaggtggggaccacagcagagtgggcacccccagggctgggcggggatcgagtcacccaggggaggggctccacagtctccaaggtgggggggggtgtcaccagcgccccctgcctccagcattcaaggagctccccaggagaaagagcaagttctgaggagccctctgagcccggcattggtgttgaggagggagtcagagaagagaggggcccggggccgcgcagaggcgcagaggtgggggtaccccgggccaggcagaggtgggaaggtgggggtcccggggactgggcggaggcggggctgtgggggtcccccggccgggcagaggtaggggtgtggagtccccgggtctgggcagaggcggggag

SEQ ID NO: 717 - DNA, 1181 bp, Artificial sequence
  DNA replication origin
gacagtgtgtggactccccagctccttgctgggctccactgggcactgttcgaggtctagtcagggcgtcccaggtcacaagggggcatggaggaggacacttgtggccctgggccacaggggacattgggcaccacatgtgagggtgtttatcatggaggaggtagtgattccagcagccgccattgatccagcacgtactgtatgccaggccctgccttagcgcctggcacagaaacctcatctggccgcctcccccgctgcggtggggcctaccccatctccgtttcctagagagggccctgcagagtggcgaggtaaaatgacttgccaagcaaggcaagatcaggactcaaaccaggcctctctgtcagagcctcccatttcctcagaactctcaggaggaaagggaggtgaatttttctgcacagctcccaaaggccttgacagggaggtggggttcagcacactacaggaaagagtttccagcagctggagctatccccgaagtggaggtagtgagcaccccatcactagacatatgcaagaagagacagaaagggaagcgtagaggggattgcagtgtggagtggaggttggatgggaggacttcagagttcccttgcagcttaacaatggcctgtgaggtggcagggatgagtcagggtatgcgtgtgtggagggaggggtggtgagatgaagaccagggagaggaaagggtggacctgaggcccccatggagaagggacgggcaggatgtgagtaatgggagaggcaatcacctattctcctgggcaatgctttgggggtgagcagcggcagaccaggatgccccagggaatggccaggtttgggccatctctggaagtgactggtccccggagagaggtggtggggctatctgcagctgaagaaacgggcagggccagagaaacaatgcaaggggactcctgggttttggctaagtagttttgggggagcaggtgaagacgtggggatccctggcccagccaggagctgccctagtataggcccagccccaagggttgtgtggggcagtctggaggttttggcctgggaaggggtcgggggaaggctgtataaaaagcttgaaagtgcggaacaggttggtggacctgaactccacctcctcgagtgggccccctgtatccacacccttc

SEQ ID NO: 718 - DNA, 1548 bp, Artificial sequence
  DNA replication origin
gagcgatgcagggcgtaaggttctcagggatctgggatcttggagccccttccccccagcagccctgccgggaccccctgggaagtctggggccccaaaaggtcactgagcgctcccccacttgtcccccagactagagggacagagggagagagcagcgtatttccaaagatgttttctccccgtggaatctggataatttccctgaggactgcaggagaaaagggctctgcaaacggattcccgtgcagataagttggcatttaaaagagaaagggacgctgacctcttttgaagggaggactgaggagatcaccccacccctcctccggttgggaggccagtggggcccaggggagcctgggtgccccgctgactgatgccctctgctcctcccctgcagacgaccagagccccgctgaaaagaagggactgcgctgtcagaaccccgcctgcatggacaaggggcgggcggccaaggtagggaggctggagagcctggggaccctcgggggcagaggggccagggctctaactgccctttctatcccagcaccagctatccacagagccctggcacgggcgcggctggctgggctgggttcaagtgtaggtggggccacagtgtgtctggtttaggaggcagagggcctgcccccagctcaggaacagtggagtcgggggacttctacaagaacaggggggtggagtaccccaaagccctttgctgcactgtggtcctagcagccattctgaggtgacaggagctgtagccttatgtcacggatgaggaaactgaggcttagccaggggaagtggtctcccacggtgctggtccagtgcccagatggcacccttcctgttgaactcagccactcttcaggcctgggcatgggtctgagatgctttgggacttggcgagtgtgaccatggccctggggatgacaaaaggaggaaggggccagttgatcctggagtgccagggcttgggagctgggagtggggcgaagtataaatcagggataaagggggcaggaaggaggataatagtactggctgggcgcttctgcctgtgatgtgctgggcttagtgccacccgctttctgtgccatatgcactgattgcggcagctctgcagggaaggcatcgtcaccccgttttccagatgaagacaccaaggttcagagaggtccagtgacttggccaaggcccacagctcatgagagatggagccggggtttggagccaggttttgcccctcccagcatgcatttacatgacaatagtgacaactgcgcaacttagcatctggcgcaggcaccaggactcactgactcctcctccggccttctgagatggtcctgtccttattctcatttacagatggggaaactgaggctcactcagggacagactgctaggaagtgggagagctgggatttgaacccagtacccaggtctgtgtcataccagggcccgtgttgtcttccatcatgtgtctcagcactgccagctgcaggaaatgtaaaatgccaccccccacccccc

SEQ ID NO: 719 - DNA, 778 bp, Artificial sequence
  DNA replication origin
cggtcggcgcccacccccttgcctggagcgggccctccccggaggaggttaggagccggcccggccccccaggaccccgccccgcgtccgccgggtccccgcctgcactcacccatggagcaggccccgtgccgcgcggggggcgggcggcgggcgggggcgccggggacgccggggactgggaggccgcagagccgccgccgccggaccctcgcacgggaggcgggcggggcaggtgggcggggaggagccgcggcggccccgcctcgggggcggggggcggggggacaggagcgcggccgggcctcggcgccgacggtgtcacccctccctccccggctccccggcccctgcgcgctgcggtccggaggctgcctccacctcccggagggcgggcaccggggcggctcaggaagcgcgcacggctctgtcctggagggtgccatccacgcggagggtgcctgtccgcaggaatgcaggccgggagccacgcagagcccccaccccagcccggaatcgctgtctccgaggtcagtttccatggcaacacggaggctgccccgcgcagggtgagggctgtcaccgggagagactcgcctgccacggctcttgctgcatgtcctctgctggttcagttttaaactttattgaagtgcaaacgcggacagagaagtgcacctgtcctgtgagcacagctcaacacattttcaggaaactttcacaaaataacctgtgcccagaccgagctgcagagcgtccccacccagtccccagcccc

SEQ ID NO: 720 - DNA, 1135 bp, Artificial sequence
  DNA replication origin
agttgtgtccggcaagtagcggagtgaggggcctgcggtggggcgacggagtggcgtggactgtgggggctggaagcatttgtgctgatccgaggcagacacagctcgggagctggagccgtccagaacatgggtccagagctgccgggctcctctggtttgtcaagagaagccagaaatatggacttttatgtgaaatctcctgacttttcaaagttggcaaccaatttaaattcttccgaaaccctgttctcagccaaacaaaacatgtctgccggccgttctgcccgcgccccgaggcccagttctggtagagatcatgttcaggacaaagcccaagtggcctcctgcgactgagacagggtcgggggagaactggcgagtaggctcctctgcctggccaagggccctggtctccctgcgacgggaggtgggggagccaggagggcagctgggctgttgcgcacgtggggaggcagtgtctggcatgcagtggcgggagctcagggttccaggtccgcctagggacgagtggagtgcagggttccaggtctgcctcaaggggggtagttcatggttccaggtctggctaggggtggggggagttcagggttccaggtttgcttagcggagggggtagttcagggttctaggtctgcttaggggaggggggagttcaagattccaggtctgcctggaggggaggttcagggttccaggtttgcttagcggaggggggagttcagggttccaggtctgcttagggtcgggctgaggtcggggagcagacaccgcttaggctggtccacataagaggggttgctacgaagaggcagggctcccaagggaagcccggggcaggcagaggaggccgcccccctgccaccccgagagctgcccactctcacaaagctgccttctcctgccctgtctgctctggggtgatttccactgaggggctgctcccctttttcctgctccccaacaatcttggggcatcgtacctatttggactgactctcagtggactcaagtctccagggcccagtagtagtcctgcctgtgggctcctatcaggaaggggatcggaatcatgtttccttcccaggcctgtctcaattcatagtctcaggag

SEQ ID NO: 721 - DNA, 1034 bp, Artificial sequence
  DNA replication origin
gtgaggccagaggcagggagagtgacggttcagcctgcggtccacattgggaggcaagagggagcccgcagaccatacagcgaagggttttgaaaagggaggtgtaggctgggcacggtggctcatgcctgtaatcccagcactttgggaggccgaggcaggcggatcacgaggtcagggaatcgagaccagcctgactaacacggtgaaaccccgtctctactaaaaacacaaaaaattagctgggcgtggtggcgggcgcctgtagtcccagttactccggaggctgaggcaggagaatggcgtgaacccgggaggtgtagtttgcagtgagccaagattgtgccactgcactccagcatgggtgacagagcgagactccatctcaaaaaaaaaaaaaaagaaaaaaaaagagagaagggaagtgctgctcccaggagagaggacgatgccgggtgggcatgaaggccaggcgtccctgcctgtgaccagccccccactgtggaggagggggaatgtggctgcttgtcaggagaggcaggtacagtgtcccacaggccccagcaactccaggccccatcgggacgtgcgcagaaggcagggagggcaggacatgagaggggcggcccagctgcccagctggtggaggcagtggggatgcgggaggcagcacgggatgtgggggtggggtgaggaggagtgtggcagctgatgttgggggggcaaatctcccctccaccctcagccgggcactgtcctggagtcggagggtgggatcgggggcaggctgctctatttcttcacccggcagcttcctgcctacctgaggcaggtacggtgctacaggacccaacagagccagagacttgacccaggtcgtttagccacccagccccaagccagcagggccagccaatgggagcctgtgtcccacctctcgcccccactcagactgtgctccccttggcagggtggggcaaagtggggctgctcgccgtctgcagaggcaggccctccctgggctctcttagttg

SEQ ID NO: 722 - DNA, 1066 bp, Artificial sequence
  DNA replication origin
gcggggcacctacgagctggaggccctgcccggcgacctggccgagctggagctggggacggtggagcgtttctcgtggagctccaccctggacatcatcgaggacctcgggggtaggtgcgaacccacctcccgggaggactttcagcaggctctggcaccgggcctgcccagccagggcctgtagcccattcacacacacatgctgctgacagtcacttgctccacggtggtgtgggggccagagccactcctgagagctgccgctggtgcaggagaggacccggaaatgaggaccctgggggccagagggcaggcaagcagctgaggaggctgtccttcctccagggctggcctggctgggcagcgtgggccctgcactgggcttcaggcctggcctctgcctctgctctcaccccgcccgcaagatcaggccatggtgttttctcagggctgggtggtgtaatgagatgttctggaacattcacgttccaggtcccaggacgtgggtcatttctccttttgtccccattttacagatgaggaaacagaggtacagggagtttaagcccctgaagaggcaggatgagctctcggggacgctgagccccgtggcttgtgtttagaggggtgggacgttggactgctcctgggggtgagaggttggggagctgtgaatgggaataatgatgccttgggggtcactgggaggctgagagcactaatggggatgacacacagggagcttcaaacagcggtggcagaggcagggcgcacctgtgctggctgtcggatgcccattctgtccgctcagctcagctggtcggcaccgtaggctggtcggcatcgtgggctggtcggtactgtaggctggtcggcacagtgggctgaccggcactgtgggctggggacctagctctgtcagggagctttggtgcagtgacagaaacttgagtccggtccgcagaagctaccggagcgctgatctccagctcccagcactgtggaactgtctggggccggggcctgggcctgggttctcttctccattagcctcatcctcggg

SEQ ID NO: 723 - DNA, 1149 bp, Artificial sequence
  DNA replication origin
aagtcagaccggtgccggcggccacagggccgtgaatgggcttgtcattacttgtatattgggtaaggctggagatataggagcgtaaaagttgtactatgcgccgtgtcagagtgttttctgtcgtatctatgatagaaaatttagccaatgactgcatgtctaaaagttgtaaggggctttttccttcataacgggggtgacagtttaacttagtaagaactcagtcttttgagggaatgggggtggcaacataggtggtagttgatagggagataaagagccagcagtcttctgctaggatggggttgggctggtttagtggggagggagttaagctaagggtcttgtagaggtagctgggtactattggaaaggggaggtgtggctacgtggggcagccaagggattaggagcggtagataggcaaagagtaagtaggaaagtaaataagtgtgtttcatctggggaaaagtcacacagggtgccttgaaaggggaggtcatctatccactctaaaagagagtcgagagtgggaatttggggctgaaaccaggagatgtcttggcaaacggagaggatgaagagggtgaagtggcaaggtaggcaggaacagggcatttgagagaaatcaggaatgtacttgggattgtcaggaggagaaggaggagtctgggtattgtttaagggtctcctttagggacgggcatgaggcagagtttagttgggccaaggagggaactggagaatcggcggaaggcggcgggtgggtcacttgtaggcagactagtcgtaggagccctttttaatctagaaagttggtaccaagaagcatgtcctgagagtttggctgcggtggggattgtgaggatgacttggaaagggccttcccacttagacctggggctggttgggttaagagtttttaagaagacatgttctcctagaaggagagtctggtcgtggaggcttcatggggttttgggagggcctggtcggcttgttcgtggagaagatggtggatgagagagagtgttgggaggtattctcctagctgagagttagaagggggcctgttttgtaagaggaaagggcgtccatacgttaactcaaatggactgaggaaggagggtgcttttgggctggctc

SEQ ID NO: 724 - DNA, 987 bp, Artificial sequence
  DNA replication origin
tacgttaactcaaatggactgaggaaggagggtgcttttgggctggctctggtgcgggctagggctatgggcagaagggaggtccagggtttctggacttcaagagtgagtttggttaactgagttttaaggatgccatttgccctttcaacttttcctgatgactgggttcagtatgggatatggaggcgccactggacgctgagggactgataaacctgttgggtgatttgggagatgaagctagggccattgtctgattgtatggagcaagggagatcaaatctagggatgatatctgctataagaatttgggcgactactgcggccttttctgaagaggtcagaaatgcttctacccgctcagagaaggtgtctataagagtaagaagaaattttgtcctcttgacgggaggcaagtgggtgaagtctacctgccagtcctcccctgggagtgttcctctgagctgatgtgtagggatggggggagcggagcgccgcttgggaggaagtaacagaatatacgacagttggaggttatgtctcttagtgcggtgaataggtggggggaggagaaataagggtgaaggagtaggtacagggggcacgcaccgatatggaaggattagtgaggagatgttagaatttctatgaataacttcaggattgaggagaggttcatgggagatattagggaaattagactgcaggtgattaagcatctcagtacgggagtgggtgggaggagaggaagatactgcaattagagatgcagggttaaggggagcacttttggagagacagaactcagggttttcaagaaagagagcatgaagtggttggatgcgggatggagaaagggcacttagtgctcgggaggaaagaagatcttatagattatgtgggctgtcggtggtgtcttgaccgaatgttgggtttttgctttctaaggctagggtggccgctgctgctagagctctgaggcaa

SEQ ID NO: 725 - DNA, 960 bp, Artificial sequence
  DNA replication origin
ccaggcaaagatagagcaggagcggttacaagggcgttttttgtttgtttgttttctttttggagacggagtctcgctctgttgcccaggctggagtgcagtggcgccacctcagctcactgcaacctccgactcctgggttcaggcaattcacaagggcggttttaagtttgtggaagctggggattatgttgtgagaagaatttagaggcccatttagagagcctttggctgcttcatagagggggctggctaggagggcaaagttggggatccatattctgaagaagcctgcattcctaagaaagagagaatttcactcttagaggagggtgggggtaggctgtctattaaggctacccatgccagggtcatggcttgggccccgggggagagttggactcctaagtatgttactgttggggtggagagttgtgctttggagggggagaccccatatgctttgttagcaagaaagtttagaagggtaatagtgtgagtctgagagtcttctagggaaggactacagaggaggaggtcatccacatattgaagaagacggctgggggaaaggtctaaggaggtgaggtcttgggctatgacttgcccaaagaaatgaggaccattcctgaagccttggagaaggacagtccctatgagttgctgtgattggagggtgtcagggtcagtccaggtgaaggcaaagaggttttgggaatcaggatgtagggaaatagtaaagaagtcatcttttaggtcaatagcagtgtagtgggtggtactggaggggatcagagagagaagtgtatagaggttagggactacagggtgaataggaggactgcctgattaatggcttggaggtcttgaacgagtcaatatgagccatctgattttttaatggggaggatgggggtgttacaaggagagtgtgttggtcaaagaagaccacgtgagcag

SEQ ID NO: 726 - DNA, 925 bp, Artificial sequence
  DNA replication origin
agtgtatagaggttagggactacagggtgaataggaggactgcctgattaatggcttggaggtcttgaacgagtcaatatgagccatctgattttttaatggggaggatgggggtgttacaaggagagtgtgttggtcaaagaagaccacgtgagcagagcttgtttacgatgggctgtagacccttttggtgggttagagaaatggggtattgggggatgttggggaatttggaggggtcttgagatggagtctcgctctgttgcccaggccagactgcagtggcgctatctcggctcactgcaagctccacctcccaggttcgcaccattctcctgcctcagcttcccaagtagctgggactacaggtgcccgccactgcgcctggctaattttttgtatgtttagtagagacggggtttcaccgtgttagccaggatggtcttgatctcctgacctcgtgatctgcccgcctcggcctcccaaagtgctgggattacaggcgtgagccacgcgcctggccttttagctggattttgatggggtcatgatgagcagttagggaagggatggtggtatcctacactattgggttaacaagagaggtgggaagtgggtgctggggagaggggtcagggactggactggcagagaggagtaggagggactcaggttgggggaggcaagaaaaggtgatacaagccttgaatttggctaaaaggtctcagcctagaatggggatgggtcaatgaagcatgatagaaagactatgagaaaatggtattgaatagggaacaagtaagaggtctggtggcacatggacgcgagatgaatctgtcaatccccacaactgagactgaggcaaggccgagtaggtggccctggtattgattaaaaaggagatcggcagctgggcgcagtggct

SEQ ID NO: 727 - DNA, 1084 bp, Artificial sequence
  DNA replication origin
ttacaggcttatgggcagctttgttaaggcctgcaatgaggcaggtaatcatgtggttatgggatgcccggctggggtctgtgggttggtactcccaggaaggctcttactggggaacagcagcagctcctacgggcttagtaggatcttgctgatgaagattggcggcatgtgcctgtgctgcaagccacactctttccttctcttctggaaggagggtggaagagaggataatgtagagatcatgccaagtgagttcataagattgggtaagatatttaaattctttgatataagtatcgggatcagatgagaaggacccgagatgtttttcaatttggtagaggttggagagggagaaagggacgtggacacggacgatctcctcagctcttgccacctcccggagcggaagtgaggaggctggttgaggggcatgttgggcccgagaatgggtaaggggtagagacggtgaaaattcggagtcagaggcagggtggttggagagagggggagaagggggcagaacaggaacggggacgtaaggtgggggattggggtggtttaatggaggaccatgatggtggcgaggatggggaaaattggcgaggttaaaagaagaggagtcatcgactggggctgtaggaagagtgacagagggtgagttgggtttggagcgggcaaggaggatttggaaagtagaacaggactggcagagagaagggtggctatggagagtgaagaaagcctgaacataaggaatctcggaccacttcccattgcagtggcaaaagttgtctaagtctttaaggacattgaaatcgaaagtgccattttcgggccattgggagctattgtctaacctgtattgaggccagacagtattacagtagaaaagcagcttcttaggacagacctctgaatggaggccgagggcattgaggttgcatagaagacacccaaggggggtggtcttaggaagcgtagaatgagaagctcctatggtgaatggagtggggcaggcagtggaaggagagactgccggtcaacaaggatggtgggagagggcgtcctgtgtcccgca

SEQ ID NO: 728 - DNA, 953 bp, Artificial sequence
  DNA replication origin
tggggcaaaaggagagaagagctgcaagtgaaagccaggtgggggcagggggctgaggggggcataaattccaaggaaagactctcataggaggactggtcaaaaatgtcacaaagggcacggtgcctcatgcctgtaatctcaccactttgggaggccaaggcaggtggattgcttgagcccaggagttcaaggccagtctaggcaacatagtgagacctctatctctacaaaaaatacaaaaattagccaggcatggtggcacatgcctgtggacccagctacttaggagtatgaggtgggaggattgcttgagcctgggagacagtgagacaacattgcaccactgcactccagcctgagtgtcagagtgagactgtgtctcaaaaaaaaaaaaaaaaaaaaatcacaagtcacctaagataaagaaggactgcaaagtaggatttggatacctagaaggtgccccagctcacagcgaaagcaagagtggtggggacagaatcgggctgagggtcaatgagggcagggagaggccagcaggaaactcccatgggaaggggcagggagtcagtgctcagggtagagggcctggaagagggagaggaatgagggcaaccacaggccaggcaggaacccatggggaaggatccataagccaaggaggggctgtggtccaaggtacagggcaagaataagcacagagacaggactgacatcagcaaggtgaggcatgtcagcacctctgagccaggagggaagaaggaaaggcaggcaggagagactgggatgatgtggagcagtctatggggtgggaagcaaagggtgtccttttttggggggaggatggaggggacaaggtatcactctgtcacccaggctggaatgcagtggtgcaatctcagctcactgcaacctccacctcccagattccagcaattctcctgtctcag

SEQ ID NO: 729 - DNA, 1189 bp, Artificial sequence
  DNA replication origin
tgaatcatcctgaaaccaacccctcacacacccgtccttagaaaaattgtcttccacgaaaccagtccctgatgccgaaaaggttgggggccactgctgtaagccacagggagtccctaaggatgtccgcagagaagtgctatgttcggacttgcattttttcttttctttctgagacagagtcttgctctgtcgcccaggatggagtgcggtggcgtgatcttggctcactgcaacccctgcctcctgggttcaagaaattctcctgcctcagcctcctgagtagctgggattacaggtgcctgccaccacgcctggctaatttttgcatttttagcagagacagggtttcaccacgttggccaggctggtttccaactcctgacctcatgagctgcccaccttagcctcccaaagtgctgggattacaggcgtgagcccccgcgcccggtgcccggccgggacttgcatttcatgagcgtatctctgacttcagtgaggaatgagttagaagaaatttaagactaaaatcagggggaagccttaggacactgatgggagaatctagctgaggggtgatgctggtgtgaattccagctgtggctgtggcagtggaaaaggaggccagaaaggatgaaaggtggggagcagggcaaggaggagcagcagtgggcaggactccagggtgatggccactccctcactaccctccaccagaggattggggctaatacaggaagaaaagaggcttttgttgtgtagggaggtaaggtcaatctgggccttgctgggtccatgatgtggcaatgttgggccagcatcaggggctcagatcagaggggaggggactgagaatgggaggttaaaccacgagcccacagcctgcctgggaactggaaaaggggaggagaggagggcgaagcctgctccggggaatcacctaccttttcagaggaagtggggcaaaaggagagaagagctgcaagtgaaagccaggtgggggcagggggctgaggggggcataaattccaaggaaagactctcataggaggactggtcaaaaatgtcacaaagggcacggtgcctcatgcctgtaatctcaccactttgggaggccaaggcaggtggattgcttgagcccaggagttcaaggccagtctaggcaacatagtgagacctctatctctac

SEQ ID NO: 730 - DNA, 1099 bp, Artificial sequence
  DNA replication origin
ccgccgacagtgcggagactccaccgtctccgcgccggacgtgacgtcaaagcgtgcaggccaggaggtgcgcctcggaagcgtagagcttctagctccggcccccgagggcggggccccgcagagaacggccaatgggatgcggggacgacgcctcgccctgttcttttggcgctgggcccgcctccggagttgcctagcaacgtcaatctgggcggtcagccttttccaggctctgggttcagacttgaatccgttacacctcacactctcccacgacaggagaccagatacgcatttcacttctttattggcagcccggagcctggtctaggctctcccaggcgcttacacgtcccaaccccagaccgcgatgcccaaagacctcccggacacccccggcctgctcgaccttcgaccctcagggcagagaaggctgccagccgtgcctgctgacccactggtcaggtggagccgcagcgcctcgtgtagtcctgaatggaggcctggaagtgctctgtgctgttgaggtctgggcggcagaggatcacgtagcacttaggcagaaaatacccaccgaagccgctgctcaggctgctcagcccagccatcatgttggccgcaggcaggtacttgccgtcgtagacgctggccgtggtgaagaaggcgatccaggacacgaagttgaagagcaggctgaaggtgacacatttggcctcgttgtagttctctggcaagtccttacccaggtagctgcaggcaaaggcactgatggagaggaggccattgtagaggaaggccagtatgaagcccagggagttggtctctgtgcactcaagcatcaccagatgggggaagcgctggtattccctagcaggcagtggggtccacaccaccagccaagttagacagataagcagctgggccgctgagctgatcatcacaaacaggccagcaccgtggttttggacccaggcgtggtagaatgtaggtaccttggtggaaaacttgaagatgatgattagttggaatgagcgaactgtcaggcaggacaggaagatggtgaaaccaagggcaaagagggcctggcgtagcaagc

SEQ ID NO: 731 - DNA, 776 bp, Artificial sequence
  DNA replication origin
tcccgggggccgggggccatattggattggccaggggggatgctggatggggggccagggtcgtgaagaagggcctggtgagaaaaatccaagtttggggaaaggagacatgggatgagagcgaacggactggcccggcacagtgagaggatcccggacggcggagggcggcagccggggacaggtgagcgaagcccacgccgcgcccacaggtcccgagcggccgagcggaaggcagccacggcggcccgcagcccctccctccctcaccccgcgccctcctcacccaggcaggtcctccctgagctggccccactggccccctgctccgtcgcctccacagcccacgaacctagtgcccggctatgcgtaccccgccgacagtgcggagactccaccgtctccgcgccggacgtgacgtcaaagcgtgcaggccaggaggtgcgcctcggaagcgtagagcttctagctccggcccccgagggcggggccccgcagagaacggccaatgggatgcggggacgacgcctcgccctgttcttttggcgctgggcccgcctccggagttgcctagcaacgtcaatctgggcggtcagccttttccaggctctgggttcagacttgaatccgttacacctcacactctcccacgacaggagaccagatacgcatttcacttctttattggcagcccggagcctggtctaggctctcccaggcgcttacacgtcccaaccccagaccgcgatgcccaaagacctcccggacacccccgg

SEQ ID NO: 732 - DNA, 1391 bp, Artificial sequence
  DNA replication origin
ctctgtcgcctaggctggagggtagtggcaccatctcagctcactgcaacctccacttcctgggctcaagtgatcctcccacctcaccctcctgagtagctaggactacaggtgtgtgccaccacacccggctaatttttgtatagtctttgtacaaatgaggcctcgccatgttgcccaggctggtctcgaactcccaagctaaagtgatccaccccccttggcctcccaaagtgctaggattacaggcgtgagtgagccatcacacccagcccagggtccctattataccaaaaaagtgtctattccctctatttgtctccccagtcccaacaccctgggcacagtacctcattactgccgccctgcagctgggcaccttcagcctctaagggccttgggggcactttgcagtcctcgggtttcttgtcctcaaggggacaaggcttcaaggcctgcttcagtttcccacagagggaggaggggccctcactctgagctggggaatggagctggggcctctgaggactatgactgcctctgggctcctgatccctggggactagacccagagtcctcgaaacttcctcttcttccaagcctgccggctccttgacgtggctgttcacattctgggaggcagggggccccagcccactctggccacctgctgcctgtcccactgaagttttgggcttgaagctctggcacagctctacggcctctggcactcgcaactccctggctgccaggagcacctgatcccggttccctgaggtgagagcgaggtgaccagtgtagaaaaagtccaacaagaggccaaagatctcagcgaagccagcagggaggacgacactgccccctgagccatccccgtagaggctctggaaaaagtgactgcagcaggcaaggacactccagtgtgccttaaacaccaggccccccacgtccagagtggcgtcgcagtactggcccttctcccgctgcttgttgagctcctgcagaaccctcacactgtgctggacgaaggagccgtccatggtctggagggcagggaggcagaagtgacaccccggccagcctaagcgagggtatgcaagagaaagctcctggagtcaagagagagaaacgggaagttggcctctactcaaataatcatatttatcagcacgagggcttgggtcagggtgaggggtgcacgcggagggctggaacacactgacagcctcccgggggccgggggccatattggattggccaggggggatgctggatggggggccagggtcgtgaagaagggcctggtgagaaaaatccaagtttggggaaaggagacatgggatgagagcgaacggactggcccggcacagtgagaggatcccggacggcgg

SEQ ID NO: 733 - DNA, 1909 bp, Artificial sequence
  DNA replication origin
tgctgcagttcccggccgtgaaggaggcgtgcggggccttcctgcagcagcagctcgacctggccaactgcctggacatgcaggacttcgctgaggccttcagctgctcgggactggcgagcgcggcgcagcggttcattctgcgccacgtgggcgagctgggcgccgagcagctggagcggctgccactggcgcgcctgctgcgctacctgcgggacgacgggctgtgtgtgcccaaggaggaggccgcctaccagctggcgctgcgctgggtccgcgctgacccgccgcgccgcgccgcgcactggccgcagctgctggaggccgtgcgcctgcccttcgtgcgccgcttctacctgttggcgcacgtcgaggccgagccgctggtggcgcgctgcccaccctgcctgcgcctgctgcgcgaggcgcgcgacttccaggcggcgcgctacgaccgccacgaccgcgggccctgtccccgaatgcgtcctcgcccgtccaccggtctcgccgagatcctcgtgctcgtgggcggctgcgaccaggactgtgacgagctggtcactgtcgactgctacaacccgcagacgggtcagtggcgctacctggccgagttcccagaccacctgggcggaggctacagcatcgtggcgctgggcaatgacatctacgtgacgggtgagtgggccaggggctgggcaggctctctggggttgaacctcgccggtacgggagcccagctattcgcgggggaagcgcacagagcctggaatcctaggggcgcacctgagtccaagctggggctctggtgactacatgtctctgggcgatacttttaaccttgaagaagggccccttgtgtgagccgggacaagtagctgcttgtgggtctctgtgccccgtgcggccggggctgccaggctgagccaactccgtgcccaggaggtgcctccccacttggttggaagatactggggcattcaccccgcacaatgggtgctttctttttctccttaaggaatccagggacgggcaggaggccgacgcccggtgaggcatctgttccccacaagccggggaatttctccctccctgctgagccacaccgggccccctgactcactctttgtcacccggtgacaaggttcccttgggcttgcacctaggctctgtgctctggtcacatggtgtttaggctgaactccccggagcctgtaaacatggtcacatgttaagaggttttcttccagttacttggcccaaaccccaaaacactgccgagtcatggtaggcgggtcccagtccgcctgagtttgggcttctacggtttttattaaagataaatcccagttcaaacacgaggctacctcctttgtcggggtgaggaagggcggtctctgtgactgctatataaggaaagaacccaccaggcaggcgtgtgaggcggttatcaggcaaggaggtggggactgggatgtcacagctgctgtgcccagccttgcatgttcgcgagagagcccactctgggacgtgctccgagttccagtggggctctgaggtgtcaggtgggacagttgctggattctgttgccacagcttccttagcctgctgctctgagtccagcctctgctgggttctgccagaatctgtgcctctttccaatccaaggttgtccccaagttgattggggaccgtgtccctcccctcttctgaaagtctgaccagtggctttgagcagataatttcttcccagaactggccacactggccccagctttctgcacacccttccataaatgtcccagcagagcagttaatcccttgggtttaggcaggtggctggttcattcctttcagctgcctttcacacagctccatggaagggaggaggccggcagagctcacttc

SEQ ID NO: 734 - DNA, 1156 bp, Artificial sequence
  DNA replication origin
ctgcgcacaaaggaaaccttggggactccaacccccatgaggctccgcggcggcggccccggtgtgtggaggcgggtcttctggactcgaggccgcgcgagcgggggaggtgcgggggcccgcgccggctcggccgcggggggaggggcagtgtgagcggtagcgccttggtctcggcgggcgcgggggcgggagtcgctgcggcggtgggggcggggctgacggcccgggttgcgaagggcggcggcggctggcacctacccttcctcgtctcctacttggggttcgcgcccctttgtggggcgggggtccccgaggcctggccgggagtaggggcggcaggggcggggacgctgacgtcgcggccgccccgggcatcgctccccgctccccgctccccgctgagggcggagtcgccgcccggcccccgctccaggccgggctcagcgaagttgttttcgcggctgcgggcttcgtgcggctccctgctccgggcccgcggggccgggactggaccgggctcttctctaggcatctgcgggattcactcgaggtggccgggttcgtgcattaaaaacaccgggccagcgttgtcagtgttctaaagaggtgtgcgttcagtttgctttctgttgccgcctaagcctaaccttgggaccggccgttttcccactctcctgaatatcctccggcccgcagggcgaggcggagacgcggtgtttggcgctggcatcgactggtacttgtttagtggtgtttaactgggatgggcagtgtgtaaacgctggaccgcagagtatccgacagctgtacgtgtggaaggctggccggacacggtggggactgcccctatgcggtgaccaaaaggcggtctgacgggaacatttttaatattcgaaagtgggggaaaaaggtaagtacaaaacgcagatgattcagtaacctgtttggtagcttcgaagaagttaaaggggagtgacacaaaattgaaaattcaaattagaaaacgaactcttggagatactagtaagatatttgacaggcgccgaatgctccatcaagctggctgttgctatttcaagggttatgatcattctgatgaagatatttaatagttaggagatggtgttaatcttagaaatacttctctgagcgg

SEQ ID NO: 735 - DNA, 1116 bp, Artificial sequence
  DNA replication origin
gggcctccccaggcctgggaccccggaatcctgcctggcgcacccccctcacacatactcgcgggatgggccccgcaccttcgggggccgagtgtcgcggggggcggctgccgcgggagggcgggtgggggccgctccgccatctgctttccgaggaggcggccgggggggcgggcggcgtgggccgtgtgggggcggcgtggaacccccagtccccgcgccggtgcctcccgcgcgcccccggcccgaggccgtcgccgccctccacttggcattcgggtttttgacccacttctgctggttccccgccgaaagaaaagttcttcgcgggagttggaggcccgggtggcggcccgcggttcccgtggctgggcaggctcgccagtgcggggagcgcggtcaacgcgggccttcgcctccgctccgtgggcggccctggggtccaagggggtgggagaggagaaggtttgcttgaaccaggttgagaaaataattttctaagggcaccgactttctcgaaagaaaacccgcgggccgcacgcctgctcctcgcggcgggaggggcggcccgagacccctgccccccatttccccaccggctctcccccagcagagtggcggccgggtaacagcacctcgggaaggatgggggtgggtcggacaaggcactgaaaggaacctcagggaacgtgccgggcgaataaacagcaatacggcacacttgttttgcttaggagcaaataagagctccatctctccgtgcttctctcaggagaaaatatctttttgtgatgggtgtttctagatggaatggggctgggacccgcgagcaaaaacctccactattccgtttaaatgtaagactaagcttcgcagtaaggttcttggtttattgtgagttgagatagttgggtgcctggcatcccgactggctgggacagtggaggggaccctctgagcacgagagaggggtcctcaggtggcgctagcttggcagggtcagccaggagtgaactccagggtccaggtctccgagagctctggagaatgagtggttgatttttttttttttttttttttgagttggaatcttagctctgtctaccgggctggagt

SEQ ID NO: 736 - DNA, 1713 bp, Artificial sequence
  DNA replication origin
cgcgcgcggcgggggctgcagcgaccagggacacagcaaaccccggccgcggcccgctagtctgttcagcaaacacctgctccgctccctgcacgtcccggccctggccccgccaggtgcgccgctgcccctccgtccgccactccccgcatccccgcggcgggcgcggcggcgccagcccctctgggcccaggacctcggcctgtccccgggcccagcggccgcacgcctttgggcctcccgcccggcgcgccaaggcctcggagtcggtccgcgggccccgggtctgggcctcccgcgcccccgggtccccgcctcttaccggtggaaggtgagctgcttcctgcggctgctgtagcggttgcagcactgccgggccgcgcacgacttcggcatctcgagccaggcctggctgcccccaacaaagatggcggcggcggcggggcctgcggagaggggagggacctgcggggaggggcggggccgctgggaggtggtgacgggcctggctcgcctccagggcgcgctcatcctgccatcccagccacccgcgtctccccagggtcggacgggacccggggcgccacgtaaaggggtgctccgggccccaattcaggcccgaaaccccaactcctagccttgggcctgtgcaagtcttaccccattcgccaatgctggtcgcctttcacctccttgctttgagcacccaaccaggacgcatagccactcacaggcttggacaactggaaaccaacggccaacccctcagtgtttttagggctttgaattgtgaataggtctggactcctctgacgtcactggaggtggtactagttggccactggtggtgtcagttcagaggccagacagctcactgcccttaagtttggtcacagggaacccccaaacgtgaagaggcaaaaagggcaactgaaggggagggagattccagttcaggccttgcagaaactccgaggctgcagctttctcaaagcagcctatagggaaggcgtcatcttgtaagaagaaaaaaaaaaaaatcggccaggcgcagtggctcacgcctgtaatcccagcactttgggaggccgaggcaggcggatcacctgagatcaggagttcaaggccagcctgaccgacatggtgaaaccccatctctactaaaaatacaaaaattagccgcacatggtggcgggcacctgtaattccagctactcggaaggctgaagcaggagaatctcttgaacccgggaggtggaagttacaatgagccaaaatctcatcacagcacttcacagcctaggtgacaagaacgaaactcaagtctcaaaaacaaaaaaaaaatcaaaagtaggctaaccactcactggggcttgagctaatcctcaatctgatgaagaaactgcaaaaaccattcacatctactcgtcctgtggtttgtttctaaggaattcaccagcaaggtaccttaacaccgtgggcattttccatcctgctaagtgcacactgagacgctgccttcccagagacttgatgtaatcatgctttggggaggtagcaaggagaaaagaaacacaattgtccttcagcacagaacgcaatcgcctgaaccttgaatcatgaacctcaaagtagcaatatatttatttacaaaatatacagtttcacagaaacagcttcgctttatacacataaactttaaaattacacaga

SEQ ID NO: 737 - DNA, 1151 bp, Artificial sequence
  DNA replication origin
gaccagacggaaggtgcagtgccctcctacctgtgtggggtcctgaaaggcgaacaccgtgggcacggcattgtgctttaggttcttgcggtttccaaaggcgctgaagcactctggccggaagtgctcggagcagatgaccgtgtgctgcttgggcttgaagttgccccggccgatgttcagcacccattccttcagcagctccgggcggctgaacggaaacctaagggcagaggcacggggtgtgaggcccagcaaggctggacccagcgcctcagagtcattcggaattttcacatcactacagagtacttccctggacagctgtggacattcagtcctctcggtttattaaatcacatctaatttctggaagcttctgtcacagctgttaaagcactcttaataggaaacccgagaccacgagcatggccagagagcccaagtgagctgcttccgatgctacatttgccaggagcctaccaggagccgggccctgttcttcgtgctagggatggggggtaatgagacagtcctggcccccaagagctgatattctggagcgggggcacagtgatgagccacacagatgtggacggtgtcttctggggatgacagctgctccagagaacagacagagggaagccctggggtggtgaggagaggcagctgaaggggtgatgtttgagcacagaccgcaggaagtggcagcacaagcgacgcaggcttcagaagggacagcaggaacggccactcacgcaggtccagctgagacagcgagagggagtggggactgcatgacgcagggccctgagcagctggggagtccctggaggctctagacagaggtgagatggaacctgggtccaccctggctgctgtgggaccaggcattggcaggaagtggtaatgagagggcagacttggatgtattttgaaagccatgcagtaaggtttgcctgtagatggtaaaattgagaaggaaggagtttcatgttggagataaaattaagttacaggacggcaggttaaggggatcagaagtttgttttgtagcagctgagcatggtggctcacgcctgtaatcccagcactttgggaggccaaggcagacagactgcctcaactcaggagttcaagaccagcctggc

SEQ ID NO: 738 - DNA, 1182 bp, Artificial sequence
  DNA replication origin
acggctccgggccgccaggggccgctgtggcgcagccgggctggcccgcgctgtccctgacgcggatcactggcccctcttgagcacggccttgccggtttggcggggtgaaaggttgcgaagatggcgacggccttgagcgaggaggagctggacaatgaagactattactcgttgctgaacgtgcgcagggaggtgaggccagcggctggacgctctgggggctgaggccgagcccggtcgttcgggagggccgggctggcggtggccgccccacccccgccacgggaggctcgggtccgtcggggaggccgcgtgaccccggcgacgtgcacgccagccgcccgatggaggcgtccccaccgcccagaccctcccgccgggggttccggggccagcctccgccccagctcctgaaggccagtgcgccgcgtgcactgtgtccgggtagggccagaggcccccgcacgctcaagaggaaacgggggccccgaggaggccaccgtagtggggttagcagtcctccgagaccccgtctcgcgctcagcccacatactcgtcctggctgaggggctgtgtcatcgcccgccgccagcaggatggcgaactgagtctcacccaccaaggtcaaggccactagggaacgtccttagggctttttccggttcccgagtctttcgtggggacgctctgcctctgaagtgggtccagcctcagaggcatgcgtctcatgccctctttcattcccctggacccgatgtccagaaattgcaggcagagcctccgggacacagaccctcggctcggaggctgcagattaggaagaagccctaggccagaaaagtggtgccctaacaacagcttcaacattcacaccaagcacttgtaccctgtctcctcaacgaataaaagataacatgagagagtctcacatagcctggcagtagtagggccccactacactcctttgttcttgactagtctggagttgagataggtgtgaagggcgagaaggcttccagggtcaggtcatgaggtggatcagtttctttaagccgatgggtccagacttttcagccctgccagagaattcctaattccatctctcaggttttccagtggtaatgaaagctagccaagtttggctatgctaaccaaagcgggttcagtgtgtgttgtcag

SEQ ID NO: 739 - DNA, 988 bp, Artificial sequence
  DNA replication origin
cgtctccgcctggcagccacctcgtccaggagggaggtggggggggtcagccccccgcccggccagccgccccgtccggcaggtgaggggcgcctctgcccggccgcccctactgggaactgaggagcccctctgcccggccagccgctccgtccgggagggaggtgagggggtcagccccccacccggccagccgccccgtccgggagggaggtgggggggtcagcccctcgcccggccaaccgccctgtctgggagggagggaggtgggggggtcagccccccgcccggccagctgccctgtccgggaggtgaggggcgcctctgcccggccgcccctactgggaagtgaggagcccctctgcccggccagccaccccgtccaggagggaggtggggggggtcagcccccgtccggccagccgccccgtcgggaggtgaggggcgcctctgcccggccgcgcctactgggaagtgaggagccctctgcccggccaccaccccgtctgggaggtgtacccaacagctcattgagaacaggccatgatgacaatggcggttttgtagaatagaaagaggggaaaggtggggaaaagattgagaaatcggatggttgccgtgtctgtgtagaaagaggtagacgtgggagacttttcattttgttctgtactgagaaaaattcttctgccttgggatcctgttgatcggtgaccttacccccaaccctgtgctctctgaaacatgtgctgtatccactcagggttgaatggattaagggtggtgcaagatgtgctttgttaaacagatgcttgaaggcagcatgctccttaagagtcatcaccactccctaatctcaagtacccagggacacaaacactgcggaaggccgcagggtcctctgcctaggaaaaccagagacctttgttcacttgtttatctgctgaccttccctccactattgtcctgtgaccctgccaaatccccttct

SEQ ID NO: 740 - DNA, 1189 bp, Artificial sequence
  DNA replication origin
cacttcccagtaggcgcggccgggcagaggcgcccctcacctcccgacggggcggctggccggacgggggctgaccccccccacctccctcctggacggggtggctggccgggcagaggggctcctcacttcccagtaggggcggccgggcagaggcgcccctcacctcccggacagggcagctggccgggcggggggctgacccccccacctccctccctcccagacagggcggttggccgggcgaggggctgacccccccacctccctcccggacggggcggctggccgggtggggggctgaccccctcacctccctcccggacggagcggctggccgggcagaggggctcctcagttcccagtaggggcggccgggcagaggcgcccctcacctgccggacggggcggctggccgggcggggggctgaccccccccacctccctcctggacgaggtggctgccaggcggagacgctcctcacttctcagacggggcggctgccgggcggagggactcctcacttctcagacggggcatccgggcagagatgctcctcacatcccggacggggcggcagggcagaggtgctccccacatctcagacgatgggcggccgggcagagacgctcctcacttcccagatgtgatggcggccgggaagaggcgctcctcacttcctagatgggatggccgccgggcagagacgctcctcactttccagactgggcagccaggcagaggggctcctcacatcccagacaatgggcggccaggcggagacgctcctcacttcccagacggggtgggggccgggcagaggctgcaatctcggcactttgggaggccaaggcaggctgctgggaggtggaggttgtagcgggccgagatcacgccactgcactccagcctgggcaccattgagcattgagtgaacgagactccgtctgcaatcctggcacctcgggaggccgaggctggcggatcactcgcggttaggagctggagaccagcccggccaacacagcgaatccccgtcaccaccaaaaaaatacgaaaaccagtcaggcgtggcggcgcgtgcctgcaatcacaggcactccgcaagctgaggcaggagaatcaggcagggaggttgcagtgagccgagatggcagcagtaccatccagcttcggctcagcatcaga

SEQ ID NO: 741 - DNA, 1213 bp, Artificial sequence
  DNA replication origin
tatgtagaatgctggatcatcatatgtgtgaatgtgaaaaaaaaaaaaaacaagggaagcaaggaggacaagaagtgctgggaggatgaaaaaaaagtgctttttttgtgtgtgttagatggagtctcgctctgtcgcccaggctggagtgcagtggcatgatctcggctcactgaaacctctgcctcccaggttcaatcgattctgctgcctcagcctcccaagtagctgtgattacaggcacgcaccaccacactcagctaatttttgtatttttaggagagatggggtttcgccatgttggccaggctggtctcaaactcctgagctcaagcaatctgcctgccttggcctcccaaggtgctgagattacaggcatgagccaccacgcccagcctgggatgctgagattttccagggtggcccgggcagggctcactgagatgtggggacaggctgagaatgggggagtgggcatcgaatcatgcagattcaggaagagcattgtagctggagggaatagccagggcaaaggccctgaggcaggagtatccctggggagtctgaggaacaggaggaggcctgtggggctggggcagcgtggacaacagggagagggtggcagatagagtcagtgagggaggggcgggagacagatgacggagagctttcgggtcatggcagagacaggctggcaccctgagagttatgaggagccagtggagctcctatgtgtgtgtggcggggggtgcgggaggtggggggtaaatcatccaacatttagcaggattcctctaacaaggggctgaagaagtgccagggcagaagtccagctatgtgactattactacatccaagagagaaacagggatccacagactagcgcggtgggtggcgtgaagtgcggggagatcctagatggatgtgtttgacggcagtgccaacgagattcgctgatgtgccagacatgggctctgagagagcggggaggtcttcggcttcagcaaacggaagacagagccgcgattaattgagacgaggagtcagcagaagcagctggtttggagggaatatcagaacgtttgctatttgttttcattggggtgcaacagacataacataaaatgtgctcttttagccactgtgaagggcacagttctgtggccattactaccttcacactgttgtgcagccattgccaccacccatctcc

SEQ ID NO: 742 - DNA, 855 bp, Artificial sequence
  DNA replication origin
tggcgcttctctgctttcggccggcggcctcatcctgggacaggcaaccatgagtcatccgctccgcgggtcacatgggcaacgtgaccaaaataaagtttcggtattttaagccgccagaaaaggggacaacggagctcaccgggggcgggcacaggaggcgggcgcaggcgggcggcgccggggccgtggggacgcggcgccgagggggcggggcctggcgggaggctcgcccctcccccacggccggcagcgacgcccggactcctaggcagtcggactccagggcgcggcacccctgcggacctcagccccgaggccccccgcgtccggctccccaccggcagcggcggcgggctgcgggatcccggagatcccggcgcgtcccccacagccaccgggaccccacgcgccagcagcggcttccccgggaacgtccttcagccccgggagcacgcgggaaaagccccagcgtgccaatgagggagcgccttcctcatgacggtcacgctcgggggcggggcttcccttcgccgctcccgagttccgggaaccccctttgattggtctggacggcctgggaaacactgtagtgacgcccaatcaaaacgccacgtctcggcctcgaggaaatattccgtgtcgggcccgtcctgattggacagttctttcgggttctggccactaggaagctttgtttaggtccggaaggcgggctttcctgggagtgggtggggagggggcgttgattcttgaccaatcctttcagtccgttgggtggtgaccagccaatgggccggatggataggacgctcctcccggagagtagtgagacccctggtgcggggcgattgg

SEQ ID NO: 743 - DNA, 971 bp, Artificial sequence
  DNA replication origin
ggcgggctggggccggagggggcggggggctcgcggggcggggaccgggcccagcgaggaggaggagccggcggagggccggcgcctcccccacccggaccgggcatccccgccgctcccgagcccgctgcgcggcccccgcacccccggcgctgggtccacggtgggggccgcggggcggaaagtttatccgcctcgggtcctcctggccccgcgccccactgctccgggccggtccccgtcgggcggcagcggccggcgctcagccctcgccggccccctgctctccggcgggcagggccagatgtactctctccggcaccctcttcagccccgtggacacctccctgagcgggcggggggtccccgagcttctccccgccagggggaccccgtcctgccgagcgtccctcggccgaagggcctcgtgtgacccctcccccttcgcttcccgggaagggaagggggcctgcgcagcatccccgcccctcgcagtcgttcacatcctactcttgcccttgcaccctcacagccaggagggtggggtctccgtttctatggcaagtgaggatctccacactcccttgccctttaccttccgtgaccccgatccttccttggcacaggggtccgtctgatctgctcatcttctttggattcttttggggcctctgcacactctccgttgaccctttttgccaggacaaggggactcaggctgcccatgttcttctttcctcacccagtggatagtgggggcttgtgcagctctgaagtcatttctaaataggaaagcagacacttcttccagatcatgcatactcttacactttgctgggttagggcgagctcatttcctaaataccctttgagttgccctccttttcttatggagacaactggacgttcaccgtgctcctttcgccatttgtgtgtctacactgacttgttctctcttctcggagttcctt

SEQ ID NO: 744 - DNA, 1094 bp, Artificial sequence
  DNA replication origin
tccagaggagctcggtgggcaaggacgaaaagggatggaggatggggccagccatggggcaggggcaggataaaaggcagggagtgggtggggccacgtgggtgggtggaaccagacaggggcaggtccacagaggaaagaggggtgggtccagaggggcggggcgggtgaaacggagccaaaaaggaggggtggggccaggtgggaaggctggatgtgggcggggcaagatgggtggatgggaccagacgagggcaggtccataaaggaaacgggataggttctgagggggcggggctggcagggagagaggaaccaaaacggaaagggtggggctatagaaagggtgggcccggggaagaggccaaatcggagggcgggcccagagggggagtggaagggaggaggggcggggcggggtggggaggggcaggcgctctcctccagctgcccctggcccctcgccccagggaccagcctcccagcaaggaccagctgacctggggggagtaaaatgaggtgggtgtccccgctgcacaggccggggacacagcgtcacctgttgtctgagacctgcgtgccttgtcggggtccaccatgtatctggcactcggagcacacgtgtgtcctgaataaatcggggccccggcagaggcatgagacagaggcgtgaggcccaaagcagcaggctccaggctcttgcgcgccacggacaccgcgagggagacacgtttggggacagcccggaggctgagggggcttggctttgacccgacagggcaaaggactgccataccggaagacgctggactggccgccggggagagatgcacagcgccttccctccctccccaggaaaaggggcttccctgcaacaacctctgagcaaggcgcactctggccgtcctcccagggacacccagccagacgccccttctagtttagaggctgggggcaagcccggtgagaaagaatcagtctagtcctcgtttgcacccagttttcaaacattcaagctgggctggtcctgcggtattcatgtcctttggagaccgagaatgaatgggcttggatcaattcaatcaatcccctca

SEQ ID NO: 745 - DNA, 1405 bp, Artificial sequence
  DNA replication origin
cgcaaagcgcagctccccgagccgcgcccagcccccaggccccgggagcgcgcccccccagccaggtcagcagcccgccccaccaggtctggggaggggtcggagagcggacaggtgcaggcgggttgaggcgccgccttgcccgatgcttcccctggcagctctgcttcctttactcggggttttaaaggtcatgttctccgtcagcggaaacattctacatgacacttctgagacagaggctcctttagaggcatttaatccaagaaaggcaccccctgaagaacagggtttataggtcacggctcagacggcctataaatcacgcttgccgctgcggggcgccaggcgggagcttgaaggccaggaaaacagggtggggcccgattggaaagaggggtggctccagaggggcggcgcgggcaaggaggggccaaaagggatggagggcggggccagtcacagggcaaggccgggatggaaagcggggggggggggggggccaggtgggtgggaggagccagatggggcggggcccataaaggaaagatgggtagttccaaaggggcggggcgggtgaggaggagccaaaagagatggaggctggagcctgccaaggagctgggtcaaaatggaaggtggagtgggtgaggccagagggtgggatgggtcaaatgaaggcggggccctaatggacagaggggttggtccagaggagaagggccacaaggaatggagaatggggtctgccacagggcggggccagggtggaaggtgggaatgggcagggccagacgggtgaaaggggccaaatgagggcggggccccaactgaaagaggggtgggtccagaggagctcggcaggcaaggagggaccaaaagggatggagggtggggccagtcacagggcaaggcagggatggaaagcaggggagtgggtggggccagatgggtgggaggagccagatgggtgcgggcccaaaaagaggggtgggtccagaggagctcggtgggcaaggacgaaaagggatggaggatggggccagccatggggcaggggcaggataaaaggcagggagtgggtggggccacgtgggtgggtggaaccagacaggggcaggtccacagaggaaagaggggtgggtccagaggggcggggcgggtgaaacggagccaaaaaggaggggtggggccaggtgggaaggctggatgtgggcggggcaagatgggtggatgggaccagacgagggcaggtccataaaggaaacgggataggttctgagggggcggggctggcagggagagaggaaccaaaacggaaagggtggggctatagaaagggtgggcccggggaagaggccaaatcggagggcgggcccagagggggagtggaagggaggagggg

SEQ ID NO: 746 - DNA, 973 bp, Artificial sequence
  DNA replication origin
tcagggggtgcctttcttggattaaatgcctctaaaggagcctctgtctcagaagtgtcatgtagaatgtttccgctgacggagaacatgacctttaaaaccccgagtaaaggaagcagagctgccaggggaagcatcgggcaaggcggcgcctcaacccgcctgcacctgtccgctctccgacccctccccagacctggtggggcgggctgctgacctggctgggggggcgcgctcccggggcctgggggctgggcgcggctcggggagctgcgctttgcggactggaggtggcgaccgtgcgagcagagacgcccctcaccatgggccaagagccctgaccctaacaatgggaaagggccagggcccttgttccacttcagtttccttccctttgtgccctgggggacactgggtcctgctaaaggctggggcgcctgtcgcagaagacccagtgtcctgggtgctctgggtgaggcacagcgtcctgggtgcccagataggggtgcagaatcctgggtgcctggttaggggtacagagtcctgagtgcctgggtaggatacagaatcctgggtgtctggtttggttgcagtgtcctgggtgctttgggtgggggcacagtaccttgggtgcccaggtaggggtgcagtgtcttgaggatctgggtaggttcagtgtcctgggtgttcatgtaggagtgcaggggcctgggtgcctgggtaggggtgcagcgtcctggaggtctgggtaggagtggtgtgtcctgggtctgtataggggtgcggagtcctgggtgttcatgtaggagtgcagtgtcctcggtgcccccggagggtgcagcgtcctgggtacctggggagggcgcagcgtcctggctgttttgtacaggggcacaacgtgatggcttctctggatgttccatctgcagtgtctcagaggatgtcatagaacttggaagaactgtgcctaggt

SEQ ID NO: 747 - DNA, 738 bp, Artificial sequence
  DNA replication origin
cagaaattcatttatatgacaaatgtttactgtgtgcctactgcgtgccaggtgctgtgctgggcagtgcatatggtccttgtcctcatggaactgatgttagggtaggagagacaagcaggcagtagttaggattgtgatcgatgtgtgtctcggaagcacaaggggttactggagcacctgttcaggacgtatcatccattcccggtgggtcaggaaattctaccggaaattctaccgtagcaagtgctatctaagtggagatctgaagataccctggcaaaaggagacggatagagagagtggaggtgggggcttgggggaggcgggttacagggaagaacatcctggtcagagggaacagaatgtgcaggtgcttcaaggagagaatgcgggatgtgactagggagctgcaagtcgccagtgtggctgcagcatggagctagtggaggacaggtgtgctgaggtgggctgcagaggcacggggcgagggggtgtctgtctccaaggagctagtctgtcttgccaagttgagggacatttaaagggtttgactttatcgggacagagaggggccagtcttgccttagaaagctcctggttgtggtgagtggaccagaagaggtcaagaatggcagctgagatacataggggtccttgcttggcctccgtgggcattttcagtgagggctaaaccagatgccttgtctaccgcaaagggcacttgttggatcagcc

SEQ ID NO: 748 - DNA, 1339 bp, Artificial sequence
  DNA replication origin
taaacctacaggcacccctgtcataatctgttgtcatactatatgcttttcctttgtaatacttatcacaatttgtctttatatattcatgttaatttcttttgtattatttcatatttatcttcttcacaaagcttcatggaggcaagttctataactaatttgtttacttcagtagcccagtagctggtacagagcaggcactcaataattggatctattatttgatggaaggatggatgaatgggtgagtggatggttgaatgtatgggtagggggatgggtgggtggatagagggttgggtgggtagatggatggttggatggataggtggatagatggttgatggatggatggatagattaatgcatacataggtggatgaatgggtgggtgatagatgaatgggtgggtggatagaggcttggatagatgaatgggtggattgatgattgggtgggtgggtaaatgggtggatgggtgggtggatcgagggttgggggtggataaatggttgggtggatgagtggatagatggatggatggatggagggatgggtggttgggcagatggatggattaatgaatggatagatggataaatgggtgggtggatgggtggatagatggatgggtgggtgggtgaatagatgggttggtagatgagtggatagaaggtagatgggttggtagatgagtggatagaaggtagatgggttggtaggtgagtggatagagggatgggtgggttgatgggtgggtggaaggctgggtgggcggatggcaacatcaagtactttgggaggccggggacttctgcattgtaaaagtgcataaaggggtttctttcttttcatggagaaaatttctattctgaaaatggcagcacattgcctgttgcaaagccaacactttgggaggctgaggtgggcagatcacttggggttaggagtttgagaccagcctggccaacatgatgaaccccgtctctaacagaaatacaaaaattagccaggtgtggggtggtgcggggctgaaatcccagctagtcaggaggctaagacaggggaatcacttgaacctgggaggcggaggttgcagtgagccgagatggcgccactgcaccctgcctgggtaacacagtgagactccatcttaaaaaagaaaatactcacaaaaaacaacaaagaaatgtctcctgggtgagtaggcttcaggcaggacctgggccagtggccggatggccattgactctctctgcacgttttccctctctgtacatctgcatcgtctttcctcagctgccgatggctgggttctgctcctcagtccatctgc

SEQ ID NO: 749 - DNA, 895 bp, Artificial sequence
  DNA replication origin
ttttggcccaagacactagcaggatgaagttggcattactgggaagcagcagccagatcagatgtggggagagattacagacactcaggttctatacccgagacaagtggaggttcccgagaagcagctggacggtgagttgggagctcagacgggaagtccagcccgcaggcacatggcgggaagctacatttagagatgtgagtctgcacacaagtggcagacagggaatccaaggacagagcccaggagcaagacagaattcagagtggggggaaactgaggaagagaaagggcagccccagtggtgagaggaaaggaagccagtgtgaggtggcacgaagggaaggaagtgcgtcacagagaggggcaatcagccacgtcacaggctgccgacaggcaagggcgaggactgagaagcgcccacagcactcagccctgtggacggctctccaagagtctgcctgcaaatgagaaagagaggagggggcctggcttggaggagggagaggtctagagagggtctttaagatgggagaaatcgtggcatgtttgtatgctgacgggaagatccagggaggagagaaagaccggtgccagaaacccaggaggcaggaccaagagcagcagtggacagagccagggcctcacagggaccagaaagaaagtggcagatctggcaggaggagctggaggaagttctccttcaattatctctacctggcaaggtcaacagctaagagagagggcgggaggagtgttgggggcttgagagagggtgaaggtacttaagagtcaccttggagaatgggaagcgtggacggggaccaccagcacctgaccgggcagtatcatgggcccacatgaggttaaaaacttgaaccgtgacatcagc

SEQ ID NO: 750 - DNA, 841 bp, Artificial sequence
  DNA replication origin
tgagacccggtcctgcccggagcagagcagagccgctcacccttgaggggtgccctgtacaactccacaaatacgtgtccaccgtcctgctggtcgccagcgcgcacagttgctaatccgttgaaatacctctgtggctgctggcgagcgggtgtcacccgagcttccagtgcccatgctgcgctggcctgcatcattctgagtagcggcgtctgtgccagaccagttgttaaacattctgaatgtcacacctggtggagggtgtgtggatgagaggggctcggttgagtaccaagtgttggggaaggccttttggagaggtcaagaccaggccagattttgagcaggagctcagcagacaggccagggaggaacaggcagatattcactgtcagcggcggaaaccagctgtgcaaaggccctgaggcagggagagcagggtgggtttggtggggtggtggcggcagaggagggggtggggtggcggggagaaggggcagtgccagggtggagagagaggctggagtaggggcagtggcagcagagcagggggtggcgctggcagaggagggagctgggaagaagagcaggactcccttggggctggtgtttggtgccaaaggccatgaagagtgagcagagggctttaatttgacggtgtatgaggtcctattatattaaattttatttttttgagaccgagttttgttctttcatccaggctggagtgaagtggcacgattttggctcactgcaacctccgcctaccgggttcaagtgattctcctgcctcagcctcccgagtagctgggattataggcgcccgccaccacgcacggct

SEQ ID NO: 751 - DNA, 1423 bp, Artificial sequence
  DNA replication origin
ttctctctctctcactctctccctccctccctctctccttatgaagccattaatataatcatgaggacacctaccttcatgacttgtctcatattaattagcttctgaagatctcacctccaaataccatagcattgggggttggggcttcaacctattaattttggggaaatacaattcagtccatagcagtcagtaaatagataaagcgaatttccctggtgggaagtgctgcagaggaagaagtgctgggaggagggtgatggttggggagggagggggtagtccctgaggaggcagcagtttaagctgagatgggaaggaagagaggaaggtggccagtggagggccaggaaaggaggattttgggtgaagagaacggctacagcaaacagatgggaaagactgaagcatgtcccgggactgaaggaagtgggggctggagtccagagattgcagagcatgctggtactggagggtgggggaggtggcaggagtcccattcggggcatggtgggggctgtaggaggacagaggagtccatggatgtattctgaggtcctgttggtctaggagctggttgggtgactcctgctgccatctaggcaagacatggcagccacttagatgaggatctgggaggggagaagaagagaagaggacagcttggggatgtccctcagagttagaaccaacagagtttgtaggttttcagcttcagtacctaggtcaccagcagtgtcatctaccgagaaggcaaagcctggggaaaaacaggtttgaggaggcaaataaaaaaatctctgttgcacacgttacatgtgggatgctctttatacagccaaatggggaggccacataggctagcagatcctgggccaggagctcccagaaggacctaggcttgagacctgagtttgtaagtcatcaacaacatctggcagggctcaggcacttagagggcaggggaaggaggaggagatggtgatggggcagaggagaagggggaaccagttgttgcaggaagatggacagcccatgaggtttcccagagggcctggccactgagaagctgagataagagaatggcgtcattggatttggtgacctagaggttcagagtggccagcgggaagttttgtagtgaatatagaggagacgaaaaagaatggggatgggaatggaggaaggagagagggctggaggaagaaaggaagagaaactaattttgactgggcaactatgcagaagaaagcccgctttaggagtgaggtcctggaggaggggacaggagatgggatccagggcgcagctggagggattctacctggagcaggtgggggtgcttatttcatggccataggagggaagagagaggagacagctgcaccttgttggagtccatgtcagctgattggaagaa

SEQ ID NO: 752 - DNA, 1413 bp, Artificial sequence
  DNA replication origin
ccatggaaaatagattgtaggcagcaagcggggaggcaggaggacctgtgaggcactaagggaggctggatgggcctctctgccttcaagattgtgtaacaatagtccctgaaaccatgctgaggagaagagtgaggctgaacaggaatgatggggagtgaataaaccatgtggttggaagtcctgctcagcccgagaatgactgggtgatagtcctggtgccaaagacctagagccacagatgctggtccgagaagaggtttgcagtggtggtttcagaggtggtgctgttattggtggctggaggtgtgggtggccaggctggggtggggggaaaggtcactggatggggggagaccaaggagcgggaggccggggggtgggtgggtcatcatatggatgttgaggtcatccagaatagtggcaggggtggacctggagaggaagagagtgacccaggcctggcagaacagagcaggcagcacggccaggagtccacagatggcagtgatgggaagcgagggacggcagtgatatggaatggcaccggcttccagggaactggggttttgatggaggaagcaggagaaatactttggaattggtaacagggaacaaggaggacatcaatttagctctaggctctgcaatacttggggtatgggagaaaagatggcattttgggagtcctagagagatggggtccttggggaatggcaggtttcatctgaggcctgacctgaaagcaggtggacaacggtgaacagtatgtcaatgatcctctgcgggacccaaagcaacatggtcgaaggattggggagggtgcggggagcaggccagggagggacagtgcctgtgcaggaattcccactatatgctcttagcacctgtcacatccttatcaagctctaccctaattactggtgcactcgttttccctttagactgtacattttgtgttatagagagcatatctttttattccttgctgtagctgcagtttctagcacagatatgctagcacctactatgtgctcaaaaatgttggttgaatgggtgagagaatgctgagctcttcccagatgccatcacaatgccaggatagcagttagctgaggtttggggaggagggtgtatagatttagaggcttccccactcctcgctccccacgtttcttctcattctgactctagtgtagaagtcaagtccatcctatattttatctcagaagttttggcaaataacaaggcatgcaatattgactaagagcctccaggatcccacaggccccagtgggccccattaccagctatttggaagttgaggcagacagactgaattgggtcgttgaaggagtttgccagtttgtggtgggaattgagttgaatttattatcatttttgccagcaacc

SEQ ID NO: 753 - DNA, 1426 bp, Artificial sequence
  DNA replication origin
gccttcatttggtaggcaattaatagtcactagaaatataaatcagggcagagacaaacgggggataactgttgacaaaccctttaaaagagcattttaaaaatagtggcagagatagagcatggtggggagaaatagtgagggatatttcctatggccctacactctgcaccagttctggcagccctgagcacagagagaggaacaaaagctatacagaaaagagaacggacctccttgttcttttaagtgttcaagccttttcctcaggagggacttctcaggaagagaggcaggtcaatgtgtgggaggggctttggcatgtgagcgggactttgatgtattgaatgaggcctcagtgcttgggaagtggctcagtgtgtaggaggagcctccacgcgtggggagggggttcagtgtgtgggaggagcctccgtgtgtggagaggagcctctgtgtcggaagagcctccgcctgagggagggggctcagtgtatggggaggaggcgcagtgtgtggggaggagcctcaatgtgtgggaggagcctctgtgtgtggcaaggggctcagtgtgtgggaagagcctctgtgtgtagggaggagccttggcgtgtgggcagggctttgacatgttagaggcctcagtatgtgggagggtaatcaatgtgtgggactgtgtgtggggaggggtactggtatatgggcagggttttgatgtgttgaaggaggcctcaatgtgtgggaggggcttcagtgtgtgggaggagtctcagtgtatgggaggggcctcggtatggggagagttttgatgcactggaggtctcagtatgtgggaggggtctcaatatgggagggacttgtgtgtgggagaggcctcagtgtgtgggaggggcttcagtgtgtgtgggggggcctcagggtgtgggaggggcctctgtgtgagtgggacttgtgtgtgtgagaagggcctcagtgtgtgggagagtcctctgtgttgggggagaggcattggtatgtggacagggctttgatgtgctgaaggaagcctcagtgtgtgggagatacctcaatgtgtgggagaggcttcagcatgtgggaggagcctgcgtgttgggaaggggacttagtgtgtgggaggggactcggtgtgtgggtggtgcctcactgtgtggggaggagccttggcatgggggaggagatttgatgtgttacaggggcctcagtatgtgggaagagcctcggtgtgtgggaggagcctccatgggtgggaggggcctcagtgtgtgggaggggcctctgtgggaaggagccttggtgggtaggaggggccttgtgaggggagggggcatggtctattgcccagccagccccaggcaccccgttatgcagatgctcagcaatgtggtttcctcctcctcttcctggg

SEQ ID NO: 754 - DNA, 1589 bp, Artificial sequence
  DNA replication origin
gagagctctaggggacaggggttgctgtccttccatcctccctgggccttctgcacggctttgccctggcactgtgggccatttcccagatttgtagaggttgtcaaatgcacccctgttcccagggagccgggaaagtgagggcagatggtgaagtgttgcagggctggaccacgaggcagctggaggccaggacaatggactgggcagggttgcagggccaagtgcagtggtgagagcaggtgagaggaggggaggggaggaggggggtgtgaaggggagaaggaaggagggcaggaggaggggaggggaggggaggaccagaggaagcggagaggaggtgggggggtgaggaggggaggattggaggatggggatggggtggagagggggagaggagggtgaggagaggaggggagggcaggaggaggggaggctaggaggagagggggaaggagaggaggaaggagagaaggaggagaggggaggaggcaagagccagtctggagggagcgagcctgtgagccaggagcacagagggcgggggttgggcctcagcgtccttcatgaagaactcaattcttcaatggcagaggatgtttctttttcctctggttataaaacagttgatgttctttatagagaagttgagctacagataggtaaaaagaagaaaatagcccgcatagtcccccggctccccgatgaccattggtgagaagtgaggcctggtattcacaatgactcacatccagatgtttcttcttggggttttgagaggccggttgggctgaagctccaaggaatgacctgaaggccctggtgaagtgttcctggggcgctttcaccccaaggagctctgagcagccggagaaggggctgaggtatgtgggcctgtgaaggacaggagcacccagaaagccggttcctagggtgtccccccccaccacatctggggaaagcccagcctggcctggctcctggcccggccctgaagcctaggtttgaaattgtggcttaatgatccacagctgcgcttttggttgccagcgccctcctgaaaaactaaagaaggccttagcaatttgagagagctctgggaagcaggaatgaggccggggtctggggaggagggtggaagaggaagaaagagtctttgagggcactggcaacccccagctctgagcctgtgccctctcccggctttcttgggctcctgggtgctgtggatcttggctgggctgctgctctgggctgaccccccccccccgccccgcaaagctctgtggaaagcgccttacctgcttatctcccgccatctggaacatcctcctgaatctctgcctcatcgcccatcatctgtaccaaaagccattcctctgattctagtgttagtcctggcagagtggctgcagttggctgtcttaggtgtgcgagaaaatcattgtttagccaaggaggtggagggtggagggttatccctcaggctcttcagctcgggagcccatgccggagagatctgggaaagcatccttatttgttggcccaggtgaagagcagccaggcagggcagccaaggtgactcctgg

SEQ ID NO: 755 - DNA, 1342 bp, Artificial sequence
  DNA replication origin
gactgagcatagaacagaaacttattgacagagccaagacacatcgcagctctgtggagaagctggtgggggctcggtgggaagagcaaacgagggccacatggaagggaaaccctccctggcctattcactcccttagtccttcactagacatgatttcctgagtgccaccagggcctggtgctgtggtaggcactgaggatacagcagcaaacacatgtggccccacgaagctccactctagtggagagacagacagcgaacaaatgagtaaacacagcactgtacatggtaagaaaagcaatggagaaaaacaagacagagcaaggagcagggcactgggcagcaggtctggaaaggtctctccgctggggtgatggaactcagcctacccagacagaggggagaggtgggggagccaggcggccaagtgtgcaggaccgggcaggtgctccaggtggatgggctcgtgagtgtgaaggccaaaggaggggcacgcgtggagaacagcatgggttcaggagggtgtgcgggcccagagtggaggtccccactggggttggggcagttgctctcagtaagctgcaaagcctcctcctggtggcttctgagcaggaaagtgacattagctgatggctccaggtaacaaagagaccacgggggccaatggcagaaacatgcagctgttatgatgatcaggatggagggcgggatggtggagtggtccagcgtggcaaaactgcaggggtggtgagaagcagaaagcactctgaaggaagagcccgcaggatctcctgatgggtggggggtggagaggaagaatggggtgggccatggatgatgctgatgattttggctgaatggctggaaggtgaaaactgccatgtcctggttcaggtgggatgacaggaggaggctgctgggtggtggtggggtgtgggctccatgtggccgtggtcagtttgaaatgcaaacgtccaggtcaggaggatgagtcgacacttaggagtctgagtctagacttcaggggcagaggccaggcccagggaatcagtttgggaagcatcagcttaaatgtgccttgtggtgtttagaaccacgagactgagtgagctcacctagggattgtgtgcagacagagaggtggcccaggaagggagccctgggatccccaaaagtcatgagtcaaggagattggggctgggcatggtggctcacgcctgtaatcccagcactttgggaggccgaggtgggcagatcatttgagttcagaagttcgagaccagcctggccaacatgatgaaactctatctctactaaaaatacaaaaaattagccagga

SEQ ID NO: 756 - DNA, 2266 bp, Artificial sequence
  DNA replication origin
agtgtggatgtgtgggagagtgtatgagagagcgtgtgtgagtgtgagcgtgtatgagcgtgacagtgagtgtggatgtgtgtgtaagagtgagtgtggatgtgtatgagtgtgtgtagagtgagtgtggatgtgtgtgtatgagtggatgtgtgtgagtgaatgtgtatgagtgtgtatgagtgtgtggatgtgcgtgtgtatgagtgtgtgtgaatgtgcatgacagtgtgtgtggatgtgtgagcatgtatgagagtgagtgtgggtgtgggtgtatatgcataggaatgttgtgttgcatgtgtgcatgttaatctacctgtatatgcatgtatatgcatgtgcatgtgtgtgtacgtgtgagtgtgaacatctgtgtgcagtgtgtgtatgagtgtgcatgcatgtgaatgtatgtggatgtatgactacattgagtgcatgcatatgtatgtgtgtatatgtgtgtgcacatgggtgtacatgagtgcatgtgcagagaggatgagtgtgcagaggattgtgtgagcctggtgtgcatgtgtatgtatgtgtgtgcatgtgtgtacatgtgtgtagagaggatggtgtgagcctggtgtgcgtgtgtatgtatgagtgtgtgtgtgcatgagtgagtgtgtagagaggatggtgtgagcctggtgtgagtgcgtatgtatatgagtgtgtgtgtgcatgtgtgtccatgagtgtgtagagaggattgtgtgagtctggtgtgcgtgtgtatgtatatgagtgtgtgtgcatgtgtgtccatgagtgagtgtgtagagaggattgtgtgagcctggtgtgcgtgtgtatgtatatgagtgtgtgtgtgcatgtgtgtccatgagtgagtgtgtagagaggatggtgtgatcctggtgtgcgtgtgtacgtatatgagtgtgtgtgtgcatgtgtgtccatgagtgtgcagagaggatggtgtgatcctggtgtgcatgtgtatgtatatgagtgtgtgtgtgcatgtgtgtacatgagtgagtgtgtagagaggatggtgtgagcctggtgtgcgtgtgtatgtatatgagtgtgtgtgcatgtgtgtacatgtgtgtagagaggattgtgtgagcctggtgtgcgtgtgtatgtatatgagtgtgtgtgtgcatgtgtgtacatgagtgtgtagagaggattgtgtgagcctggtgtgcatatgtatatgagtgtgtgtgtgtgcatgtgtgtacatgagtgtgtagagaggattgtgtgagcctggtgtgcatgtgtatgtatatgagtgtgtgtgtgtgcatgtgtgtccatgagtgtgtagagaggatggtgtgagcctggcgtgagtgcgtatgtatatgagtgtgtgtgtgcatgagtgagtgtgagcctggtgtgagtgcatgtgtatgtgagtgtgtgcatgagtgtgtgtgaacctggtgtgcgtgcatatgtatatgagtgtgtgtgtgcatgtgtgtccatgagtgagtgtgtagagaggattgtgtgagcctgttgtgagtgtgtgtgtccatgagtgtgtgtggagaggattgtgtgagcctggtgtgcatgcatatgtatgtgtgtgtgcatgtgtgtacatgagtgtatatagaggattgtgtgagcctggtgtgcatgcttatgtatatgagtgtgtgtgtgcatgagtgagtgtgcagagaggatgagtgtgtggagaggactgtgtgagcctggtgtgcgtgcataggtatatgagtgtgtgtgtgcatatgtgcacatttactgtgtagagaggattgtgtgagcctggtgtgcgtgtgtacgtatatgagtgtgtgtgtgcatgtgtgtccatgagtgtgtagaagattgtgtgagcctggtgtgcgtgtgtatgtatatgggtgtgtgtgtgcatgtgtgtacatgagtgagtgtgtagagaggatggtgtgagcctggtgtgcgtgtgtatgtatatgagtgtatgtgtgttcatgagtgagtgtgtagagaggattgtgtgagcctggtgtgcgtgcatatgtatatgagtgtgtgtgtgcatgtgtgtccgtgagcgagtgtgtagagaggatggtgtgagcctggtgtgcgtgtgtatgtatatgagtgtgtgtgtgcatgtgtgtccgtgagtgagtgtgtagagaggatggtgtgagcctgttgtgtgtgtgtgtgcatgagtgagtgtgtgtgagcctctggtgtttggcatctagttctctctgcaggtctg

SEQ ID NO: 757 - DNA, 1045 bp, Artificial sequence
  DNA replication origin
tctgcctgtggcactcatgatggatgggcgcctgagactggaacccaaggctgtatcctgctggccccacctccctgccaagacacttgtactcagcacttcggagaggggccgtaacccagcgcctgtccacacatcgaataactctcagccccaagttgtggtggtccatagaccccacaggaccctgggagaggtgggctccagagcctcaccagagcagactctcatttggtttttaggcaggaggaggagggaagaggaggggagaggaggagggaggaggaggaggaggaggaggaggaggtcggcagtccagccagggcagctgaggcctgagaggcggccaggtgctgaaagcaacagggtgggttcttcaagtgcaaagccctggaaatgagttggggggctggtggactggtggggagtccacaaagagagctctgctaggggagttgctttttgtgctgaagacttttgggtaggggaacaacatggagtgatgtgttttagaagctcccgttctgatggtgctgtggactgtgggccagcacgggacaactgatgtgcccgagatgaacagggagacgaaggcagtagtcaaagagagaggtgaggaagccccaggagggtggtggctgtgcagatagaggggcagggaccactgcggaacatgtaggagtagaactgaccaggtttgagtcatccagatgtgggggtgaccagatagatggtggcacctgtcagggagagaaggagcccctgaggaggagtaaggggacaaaggattagcccagcatcacctctactgagggagggggcatgtctgtacacagctgtgtatgcggcctgaagctcagggttggctctaggctagatttcaggatttggcatcattggcccgggcaatgagagtggcagaggtggctcagggaggagaaattcagtgagacggggccaaggaaggtccctggctgaggaacactggaggaagaaccacaaagcctggcagaagccctgcctgcatctccaaggctccttgaat

SEQ ID NO: 758 - DNA, 1066 bp, Artificial sequence
  DNA replication origin
cctccggagcccagctgggcacaggatgtgataagcaccctcctcccttccttgcttctcccctctgggcagggaagccccagggtggctagggtggagactggggtggagaccaggagggactagtgagtaacctcgtggtgcttccctccctgtgagggtgaaggtcacactggctctcccaggccaatcctgcgccttcccagacctttcaatgaggttgtctctgcatctgttccagtcagtaattagacaaaaatccattaaaatgaagcgggggtactttgccttcctgtgaaggaggccaagggagattcctcgtggggagggggcagagagagctggggtgtctatgggctgctgctgggcctgggagagagaggcccaggtgagagagggtcagctgggtgggtgtggtcaggtgagggggccgggtggtaggggccaggtaggagaggaccatgtgaaagacggtcaggtaggagagggccgggtgggaggggcaggtgtcagggttcagtggggaggagtcagggggaggggccaggtaggagaggactgtgtgagacagagtcaggtaggggagggccagctgcgaggaggccaggtaggtgtggttaggtgaggggccaggtgggagggggccaggtaggaaaagatcacgttaaagagggtcaggtaggagagggccaggtaggaggggcccaggtgggagggattatggggaggggacagagggcgaggcccctaccatatgggaggggcccaggtggccagggccagggaggggaggtccaggtgggagaaagccgggtgggagtggctgggtggcacaggcagtgggaggccctgggcttccccattcaggactctggatcagggccacactcttgaggcaaaaaggaatggtgagtggcccaggttaaacttgctcactggactccggaaccatcatcttgttcttcccctcccagaccagggtctccaaagaaagatctgcatttaacactccattaaccctctgtatcagcttctcttcctaccactctgggagctgtggattcac

SEQ ID NO: 759 - DNA, 915 bp, Artificial sequence
  DNA replication origin
gcccagtctggaaagtgaggagcgtctctgcccggccgccatcccatctaggaagtgaggagcgtctctgccaggccgcccatcgtctgagatgtggggagcgcctctgccctgccgccccgtctgggatgtgaggagcgtctctgcccggccgcaccgtctgagaagtgaggagaccctctgcctggcaaccgccccgtctgagaagtgaggagcccctccgcccggcagccaccccgtctgggaagtgaggagcgtctccgcccagcagccaccccgtccgggagggaggtgggggtcagccccctgcccggccagccgccccgtccgggagggaggtgggggggtcagcccccggcccggccagccgccccttccgggaggtgaggggcacctctgcccggccgcccctaccgggaagtgaggagcccctctgcccagccaccaccccatctgggaggtgtactcaacagctcattgagaacgggccatgatgacaatggtggttttgtggaatagaaaggggggaaaggtggggaaaagactgagaaatctaatggttgccatgtctgtgtagaaagaggtagacatgggagacttttcattttgttctgtattaagaaaaattcttctgccttgggatcctgttgatctgtgaccttacccccaaccctgtgctctctgaaacatgtgctgtgtccactcagggttgaatggattaagggtggtgcaagatgtgctttgttaaacagatgcttgaaggcagcatgcttgttaagagtcatcaccactccctaatctcaagtacccagggacacaaacactttggaaggccgcagggtcctctgcctaggaaaaccagagacctttgttcacttatctgctgaccttccctccactattgtcctgtgaccc

SEQ ID NO: 760 - DNA, 1264 bp, Artificial sequence
  DNA replication origin
caccacccttaatccattcaaccctgagtggacacagcacatgtttcagagagcacagggttgggggtaaggtcacagatcaacaggatcccaaggcagaagaatttttcttaatacagaacaaaatgaaaagtctcccatgtctacctctttctacacagacatggcaaccattagatttctcagtcttttccccacctttcccccctttctattccacaaaaccaccattgtcatcatggcccgttctcaatgagctgttgagtacacctcccagatggggtggtggctgggcagaggggctcctcacttcccggtaggggcggccgggcagaggtgcccctcacctcccggaaggggcggctggccgggccgggggctgacccccccacctccctcccggacggggcggctggccgggcagggggctgacccccacctccctcccggacggggtggctgctgggcggagacgctcctcacttcccagacggggtggctgccgggcggaggggctcctcacttctcagacggggcggttgccaggcagagggtctcctcacttctcagacggtgcggccgggcagagacgctcctcacatcccagacggggcggcagggcagaggcgctccccacatctcagacgatgggcggcctggcagagacgctcctcacttcctagatgggatggcggccgggcagagacgctcctcactttccagactgggcagccaggcagagaggctcctcacatcccagacgatgggcggccaggcagagatgctcctcacttcccagacagggtggcggccgggcagaggctgcaatctcggcactttgggaggccaaggcaggcagctgggaggtggaggttgtagcgagccgagatcacgccactgcactccagcctgggcaccattgagcactgagtgaacgcgactccgtctgcaatcccggcacctcgggaggccgaggctggcggatccctcgcggttaggagctggagaccagcctggccaacacagcgaaaccccgtctccaccaaaaaaatacgaaaaccagtcaggcatggcggcgcgcgcctgcaatcgcaggcactcggcaggctgaggcaggagaatcaggcagggaggttgcagtgagctgagatggcagcagtacagtccagctttggctcggcatcaggaggagaccgtggaaagagagggagagggagaccgtggggagagggagactgtggggagagggagaccgtggggagag

SEQ ID NO: 761 - DNA, 1667 bp, Artificial sequence
  DNA replication origin
ctttcatctgcttacgttttcaagcccagctgtgtgcccagcactgtgctgagtgagatggacagacaagtagggaggagggtcctgagtggtgggcatggactggtgcagagcacacaggagaggcccagcctggcctgggtggtcccccaggccgtaaagccagagctgggttttggacaatccctggagctgagccaggctgcagggaaaagatgcacggaggcgcagaggcagcaaccagccccctccaggacctgcgggagtgtttatggcatggtccttgcccacaaggaggtggtgacaaattggggacaagttaaatagaacaagatttaagtcccattgccaagcagggaatgggagccggggcacaggaaagctcgtgatgaagtgccagatgaatcacacactgcatggctctcagcctgaggagagcgatggcgggggcggggcaggccggacccggaggagtagggggagcaggcgggacctggaggggtgggtgggagcagagcgatgggtattggggcaagctggacccagaggagtcgggggagcaagtaggacctggaggggcagatgggaggagagcgatggtggagaggggcaggccggacctagagtgtcaggtgggaggagagagatggtgggggggcaggtcagacctggaggggtgaggagaggagagcaatgggtggggagggcaggcctgacccagaggggtgggtgggaggagagcactgaggggagcgatgggtggttggggaggtggaacccagaggtaggggtgggaggagagggatggtggtgggggcaggcctgacccagaggggtgagtaggaggagaggagattttggcaggagaaatgaggatgtcagcaaaggcccgaggcctgaaggctcaggctgagtccaggtcaggtttggctgcaatggatgagttggggtcaaaggcggctgagagggggctcctcccagagcctgagctggcctatgtgtccatcccctcccttgttggagctctggcgtggagcttcccattctagcctcagccacctatttatgtccatctcctgctcacacaaaaccagattccagagacaaacagggagacataaaaaggagaagagatgaagattcattgatgccagaactgactctcttctggaaaattgaaatattttgtacgtaatgacaatcaagtcaccgtgcgaccttcccggaataacttcccagatatatgacagtgacaacaaccgccccattggcgctgacacgctgaaggctccccaaagccaccacttaaaaaatgcctcccgcgttattaacattcctcacttgggaatgtttatggctcgtcactgttatcaacagtaacaaatttcgagaacctataaatgacaccacccccagagacagcccgggacaatccaccatcagcctgcctggcccaggctagactgtgaacatcaaatcaggctcatctgatgggcccccagccccgctgctcccacctcccgaggctcctgtcctcctcactcaccttgacccctgaaagccctggctccatctgcatccacttaacctccatcagggcccttgcccatcagatactgctggggggagggtacaggggtctcctgttcagaaccagggctttgagc

SEQ ID NO: 762 - DNA, 1426 bp, Artificial sequence
  DNA replication origin
cccgggagatgcccttccaccaccttcagcctgagagtcctgtgcctggcagggccctgggagtctggaactggggaggtcagcagctccaaatgcatttccaggaggcacagctgggttaagggacaagctgaacttccctcagagaggaagagctgcagaggggcagagagctcgtggacccccccagatgccacccctcctgggccccttctgggggagtggaccccctcctcttccagcccatgcctgggatggacaccgactccttccccgcaccctagtctctgtctgtccctctagaagacatgcctgggggttctccaggattggtcctgagacactgagtctccggagaggagacagccacccctgcaccagctcccccagccaaggccaggtgccccctagcaggcttgttggcccgtgtgctggagcagcttggcggcaccccgctatgcccccggttttcagtaagtaggatggagcccctgccatgtggctgccccgcagacagagtcccagccatccggagctcacattgtggccaggaaaacaggccaaacccgagtagtaattgagcggaaactgagagattagtgctgcaaagacagcgaggcgggaaccaggcaaggtgggcactgttgtcaacggggttgctgaatgaggtttccacaagaaagtgacctgggaccaatgtggcatggagcgtggcagccagagaccacagcccagggagagaagcggcagatctggggaatggggtggcgggagccaggtgcatgaggcaggcagcggccagcaagaagcacaggtggcccggcctggaaccgtggcaggagtgtgggcctgatctcagtgccaaggagccgtccggaacagcccaaccacgcctgctgctgtttgaagggtgggttggggaagggaggagcagacgtgaggacacccgggaggagggcacactcccacgtgcgcaggagagcaggtggaggatcagacttggtcattgcaggcagggggtatatgggaggattaggcttcctggggtgggagaaatggcagaactgggtgatcgactggccgttgagggagagggagggaaaatgagaggatgactcctgggttccagacctgggcagctgtgggaagcctggaggggccaagggtgctgagcaggaggtcgggaggcgaggtcggccatgggaagtcatggggattttgaggccttcgaggggtgccgtcaacaggcaggtaggcaagagaggagaggtaggctggagagggaaatctgggtgtcctgggaatctggtgggtgtgaggtcaggacactggatgaggccactaaggagggagagagggaaagagggagaaagagagcgagagagagggaggccagagccccaggctggacgctggtggaggaagg

SEQ ID NO: 763 - DNA, 1397 bp, Artificial sequence
  DNA replication origin
gtgatcttgtcccagctctcccacctggaggctcctcttggagtgccctggctggccagatggccctgcagccatgagcaagtcctaggccttcctgcaggcttcgaaggcccggaaatcagcaggcagctcccccagccgcctcggggtttagctccaccctgcctgccagccccagagctccgctggcatcaggccagagtactcaggcctctggggcaggtgtcctctgcagcactgggcgggcggcaggagggctggctgtggaatcagcagagccccagggcctacgcccacaccacacaagtgctctgtgcacctccatgcttctgcacgggcacacgacgtatccacaggcacgagtgtgtggggattcagcacctccacccccacacttcctccaaaagcaacctcacctccatggcaggtggtggaggccatagtaaatgtgaggccacaaaggccatgttgaaagtggaggtggaggccatcctgaatgtggggtggaggccatagtgagtgcaggtgaaggccctggtgagtttggtgggggccctggtgaattgggtggaggccatggtgagttgggtggaggccctggtaagtgtgagcggaggccccgttgaggtggatggaggccctggtgactgcaggtggaggccatggtgactgtgagggtggaggccatggtgattgtgaaggtggaggctatggtgagttgggtggaggccctgccctggtgagttggatggaggccatagtgagtgtggttggaggccacggtgagttgggtggaggccctggtgagttgggtggaggccacggtgagttgggtggaggccctggtaagttggatggaggccatagtgagtgtggttggaggccctggtgagttgggtggaggccctggtgagtgtgactggaggccctgttgaggcggatggaggccctggtgactgagggtggaggccatggtgactgtgagggtgagggccctggtgagtggttggaggccatggtaactgtgaaggtggaggctgtggtgagttgggtggaggccctggtgagttgggtggaggctctggtgggttgggaggaggtcctggtgagtgtgagcagaggccctggtgaggtagaggccctggtgactgagggtggaggccatggtgactgtgagggtgaaagtcatggtgagttgggtagaggccatggtgactgtgagggtggaggccatggtgagtggggtggaggccacagtgagttggaatggaggccctagtgagtgtgaatggaggccctgttgagttgggtggaggccctggcaagtgtgggcttgcttgtgctgtcatggcccccacagtccatctcccctaacacactggtcctcacctgcagcc

SEQ ID NO: 764 - DNA, 1423 bp, Artificial sequence
  DNA replication origin
aggcagttttcagagctgtagaaactgaggcccagagaggtcaggcactgagctccagcaacagggatggtttctggctgatctgggatggacccgagtgtggctgactccagccccggggccacacaaagcccagcctttctttttctgtagaggggtcagataactgagagcagacctaagcagccctgccctggtccttagccaggcgagaaccaggtacaggaagtggcatctatttataggccaggcaagtcgcattctggcagcagatgatgggtgcactgtttaattccacagtgccctccccgccactcccgccgggccggggtcccatcagctgcacacagccctgagctgtgataggcagacccggcctggctgccaccccggctggctgtgctccaggccgagcagggcagctaggtgggccttctggagccaggcaggtgggggctgggaggggagggctgggccagcagggggtggggtgggcaccttgggctgctgcactggctcctgggaactttttggggaagatggtgctgggttcaagcagaggcggagtgtgcagccagctgtggagcaggggttttctgctctggtggctgcaagaagagcctgagagagatggggcacagtggctcacccctgtaatcccagcactttgggaggccaaggtgggcggatcacttgcgtcaggagttcgagaccagcctggccaacatggtgaaactccatctctactaaaagtacaaaaattagctgggtgtggtggcacaagcctatagtcccaggtaccagggaggctgaggcaagagaatcacttgaacccaggaaacagaggttgcagtgagccgagattgcatcactgcactccagcctggcaaaagagtgagactccatctcaaaacaaaaaaaccaacaaaaagaagagcctgagagagaaggagaaaaggagaaatgggtggtgggactcagctggcccagcctgggggcatggttcaagggtggggtggtggtggcagacagctggggcagccaaggctcaggctggaccaccttgggtggaacctagaaacaccctggggcctgcctagcactggccagctctgtactcccaccccgtacctttcctcctcacccccagtcttctacactgagcatcttctctcctttctaggctccctgacgttagaggacaggggtgggtctccctgccgttccgcacccctgcatccttacccccctcctgtttatggtcagggctcactggacaggccatcctgagggctggtggtgatgagatggggcagccaagggagtcctgccagcaacagcccaggagcagaagacatgagctctagaaacaggcttcagatgcctggagactcattcattccgtcacaatctccatccccct

SEQ ID NO: 765 - DNA, 940 bp, Artificial sequence
  DNA replication origin
aatacaaaaattagctgggcgtggtggcaggcacctgtaagctagtagggaggctgaggcaggagaatcacctgaacctggcaggtggaggttgcagtgagccaagatcacgccactgcactccagcctggaagacagagtaagactctgtctcaaaaaaacaaaaagcaaacaaacaaacaaaaacaacaaatgaggtgtagaattgggtttcaaaacaattcattcaacaaatagttactgagccgccataacatcctgggcactgaccttggcactaggcatgaagattaagacagagccagtcccagctctcatgagctaatgttctactgcagggagacagaaaacaaacaaggagaaaaagaaataaccaagataactggtgaaaactgtatcccagcagtagaatatggtaataaggtcacctgggaagaaggaggttccttctggaacatggatgagcagaggcctctcgcagactgggacctggatgatgggatggagccagtcatgggaagtgggagaagcatccaggccaggtagagggtaggggaagtgcaaaggccctggggcagaaagaggtttggcaacgtggagaatctaaagcctgagaaaggcactggctgcaggatagtgagtggggtacggggagctgaatacagtaagactggagatgatagcaggaactaaaataaatcgtgtccatctttctgcatcataggaaggagtttggtttgatgttacttgcaatgggaggctgttagctttaagcagggagtggcttgatctaaatgatgtctttaaagatgattctgggtgtgtgggaaagatgattctaggttgtagggaggaagaacagaagcagggagaccataggaagaaggcagagggctgatctttccagatgtaaggagaagggctcccttgggcaccacac

SEQ ID NO: 766 - DNA, 2011 bp, Artificial sequence
  DNA replication origin
ggcccggacgcaaagttcatggccaggccccgtggctggccagaggcccgggacccccgcgctcccgactagctgttcccgcggccccctttgcgctgcgactgcggcgctgcttcccctcccctcccttagtatttatcaagctggtgaaaggctgggaaggctgggcccttgggtgggtgagtgccttgtattcatttagggggaaaaagaatagccagggaagacccgcttctccccagccaggtggggtctggcagttcctctgtccctgcctcccactcattccttgaaaggacaactggcccagaccaaaggaaagcgtccttcagggccctgatctgctctctgcagggcccctgggccgaggtggaccccaggctggtcccctctggttcagcagggcgctctgagctgggggtccaagctgcggagctactgttcccctagctgtgccctggctggtggtaacagaggcgatgctgctggacgcccaggccttgatgtcatcgccgccccaattcctgtcaccctcctgtgtatcctgcaggtgcaggggtgcttatttcaacttggaggcccacagagttcagagctcaaagttctgggggggggggcagctagggagcaggtgcccagcttggcggcaggcccatctcgaggggcctggggtggccgaggtcccggggtgtgtctgtcatgaagcagttgggtggctccccttccccccggtttctatggcagcatcctcccgtgccgtagcttctggggtacagctggctctctgggtttccagggggcctgcagatgtgtcctgagctctggggcactgcctgactgtgactttgctctctgaaaaggctccatctgccaggcagggtcctacagtggtcccagcatccttgggttcattctagtgaggccggccaagtcactcagggagagccagagctctggagagttcctgactccattccccatttgttctgcaaaactaaaaccagatttcctaaacgggagcccctggtcaccctgcccttctttgttacatcctgtgggtggtcatcacagctctgcctggctccggcctcagccagagatgctgccaagggcagctcggtgccccagggcagcccatgctagggtttgaagacccaaagccaccccagggaattgtctcctgagggttcaccagccagggcagctgtcggcaccctctctctcggctggggcagggactgggataaggctgaggtttacacactgggtggttcaggaaatgaactatgtacccaagcccagaaatcctccagcagccaacagcaaggggcagtctgagaggtgagacccagaaggccagctgtgggtgcggggtgcgtgagggggtgttgcttggagaacccacccctgcaaggggctcaggctcagcttagcccagacctcaacatcctgggctagcaaggtctccagcaaggtaccccatggagtgtcacctctgtgggctcacctgatactgaggttatggacaggcatccctcctaccgcatccccagtgtactgggctcagccccccaggccttggctagctctgggcctcctgacgtgtgcccaggtgggaaatggcagcctctggctctggcgtccccagcctgcctttggcagctcttctctgcagagcccctggtaccccaaggggaaccaccaacactcaccgacccccatggccaaggctggcagctcttggagtccctgcctctccttgaccaccaggtcctgcctgctcccttgaagcccactggggtccctgacactctaccctctgccacagtcgtgatcctgggcttgccacagacgccgtacaggccagaggtggaattaaaatcagccaagaagctggagttgagggtatttgagggcttccaggagaagatttggctggttagccccaaaaggcagaagcaagcccccaaattcgaaagaagcccaggcctgagctgcctccccgtcctct

SEQ ID NO: 767 - DNA, 1616 bp, Artificial sequence
  DNA replication origin
cgcaatgcggggcccttcgcggaactgctggcggcgccgcgccccgcggggtctggggccccagcagggactgcgaggaccgcgggactaggaaggcctgagcccggccacccgcctccgagtgcgccgcaccgtgcggcggggaccacaggccttcggtgggcggcgagccctggctccctcgttcggtggcctctgctgcatgtgggatgcgccctttgtcccctctgccatgcgcgggggaaaatgtttgagggcggggaagagactgtctgccctcatttgatctaaaacatgaatttgtttgcttggctaaaggccgggggggggcgtgggtccggggcgcagagaacacgcgcgcgcgcgcgcgcgccagcagcagcagcagcagcagctgctgcggcgaagtctttgtccccgcggcgcagcctttgtccccgcggcgtagcttttgtttgcgcagccccgccctgcggagggcgatcgtccccacgttggggccggggggcagggacccgacgtccccaaaatctcagctggggcgcagccatcctgggagagaccgggcgtggagatgggggaaggtgggaggaggaatcgcagccttctggatcccggagctgcagcgcctcccccagacctaggggtcttcccctcccttcccctgcgccccactgtgagctccagggtcaaaggccctgtctgctggacccccatcacttagcccagggttggcacgtggtgggctgcagtacatatttgtgatatgaatgcaggcacacgtgaatgagtgcaggagggactgtcaaaaagctgaatccaactagtggtaaggaaggtttcacagaggaaacgacccccttggtgagacctgaagcctgagcagggttagcccgggaagagggggcatcaagggtggcaggagagggaatgagcggctgcctttaacccagggtcttcgggaactgccgttttcaccatttctcctccacccacaaaggtgcggattcagaacaaatttcctctgtcctgacctgaccccaggccatttgcacaggaccccagggaggtctgagcaggccagctcttcatacaaagatgcaagggggacctcttccaggctagaggtaggcaggcaatggggtttaccctggagacccactggggaggatctctgggaaatgtcacttatacctgtgataggtcctatggatacaacagccagggccgtgctgaacttcaagaggatgctgtctgtgtagatttggcctcgcctgtgcctgtgtttacaaagagaataaacccaggcagttcaacactgcagccctggagctgaggggatggggcgggccctcttctggccaaggacactgggacacctttaagtgacctgggtccctagaagagaaggtgagcggaatttttgtgtgcctctttcttgtcttacagcatctgattctcccccaaggccaagttgagaagatttagggtaccctgtccccacccccacctgccggcccttcttggaaccccactaagccgcttagacttagactctattttcagtgcttctcaggcaactgagcctccttgcctgggtgagaggattggagtga

SEQ ID NO: 768 - DNA, 1373 bp, Artificial sequence
  DNA replication origin
ccacctccttccacctgggctgcctggtcttccatcacctggtcaacatggactcggcatctgctgggtgccaggcactgttctgggctctggggaatccttattctcctgtagtttctattctagcgggggagaaagacaacaaacaagatgcaaaggaaactgtcagatgttgatacctgctgggcagggaacttcccctggatggtctgggagagggtaccagggcggctgctttataggccaggagaggtcagaggaggcctgtatgagaaggtgatattcaagctggggtatgagtgacaggcaggggccagccacagtaagaccgtggggggaatattccaggacagggaatcaggagcaaagcccccagggagagggcaagcctggcgcgttgggggagctgcggtcagaatagaggaaggggaggtggagggggttgcggggatgggagagggccagggggttcagcagaggccacatgggatgcatcaccaagagtagggggctgggcttttattctgaggtcagtggggagccacgggaggggcgttgccacacacaggtgtatgtttgcaagaacaccgcagctgccacgtggagaatgaattgtgtctccaccggcacagagactactccagggctcttgcgtccgttcgggcaagaggcgattgtggctctgacaaggccggaacaatgactcctgagggacagggtgggtttggggttgtttggaggtgaagtgaagggctctgctgatgatttgaatatgaagaacgagagaggacaatgagtaataatgcctagatttggggcttcaaccaccggaggaacagcaaaccatttcctgagatggagaagtctgaagaagcagcaaacccaaggggataggggaatctagtgttcagttttggtcacgttacagctgacaacctcattagagatgcggggttcacattgcggtctgaaagtctggaggccaatgagagatccagaatggagatgacgtttaggagtcctccgcgtgcagatggcgtttagcgccctaggtctgagcacgaagactccgtgaaacagcacagatgaagcagaggagaggctgcaggatcaagcacaggctaccctggtatgaggacaccaagcagaggaggagctggccaaggagggagggggacagccagtgcaacggagggaaaccagcaggatgtgacccatggaggctaagaaacgaaggtgtttcaaaaaaaaggacgtggtcaggcaggtcagatgccaagcagggagctgggtaagagccctccaagcagggggaggtgggtaggaaggtcctgaggcaagagggagctccacggatttgcagaattcagaga

SEQ ID NO: 769 - DNA, 1691 bp, Artificial sequence
  DNA replication origin
aacaaacaacaacaacaggaaaaagaacttccccacctgagagagaaaagactgaagattccttctctttaactgggcttcaggtgcctgaactggatccaaatcaccacgagttccccggcactttagagtacagaggcaggcgctgtctctcctgtcagcctccacccctgctggtctcttgctcacaatccattcagagcaattcaacaaccatcagctgagcacttacagcgtgccccgccagcactgtgcaagctgctgggatgtcaggctttgttcttgttctcaaggagatgagggctgtcctgctcttagtgaaaaacaactaacttctagaaacactttttattaatgtatgatggacatatggaaaagtgcacatattctaagtatgcaactcaatgatttttcacaaactaaaaccagtgcccaggtcgagattaaaacagcaccagaaacccagaagccaccccaaccccagcctccagccactcctcctcgcccccaagtaccccgttttggcaaagctggcaacggtagctaactttgattgaatgtacatcagtgccaggcactggtacatgcaccttccacctattgattcctttaactcccgcaccatagatatgaaggcacagacagtggagcacacagctagcaacgagcccactctgaacccaggggggttggtttcccgagcctatgtgtccctgatgactaccctttcattgccgccctggaaaacaaacagaactcactcactgtgtactgcaacaccaacacataacaaagctggaggtttggttctgctgagagcgtcaggaaaagccactgagggtggccagatttgagctggaccttgatgaatgcataggagtctccctagcagataaaggggaggagttgcatagcaaaggtggtggggggagcgtgcaaggggtcctgcgtggtgacccggggggcgggcgaggggtagacaggtgcagtgggaatactgacctagagcaggattggaatatgtactggggctttgccagggcaggcttcggaacaggagaggaacttgctcaggtttacagtgggtggcagcccccaagggaagccatggacgatctaccggcatgggcaggacccagcttggtcagggtgtccttcacgcggcctctaaccagcgattcctcattgggtgtacaggcttaagggctctgcaaatgttggggttgtttctgtgtgcgtttgggtagggtcagaaaagagactccgcccccaatttcgagacacctttttacccaggtggcagagacatggccgattttacagataattgactgtatctatatatctatatctattagtatataacaaaaacaaaataggcggtctcatcacaggtcttggggtcaggcactttctctgtgcgaggccgtgggactgcaaacagcacagggaaaaaagaaagcgggatccgctcgggacgcctgagcctcgattaagaggtgcggctcgggatttgtggccggggcgagagaccctcacgcagaagtccccaagtgcgcagggctggagctggaactttggaacgcggaggttagacccaaagggtgggcggagcctgcactccagctaagggggcccagcgccgcaccccctccccaaagccggagccgccgccaccgtccccgcccacc

SEQ ID NO: 770 - DNA, 952 bp, Artificial sequence
  DNA replication origin
gctccgcgccccgcaccagcctctgcccggctccgggtgacgtcgcatcctccgattggaccacgcggcctggggggcggggtctggtccggtgagctcaccgccgcgccccgccattggtccgggcggcgcactcgggcagtggcggggagaccgcggtacccggagccccgcgagtcgttccagctgcggcgagtggagctgagcgggcgcggggccgggctgggccgggccgggcggggccgggcggggcgcgggagccagtgagcggcggctcggcgcaagcctgacgagcaggagccgagctcagcaggtccgggtaggtgcgcggcggcgcggggctaggcggagggcgcgtgcggtcgagggcggcggccggcgggggcgcgcgcggggcgggggcggggccggggcgtggggacacgcgtgctcgcgggccgggggcgtggtgcgcggccacgcgtgtttctggcgcgagtgtgcggggccaggccgggagggcgtgcgcggaccgggcgtgtttacgcgcggcagggaggggccacgagggtgcgcgcgtttctggcgcgagtgggaagtgtggggatccggcgggcccggtgtgaggggcgtgtttctggggcgagagtggggagtgagtgtgaggagcaagggtgaggggctgcagggaggggtgcgtttggccgaggagtgggtgggagacacgcgtgtccatgccgcgagggtgtgtcgacgcccgagcctgcgtggggcccggggccgtgtgtctggagtggccgagggcgtgaggggcgcgcgtgtttgtgcgaggggcgtgtgcggcgggtgtgagccacgcgtgtctgggtgcgcgcgcgggccggatgagcttctggagtggtgcgaggacgcgcgcgtgtgtctgtgtcggagcgagggcggggacgagcgtgtcgggcgcgcgcgggcgggg

SEQ ID NO: 771 - DNA, 1424 bp, Artificial sequence
  DNA replication origin
gggcgtgcgcggaccgggcgtgtttacgcgcggcagggaggggccacgagggtgcgcgcgtttctggcgcgagtgggaagtgtggggatccggcgggcccggtgtgaggggcgtgtttctggggcgagagtggggagtgagtgtgaggagcaagggtgaggggctgcagggaggggtgcgtttggccgaggagtgggtgggagacacgcgtgtccatgccgcgagggtgtgtcgacgcccgagcctgcgtggggcccggggccgtgtgtctggagtggccgagggcgtgaggggcgcgcgtgtttgtgcgaggggcgtgtgcggcgggtgtgagccacgcgtgtctgggtgcgcgcgcgggccggatgagcttctggagtggtgcgaggacgcgcgcgtgtgtctgtgtcggagcgagggcggggacgagcgtgtcgggcgcgcgcgggcggggctggggcggcgtcggggcgcgcgggggcccggcccggccggcggcgagtgtgttggggcgctcggcttctcctcaacacgggtttttgggacccagtgccgcctccttcccgcggcggggcccgcggagctcccggtttccctgggcagacaggtgcgaggcgaggtgcgggcacagccctgcgctcctcagcgggtgcgggatcgggcgacgggggactgtctctaactacagaccaggggagcggagggacgctcgattcacccgcgtgcacagggcagtcctgaaagtggatggaaggctcggaggaacttctgagagctttgcttccctgcagactggcgaccagagagcactttccacgcgcagatgggccaggatagatgctcggggtggcccttttgcattttcggagctctggtgattgggtttctaggtattgcgcctctttagaggtggcgctgatggcgttctggtgtttgagactttttcgatctctgtagattactgcagacatcaaaagcatttctctacaaatcaggtatcagaatagatttctgaaatgatgatattcttgcagactgtcttcttaatcagttgcctcaccagggaaggacgacaattttaaagtccattttctattttgcccacttttacttgataggatttctgctggcagcctgaagtatctaatcccggaagcggactcagtaaacgtgagaggtgccctcagataactacagaaatgcctcctgtgtttggttgcttgaatgaatgcattatattttttccaccagtgaggccaacccctgactttttaaaattgtgctcccaagttttatcgataaaatgtctggctattacatacaaggagtctttttctcttactaccttgaggaactgaagtgttccgtttccctgcagaatctgtgtcttatcgagaaactattgctgggaaccggatcaagag

SEQ ID NO: 772 - DNA, 1015 bp, Artificial sequence
  DNA replication origin
tcgtccccattcctctcagggacgtcggggactagaaagggaaggggcgaggagcgggctgcgggcgggcagctcacttcctccgggaagcgtctcgccgccccgcccttgccccttccgcgtccgcccgatggccgcgggacccgcccggcccgtctgcagcccgcgacccaagggccaccgcccacccccaggcctcgggatccccgcgcagccccggcctgcgtccgagtggcggccggcggcaactgggcagtatggcggtcccagcgcgagctgccgcctgcggggcccgaagccgcccgcgtcgcgtagcgtcactcacattttggcagctgcggcggcggcagcggcgacgagagagggtcagcagagaagcgaagttgggaccggaggccagggagatgggtgggacggcgcggcgcggggcaaagacgtcactaggcggagccgggggagtgggcggggcgaagagggggcgcgccggaagtgggcgggggcgtcgtgggtgggtgcgtccagggcggggtcagagcgagacgtcccctccccggacgaggtcacttgggaacttgagggccacaggggtcccagggcggtccgggctctgaaacgcagaacgcaggtcaatacagctccctgtccgcaccgccgtccgcgctggcgcttggggacgtggtctgtaaacgtggtgcattagccactggcgagggactgcgtggataagtgagggtgggggcaattcatgttattctgggctcgggaccatttctaacagtattagagacagatgactggcttctgctgagtgttccagagtaacctagtgatcctgagggcaccatgtttctctaaagtagttgaaataggaagtccatttcgggtatttgtcacatggtgttgggtgaggttcccgctcatgttttcatcggtgacacaaatatttgtcactgcagatcatattataatctgcttacgagagccttggcatcaaggctgtagttcctttatttct

SEQ ID NO: 773 - DNA, 1466 bp, Artificial sequence
  DNA replication origin
cgcgcgggctcgggcggaggccggcgctcggccaatcccagcaggccggcgggcgggcaggggacggggtggccctcagcggcctcaggcctgtgccgcgcgactggagtgtccggccccctggcacggcgccggggcggagccgctgaagccagcgcagaaatgatagggccaggaagctgccagccacgtgggggcgggacccgggctctgtggggcggggcgggtccggcccaacctccacgtgagaggcgggcggggaaggagaggggagtgagaggcgggggcagagaggggcgagaggcggagtcggggggcttgagtcggggtcagggggaggctggaaatggggacggatgggggcgagaggcggggacgggggggcggatgggagcgggggtgccgagagacgtggggagcgagaggcaggggcgggggggcgacggtgtcgagggcgggggcattagagggagggagaggcggggactgggggcgagcaggggcggctcaggccagcgctctggggtcgagtcctggagtttgtaggtggctcccggctgcccgagcgggtgtggggaggagcccagggtggggcgggctgccggcagcggtcctcatcgtgctttggccgtctttctgggttcccacggttttcaccgcccgtgacctaccgagcccaccccaaccgcccccatcctccgctaactctttcggtgagtggggtggacttggaggaaccgggccataaagcagccctggtaaaaagcccacccgatttttagaaacagattttttattttttgagacagggttttgctctgttgtccaggctggatggagtgcagtggcgcgattttggctcactgcaacctccgtcttctgggctcaagccagtttcctgcttcagcctcccgagtagctggaactacaggtgcagccaccacacctggctaatttttgtgtttttggtaaagatggtctgtgttagccaggctgttctcaaactcctaagccccagtgatctgctggcctcggtctcccaaaatgttgggattactggcgtgagccactgcaccggcccagaaacagaattttgacggtggaacttaaaacacttccctgcacttcctaaaattagattcatttggcaactggaggaagacaaacgtaaaagacactctgtttcagaaaagaagttgtagagccctttaaaaaaaatgtctgaaagctcagtttagtatctcaacatgttagaaatgaaaggtacagtgcagagtgccgcccctcttcgctgcctggtacagaaaaaatattcagtatttgttggatggatgaaattgtatgtaaaggaagaggggaaaagtgaggtgagtgttcatgttaggtattgaataaaccaccttatatcttccaagcgatactctaggttggcttgctctcctccgaagctgggttttgtcaaactg

SEQ ID NO: 774 - DNA, 1308 bp, Artificial sequence
  DNA replication origin
tctgggcactcgcgcgcggcagaggagccccgcgagccctgccctcggtactgggggcccccggagcgtggcgcttccgagccacccgcctccccgggccccatccctcggcgcgcgggaaagttggggcaggggtgaggaccgcgcggtcggggcgccccagccagccgggccgctggcgtcggactgtctgttccatttgtcccttgtcacccttgtctcctccccctaggccggagtcctgaaagtcgagcgagctccgggttttgaaaatgttggagggaaaagctcctcggagatgagcgtgaccccctggctcgtggtggccgcctgttctcactaacgccatggcggggaccggagtgagaaaccggtgtctgtcactgactgcaaagtgagcgagaagcaggctgcgggccgtcccagcacgacgtggagccccgcggagacctcgagatgccccgcggggaagctcctggccccgggagacggggggctaaggacgaggccctgggcgaagaatcgggggagcggtggagccccgagttccatctgcagaggaaattggcggacagcagccacaggtgacgcgctggcttcaggccgagggccccatgcgttcgttgtccttccctggagcagggaaagggggacctaaatctttttattcttttgttttcaagcccaggggaaagtgtaaaggggagactcgggcaatgtaggatgaagtgatccgtgacactgaagaaaattaccgaagagtatcaggagggaaaagtggttacaaaagttagctgagttggggctcaagtggattaagggaaagtaagtggagaatgtttgtcattcaccagttgctttgcctcgagttccccacctagaggaagaggggtcaccaccctgtggactgatgccggtagagcacttagaaacttacctggcttgcagtttgtgttccctaagccgcaagatgctgttgtcttcagaggatgaagttgtaatttttttttatcttccagtgaacagcaagatcgaaacagagtttctgaagaacttatcatggttgtccaagaaatgaaaaaatacttcccctcggagagacgcaataaaccaagcactctagatgccctcaactatgctctccgctgtgtccacagcgttcaaggtaaacaagccggagagaaatttcatcctacgaatgcaccaggactcatacaagcagccagaggagtggtcagtggggtctcagtcagacaaataatttgagctttttctggtgctttgtggaagatgagcaaatctacaccg

SEQ ID NO: 775 - DNA, 1085 bp, Artificial sequence
  DNA replication origin
ccttggccccgcccctctggcccatgccatgccctctcaagtcacgccccgcctcacctgcttcaccttgccagaccccgcccagccctgggctgtcctcacctcgctcccctccccggccccgtctctatccaggctcagtagaattctaggcagcaggagtggaggctgggtgggttgtgctggaggtaaccttaaggatcccgagtcgcggttccctgccttgtcctgtcttaaggccggcctataccggggccatctcctgtccttcctgggaggaagtatcccatactccctgaggctggcatgaaacctccgtttgggccgccattgtccacctcccagacccatgggctcgacccagatgttggttagcaaagtacctaccaaggctgccctgtggttacatgttgactaccaaggacacagacaaatggacaaggaagaaacaagaaaggaaaatttacctttggaaaactttccaaagatgttcccttttggtccctttccaaatgagaattatatacaatgaaataaaagttgtggatggatggatggatggatggatggatggatgataggtgggtggatggatgaatggatgcatggatgatgggtggatggatggatggatgtctgaatggatgagtggctgaatgagtgggtggatggatgggtgggtgggtggatggatgagtggatggatggatgagtggatggatggatgaatgcgtggatgatgggcatatggatggatggatggatgaatgataggtgagtggatggatgaatggatgcatggatgatgggcagatggatggatgggtggatggatgggtgggtggatggatggatagatggtgggtgtatgatgggtggatgatgggtgtatgggtaaatggatgggtgggtaggtggatgaatggtagataaaatgggtggatggatggcgaaagatggagtggataaatggatggatgggttgtggataatgagtgagtgtgtggttggatggatgaagctactcttaattatcttttggaaaagtggtcctgagaatcaagacattgaaatattccactaga

SEQ ID NO: 776 - DNA, 1338 bp, Artificial sequence
  DNA replication origin
ggatacttcctcccaggaaggacaggagatggccccggtataggccggccttaagacaggacaaggcagggaaccgcgactcgggatccttaaggttacctccagcacaacccacccagcctccactcctgctgcctagaattctactgagcctggatagagacggggccggggaggggagcgaggtgaggacagcccagggctgggcggggtctggcaaggtgaagcaggtgaggcggggcgtgacttgagagggcatggcatgggccagaggggcggggccaaggagtgggcgtggcaagggaagaatgggcatggcctagggtggtgagcagagctagagggcgtggtcaagtctgggcgggactaggacgatgtggggcagagccaggaaaggtgaggtggggaaatcaggaagggcgaggcccaggagaggcaaggaggggcttatcgggccagaggcccaggtggtggtgggggggtggggtgggggggggcgggtggaggtggaggtcggaaccctgggcctgtgtggcccttgtggggccccagtttcttgctccatccctgtagtcaaaggatcttgcctctccgacgcatcggaagtcagctgcaccgcacctgttcccaggtgtaaggtatcccaggtacccaggtgtaaacctccatgtggatctgtgccctacccggtagcaggactttgacgtcgggaaggtctgacacaaattgctccctgcccactctgagtctccccgggaggggggagggcctcaaaacccccggctgtctcctgctatcagcactgctggctccaaacccatctcggcccaggctgagggaacagatgacgactttattccaagtgacataaattattaatacttataaattggaacagagaaaaatatttgtcatttctaaatagctttatccaactcggacaggaatgcttaatatattgttcaagctagtgttaattttaagtaacccacatctgtaactgtaacacattattttgaatgagtagtacttgctttctgaacgatgtagaccaatcagtctccgtggtacatttttcattaaaaggcagctcacagatgagcttacgggagcgggttctgccaggtggaagtgaaaccgatggctcacaaaggagccattagcagttgccaaagaatgaattaagtcatcaagaccttggcattatcccagaacataattttccttgcctttcagtctttctctcactttctgcttcagttttctaattggcaccgccattacattacacagcaactctccgactgcttgtttttggtcagaaaataatcagagggg

SEQ ID NO: 777 - DNA, 866 bp, Artificial sequence
  DNA replication origin
agatcacggaacgtgtgaggtctgtagggaaaagcatttgagaaagaaggaacagcaaactccaatgtcctaagccagagaaaagtttagtggattcaaggagcagaaggaaatccagcgaccctagagggagtgggtgcgagggagagggtgatggatgaggtgggagagaatgaccggggtggctgagagcagggctggactcagcgctggtaacaccaggctgggagggaagctttggggctctgtggctctgggtagggaggactgcggagggtggcaattccccaccagctcctacaacagggtctgggatcagacacagcctttgggctccaggctatctctgcccccgggtgagggttatacagacctgactccttcagggagagttttgtcctgatgggaccaccctgcttttttgtatggaagttagaaattatcttctctctgggctctgggcagattgcctgtctcctcaacagggaaggggtgattctctgggggaaagcgggaagtcggggaagttctgacaatgtagtcattttggtaaagactctgaaaatcattcccattcacatcacaggggcctaaagatggcctgggtcgtcagtgcggctttttctatacttccactccccatacattttctttcttttggcgacttgcacatcattgttggactattaagttatgggggaagggcgtccctactaaggagcctcctaattctttttgttgttgttaatctaattttttatagggacgggggtctcgctatgttggccaggctggtcttgaactcctgacctcacgtgatcttcccacctcggcctcccaaagtgctgaagaagtgagccagcttc

SEQ ID NO: 778 - DNA, 1055 bp, Artificial sequence
  DNA replication origin
ccttcactgaactagcagccatccaggtgtctactctgcaccaggaaccacatcaggacacaagcacaaggataaaactcacttcccacctggaactttcattctaggggaatgacatgtctaacctgataagatccacacatccacatgataaggtaaaactcacttcctgcctgggaactttcattcgaggggaatgacatgtccaacgtgttaagatccacattggggtacaagatgctttctctaagaggaatcttcattcaacacaacgccaccaggcaccaagcaccatggatggacggcaaaaggggagtgagagcagctgccctcctggtgctcacggtggcgggtgggggggatgtggggaaggggcagctgtgcaccagggagctccgctgggaggcaggggagggagggatggagttgggggacggggagggggaagggggagggaagggggcgggggagggaggggggaggggggagagggaagggagggaaagcgggatgcagaggaagcgatgcctgtccaggcagtgtgcttctcagaaggagccatgggcccaggcacatgggagggagagttggggctgggattgaggagaggggaaggaagccacagggtgagcagggaccagagagccagattttataagttatataagaaactcagattttggccgggtgcagtggctcacacctgtaatcccagcacttggggaggccgaggcgggcggatcacaaggtcaggagatagagaccatcctggctaagacggtgaaaccccgtctctactaaaaaatacaaaaaatgagccgggcgtcgtggcggaggcctgtagccccagctattcgggaggctgaggcaggagaacggagttaacccgggaggcggagcttgtagtgagccgagatcgcgccactgcactccagaaaaaaaaagaaaaacaaacaaaaaaaaaaaccctcggattttagttagaagcagtggctcaccctgtaatcccagcattttgggaagccaaagtagcaggatcccttgaggtctggagt

SEQ ID NO: 779 - DNA, 1310 bp, Artificial sequence
  DNA replication origin
ccattgtcatcatggcccatccccaatgagccgctgggcacacctcccagacggggtcctggccgggcagaggggctcctcacttcccagtaggggcggccgggcagaagcgcccctcacctcccggatggggcggctggccgggcggggggctgacccccccaccaccctcccggacggggcggctggccaggcagaggggctcctcacttcccagtaggggcggccgggcagaggcgcccctcacctcctggatagggcggctggccgggtgggggggctgacccccccacctccctcccggacggggcggctggccgggtggggggctgattcccccacctccctcccggacggggcggctggccgggcggggggctgacccccccacctccctcccggacggggcggctggccgggcagaggagcccctcacctcccggacagggcagctggccgggcagggggctgaccccccccccacctccctcccagacggggtggctgccgggcggagacgctcctcacttcccagacggggtggctgccggacggaggggctcctcacttctcagacggggcggttgccaggcagagggttttctcacttctcagacggggcggccgggcagagacgctcctcacctcccagacagggttgcggcccagcagaggcgctcctcacatcccagacagggcggcggggcagaggtgctccccacatctcagacgatgggtggccgggcagagacgctcctcacttcctagatgggatggcggcggggaagaggcgctcctcgcttcctagatgggatggcggccgggcagggacgctcctcactttccagactgggcagccaggcagagaggctcctcgtatcccagacgatggggggccaggcagagacgctcctcacttcccagacggggtggcggctgggcagaggctgcaatctcggcactttggggggccaaggcaggcggctgggaggtggaggttgtagcgagccgagatcacgccactgcactccagcctgggcaccattgagcactgagtgaacgagactccgtctgcaatcccggcacctcgggaggccgaggctggcggatcactcgtggttaggagctggagaccagcccggccaacacagcaaaaccccgtctccacaaaaaaaaaaaacgaaaaccagtcaggcgtggcggcgtgcgcaggcactcggcaggctgaggcaggagaatcaggcagggaggttgcagtgagccgagatggcagcagtaccgtccagctttggctcggcatcagagggaga

SEQ ID NO: 780 - DNA, 1322 bp, Artificial sequence
  DNA replication origin
tgagaagtgaggagcccctccgtccggcagccaccccgtctgggaagtgaggagcgtctccgcccggcagccaccccgtctgggagggaggtggggggggggtcagccccctgcccggccagctgccctgtccgggaggtgaggggctcctctgcccggccagccgccccgtccgggagggaggtgggggggtcagccccccgcccggccagccgccccgtccgggagggaggtgggggaatcagccccccacccggccagccgccccgtccgggagggaggtgggggggtcagcccccccacccggccagccgccctatccaggaggtgaggggcgcctctgcccggccgcccctactgggaagtgaggagcccctctgcctggccagccgccccgtccgggagggtggtgggggggtcagccccccgcccggccagccgccccatccgggaggtgaggggcgcttctgcccggccgcccctactgggaagtgaggagcccctctgcccggccaggaccccgtctgggaggtgtgcccagcggctcattggggatgggccatgatgacaatggcggttttgtggaatagaaaggcgggaagggtggggaaaaaattgagaaatcggatggttgccgggtctgtgtggatagaagtagacatgggagacttttcattttgttctgtactaagaaaaattcttctgccttggaaaaaaaaaaaaaaaaagaaataagatgctggctgggggcggtggctcatgcctgtgatccgaaaactttgtgaggccaaggcgggaggatcgcttgagcccaggggttcaatataagccttggcaacatagcaagaccccgtctctacttctcagaaagaaaacaaaagaaataagatgccatggaagggatggcaataagcgttttccataaacaacccgagagagagaaacagaaaacgctgtccaagctaagccttgcttccacactgggctttgcagattttccaatgagccaccaacgaggtggttaaaacatcagagactgcatccgattccccaagacaccaaggctctcgggatgggaacaggcaaatcgtcgtcgttctttgctgagcctgcgggctgcggtcaccagaacgaatctgggcccagcaggtgccaagggctcgacctcccgccttgcatccggcaggccgcacacacccctcggaagtcggcgagatcgctgaggcaaagcgactccagggcgcagagacccacacgcgacgctctaaaggaagtgacctttaggggctgttactctcagaccaggcccagcagcacccggc

SEQ ID NO: 781 - DNA, 1141 bp, Artificial sequence
  DNA replication origin
cgctgagccagccgggacggacatgcgcgggagggcgccgcggggcagccgccgctcctccggggtaaggggcctggcgcgctgagggggtggggagggccacgcagcgctccgttccctcagggggccccgcgccgggcgccgggatccaggcggctccccgacgcgagggcgggggcgtggagggcgcggggagggtcgccgcgacgcggagtctctgggatggagggagaggccggccggtcgctcgcgggcttctccccattgaggtgtggagagcgggaccctccccggcggcgcagcccgggcctggggacgccgcgaagtgccggcgcccgccgccttctccacgccggctgtggtcgtcgcgcggcccctcggctggccggggccatgcacccgagcgcccgggatacgtccccgcagcaccgggaccgcaggagcggacgggggttcgggagcggcgagcatgaaggtcctcgtcccgcagcctgcgctcgcggggttgcccggcggggatgagcgtcttcgggcctgggggcttgtttgattttttttttatttgtaaaaagggggttgcgttgtcttgttcacaccgtgtacccgtaaatcctgtcttgaaagctggggtgggaggctcggcgattgcttgcggtggttggtaccggttctctggcggtcagccccgctccctctgcctaatctcacagcgacgatggtaatgccgaaatcagtatttaaaaattcgtctaagctgttctgaactcttccttctctcctagaaacgtgattctttgctctgagtgtcttaagtacggctttgaatggaatcggactgcaaaattatgtgttcaagacgtgaatgcttattgggaattttgtgtgtgtatttatatgtatatcatagccctgtacaaattagatgactctttaaccgtgaatggtgctgtattagtgcttgctaagtctttattaggatttcatcattgcttgaaagaaaccagtctcttacctgataaaaatatgaatagatggttagtcataaacttaagtcagaatggagactgtagctttaaaagagatgtgtcggtgacttgaggtacacctgcaacacaggtagggcaagactggtttctaggca

SEQ ID NO: 782 - DNA, 1110 bp, Artificial sequence
  DNA replication origin
ctgcctcgcaccggaccgccgtcgccgcggctgccgccgccgcctctatatatagcataggccgccgggccgtgaggtcgccgcgtcccgccccgcctcctcccgcagccaatcagggcgcgcgccgcttaaaggggcgatgccgtggccgaggcgttgcgccgggcccaccgtggcgtatcgcggcgctgcagggagccggctttgtctcccggagaggcgtctccgggctgaccgcggccgcagctccgctcctctgcctgagccgtgcggcagccctgggagcctctcaacgccgagctttcctcagaagcccgcggcgacccgggcctcggccgctgttcctgcccgaactgagggcacatcgcgcttcgcgcgggatttcccataaattcaggctccgggcaagattgtgtgttttttcctctccgcgggccgccgctggccgtgtgggccgaagaagccctggagggggagaggggagccgctctcgactgggcttgcggcgtgggagggacagtgagggacacttagggactgtgtggggcagtgaaggatagtgtgggatgatgagggaccgtgtggaccggtgagcgactgtgtgggacagtgcgggacgatgagagacggtgtgggacggtgagggacagtgcgggacgatgagggacagtgagggactgtgtaggacagtgagggacagtgtgggacggtgagggactgtgggacagtgagggactttgggactgtgagggactcggacagtgaaggatggcaagggacagtgtgggacagtatgggacagtggacagtgaggcactgtgaggggcggtgagggacaatgaaggatgtcaagggacagtgtgggacagtggacggtgaggtactgtgaggggcggtgagggacagtgtgggactgtgagggatggcgagggacagagtaggacagcaagggaggatgaggggacagagtgggccggcgtggggcggtgaggctacgcggggggaacccagggctcctctgactgcgttggaatatggaggaaaggtcctgctcgaggttgagcccttcagggtcgctgtgggtttccaggaggagctccctcactactg

SEQ ID NO: 783 - DNA, 1154 bp, Artificial sequence
  DNA replication origin
tctgggaaagctgggtggagctgaaaggaaatggtcttggatcccatgtggaatttaaatttaatacccaaggctgttgcttcttttctttctttctaggggagatgtcacaaattctgcaccagaatctcacaaatcacaaagaacttactcatgtaacgaaacaccacctgtttcccagtaactatggaaataaaaaaaaattaataataaaaaatttaaaaaataaaattttgatgaagggataacccttttcccggaaagactccccctcccctgacacttgaacacattttcagagacccaagaatcagctctctggaacccagtggaaggacctcaggacagtgatttaaactgagaggggcctgatcatatcagaaagccaactaatcccatgacagtgcagagaccaggcaggtgggggaccggctaacggtgcctgagaaccaagtgaggttgggaactgaagcaggggcctttggggcaatggagggggtgggtgaggtcaggaaggaggagagcgcacatgggactcatgtgggggtgcaggattgaaaggtgagggaggcttcctcttggagagcccctgggcagggccaggggtgttgggggtacagggacaatgtacctggaccatttccagtttacaacgagtagaactgtgaggaattcaagcagaccttcctggaaagccatggaaattcaggtagaaagggaaaggggccgaggctgaagatctgatactgcgtgagcgtggatgacggctgattttttctggggatccccggcctgctccagggaggggctgtaaaacaacacagaaaacaagacctggaagaatccacctcgcaggggcaggcagagaggagcccatggaaggggagaatcgggggagatagagcaacagagacagagagacagagacacagaccgagacagggggacagagacccagagaccaaggggcagaaaggccattgggttgggcagctcagaagtcactgggggtccttaaaagtctttttcttttgctaactgtgccatgaatgtccttgtcctcagtaaagacatgaccaagtatttagagataggagacatgacctctgcaatttacttgcataaatggtttagaaaaaaatccttatctattt

SEQ ID NO: 784 - DNA, 1225 bp, Artificial sequence
  DNA replication origin
ccccggaagcaccccctccctcgccaagcccagcttctgcacaggctccaggagacgttgctccggggtcctgccggggacaccgggctgcgtccccgtcggccgccgcgcagatgcgcacttggagcagactcgggttccggggctgggggaaagagaaacccgggctccaaaccctcctggaagtctcttgagggcgcgagctccgcagaggcaggagcctccgcgcacgtgcacgcccgaaactgctaaagcccacgcgcgagcttgaccgccgcgtggaggcgccggctgcggggagagaagccgccccggccccggccccttcctgcggcgccctccggccctggccccggccccagccgtgcgcgggcggccgctcccccacaagctggcctggctgacccagcgccgccgctgggccttcaaagggcggccgcttcctgtcgccccgggacggctcggccgagccctcctcgtcacggggcgggcgtccccgccgtcacctcctttgcccttagtcgggaggacgcccccctactgcactccccggccgagctgggcagacccccgtcctcccacctgggggctcctccttctgctccctcgcctccctctgctctccggtcccctcccctcgccctcatctctgggaaagttgtttcagccctgaagtgtgcctgagcacgagcaccttctcctcctccctgttccccatacgagtcacaggaatgacccaaggcactggataaaaattcagattcctgcggactctgattccgaaggtctgagtggtggtgttggggtaggggtgagggcgccccaggaatctgtacaactgacaagcagaagaatctaatggagaaactgggctagaatcagtcactgactgtccttgcttaagcccgggaggttgaggctgcagcgtgctgtgattgtgacactgcactccagcctaggcgacagagcaagaccctgtctcaaaaataaaaagaaaaaagaaaaaaagaggaaaaggctgggcgcggtggctcaggcctataatcccagcactttgggaagccaaggcgagcggatcacaaggtcatgcgttccagaccagcctggccaacgtggtgaaaccccgtctctaccaaaaatacaaaaattagccaagcgtggtggtgcacgcctgtgatccctgctactcaggaggctgagacaggagagttgcttgaacccgaga

SEQ ID NO: 785 - DNA, 880 bp, Artificial sequence
  DNA replication origin
agtgcagtaggggggcgtcctcccgactaagggcaaaggaggtgacggcggggacgcccgccccgtgacgaggagggctcggccgagccgtcccggggcgacaggaagcggccgccctttgaaggcccagcggcggcgctgggtcagccaggccagcttgtgggggagcggccgcccgcgcacggctggggccggggccagggccggagggcgccgcaggaaggggccggggccggggcggcttctctccccgcagccggcgcctccacgcggcggtcaagctcgcgcgtgggctttagcagtttcgggcgtgcacgtgcgcggaggctcctgcctctgcggagctcgcgccctcaagagacttccaggagggtttggagcccgggtttctctttcccccagccccggaacccgagtctgctccaagtgcgcatctgcgcggcggccgacggggacgcagcccggtgtccccggcaggaccccggagcaacgtctcctggagcctgtgcagaagctgggcttggcgagggagggggtgcttccggggacacccgcgcagggaaaaggaggatgctagtgacccatcctttctcgccgtgcgctttaatttcaacaaaccctccattccccttgtgttcccttctccagctgcaaaattaaaagtatccagggccgggagcgatggctccagcctgtaatcccagcactttgggaagccgaggcaggaggatcacttgagcccagtgggttgaggctgcagtaagccatgatcatgccattgaaccccagcctgggtgacagtgagcccctgtctcaaaataaaatgggagacctggggaaagcggatgtggctcaggccagggactagggtgaggctgtg

SEQ ID NO: 786 - DNA, 1155 bp, Artificial sequence
  DNA replication origin
tccagctgcaaaattaaaagtatccagggccgggagcgatggctccagcctgtaatcccagcactttgggaagccgaggcaggaggatcacttgagcccagtgggttgaggctgcagtaagccatgatcatgccattgaaccccagcctgggtgacagtgagcccctgtctcaaaataaaatgggagacctggggaaagcggatgtggctcaggccagggactagggtgaggctgtgggtgcaaaattaaaggaggggtgtcaaaaaaaaactattcaacataaataatattttagtgcagtgtttttaaaaatacaaattaatgcaaacaagtcatcatgagcaagagatttgtttaaacctagataaagacaggatcaggttatttacttttttacttatttatttttgagacagagtctcactctgtcgcccaggctggagcacaggagttgataaataccaggcgcccaacaagctccgctcccgacttcatgcaggccttcctgggccccacaggtagcctggggaggaccgtggctggtggatgcttttccatgatggagaggcttttgcttaggaaataggtttatcctcagagtatgactcggacaccagttgccttgtctttggagggagagggaagacccactcggcttgcctctgggactggaccggaggctgagagcccaatctttggggtggagccacatttggggctgccacgacctggggatgtaaagggagttagaccacaaggatttgcatgcttcacatgaaatgtggcccagcccccgtcgggggagcccacccaacttccataaaggaggaaggtacagatcactcctgcagcctccctgtcccctgagcccctgtctagccatgttcctacagtcattttcaagaaagacacctggatttatggaaaacagaactttggaatcctcgagcacggtcatctgctcctaggtggtcatttccatctgtggtcagagctaccacatgagacttttgaggaaaatgatgacttggttattgcgtcactctgaaggtcagacacccacatcctcttaaatttgtgcttctcttcggagctccatagggtgacatgaaaccctgtttggcagagacagcatgtgccatagaggagtttca

SEQ ID NO: 787 - DNA, 1930 bp, Artificial sequence
  DNA replication origin
cccgcgggcgggaggggagcccggtgtcctcctgggcccttcccgcgggaggcccgtcccggtgcttcgcgcacgacggcgcggtctgcaggatctgccaggatcccggaggaaaacgtccccccggcctcacagttctcaccgttttcttctgattttaaaagaaataaatacattttcgtgtcttcatgtataaatagatacccatgtgttcgcggatacgtgaatgccgcagtgcgtgtgccaagcctgtgcccatgtgcgcagtggggcagccgggcctgctggaggcgtcgcgactctgggcccggagctgtccaaggcactggggatgccgcaagaacaaggcaaagttcccgcccctgggggaactttgtaatgtaagtaaatacataaatactttatgtatttattatttacttcattttttaaaatacagagaggcagggccttgctatgttgcccaggctggtctcgactcctgggctcaagtgatccttctgcctcggcctcccaaagtacaggtgtgagccaccgcacccggctgcatgacatttaagagagagacacacacacattaaacaagacataaaataaatggtatgtcagaagatggcaatgccctagagaaggggttagggagtgtggggctgcagaggcgctggccttgcaggtttctatcaggttgttggcgagtcctcacctggaaggtgacactagaaggaggatttgcggagcaggccgggcacggtggctcacacctgtaatccctgcgctctgggaggccgagaggggcagatcacctgaggtctggagttcgagaccagcctggccaacatggcaaaacccccatctctactaaaaatataaaaattagccacacgtggtgctgggtgcctgtaatctcagctactcagctgaggcaggagaatcgcttgaacctgggaggcaggggttgcagtgagctgagatcgtgccactgcactccagcctgggccacagagtgagactccatctcaaaaagaaaagaaggacctgaggagctaggggggccagccagactgacgtgtggggaaggtcacgccaggcactgggaagagcaagtgcaaaggccaggggcagaagtgagctgggctgagtccaataattacggatgaaataattatgcagctggtagtggaataataaccccagggaagcgctgcagagtgggggcacggggccctgtggaagtttaccgcggcggattccaccccattgggagggtcgagggctcctcaaggagccctaccaggccaagtagagagaacagcatgtcccacacagagggctcagagagctctgcactggcagagctccggaggggagagggcctggaggcacactgcaaaggaagtggagggggacagggatgcagaggcctgggaaggaggtgagggctggggaggtgggacaggcccaggtgtggcctcttaggcagttgccagtttctaagagcaaagagaagcctagaaaggttttatgtaggggagtggatggcatgaatcctattcacagttagcaaagatcataaagctcagagtgaaaacagattggagggaaccaggggaccacatgggcgtaccgggtggcacaggtgggagagttgggggtgttggtagagggagagaggtgatggactggccggggacttaggactccatgattgactgaaggtgggggggtacaggaacagcgagggtggtgctaagaagtttctagcttgagcgatgagggaagagagtggattcatggaggccaaagcaggtgtgtgctggagtgaatgccataggtttgctttgggatatgctgagcttgagggccttcgcagcctctaggccaccagacacttgggtctggagctcaaagatgctcctttatgagtcccctg

SEQ ID NO: 788 - DNA, 1404 bp, Artificial sequence
  DNA replication origin
gggaaatcggggcaagagcagccacagaggcagagcgggggctcccaatcttccagggaccccagggcagcatggctggaggtggcaaccctgaaatccctgccagcgcctgtgttggctggagctgggagataggaggtgagggcaggaggtggtgcagtgaggtcagatcaaggcaacgttctgaagggagagacgcaagatttgtgccagcagagaggagagggcagtgctgtgccaggtccccattctgcgccacccactctgctggcctcctttaggttctgcgagtgaagagcagggagacagccctgggcagggggtgccagcccaacacccactggcgcaaggctgtgtgttcctgtgacctgacaggcagagggcaggcccaggtggccggcgagagggaccctgctgatcccgggtcctcgacaaaactggcctgggattgcctgttaggggcactccacaagcggacgagggagtgcctgcatcagcggtgggctcgtcacttctctcggcctctggagctcttgctgaaggtggaggcagccactttggggcagggccacctgtagccaggtggtgcatccagccctggtgaccaggagccatcctgggtgaggaggaagtcatcggtcattccagccaagggggacaaacattgaagagctgcacaccgcctccatctggcgttttgtcctttccttaggttcagcaggccccgttcacccgctggtcgaccccctgactgccggtccccacctggctcgcttcccctacccgcctggcactctccccaaccctctgcttggacagcccccacacgagcacgagatgcttcgccacccagttttcggtaagacttcccctccaggaggggcggggaggccgtgtgagggttgggttggggtctggtctgctgtcttcattcattactcattcattcattcatgcattgagcaggtgggttcgctccccctgcatgcagggggtccgtgggggaacaagcctcctgccctctgggggctgtctggggtaggggtcataaatgcatcagccttgctaagagccggtgaaagtagcagaggggactcacggcaggtctctgaaggagaagcacttgggctgaggccttggaggaggggccaggcaggtccaggcagaggcacccaagggcacctcctgcctccccagaggctctgccctctggctgtctgcagagtctgggaggggctggctcctgtgtccgaactggcacctctcctgtgctctttgccgtttgctgtgcctgtgccgccctggtcttggccagtcctctggctatttctgtagcgcaggttgttttgtgttcggcaggcaccccctacccccgtgacctgcctggggccatcccacccccca

SEQ ID NO: 789 - DNA, 993 bp, Artificial sequence
  DNA replication origin
ggagaggctgctctgaggcagaggcaggcccagctggcatcctcactccctctgcagcctggtgagatggcgcagggggtggctactgtgcttacgaggaggcaggttcacctgctccatgggacttggagtacaggtcctgtgggacagcctacgtgcagggcttcctcactggccaccctccagtgtggggcaggatgactgatagagcagggcccagagggagggcggggagccaccttgcttggaggcaccaggcgcctcccctgcccctgtacccagtcctgacatgggagagcactcaccattgccgtcctcatatctgaagctctgttggcacctggtgtagaccttacaagcctcagtatgagcagtgttgaggacaggtagtcatttgttcattcatgcatcattcattcagcaagtgtttactgaacccctggaatgtgccaggcacagttgtaggtgctggcagaacccctgtccacatttaccttccagtttggggagatagttgaaagacgtgtgccacgttgtgagaggcagaaagtatatgttctggaaaaaaataaatccagaagaggggatcaggagagctgggcgcaggggcagtatggcggtttcgagaaggccgtcaggagaggtccgctgaggaggtagcagaaacatggaggagatgaaagggcaagctgtgggaaatcggggcaagagcagccacagaggcagagcgggggctcccaatcttccagggaccccagggcagcatggctggaggtggcaaccctgaaatccctgccagcgcctgtgttggctggagctgggagataggaggtgagggcaggaggtggtgcagtgaggtcagatcaaggcaacgttctgaagggagagacgcaagatttgtgccagcagagaggagagggcagtgctgtgccaggtccccattctgcgccacccactctgctggcctcctttaggttctgcgagtgaagagca

SEQ ID NO: 790 - DNA, 1215 bp, Artificial sequence
  DNA replication origin
aggtgggtcagctcggaaaactcagccaaagccagcaggaggcctgcccagcctcgctcctcaagggaagaggactgtgcttttcattctccctcagccacccttgagtagcccagtgccttatctgtacgttccttggctccaaaggccacatgacactgctctgctgcccttaccctgccctgtgggcctaggccacttccctccatcccaggcacagggccaagaacccaggcttcacccgtgtgctgcagctgtctgaggccttgcagttctggagagctgcggggccgaggagagactgcgatacagcaaaaccatgacggtagtggatgctgagctcttctaagatctgccagggatgagggatctgttcagaaaagaacagtttccgctcctggatggtgactgtcactcatcaggctctgcacccctccccgtgcctctgtcccacctgccacgctggggcacgcaccttggtggagggggtcctgctggtggaggtggaggtgggagtgaatgtgagagtgctggtgatggtgcggagtcacgttgaacatctgcagtcgggccaggggatcgctggtcagcgatgccatgcgctctgcgtggatacgctcggctgccagtctgtcagggtagctcatctcgggccgcagctgggggcccgccagggccagtctctccctctccaaggggttcaggcccgggtggaaagaagcaaaagggtggggcccggcggtcggggggatggtgagggcgctgtgccgggcaaagtgctccatggggttggcggctgggtgcagggggtccagctctgggggcttcacctcgaagcccggcttcatcctctcccgcagctcccgctctcggatctcccgctctcggatctcccgctcccggagctcccgctcgcggatggtggggtcgacgttgtagaggccaggcatgtggtaggccagcagggggtccgtggggttaaggggcatgtagaaggggtggttgcggttggtgggcgacatgacgtggggccgggcgtactcgctcagagtccgaagggcaggtgtgtcgggcccgatgtaggggggcacagcagcaatggtggttggtggtggctcgaaggatggccgcatgtggccaggaccactgagctgtgggtcactgaggcgaccttcatgcgctgagctggacgccttctgcagaaggaaaagaaag

SEQ ID NO: 791 - DNA, 905 bp, Artificial sequence
  DNA replication origin
tccaggtgtttgtagaacctgagaaaagccacagatcttgctgggagctcctgccgagacccaccccggccctccctcccaccagaacttgcccccaccagcccacctgtgcctgacccgtcctggagccctaggaagcgtacctagctgactggctggcgtgactgggggtgtccaccacagtgggctccggggacgggctccttggtgggggaggggggctctcaggctcctcagcgtcgtccagagcctcctccttgatctggacggtggggagtgggcaggacgacccccccgctatgctgcctcctgaagccgccgcaccagagcagggtggctgggccgaggtgccaggtcccgccggtggggtagaggtggaggggcaggtcggaggggtgatgggaggagggcctccagggacaaaggggtgctgagcaaacgggggttggggggccacctggtggaggcctgtaggggggtgggaggcagggggcgggggcaggttctggctctgggtcagcccggggggctgggcgggcgaggagggcaatggctggctctgaggcatgagttgcaggggtggggggtgagccgacggggggtgatgtgtggacagggagctcaggggcttcagggctggagggggaggcaggttggcattcatggagaagggtgagggccccgagaggtggggagggtgcttgtgggcctgtggcgccggcagctgggggatgggagtggtaggcgggggcttgatgtggggcatggccaagggcgctggtggcaggggctgctcccgtggaggctgttgggactgcagcgctgactgagaggctggcagctgcagggaggtgtgagggtacgctgctgctggggaggtccccagaggggcctggccttgggag

SEQ ID NO: 792 - DNA, 1313 bp, Artificial sequence
  DNA replication origin
aggcagggggcgggggcaggttctggctctgggtcagcccggggggctgggcgggcgaggagggcaatggctggctctgaggcatgagttgcaggggtggggggtgagccgacggggggtgatgtgtggacagggagctcaggggcttcagggctggagggggaggcaggttggcattcatggagaagggtgagggccccgagaggtggggagggtgcttgtgggcctgtggcgccggcagctgggggatgggagtggtaggcgggggcttgatgtggggcatggccaagggcgctggtggcaggggctgctcccgtggaggctgttgggactgcagcgctgactgagaggctggcagctgcagggaggtgtgagggtacgctgctgctggggaggtccccagaggggcctggccttgggaggcctggggagggaggccaaagggctgtggggggcctgggtgctgcagcaggggcccagcctgcaggctgtgagggccgggtgggccctgaccgtgcagtgggggctgggcatgagagggtgcagaaggctggcccgccgacccagtcagaggctgcagcgggggatgtggcgagggatgcggcgggggatgcggtgagggcggccgctgggggtgcaaggccggtgcctgttggatgtgggtgtggggaacaggcgctgtgggagcctgtggctggttaggggcctgggaggccgtgggggagccctgtgggggaactgcagtggcagagggcgtgggccctggcgtgggcagctgaggggtccctggaggagctgaggagggagctggggtgaccccagtgggagcctgcaaggctgggggctgggcctgcagcatctgctgctgggctgacgagtccgagtcactctcattgtcctgggggctggggatgctcggggacgtgctgcgattgtcctggtcgatgtctttggggtcactgctaccctcatcgttgacgctgcgactgtctgaactctctccctcaccttcagatggcgagttgggcctgctgatctcctggagtcagagaagggaaggatggaagtcccaggagggcagagccctgtctgctctgcaccaccagtgccggacacacagtaatgtttgtgcagatgaagcagcaagcttggctccgggaccacaggtcgtgccctgacccagccagtgtcaaaggccactccagccccaccctaggagacagggcacggccaccaactagggagaaccccggctgggggcttctgaagaagcattagctttactcagcaaggctcagcagcaaacctcacct

SEQ ID NO: 793 - DNA, 1180 bp, Artificial sequence
  DNA replication origin
ctctccccacgcttgctgcggtagggaggaagtttctgtgctttaccgccttgatgttctcctgtccggaaggaggacacagattccagcgccgggtgccctggaggctccggcctcggggtgggggtcgggccgggggcggggccggggccggggcgcggggccccggctggcggacaggagggcggcggcaatccaggccgccttttgcagccgcccgcggccgcgccgggctctgcgcgccgcgctcctgcctcctcccccgtcagcggcggccccagccccgcgccccccgggccccgcgccgcgcggccccgccgcggtcacacgccgagccacccgcggccgcctccgccctgcgctttgtggagccggagcccagtgacaggcgacggcctcttgccgccccggaccccgggcgcttacctgtggctgctggggtcggccgcccgggaccaggctgggagccccgaggtgggggctcggagccaggagctgcccccaccggggcggggaggggtgctcgggaggcatgggacaaagtgaaagtctccgggctggggttagggacgagtctgctgcgaaaatggatgggggcggcgagtggcgtcgggagggcggaaggggtgctggttattctctggtgtctcggagtggcttttaatgacggacggtggggcaggcccgctggctttcgtgttcccggtgggcttctgtgatactggtgccttccggtgcctcctggcaaattctttggattaaggaaagcggccttttaaccccctagggttcccttctggagaagagtcaccgggtttggttctgtttcccctttctgctcgacacttctgggaagcttggttctcaggtgggaaagcagttgtgttttattaaaacatggagcatatttataccttcgtgcaccagaatgtgtgcctggtggaagagggggacagattgcttcttagcctcagacgcaggacgtccttctcttaaacgcgctgccctgcgtggtgggtgggattggggttctgatgaaggtagctggggcctgccctggccagtgggtcccagctgagctgctgacatactctccgagcctcggcagtattccctagccgagactttttttgtggttgttattctgctgattgtagatatctttgctttgctgacatcc

SEQ ID NO: 794 - DNA, 1582 bp, Artificial sequence
  DNA replication origin
gctggggccgccgctgacgggggaggaggcaggagcgcggcgcgcagagcccggcgcggccgcgggcggctgcaaaaggcggcctggattgccgccgccctcctgtccgccagccggggccccgcgccccggccccggccccgcccccggcccgacccccaccccgaggccggagcctccagggcacccggcgctggaatctgtgtcctccttccggacaggagaacatcaaggcggtaaagcacagaaacttcctccctaccgcagcaagcgtggggagagggcgcccacagggctggggcccttcccaggctgctgggtctccagcccacgttccggatggacgaagtcggctgcgccccggccgcacgccctccgccccaaccccgcctcagctgcgaaacggggggctggccccgacgccccccgcggtcccttccggcccgcgattgtgggcggcctctccctggcggcccaggcattagcctgcacttccccggccgccgcttcacaactaaatcaccgcggaagcttcccagccaataaatcacctgcccaccgggcagagggtccctcccactccctgtgtttgagacccgccaggcggattcagtgaagggccagacttagccttttaagaccagtctgcaacctcctactccagtagtggaggctttgcgtttttgaatttcacccttgctgagatatgactcatcattgtcaattttcaatataattcatacagttcgaagggaaaatctctcaaggcacaagaaagcagcaagctctcctctagtgtgaggagtgacctttgttacttgacaaaagtatcgtttatatgatcaacaggcatcctacgctgtgtgcacacagcatatcaccgggagagacggcacggaaagatggccctgccctcaaggagctgcagtctgcccaggaaggcagacaggtaaacaaaccagtcctagggcctgcaagaaaagcagcagaggaacaaagggtggtgggtgaagctaggaagaggaagcaacttactctgcttgctgatgtcttagaggaagtgacaaggaagagtgtgagcctgccaggtgggctccagcagggcttccagcagaagtcagccaggaaaaggcacagggaacattctgggaactgcaaggaggacagggtgtgcagaatggagtgccagcagataagacgaaagaggcaggcaaggatccggttgcagagagcccttcaggccgcacggaagagttcctaattgtaggctggcagaaaggctgaagctggagctttccatgaaaagactggatgaggactgtgccagtggcagtgtggcctaagtgtagattagggacagaccagttaaagaggctgctgacacagttcaggtatgagatgaggacctcaactactggcacactccacctcagtaatcagaattcctgccgcttaatccattcttcaagtattcaggtatttactgagcacctagctgagaggggtctaggaagataataaaggttgccatggacctttactgaactgtgattcatttttgcacgtaagataagtatgtgtg

SEQ ID NO: 795 - DNA, 1232 bp, Artificial sequence
  DNA replication origin
ggctgatccccccacctccctcccggacggggcggctggccgggcagaggggctcctcacttcccagtaggggcggccgggcagaggcgcccctcacctcccggacggggcggctggccgggcggggggctgaccccccaccttcctcccggactgggcggctggccgggcggggtgctgaccccccacctccctcccggacggggcggctggccgggcagaggggtcctcacttcccggtaggggcgaccgggcagaggcgcccctcacctcccggacggggcggccggccgggcggggggctgacccccccacctccctcccggacggggcggctggccgggcagggggctgaccccccctcccggacggggcagctggccgggcagaggggctcctcacttcccagtaggggcggccgggcagaggagcccctcacctcccggacggggcggctggccgggcggggggctgaccccccccccccctcccggacggggtggctgccgggcggagacgctcctcacttcccagacggggtggctgccggatggaggggctcctcacttctcagacggggcggttgccaggcagagggtttcctcacttctcagacggggcggccaggcagaggcgctcctcacatcccagacagggttgcggcccagcagaggtgctcctcacatcccagacagggcggcggggcagaggcgctccccacatctcagacgatgggcggcggggaagaggcgctcctcgcttcctagatgggatggcggccgggcagagacgctcctcactttccagactgggcagccaggcagagaggctcctcatatcccagacgatgggcggccaggcagagacgctcctcacttcccagacggggtggcggccgggcagaggctgcaatctcggcactttggggggccaaggcaggcggctgggaggtggaggttgtagcgagccgagatcacaccactgcactccagcctgggcaccattgagcactgagtgaacgagactccgtctgcaatcccagcacctcgggaggccgaggctggcggatcactcgcggtcaggagctgagaccagcccggccaacacagcaaaaccccgtctccaactcatcaattcttatgattaagaggcattttcgtttctttttctgtaaactgtctaattatatttctagtccatttttctcaagaatgggggggaggttggtcctg

SEQ ID NO: 796 - DNA, 971 bp, Artificial sequence
  DNA replication origin
ggggtcagccccccgcctggccagccgccccgtccgggaggtgaggggcgcctctgcccggctgcccctactgggaagtgaggacccctctgcccggccagccgcccagtccgggagggaggtggtgggtcagccccccacccggccagccgccccgtccgggagggaggtggggggatcagccccccgcctggccagccaccccgtccgggaggtgaggggcgcctctgcccggccgcccctactgggaagtgaggagcccctctgcctggcgagccgccccgtccgggagggtggtgggggggtcagccccccgcccggccagccgccctatccaggaggtgaggggcgcctctgcccggccgcccctactgggaagtgaggagcccctctgcctggccagccgccccgtccgggagggtggtgggggggtcagccccctgcccggccagccgccccatccgggaggtcaggggcgcttctgcccggccgcccctactgggaagtgaggagcccctctgcccggccacgaccccttctgggaggtgtgcccagcggctcattggggatgggccatgatgacaatggcggttttgtggaatagaaaggcgggaagggtggggaaaaaattgagaaatcggatggttgccgggtctgtgtggatagaagtagatatgggagacttttcattttgttctgtactaagaaaaattcttctgccttgggatcctgttgatctgtgaccttatccccaaccctgtgctctctgaaacatgtgctgtgtccactcagggttaaatggattaagggcggtgcaagatgtgctttgttaaacagatgcttgaaggcagcgtgctcgttaagagtcatcaccactccctaatcttaagtacccagggacacaaacacttcggaaggccgcagggtcctctgcctaggaaaaccagagacctttgttcacttgtttatct

SEQ ID NO: 797 - DNA, 923 bp, Artificial sequence
  DNA replication origin
atctgaccgtcactccggctccgtggagcattggggccagctcagggtggggtgggtgagaatggagaacaggactattctatgaccttttcaaggggagccagagaactgggggaagctggggaatggtaaggtcaggagataacgtttgtttgcttgtgtttggaggtgggaggaattagggcagatgtgtgtgctgagcaggaggctttaataaagagtaagacatcaacgatgcagaccgggcacggtggctcatgcgtgtaatcccagcactttgggaggccgaggcgggtagatcacaaggtcaggagatcgagaccatcctggccaacatggtgaaaccctgtctctactaaaatacaaaaaattggccaggcatggtggtgtgtgcctgtaattccaactactcagggggctgaggcaggggaatcacttcaacccgggaggcggaggttgtagtgagctgagatcatgccactgcactccagcctggtgacagagcaagactccatctccaaaaagaaaaaagagagagagagagagaaatcaacgatgcagaagaccagggagagaatagcaggaaaggaggccctgagcatgggagaggagtggggttgggccccacgtgggaggggtggtgttgacaagagcagggatttgtcatccgttgcagctgaagaggggatgtggaatttggtccagatgcacgtgggttaaggagcggagtgtttctggcctgtggcttctgtcttctcaatggagtgggagtgggagcgtcagctccaggggaattgctggagcccaggcacaggggcttcaggagagaggagaaagcatgtgacaggaatttgggaggtcagaaagaaaatgcccagcgtgatactttaggatttctgggcactgttcatatttgtagctat

SEQ ID NO: 798 - DNA, 1991 bp, Artificial sequence
  DNA replication origin
tagtaactgttgttgttatgttaccaggagccacacaaaggttgacccatcaaggtggagccacgttaccaggagccacacgaaggctgaaccagcaaagtggaggaccagctgtttaattgactcgggtctggtgacaggccaacatggagagagacagcccagcttcaagaacagcaaggcagccctttgcacagttcccactggggtggggaggctggagatgaggactgcattccacatcagagttgttttatttctggatattcacagacagctagaagtcagaaaaataagccaaagtgggaagcccctggcagaccagctccactggcttcctctccagagtcactgttccgaagtgacaggtggaagctctttcagttcctccttttccgggtacacttcagacaccttattcatcttggtgaaaatctggttgatctctatgaacgtcttggccttggtctccgggacaatcaagaagatgtagatggtggtgaggaggcagatcacggcgaagacaatgaagctgtacgggccgaggccctcctgcgggaagaggggcaggtgacacgtgtgggacgtggtttgcccaggggctcgcactgtactgcatggggatctggtggtgagcgtgggccccgggccccactcacctggatgaacgggaagatcaagcccacggtgaagttggagagccagtgcacactgccccccaccatgaaggcagatggccgagaggactgcaggaagatctcagtgatgagcagcgcgggtatgggacctgtagggggaggagagcagcctccctgaaggcagagcgggcccgagcatcccaggcctggccatgcagacccaccaggtagctggccccaggacagaggcgtctccaggactcttgggcatgtggggcagcacgtagggggcaaacggcagtgtacagggatggcaggccagcaaccacccgttaggcccactctgctgcctgcacagtctgtgtgttcccacccacaccaccattttaccatttcgctctcattatgtgccacccacccccttgcggtggacgggggaagagatgccatttccaggctgcattggccatccctggtatctctaaggagctccagcccggagcttctgggaccagggggggttgtgacaccctgaggccagctttgggtacgtactgggcccgagggcatgtcctatgacgtaggagatgacacagacgatgctgatgtatggcatccaggacactgtgtcctgtggagagaaagcagttggttcacctggagcagacaagctaggacgggaccccagggggcggccaacctgccctggtgggtggaggatggcacctggctcctcccccagcagtgccacctcgatgagccactgggaaatcagctgaacgtgggctatgagctggcaggacacacggtccccagatgtctggccagttgtatttgctaaaacagctcattgtgaccccttttattttaaggcaggtggaggcgcaggatgggaggggcactggtcttcctggtgcagctccgggctcctgggaccctggcctgtcctcacctgcagtgccagagctgcagtgagcacgcagcaggctatgaggcagatggagaagcccagcagcagcagcagcctccgacccaggagctccaccacgaacacctacaggagggtggcagggctcaggcgggagaggcccagcttcacctccctccagccccctccaatggggcagctgtgaggagagctgggcggaccgggtgcccacccatgtgcacgcacactcacattcacatgtgcaagacatgcccttgggcagccagcgggaagtcggctgtggctgtgatgcgggaccccagctgcccacccttgagactcagctctagggcctcctaatcccacaaccctgagcctcaggattcctgccctcgggaggccagatgtctgcatgcaccggagac

SEQ ID NO: 799 - DNA, 2611 bp, Artificial sequence
  DNA replication origin
ccgggctcggagccacccagcagtgggcgctgcctggtccaggcacgcctacatcccggtcaggtggtggccccgggcccggtgcggctcggcagccccaagtgtgaggggctggtgcggggccacctcccacacagagtttctgtagtagcggctggtcctccacgttttggggccacgggctgcccttttggcggcgccgaggctggggcgtggggcccgaggggccttgggtggaggctgtgggcagctcccaggacactcacggcgcagaaggtcatgaccacgttcacggccccggtgccggccgtcacgtactgcacgtgctcctccggcacgccggcgctcaggtagatctggtccgcgtagtagtagatctgcaaggcaagcgcggggctgggcggctgcccggaggaggcggcctcggcgccaggacccacgcccggcgccccaggacctgcgccccgcgccccccgagccctccccagctcccgagccgcagcccggcccatacagcgttgacgcccgacagctgctggccgcccatgaggacgatgatggacagcagctgccagcgcagcgagcgcatccggaacagcttcagcacggagatgaagcccgcggccttctctgcctcatcctcctgccggatctcggccacctccctgtccacagagtcccagccgcgcagcgtctgtagggctggggagaagcggcaccgtcggaccagggctggggagcagaacctggaggccgcccccgccagagccctcgttacctttcttggcggccgcttcgtctttcttctgaatcagcaggtacctggggctctcggggaagaagggcagcagaaggagctgcagcgccgcggggaccccggtcagccccagcaggatcggccagcctgggaggaaggcagcgagctggcaccagcggcctccccaccaccccgaaggcgccctctgcagagccggccccagccccgtcatcctgagtggggtgcaggctccaggagggcacagctttcccagccctaagaacagcaactcccgacggtggacactcgggaaacacctgcagcagggatcagcagcgacgcacccctgcgcccatcagacagaccacaccgacgaggccggtaataccatgtgctggtgagaacgtccccgtgtccttcagaggacagtcttgcaggggctggaggagctgggcatacccggcctgacccaactgcccactcccagctctatgcccagagaagccaggccaccaggatgcctgaactggaatggtcacggcagctctgattacagaaaggacaccagaaacagtgggaatatcgttaacattccacatagaggggacacatgggctggctgcattggtactgcaaaggcaaaactagaggcaaagcaaaaaaatgaagcacagagcttcacaaatgcctagagggccgtgtgtggttctgagtcctgctatggagctccctgagacaggaacctggcttattcacttctggtcccagctcctaatgagaacgcggcgccttggcgtaagtgtccccaacacatgcaggagtgaaggagaggcaggagcatgtggtacttaaacagggacctaggtctgtgccgctgggtctgcatcctcatgagaccttggaccagtcttccaatctctctgtacctgtgatgcacctgcaaaatgggtatgatactggtacaggcttaatagggctgttctgaggaatacatgagttactaaaaaagacttggcacttggctcacggtaagcactttctacagagagtgtctaagcagcacagagcttgatgatccacttgactgacttgcagacggtgtgtagaaccctggcgggaactggcttatgttttggctgacgggatgactgatgatagtttaaagggaaagtcgtgcaaaaacaaccccggttacaggtgtctgtgcacctgccgcatgccaggccccaggctgtcttggggaaggtggaggcagggtctgggatgtcctcaccacctcccccatggggccaggccaccctcactcctggtacttctctttctggtctgcaaaatgggataatcactgagtcccaggcagcagcgttgctgggagggtcctatgaactgatgctgggtccgccccaagcacagagcctggcacactggtggctgtcattgctatgccacgggcctccatatggacagctgctgagcaggcagggaagcccatcactcaaagccacctcatccatctcctaagagggactagatagtaaacgctggccagtcccttatcgcgcctttgtccatggcctgctatgttggctcgggacaggatgggccccccaaggacatccagcctgttagaagagaccagtctgcagaaagtcctgtcctgtggtggtggctttggaacacaaggagggggccaagggtagtggtgaaggggtgggggtgctcccgagatgtcctgaactcaccatctacgtttgcaaggagattccgaagaccaaagatctgggccacaaggatgccaacagtgatgaagagctggggcaccaccccgagagccccccgcaggtttttaggggc

SEQ ID NO: 800 - DNA, 1249 bp, Artificial sequence
  DNA replication origin
tgaggctgagggggactcgggcaaaggcggaggggaacccgggctgaggctgggggggatctgggctgaggcagagggggaccgaggctgagggggacccgggctgaggcagaggccgagggggacccgggctgaggcagaggccgagggggatccgggctgaggcagaggggtcctgggcagggacaggacccacccggagcccgcaggcccgccaggcagagggactggctgagcggcccgcagcctggcgtcatgacggcctcccgccacgcccccgtccccgcgctcggctccctccagggcggaagcacgggtcgagcgttggtgacgccatggctgtgcttgcgacgccctgtcactggcaggaaccgggtactgcggcccgcagctcccgggatgatcccctctgggcctgagggcctggctcactgtccccgcttccccgggctgggccgtcaaggcggggactgggagtgtccgcgtcccccccagcgacccccggttttagttaccccctcgcccaaaggcagggagaagtggaagatctgggcctagatagaagcaggtgtcatgcacttgacatgactgatgactacaaactttggacgattatttttggggggaggatgggggacggagatgagtctcgctctgtcgcccaggctggagtgcagtggtgtgatctaggtgcgctgcaacctccgcctcccgggttccagctattctcctgcctcagcctcccaagtagctgggattacaggcgtctgccaccatgcctggctaatttttgtattttcggtaaagacagggtttcaccatgttggtcagactggtctcgaactcctgacctcaggtgatccacccaccttggcttccccaggtgctgggattacaggcgtgagccaccgcgcccggccggattcttctttgtgttggattgcacacctgtacccgtctcctcactcccccatcgttgatttcctctccccaccctacccctgcaattaaagtgcattttctttggaaactttttctagatctttgaaataattggaaacctctggtcttgctatgcgttagtcacaagtcagtgtgctaggacagtgatacgcagaagaaaaagacaggcagtagctggtgaaagggaatgctgagttctcccttgtgaatagggacccccccgaccccccaacacacacacacacacagacggccacgctgctaggcttctcacagtctcccaccc

SEQ ID NO: 801 - DNA, 1021 bp, Artificial sequence
  DNA replication origin
accaacgctcgacccgtgcttccgccctggagggagccgagcgcggggacgggggcgtggcgggaggccgtcatgacgccaggctgcgggccgctcagccagtccctctgcctggcgggcctgcgggctccgggtgggtcctgtccctgcccaggacccctctgcctcagcccggatccccctcggcctctgcctcagcccgggtccccctcggcctctgcctcagcccgggtccccctcagcctcggtccccctctgcctcagcccagatcccccccagcctcagcccgggttcccctccgcctttgcccgagtccccctcagcctcacccgggtccccttcagcttctgccagagtccccctcagcctcgcccgggtcctgcttctggccagggaccccccaaccttcgtggcgggcggaccagcctccaggcccctgcctcaggccgccatgaggccgaggcctgcaggctccgcgagcagggcggggtgggagactgtgagaagcctagtggctcaaagatggaggagggggatggcagcggtgaggtgggactggggggaggggagtggtcctggcaaacctgaggcaagaggatcgcttgagcccaggaattcgatcatgccactgcactccagcctaggtgacagagcaagaccctgtccctagaaataaaaaaaattaaaaattaaagttccatctggatgtccagaggtgaactgatgaggggacaagagaccgctggatttggaagtggggagaaggagcagtggaaggtctttgccgtagcccaggtgaaagaacaatgtgacttggaccagcatggggatggagaagacagaagtagatacacttgagggatatttaggatggaaaattgacaatcacttggtgataggatgggggagaggaaataggagcgtttctgttactgttataataaaacacaactaggccaggcgtggtagcctgtaaacccagcactttgggaggctggggcaagtggatcacttgaggtc

SEQ ID NO: 802 - DNA, 827 bp, Artificial sequence
  DNA replication origin
gcaaagtcttgaagagggccggggggagccctggggacagatggagacgggcattccagagcaagggagcagccagtgcggagccctggggcgggggtgctgcgtgtctgcagcataacaaggaggtcggtgtggcttcagggttggccccactgtgaccataagggttggccccgctgcgaccgtaaggagcatgtggagtggggagcgctgaagagctccgagtggaggactcactggagcagactcgggttttcaagcagccctgctgcttctgtgttgagaatggactgtaggggggagcaggagggggtggcagaggcggaggagggagcccatccagagacgtggtgacgtggcctggacacgggggcagtggcagaaggtggcagaagtacccagagtctggatctgttttgaagttagaggtcggcacggtggcagctcatgcctgtaatcccagcactttgagaggccgaggcaggaggattgcttgagttcaagagtttgagatcagcctgggcaacatagggagaccctgcatctattttaaacaaaaaaagagggctgcaggacttgctggggatcggatgtgggctatgggacaaagaaaggggtcaaaacagagccccaaggctttggcctgggcaacgagaaagctgttgtttccatgagctgagactgggaagggagcattggcctcaggggtcaagatccatcttctgtcttggatgtgagctgtttcagatgactttgagacctccatgtggaggtggggactgggcagaggatctagcagtcagggttcaggagaaggatccgggctc

SEQ ID NO: 803 - DNA, 1821 bp, Artificial sequence
  DNA replication origin
ccgggggacgtgtgtccggggctcggattgtgggcggggctcagggcctgggacggcgggacggggctgggagtgtaggcggggcttaaaggccggggtaccggggtggggcgcggcgcgtgggcggggctcagggcccgggatataggggcggggcgcagggcgtggacggggttcagggcccggggcccagatgggcgggggagcggccggacgcgggcggggcgggcgcctggacgcgagcctagggcgcctcggtgcccagacggcggcggcgtggccgcacgcgcggcccggcttctgtcctcgcggcgctccggctcctggccccccacgccatgcagccgtccccgccgcccaccgagctggtgccgtcggagcgcgccgtggtgctgctgtcgtgcgcactctccgcgctcggctcgggcctgctggtggccacgcacgccctgtggcccgacctgcgcagccgggcacggcgcctgctgctcttcctgtcgctggccgacctgctctcggccgcctcctacttctacggagtgctgcagaacttcgcgggcccgtcgtgggactgcgtgctgcagggcgcgctgtccaccttcgccaacaccagctccttcttctggaccgtggccattgcgctctacttgtacctcagcatcgtccgcgccgcgcgcgggcctcgcacagatcgcctgctttgggccttccatgtcgtcaggtgggtggcggtggcgctgcttttccaggagcccccgacacaggccgacccctcccggtcttgccctcccagaggccgcgtctaggttggacaccccctacccacagcaagcagtgcctgctggcgcccccgaggctgtcctgggccagcgggaggaggccagccttgcccgagattcgctccctcccgaaggagccccgctgtgcctgccccagggcacagccccttggggtagtggggacagagttcgcccccagagccgggccctgtttccttggacggggctggggaggacactctgagccccttgtgacctgcttcactgtgtcctggctgtctctgctgcccatggggaaacaggctgggagacgagttaggtaactgtcccgggctggagagccggcaactgccagtcccacgccaccaccccaccccaagccacagtgagcttggtgcactccgccactcccgagctgccgtgtctctgctgtacagtttacaaaggactgtgctttttattctgtctttggtcgtttctagcctcaggccccagccccttgtatttctgttctagatgatcttgactttccagagttcagcaattctgagattgagggcaggggcggagggctggtctgggagtctcggagtcctcctggagtctctctgagagtggggaaaagccaagaccttactttgcgattcaagcgtctttcaagtaagcctcgctgaagagggtcggcccttccctggggaatgtcaggttttgaaaatctcatggcgtcctgtgctgtgctgaactgagggcaggaatcctaggggctgttttccttttctccttctcccagatcagagcatcagatactgccctaattataggtcctttctattaaaaacttaagtgcattccaaggactgcgagcacagtcagcactttggcagagacaggtcacctgggtgtcacacggcaaggctacagggctgtaagagtcgcttgaccttcagttgtgcactgaggccggctggtccttgagaaactaagtgacctgcttctcagctgtacaagtaaaaaatctttgcaacacatcatccaaaccgag

SEQ ID NO: 804 - DNA, 1096 bp, Artificial sequence
  DNA replication origin
tggtatatccatataatggaatattacggggcagtaaaaggaatgaagcactgcatatgctacgatgaaccttggaaacgtgctaagttaaaaaagtcagacataaaggccacagagcatatgagtctatttacaggaaatgtgcagaataagcaaatccacggtagaagagtggttgccagggctgtcggggagaactgagggctaacagctgagggataaggatttctttttgggagtaatgacaatgttgtagaattacataataatgatggttgcacaaacttgtgaacatactactgaattgttcggttaagagggccaattttatggtatgtgaattacatcttaattacaaagtttgaaatttttaaagaaaaagccatgccctgcctagcatttcattttttaaaaatcacacctagttagctatggtttttaaaaaatagcatgcttattttaagaaaaggtggaaacgccggcttccccaagtcaccaccaacttgtgaacacgtcgggatcacggctgaaggaatgaggatcatacccgagagctgtttctgttgctagtggaaagaatgcctctgatcctcacgcccttccactcacaacacacacagaagctggctgaaaagagggaaagtaatattagccctaaaaatgccagcccttcctctcacaggactggatgtcccagacacctggcaagagcaggggtgggcctggaggagcgtggagggacaggtgctgggacctgggggtgccctgaggtagggcttagggacctaggggcttaggggcgtggtgtgagggcgtgggcggggctcaggagcctcgggcaccgggtggagcttggaagcctcaggggcgtggcgggggcggggctcagggcccggggcaacgggacgaggaagggcacctgagccagggtcagggcccggaacacaggggtgtggcggggtgcgtgggcggagcggggcgcgtgggttaggctctaggcccaggtctctgggccctgtggacaggggatcggggcgcgtgggcggagctctaagtcccagtctcaacgcgggggcacacgggcggggggggggcg

SEQ ID NO: 805 - DNA, 1150 bp, Artificial sequence
  DNA replication origin
cggggagtccgggacctcggctctgggtaggcgcgccccgcgacccagcggcggcgtgggcgaggggcgctgcgcaaactacgcgctctcgctggggaaacgccagcccaggcgggcggcggcggtgaaggggatgaggaccaggaccccgtgcccggcgggactggccccgcaccccacgccgcccccctgcggtgcgcaccgcatctgcgccctaggccgaggccaggctccgacccctcccccgcaccgacgtgattcggatcgcgcggtgctggcgccgccttcatgcgccctgcctggcccccacctggtcctctttccttttcaggtggaggagatgccgctgtcccgtcggtctggggacagcccagctccccggatcccgggctggagagacgcgtcgcggccccggggcctggtggcacgagcaggaaggaggacccggcggcgggctctgcctgggcttgcctgggcttgttccgagccgggctgcttctcggtgaccacgcagatcgggggcatttggagattttgcgggagtcctgcagccaagctccggggcaggagaggcctggaagcctgcactacctgctcgccccgtcccagcatgcacccaggtaaacgcttgtgtttctcagtccgtgcgaaagtttgcaaagaaggaggcgggaactagaccaacaactttaataatcatagtcataataatgaaaaccctgttcaattgtgtagcctccgtaaggggaagaatttccaagaagcaacaaaatgttctttgatttcataatctctggggagaaaggattccttttttggggttttgctcggctagttctttcttccctcctctatctccagcgtggggcgaggaaggccgactggttcatgggtggcaaatggggaccctggctctcttgcgctgctggccacggtgatattgcagcaaatgctcaacctccccagttcctctcctcaccttgaaagtggaggcattgatactagccacccatggttgcaaaaaactcgcatgaaagggaaaggaaaagtgcttcggtcactaaagtagcgttgtctaagaggtcaaggctttggaagacttttgctctagaagaggggaacgggagaggggctttcagccaacctggcc

SEQ ID NO: 806 - DNA, 1738 bp, Artificial sequence
  DNA replication origin
aagcaaacagaaaccacggggggctcgccgcgacgcccagtccgagggcctctcgcctggaagagggaagaaacccacgtcctggacgcgggtgtggggtctgtcccgggtcaggacctgttgtctctgcgacgttgccagtccggagagctcggagggccaatgcagccccggattcaacaagatgcgaaaggacttctaaagccaggaaccggcacccagccacggccaccgcccgccggcccggcgccctgcccccactcactgcgcccccaagttccggcgccgcgggctgcaggggtgacttggctcggcgtgcctcggggcacgaggctcggccccgcacggctctcgggtcccggggggctggggtgggaagggacatggccggcgcgcggcgctggggagccgggtgcgccaggctggggaccttgcgtggggcagggcttggctcagccgaggggccgcggctcagcccccctcaccggccttaaaggttcccagagacgcaaagtcggacgcgggtcctgagcgcggagctacaggggggagcatggggcagcccccaaggcgcgctccctgcatttcccaccctttccacgctgccctgcgcgcacggtcgggcgcccttggggtgggcagggaggcgcgggcaggggcagcgccgaagacctcccgccgccatggagaaggggctccccacccaccctcctgccccaaccattatagatcccagccagtgcgccccgcgcccttccgggacaagctgcccccaggaccaccgtgccccagtatcaagcggacagcaaatctctcggtggctccttttgtaagggtttctgccctcagggttgttacgggacagaaatggtttcatcagaaacaagccctcctcgcacactcacagtttgcaggactccgaactgggcccgcgagatctccacctgcgcaaaacgaaagggcggattctccttggactcacgaggcaaccgctccccggggtgagaacgggggactcattcctccggcactgggagaagacgattctttaggaggaggacagggaagcgaatgctacccaggtgcgtaatcacatttgggcaccctcgggggcctgagaggaggccaggggtgacctgcccccattctcacaggggaggggcggtgagcctattctcacaggtgtctgtgatgagcccatgttttccaaactcctccgtgattctagaacagtgctagagaagccgtgagccagctggcaggtgagaacgcccaggtgcaggtggatggctgcaggtcaggcctacttttcctacacctgttgctggggggcaatcccatacccactctcagtccagagtgcctgtcaccacagggcaagtaggtgaagggcttctcagatcctcaaagactcagagggataaaaggaggcagatgggtcctagaggcagcccatggcaagggagaggtctgcttttttctttttttttgagacggagtttcacttttgttgcccaggctggagtgcaatggcctgaccctggctcactgcaacctccacctcccaggttcaagtgattctcctgcctcagcctcctgagtagctgggattacaggtgcccaccactatgcccaactaatttttgtggagacggggtttcaccatgttggccagtcaggtcaaattcctgacttgaggtcaaactcctgacctcaggtaatccacccatctcggtct

SEQ ID NO: 807 - DNA, 1515 bp, Artificial sequence
  DNA replication origin
cattacagcccatcatcgtggaggggaaaaaatgaggctagagttggtttcagaattagatgggggtgcatgactagagggtgatacagaggggcgtacgtttcggacaccctgtccatgtcgtgggccaggctctccgggacacctcccaatgcaccagtgctgactcaggggtatttctccgcttgctgcgctcccaccctttgcaactgccccagccttggccagcccagcccttgcagccagcttctcccggtctccttgcgcaggggcagttagaacccaagctgcagcaggccctcccccgccctccccgcccgcctgcccgcctgcccgccgcccgggccaagtcagcagtgctgagcgctgcggggctgcagcagcagccggcgatgcggagaccctgcaccactgctccgggcggcgctcgcgtcccgacggccacctcctggcggctgcgcgcagccggcgccgagatccagacggacgcacggtgctgattggtgcagtgagtgagtctccggctttatttagaccaccgtttcttgacgactgtacttcattggagttgagggctcggagcagcaggcagccttccccgtgggaaggatgacaaatggggagtgctgcttctaggtgctcgtaccaactggcttcgtgcgtcctgggatgggcggtgttcacaggcgcttcggggctgagcgcccaccaagtgtggcgcgcgcttttgggaaactccgtggaagaccaggacggacccctggagggttaggaagactttgagaccagccaggggaagccgtgtcccgggccctgactgtggatctcctactctgaaccacggactccagtttggaaggccaggctgcctttcggattggggggtaaggaagggatccccagctcaggcagccttttgggctagggcaaggggacctctggaaccacatttttgaatgctcccacccatgatttctgggacagctactggagacaaatagaggctcgaaggtgtcgggagaaaggctgtgttcctgatgtcatgtagttgaacttggatgtggaggaagtccagcttcccctgcagagtaaaaccaagccagcgaatgtgggtgggggccagcagctgccgaccctcctgggtgatgtgatgggcttaggtggtaggagccaggggcctggggccagagagggcagccctaagggggtctagacagcaccttctgcccagaatggcagcctttggtacaagtctttatttatgccagtggcatgaaaatgtcgcccgatgaatccccaggggcccgttcttggcaaaagccctgtctcccagcaagatgggaagtgatgtcacattgcactctccagcccgctcttctggggttgttcgagttgtgagatggttcggtgactgatgcctctcattgtcccagaccttgtgcttcccctgggagaccctccaccctggtggttgctttttcctgtccccatgctttagcttgagcatctccaccg

SEQ ID NO: 808 - DNA, 1414 bp, Artificial sequence
  DNA replication origin
cggcttcccctggctggtctcaaagtcttcctaaccctccaggggtccgtcctggtcttccacggagtttcccaaaagcgcgcgccacacttggtgggcgctcagccccgaagcgcctgtgaacaccgcccatcccaggacgcacgaagccagttggtacgagcacctagaagcagcactccccatttgtcatccttcccacggggaaggctgcctgctgctccgagccctcaactccaatgaagtacagtcgtcaagaaacggtggtctaaataaagccggagactcactcactgcaccaatcagcaccgtgcgtccgtctggatctcggcgccggctgcgcgcagccgccaggaggtggccgtcgggacgcgagcgccgcccggagcagtggtgcagggtctccgcatcgccggctgctgctgcagccccgcagcgctcagcactgctgacttggcccgggcggcgggcaggcgggcaggcgggcggggagggcgggggagggcctgctgcagcttgggttctaactgcccctgcgcaaggagaccgggagaagctggctgcaagggctgggctggccaaggctggggcagttgcaaagggtgggagcgcagcaagcggagaaatacccctgagtcagcactggtgcattgggaggtgtcccggagagcctggcccacgacatggacagggtgtccgaaacgtacgcccctctgtatcaccctctagtcatgcacccccatctaattctgaaaccaactctagcctcattttttcccctccacgatgatgggctgtaatgcaccctgctctgaggcctggggggaatggaaagacagaattctctttcaagcccaacccaggcccggggaaccccctagatgttactgtggggtcacagacaaggccgtggggatttgacacgtgggcagggacaagggcaaccccaaagctagtggatctgacatgggggtgactgggtggtgtggtgggcatcatttcattcactgcagtggatttgctgcctgggaaatgcaacccccaccgtccgaggtccgctcctgtcttactagctacttagcagccagcttccctgttctgctccctgagagatgaaggtgtcccaggctaagatccctccatcacctgcccatccctgagggtctcatgtcacctcagcggctggcacctcctcttcccaaacaccccgtggtggctttggcccagacagtgcctgcctgagggaaggaggcctctggccatatgaagaccgtagaggccagggcggccatcccttgttcatttcatcctgtgtagttcctttcacaagccccactggagtcatctgctcttccccgggacccatttgtgaagttcctgtctcccttgacctccccgtagggaaccagagacc

SEQ ID NO: 809 - DNA, 1092 bp, Artificial sequence
  DNA replication origin
ggcggcggggccggcggggggcgcttacttcctctcgcgcggcggcgcaggccgctcctccgggacacggccggggcggcgctgagggccgggcccgctcccgagggctcccctgcgccctgggccgcacctcctcttccgcagggcccgtcactccgacaagtgcgcgtgtcacgcggccacgcgccgcacgacactccgataccgcccgcggagcccgcggcggccgcaggggaaggcgcgaggccaaggccagcccggccgccaccccgccccaggcctcaggcctcaggcctccaccgccttgcgctcagcaagactggggcccgggccgggggcgcgcgcggcgggggcgcgcgcggcgggggcgggggcggggcgggggcgccggcgaggccacgccctccgctggcggccgccggggcggggcctcggagcttccggggcgaggcggtgggtcagctccgagcctccgcccccgcccttcccttcggccccctggtggccgtgcgtcctagagctgtcctgccgcgtccgagacgcgcgcgggacccagaagtggccgagggacgtggttgtgtcgtggaggggacccggggtgctggctgctccctacgatctggcacccgctctgggactcctcaggcctcgcttttccccatctgtagaatgagcggctcggtctttcccgtcttcaatatccagagtagggatttagaagtcggagcgcacacgctggccacgcctccgcgcacagcttcagatctctgccaccccttatcacttgtgtgaccctgagttcagtttcttcatctgtacagtggggacaatgggagtacctgcctccggggttgtctggcacttgggtgcttagtaagcggaagcttggacccgtgtggcaaatagaagacttttgctaagacattgctaagaaagacagcaaatggaatcagggcttctctgtagggtgagaggtatttaagtgagaaaacgggatcagctgcctctcagagcactcagtccccttcctgtcccccaccattatcaggcagtaggtggccctcaccatgctccccaacctgctccccactt

SEQ ID NO: 810 - DNA, 839 bp, Artificial sequence
  DNA replication origin
ccccgccgcgcgcgcccccgccgcgcgcgcccccggcccgggccccagtcttgctgagcgcaaggcggtggaggcctgaggcctgaggcctggggcggggtggcggccgggctggccttggcctcgcgccttcccctgcggccgccgcgggctccgcgggcggtatcggagtgtcgtgcggcgcgtggccgcgtgacacgcgcacttgtcggagtgacgggccctgcggaagaggaggtgcggcccagggcgcaggggagccctcgggagcgggcccggccctcagcgccgccccggccgtgtcccggaggagcggcctgcgccgccgcgcgagaggaagtaagcgccccccgccggccccgccgccgccccggccccggcgcctccaacccgcgctgccgccgggcccgaggccgcgccgagccccggagcctgcgctgccagccccacggagcctggggctggcggctttggaactgctcaggaggcggccaggctccctccagggtcgccccgagcggccgagctgtcctttccctgggcttcccggaactgagttccaggagagggggaactccgagatttcccccgggacctgcttaatctttggcattgattggccctcgggtttcacatagcgtttcccgtacccggatctagtgaacggttttccaggggcaaacctctctggatctctgaaaatcagctcacccaaccttgaatgcttagccagaagtgagaacttctggaaagaagtgtccttgcccactccccctgcacccacaacaggcccatggctcatgaaaggcagcagatgagggaaaactggtgtcaaatgg

SEQ ID NO: 811 - DNA, 1502 bp, Artificial sequence
  DNA replication origin
cagtgtgatgagatcatcaccccccacagcacccgtgaatctgggcagtattagggagccatatctgagaggctgagttttgtacctcactgtggcacctcggccccgcagagagcttctggcactaaatacacattcagagaggaagggagaagcagctgaagagaaaccaaggggcgggggaaagaaaaagagaaaatggcccagagaaagagcaagggagagagaaaaagaggagaaacctcctggcccatccctgggtccagggctctgggccctgccctgtggcgggcacgcactgcgggggctgggggggcagtggcctcgggtgctcccgctgcagctgcagaaagcggccgcggggatgagctggccactgacgcagcgctggcagcacagcgcagcggcgccaggcctgagtgctggggccagactgttgcccccaggatcaggctccaccgccttctactgtggggctgtgggctcgccaccatcttcatctgtaaggaggctagtaacagcgcccacctcacctggcggctggggactggggacacagtaaacttcagctcttatcgttactgggcaagagccagtgctttacatcttcacggtcaatgctccaaaactttgctaccatcacagaatgccagctaagggaccttagctgtcctcaccgacaggacatgctcatctcacagctgcaaggagtgacatgctgaggccacccagctgaaggcagcggtgggcatgacgcagggcccccgcctcccgggtgtatactcagtgtgtctgaggtgtgtggcagtgcgggagaggcggtgtcctcctggagcctacaggctggcagaagagacagggtggacaaggacgaggcaagggtaacactgtgcagggcaggggagggaggtgtgtggcgccgtgagggtgaggggagtgggcctgcagggctcagaaagtcttcctggagggccatggagctgagaactaacaagcgagagaggggtcagaaggtgagggggacgcgagggggagtgccccaggcagggggcgccacggctgcaagcaccacagtcggggaagccctcacgcagttcccatggtctccacgcactcaaaaacttgggggacctcagggagactccagcctctaccgcgtgccagtggtttcccgcctctgtgccaggcctacttctctggaccatacgctcctcatgggcagcaatggctacttgggctttgcagccggcaccctggggtttagcccggttcagagctaggcacacggcaggctcgaagggagaccacacacccacagaaaacctccctctgagaagcgccccatgcctcaccgcagacagcgggcaggcagaggctgggggaccgagtgcgcagggccactcacacaccttcagcatccacggtctctttcatgatgatctccacccgctccacatggtgccggttccagaggccgtccaaagccttgcggttctggtctc

SEQ ID NO: 812 - DNA, 1152 bp, Artificial sequence
  DNA replication origin
gcgggggccctgcgtcatgcccaccgctgccttcagctgggtggcctcagcatgtcactccttgcagctgtgagatgagcatgtcctgtcggtgaggacagctaaggtcccttagctggcattctgtgatggtagcaaagttttggagcattgaccgtgaagatgtaaagcactggctcttgcccagtaacgataagagctgaagtttactgtgtccccagtccccagccgccaggtgaggtgggcgctgttactagcctccttacagatgaagatggtggcgagcccacagccccacagtagaaggcggtggagcctgatcctgggggcaacagtctggccccagcactcaggcctggcgccgctgcgctgtgctgccagcgctgcgtcagtggccagctcatccccgcggccgctttctgcagctgcagcgggagcacccgaggccactgcccccccagcccccgcagtgcgtgcccgccacagggcagggcccagagccctggacccagggatgggccaggaggtttctcctctttttctctctcccttgctctttctctgggccattttctctttttctttcccccgccccttggtttctcttcagctgcttctcccttcctctctgaatgtgtatttagtgccagaagctctctgcggggccgaggtgccacagtgaggtacaaaactcagcctctcagatatggctccctaatactgcccagattcacgggtgctgtggggggtgatgatctcatcacactggctggtgggacaaactccaaaatggagctgggcgcagtggtacacccgtagtcccagctactcgggggcagaggcgggaggatcatttgagctcagtagttggacaccagcctggggagcatagtgagcctccgtctctgaaaaagaaaacaaaatgggtgatgggtgttgcaggcaggcagcgtggtggggggacaatgtggggggtgggcgggaggccaggcaggacttcccaagccaggccttgaaggacattgctgggttcgagaaggcactgggtttctctacttcagaacccacagcagaaaagaggccctaccccctgcagtgagccttcatgggtctcagggaatcgtcctccagcccttccaaatttccctccca

SEQ ID NO: 813 - DNA, 957 bp, Artificial sequence
  DNA replication origin
ctccttttatggcccatgctgcttcgagaccccagccagggtacccaggggggctgtgactctcaggggctcacggactgggacgcacaggaggagcaccccaggtcaggctgagagggagctgggaaccagatcgcgtcttcctttcctcctccccaccccctccggcctgtgcagcagccttgactctgcagcaaactcctctgggccagaggctgcagcaggaaaaaaaaacaacactcacccagcatggaggatggaggggagggagccggggaagccggcttccacccacttagatgtgtgtgatgcgggtgggggaagacatccaaacgaccttgcagctcagaagtccctttcccggggcctgcagcagctctggaccgggaatgctccatttcccaggcctggcttgcagcccctcccttcccagcactcagggtgctggcttcggttacgcaggtgccactcctgcctaggagtcagctagggttgcaccactgcaggggtggagagcagctgggatccaccagaacccttggcagggcagaggacagggtagggagtgagggagaatggcctgtggtatgtgtggggtggggagtgggagagaatggcctgtggtgtgtgtggggtggggagtgggggagaatggcctgcggtgtgtgtagggtggggagtgggggagaatggcctgcggtgtgtgtggggtagggagtgggggagaatggcctgcggtgtgtgtggggtggggagtgggggagaatggcctgccgtgcactttgacccctctgattagcagtcagaccgcgggctccgaatcctgccttggaaacattctgcccatgctgagccccactgcagcagcactcgcctgccaagtccaccaagctccagtaggaggcagcatttactcctgcctgtttcccgccctcacccgggacagcagtggcagcc

SEQ ID NO: 814 - DNA, 1096 bp, Artificial sequence
  DNA replication origin
agtgccacctcactaccgggcgcacacctgtgccaggcaatgtgcaggggagtgggagggagggaaagtgggaagaagagaaaaggaagtaaacaaaattacagagcagttgtgacagagggtaatgaaaaggcccctccgagacctgaagagccagcctcgcaaaaagccagggagaaagcatctcagctgcagggaccctcaggtgccaaagccccgaggcaggaaggaacttggtgtgctgggggccagatggaggtgagcaaagagtggggacagcggtgaggctggagaggagatcaggggtcttgcaggataaggcgaagaggctggacttttttctaagatcagttgtaggggggacactggaggatctgaggcaggagaagacgagacctgacctatattggggatcgacccctggtcttggggggagaatgggtgcagatgcagggaaggcaaggaagaggctgcacagctgcccagcagagacgacagggcctggactaatgggcagtacaggagctggaggggagggagaggcaccccagagtcaggattgactggacctgctgacagatggggtgggtgtgagcaaaatggaggcccccaacatgagccctggaagtggggcctgagcagagggatgggcagtggaggcgctcacagacacggggaggcggaagcagaggggtttggtggagggtttaggtgtgtttaggctgaagacccccaggcgcagatgtccagttgtcaggtgtacggggtaactgtgacgataaaagggaagaacacctggagaacatggagcagcacgaccagcataacaacagcaacataacaacaccagcctaacaacacaacaccagcataacagcagtgcagcaacaccagcgtaacaacaacataacaacaccaatgtaacaacagcaacataacaacattggcgtaacataacaacatcagaataacagcagtgcaacaccagtgtaacaacaacataacaacagcagagtaacaacggcaacataacagcagcaacgtaacaacactggtgtaacaacagcaacgtaacaacactggcgtaacagcaaca

SEQ ID NO: 815 - DNA, 1752 bp, Artificial sequence
  DNA replication origin
gtgccccgcgccgcctaccgcgcccggggtgccgccgccgccgctgctctccaaggccgaggaggctcgggcgcccgggccgcgcccgccgcagggagcgaagtcgcctcctccccgcggccccggccccggcgccggcgcctggagcctggttcctgctgcgagcgcgcaggctgcccgagcgcgacttctgtgcggaggagaaaaagcaaccgacggctttaaagtgaaaaaaaagagaaaagcgccggtgggcggggccgtccctgccccgccccgccccgccccgcccccgacctcgggcgcacggaccactcagcactgcagggaaggccgggggcgcggggcgcggggcgcggggcgcgtcagcccggcgctggttcggccgccccctccgcccccttagtccgcagccctctcccgagccgccgccctggtgttgccggcccgaagctcgggtccctccggaggcgtctttgggaaacgcgtggcgcagggcctgggttgcagccgtgggaggctggagtgggggcgggggtcttacgagaaggagaaatcttcgcggagagtggggttgtcccaggaaccccgagcaaggcctcgccggcctcctctgaagtgcccagcggggacgagtgggcagccgccgggggtccagggagcctcctgcagcgctgtttcggccgctcgcgtttcggtgcccacggggacgggggcctcggacctcgagaccctgagggcgcgggcacctggcatccgcagggctgctccctgaacaggtcccagcctctggggacttgtcctgtggctctagctcgttcaaggaattttcctcccccttccccgaacagagcagtcacttgggactgggaagattttaaagactttgctgttttgagagcaaaatctcctggcattccccacccctcgctgtgtagtgtccattgaaaacggtgaggagttagcctttctgggggagccgaaacaaatagcggggcttccgtagttactgtgtctttaccataacccagtacagtgagggtgggactaatgacacactcactgtaaaggcgaggaaacagtgcctggcccgaggccagctgtccagagcttggaacccaattgaactgtgagattacaaagtttgatgtctctcattttacggtgctgaaaatcagtttggtttagctttgtttgaactcagaataggattacggagactcaaccaactgccctgggctgggcgggcctgagtgggcattctgactttccaggtgccagcggtttaggaatgttgaacccagactagtcaggtgggcagccatggccagcagcttaggggtgcttcccatttaaaagatcacttgaggctggaggtggtggctctcacgcccttaatccccacactttgggtggctgaggcaggcagatcacttaagcccaggagttcaagagcagcccgggcaacagagcaagacacagactctgcacaaaaattaaataataataataataattggccgggcatgatggctcacacctgtaatcccagcgctttgggaggctgaggcaggtggatcacctgaggtcagaagttcaggaccaggctgggcttggtggctcacacctgtaatcccagcactttgggaggtcgaggcgggcggatcacgaggtcaggagatggagaccatcctggctaacacgatgaaacccgtcactactacaaatataaaaaattagccaggcgtggtg

SEQ ID NO: 816 - DNA, 1225 bp, Artificial sequence
  DNA replication origin
gggcgcctccctcgccgcggctcctgggagaggggcccaggcccgccccgcgctgccgccgctgcagggcagggggtcccggggcgaggcgcggcgggggtctcggggcgcggggaccgtcgcaacgagttgcggtcccgaggaggggctggggcgctccggggccgccgacccgtcccccctttagcccggggaaagcgggaccccgctcggctgagttagtttcgcttttcccgccagtccgagtcgggattggcggcgcggcccggtcccccgtcggggcgcccccaccctcccgcagcgcctcccccagggagcctgccggggacacccgagcgccgccctccccgccgccccggagccgccgcggcttctcccagcagcggagggagagccggagggttgtcaggaaatcgattaaatcagaaaaacaagggcggcctgggcccgcgggaggaaccgcggatgggtcaccgtccccgggcgtgtactgggctcggtggcgtccaggttccggtgaggacgggacggccccgagaggagggtgcgggtctgcaggaagagcgggtgtctctgagagtgcatctgcgtgtgtgtttgtgcatgtccttgtgaatatgtgcctgcgtatgagtgtgtctgtgtgttcatgtgggtgtgtgtgtgagtgtgtctctaagtgcatctgtgtatttatgtgcctctgagtgtgtgtgtgagtctgtgtgtctgtcaatgtgtgcctgagactctaagtgactgtgtgtgtgtgtgtgtgtctgagtgcgtctttgtgtatttgtgtgtgcctctctgtgtatgtctgtgtgtctttgtgtgtgtctgtgtgtgagtgtgtatgtgtctttgggtgtgtgtctctgcaagtttgtgtctctgagtgtctgtctctgcaaatgtgtgtctctgtgtctttgtgtctgtgtgtgtctttgcgtgtgtgtgtctttgtgtctctttgtgtgtccacacgtgtctctgtgtctgtctctgtgtctgtgtctctgagtgcgtctgtgtatgtgtgagtgtctgtgtgtctccaagtgtgtgtctgtgtgtctttgtgtgtgtttctctgtgagtgtgtgtggggaccatccagggggccctctggttcctaggtactgctcctcatggtgatttctttacttggttctggatagccgggcatgctgggccacagacaccccactaggcaagc

SEQ ID NO: 817 - DNA, 1129 bp, Artificial sequence
  DNA replication origin
ttttgctaccttagagcccacccgttcccgccatcttggggcacaggcgcaggtggtcagccgtgactcccggattcctgtggcgcggcacgggccttcgtcaggaccacggctgcttctccaggggagaccgccccggaagcggcattgggtctgggtctgggggccgcagcagcttcgagcccagcttgggaggtggctggctttccacctcggttctccctgctcctatgacctggccggaccttgtgacctctctgagcctcagtttccatctgtgaaatgcgggtataagagtgcccccgggtagagggagctgcctggtgctctccttctgatcgcagagatcccaggccccgtagcagggccaggcctcaccttggatgcaccttcctgcttccaagtggaaacacacggtggaatttagaatccttaacctggcctgtgagggtttgcttccggtgctctcgcgaaggaaagagagaactcacaaataatatattatactaggcagagggtgagaaaggtgcttagaggccagcaaggttctggccttggggatcagggtttactctcagcaggtgaatctgggaaggcttcctggaggaggtgatgctgaaactgggccttgggatgtgtaagcactggagagggaggaggaagggaagaagggaataaatgtcactggcggaaggtggcatgtgtgtgcaaaaccactgggagctttgatgatacccggtatatagtaagtgcttgataaaagtcatcaccgaaatcaatctgactccaggatttggtttaggtatctgggagaaggggtgtgggggcgtgtggtagagattttcagaccaccaggtgagaacagacaggttttttgtcgtttgtttttgagacagagtcttgctttgtcacccaggctggggacaaagctcactgcggcttctgcctcccaggctcggggatcctcacacctcagcctcttgagtagctgggacctcaggtatgcactaccacgcccagatatatatatatttttgtattttgtattttttgtagagttggggtttcaccctattgccaggctggtctcaaactcctgagctgaagcagtccaccctccttggcctcc

SEQ ID NO: 818 - DNA, 725 bp, Artificial sequence
  DNA replication origin
ggaataccctgcgtcttttcacctgaagctcactctgcgctggggcttcccaacatggcactgttgacatagggcaggggaattgttgatgtgaggcttgtgtcgggcgtggctgggcgtttagcaatatccctggcccccacccaccagacgccaccccaacttgtgagccccacatgtgtctccagacattgccaaatctcccagggtacgctggggtgaaggagggagggtagtaaaatcacccaggttgaaaaccactgctctgtcctactaggggcgggccctgcatttgctggaatttgccagtaaagggcagaaagacttgctggagctctggcagatgtgtaggagttcgcgtgggggacagggtggcggggacagcctcccaagggggagaattgaagacacctaagggcagttgtatgaagcagtgtgaggggcactgcaggtggttcagtctgcatggggcccgagcacagccggttgagggtttgtgggtggggggaaatgcagctggagagggaggaaaggtgagatcccggatgggtggatgggtggacaggtggacaggcggatgggtggacgtgtgtgagtgtctcagtccaggaacttcatgccaagggctggagggcagtgatggagaggtcaggggaggtgacacccggtggtgggtaggtcaggtgagaggatccgaggaagggagtagggaagagagcctttgg

SEQ ID NO: 819 - DNA, 1056 bp, Artificial sequence
  DNA replication origin
ggctgaggcaggtggatcatgaggtcagtagttggagaccagcctggccaacatggtgaaaccccatttctattaaaaatgcaaaaattagccgggcgtggtggcatgcacctgtaatcccagctacttgggaggctgaggcaggagaattgcttgaacccgggaggtggaggttgcagtgagctgagattgcaccactgtactctagcctgggcaacagagcaagactccgtctctgggaaaaaaaaaaaaaaaagtatcattctggctgctctatagaaatggatggcagaggcaagagtggcctctgagaggccaggccagggacgagccaggcttgtcccggtgagaggtgatgggagcttgggccaggatggaagccgggggggtgggtggcgggggcggcccggttccgggactctttggaatgggctcatccatggaccggatgtgacgagaaagggaagcagcaaggtgacttgcattgtttgggttgagcaggtgaaggcgggggctgctgacccgagatgggaaagcccaaaggaggagcaggtgttaaatttgagacgcttcttcgacacatccagggggccctgcaagcctagtctcagagagcggtcagtgggggagttgtctgcacataggcgacttcagagctgccaccctgggtgaggtcaccagaagtaggggctagagagcgaggagaagagggctgaggctgagccctgcttagaggccaggagggtgggggctgaagggacccagtagattttggtgtcctggatgccaagtgaggaaggggctttcagaagggcaaagtagcagcaggtcaagtacatggacggctgagaaccgtccatcagctttggcaacaaggaattggcagttgaccttgaggagagtcacttgggtcagggggcacgggaggagcctgatggagtggctggaggaagacagacagggtattcgtctcctggagctgctgaacacattaccacaagcaggacagctgaaaacagcagaagcgctcaggaggccaggtgtctgcgatcagga

SEQ ID NO: 820 - DNA, 879 bp, Artificial sequence
  DNA replication origin
gggccgaaccatgcactcacctccgcgcgatccggtagagcaacacgccggccgcggcgcacgccgtgacccccaggccgccggccaggccggccgtggggcagcgggccagcagcgcgctcactccctccatggctctccgcgtggaaggacggcaggccggcaggggggtaggcgggtaggcgggtaggcgggtaggcgggcaggcgggcaggcgggcaggcgggcaggaggcggtgacgccgggggcgcgggccgcaggcgggacgcggggcggcgacgcgcgcctcctcgcgccgtgaccttcgccgctttgtagcgggcgcgggcccgccccctgactcggcgcgctcccgtcgcgcagccaatcgggacgaggggtgagcccgggtgggcggggcggcggcggaagcgacagagccggccggggagcgcccccgcgcggccggaggtggaaggcggcgcggggagggcggggcacggagccctgtaggaaagccccgccttctgcctcccgcgccagccgccaggcccggaggtctggctgcagacagtccaccgagcttctgctaaggggagcatctccagagtacgcaactgcttgtaattagtctttttccccctcgctaatcctgtctagtcaaacccagcctatgcgcccagtgctgtttagcagctccttgagccgctctaatggttgaaaaactagctttttagaaacacgatcatccacggatagggacatggttgaataaatcataggacagccatagttcggaacataatgcaaccattagaaagaatgccagatccaggcagggcgcggtggctcacgcctgtaatcccagcactttgagaggccgaggcgggcggatcacg

SEQ ID NO: 821 - DNA, 1896 bp, Artificial sequence
  DNA replication origin
gtgagcgcgctgctggcccgctgccccacggccggcctggccggcggcctgggggtcacggcgtgcgccgcggccggcgtgttgctctaccggatcgcgcggaggtgagtgcatggttcggccccacgcggccctctgcgccgcccgccaggcccgcccccgcgccgccccggcccgctgcccccctcggccgggacccgggctgcccgcgggcgcgcggagacccccggcgcgcgccgccgccccccgagaccgggttgagactgcagtcgggaagcggctgcggagtcgagtggagcggcggggactccgggaacgtggggcgcgggcgagagcgccgcgcgggggccacaaacttcctccgggagccgcggggggctggagccggtgcgcacgggccgcccctgccctcagccccgtgctgggccccggtgcacggcgatgctggcgatcgcggctggcggttgctgctcggcatgtgacgtcccgggcgtttttctacacgcctcgcatccgcgcgtttcagagccacagcccctgcttacgctagagcagctgagggacagggaggctcagtaacttgctgttaatgagaggaatcatggtttgagccgatggaatctgcagggcagaccccgaggctgggctgcctcccagaggtgggcaaggcctgagatgcctccaaacagttcaagacgggccggggccaccctcctccctgcccggctcacgggccatgcgggcccccgggttcagatccggcctctttcatcggcctccatcgccaggcataaaagcttagtggcctgttgcttcagcagagcctcgcaggtagcttactgtttctccacttgatccacctttccagagggcaggggggaaagtggggttgtgagaacatcctagaaagagtggatgggtttgcagcttcggcaagggatgcaatgagctcacacccttaggaaaaaggggagaagggacttgcccactcagcagcaagtggcagagctggggtttgaaccctgatcgtctggctggtctgtttgttcttccttaacacataccggtgctgcttctctcctccaggggggaaacggggaaaaagaagtacaggtggttgagtcacagaggcttcccagaggaggaaggcatgggagggacatcagctgtgtctggaggatgggccagatgtgactgaggagggtagctggggattgagtgaccccagcccagaggtccctgacaacccaagtctctccatgtcggtttctgctggattcctggaagttgagcatctgcaggaccagcttgtccaagccggtggttttatacccaggggaccgaggtccagagacctcaggtgatttgctcacattcccagagcatgttgccagctgagctggtccagcacccggtgttcttcctggacgaagccgcctctcagctaacccaggatggggggtgttgcctcaaggatgagagcctgggggaggggatagtctgccagccacacagcacctccgttgtgtttattgaggctggacttggactgggtggctcactgtgccacacactgcagctgtcctcagggatgctgtctccccttcctgccctgctggccacagctctccatctcctggaaacaagagtctggggccttggagagatattgggctagctggtgccaggggaactaggagggtgcctggaagtcctttcacgcccctgacgacaccagcaggtcacggtgtggcattgagacccttgctgttgattgggccgagaagggccagcctttcccaggatgctttaagatgtcctcatagagcactgggtttcacctggaggtcataaattggccactgtcacgattcagaagccagaccaacctagcaa

SEQ ID NO: 822 - DNA, 1009 bp, Artificial sequence
  DNA replication origin
ctggccaggccctgctactgaggagcaggtctgtgggctgccccctcacctgagtcggaggacagagtggcgctgggccatggtgagcaggcacctgcagaggctcgtgacaggtcagggagggaaaggatgacaacgacctgatgtcactgaaggcctgcataccctgggccccttacccttggaaaagctcagattccccaaggtcagcacaggctcctactgcctgtctcaggtggggtctcgctccccaaactcatggcgaaggccaggctgggcccaagaactgcactctccatttccggggactcgggagggtcttggagcaggaggccaagcagcagccagagctgcagctcggcctccttcacggctccaccacctcctgcagggccggtccagccataagcaggaccaaggggacagaccacaggtgctcctcaggggtgaggctggggctctctgctgccccagcctcactctgctgcacggtcagggcacgccaggggcccagcctgtagccactgtcaccacccctgtgcagaggccagaagggaagacagcaggaccaggaccctcacccaacagtgtcagagccagcaaacggcgtggtgagaggggggtgcctggagctgccagtaggaagccatgggccagagcctgtgtgggcgctgcccacattccagtcaccaggccagtgaaagggccattggccagagaggtggcagcagtggtgagtggctacagggcactcggggatggctggtggtgcccgaaaggaaaaggcagggcagactgactcttcgaggcagtggagggactgggccaggacctggggctgtagggtgggggtgggagggcgtgagcaggtgaaaagaggcaggacagagaggggcccgcttcggacctggcaaagcctgggcctgagcatccgtgtgtcctccccccgcagtcatggctgcttctctgaccttcggggccggaacctccgtgggcccgttgccttcct

SEQ ID NO: 823 - DNA, 1180 bp, Artificial sequence
  DNA replication origin
cagcctcccaagaagctgggattacaggcatgcgcccccacacccggctaatttttgcatttttagtagagacagggtttcaccatgttggccaggctggtctcaaactcctgatctcgggcagtctgcccacctttgcctcccaaagtgctgggatgacaggcatgagccaccacgcccggcagatttttcaagatataatatcaagttgagggacagctctccctctttgcctttcatttctttccttcccttccttggaaattcagtccaaaaggcactgggggagttacaagccatggagcggcccccctgggtggccaggtgtgcccatcagacctccagccaggtgagggtggaagtcacccaggagggcgacctgctgggaggtatcagagcctggcaggggtggagaggagggagtcctctcagggagtcagagtggagtgagaaaggcaattggtggggtgtgggagcccgagtggggtgaggcggcacctgggacatggcactggtgaccaagggccctaccccactttactcttctccctagcacttaccactgtgcaagatgttaggaatgtacttgtttgtttctgtatcatcagccgcgcccacccacccactagaagatcctccagggcagggacttggtcactgctgtatcctcagggcatactggtggcatttgataaagtgcagaatgaatgggtgtaacttgtagcccctatcccttgaccatctcagacagcaagacttggcaacacctgcatgaggctgcgggcaagagagagaagtgaaccctgttggggatttctgctttgaccacagaggagagaggggataagctttcgctgaagcagaaaggaagagtgagccaggggcagatccgggtggccagggagtcgggttggggcagattccgtttgcaggggcctgcaagtgcctgggtggggacgcccccaaggctgctggagagggggtccggggcacagggtcgcagagctgggcagggaggaagggagggtgagctccaggctgagctgccagtaccaaggctgcggcaagcagctctagaacaatctgccacttgcaatgcaggaattaagaaaggaggccaggcgcggtggctcacgcctgtaatctcagcactttgggaggacgaggcgtgggcggatca

SEQ ID NO: 824 - DNA, 1282 bp, Artificial sequence
  DNA replication origin
gtcaggtgtggtggttcacgcctgtaatcccagcactttgggagcctgaggcgggtggatcatgaggtcaggagttcaagaccagcctggtgaacatggcgaaaccccacctctactaaaaatacaaaaattagccaggcacggtggtgtgcacctatagtcccagctactcaggaggctgaggcaggagaattgcttgaacccaggaggctgaggctgtggtgagccaagatcacgccactgcactccagcctgggcaacagaacaagattcctcaaaataaacaaaacaaagaaacaaaacaacaaaaaacaaacaaaaaaacatgaaaatcagctgggtgtcgtggcgtgtgcctgtaatcccagctacttgggaggctgaggtaggagaattgcttgaacccaggatgcagagattgcagtgagccgagatggcaccactgcattccagcctggacaacagagcaagactgtctcaaaaaaaagaaaagaaaaaagaaaaagaaagaaaagaaaagaaaaaaaggaatagaggcttgggatcctggggaggtggtacacaagttaagggagagtgaggggagagagggtaaggtgaatgaagcttgtcttcttatgcggataaaatttctcaggtaagaaaagttagctctgagcagccctccgcctgatactaatactttaccaatggagattttccttttcttttctgtttttgagacagggtctcactttgtttcccaggctggagtgcagtggtgccatcatggatcactgcagcctccatttccctggctcaagccatcctcccacctcagcctcccgagtagctgggactacaaggtgtgcaccaccacgactggctaatttttaatttttttgtagagacgggggtttccctatgttgcccaggctggcttgaattcctgggctcaagtgatcctcccgcctcggcctcccaaattgctgggattgcaggagtgagccacagtgccaggcctggagattttctttatagatagaaatcattttacaaaaggacagcttttcagatctactcctgtgcctgcagtttctaagaataatcccttcaaaatatggcgaagaagtatattttggggtggcacacgctggtctcccatagtcacattttgggtgtgtgtcctgagccccaacactggtcacctcgcaatggcgcttggggtccctgggtgcctagagctgcaggttaccccctcttcttctcctgctctcagcctttctcccgctcctgctgaaat

SEQ ID NO: 825 - DNA, 1561 bp, Artificial sequence
  DNA replication origin
gcgcgccttgcccgcctggcccggcagcggggtttcagctgcgctcacagcggcggtgcggcctccggtgcgccggctgaggcgcgaggatactggaagcgctcagcgcgtgcgcccgctccgagcgctgactagaggaccaggggcctcctctgtacggcagcggggtccacagagagcgcgctggtgatgtcgcccgagtgccctggcgcggagagagggctgcgcacagttcgccggcgcccgggtcctgtgcgcccttcccagcctgggcaagtggggagcggggctgcagaggggccggggtggaagttttcggggcttcctcccggctcgtggacccgcgccccgcctcccagtcccgggcctcccgcgttgctcgccgcgtttgctgcagcggcgcaggcgagatcagctccggatctgcggccgagccggggttacgccggcaaaaccgcccccagctttgcatttccggactttttaaaaaaatactcttacccgtaattcagcctgaatgaggctttttaaaaaaatcgagtttcctgtttttatttaggcttcctcatttgcacctcctcctttgaggtagagaagaggggaactgggacgacctttcgtgggcaccaggatgggggcgttgcagggcggggagacgggggtccagagaaccggggaagggccgctgggaggtcccgaaaagtgcgctgtgggtggggcgagggtgaagcaggtaggggcgagatttccggggtcgcgggtggggggcgccctggagcggccaaggtgcagggtcctcgcgtggcacccttgggatctgcccagtttgcggatggagcgcggggctgatcgggcaggtctcacttgtgcaggtgttccctggaaggtgggacctgcagatcttgaaccccaccagactccatcaagggggcttcttcccgccgattcctgagaagtcctacctctgagatgctgggcacagccgcacgtggatgtgggcgggtgtgccgtgggttggagtgggaaggggcaattattcctctctcagggctctcggaggggaaggtttactgctccctagggactttgaaaccaagggctaaccccctgctctcttccaggagagtgggataccgcccgggtgcctgacggtgccttggtgttcttgacaattgaatggtaccatcgggacattactccccaaagaactggtcgttcttacctaggtgatttcagctggacaactgtaggagctgagtggtgttgtcttcattttacagttaaggaaacgaaggctcagaaaagttaaataactcaccaacccacacagtttacaagtagtttctccaggatcccagctctttccgacgccagcgcgtttaatcatctgggggtgccgttgcttgcgggggaaggagaatgtcctagtaattctcttgggggggatttggaggggacgactgttcagagaggcaccctctaagatacccttgagactcctctgtaacacccgctgctgctgttcacaccccctccccaatttgattgatgtgttgagtgg

SEQ ID NO: 826 - DNA, 739 bp, Artificial sequence
  DNA replication origin
tggagataaacggaagtcttcgcgcagggggacgattgcaggacggggccgctagggaggagggctcccacacgtggggaatgggggtggaggaaccgctgaagctcgtctgccctttggaaaatctcgttggtgtcctagccctgggatcattgtacttaccaggttggggggctctgcacccagaactcctcccagcctctgtctgcccgtccaaggtccggcgtgacttccggtggctgatttctcatcttggggaaatccccgccctgggggggtccggtgtggcctgcagggagcctgactcacccgtcggctgagtcagggggtcccagctgccctcggatgtctgctgcaccgctcccctccctcaggcgggggacggcaggaaggagggagagatgggagggcgtgggggcggggccgggggcggtctccagcccccggcccgggctccgccctctcccgggatctgtgaaagcacagccagggtgcgggcgggtgagtgcccacctggtgcagggtgtgaagagcgagagcgcgtgtatgagcacgagcgtctgtggtctctgtgtgtccgtttacatgattgcgcctgtgtctgtgtgtgcgcatctgcatgcgtgtctttttgagtgaatgtctgtgtgtgacttctagggacggccagggaagaggagtgtcccctcccaccctggccccccgtcttctcatcctggactccctctcttctctctcc

SEQ ID NO: 827 - DNA, 1581 bp, Artificial sequence
  DNA replication origin
ggcccgggctccgccctctcccgggatctgtgaaagcacagccagggtgcgggcgggtgagtgcccacctggtgcagggtgtgaagagcgagagcgcgtgtatgagcacgagcgtctgtggtctctgtgtgtccgtttacatgattgcgcctgtgtctgtgtgtgcgcatctgcatgcgtgtctttttgagtgaatgtctgtgtgtgacttctagggacggccagggaagaggagtgtcccctcccaccctggccccccgtcttctcatcctggactccctctcttctctctcctccttggggggtgctctgggcatccgggacccctggcaaggctgccgggtgctgggaggacgcagaggccgccgagggcggagggaagcgtcaggcctggctgcgcgcgccctggctagggagctccgagtcccggccgcctggtcctttcattctgggcttcttcgagattctcgagggcttccagccggcagtgttttctccttgccgtcttctcaggcacgaggaaggctcctggagctcatctgcctgggatgggcggccctgccttgacctcacgtgcagcaattaggaccaccaaggagtgttcttcaaaccaccttctaccaccccgcgggacacgccagggctgattctggtgctcgcaccccgcttcctcctctgcgttcccctgtggcaaaggtttgtcttgggctgtggacccgaaagaatattctaaggggagatgggctcttgcagagcaagaggggtatggtttcagcaccaaactaaactggtgccagcgctagctctgcccaagaggctgtgcagacagtgtttgtgtgagtacgtgagggtgagagtccctgcccgcctagcttcggcttccccacttacaaccaagggagaacaacatctatcttacagtgtagatgcctggataaaaactggagcgcctggccgagcactttgggaggctgacgcggtaggatggcttgagcccaggagttcgagaccagcgtaggcaacatagttagacccccgcctctacaaaaaattttaaaaaattagctgagtgaggtggtgcgcacttgaggtctcagctacacgggaggctggggtgagaggatcgattgagccagagaggtagaggctacagtgagctatgatcgcaccactgcaccccagccagggcaacagagcaagaccctgtctcaaaaacaaaaacactggagcgcccagagttttttttaagtgcgggacaaggattgtctcggtgttgttactgcacgcacaccgcccgttgtaatggatagatgcattagtgaaagtgctaggtacactcatttattttctaaatctcacatataagggaacccccgatggaaaggcccatcagctagggaacagccagcaggctggatttgagcccagagcccgggctggccaattactcgagtgagtctggctccggctctgtgacctgggtccagtaccccgccctttctgcggatgccttgcaaagcggggagcggaaagcagtttggtggacgaccagccctcccttgctttgcaggtggcgctttc

SEQ ID NO: 828 - DNA, 1595 bp, Artificial sequence
  DNA replication origin
ccgtgtgagctcgggcgcttctcccggctgggggtgtgagaatttgccgacggtgcccgcgccgccgccggccccggccccgccccagccccgaggacgccccgcccccagccggcgccccgccccgcctgccagtagtcccagccccgccccgggccgcgcccctccgccgagccccgcttgcctgcacctcgcgcggcgggcctgccctccggcccccgccggccccgcgccgctgcccggaggctggcgtcttcccgtcactccgggacccgcccgctgtgtcccctgggcaactgtctccagggagatcgggccccgcccccggcagcgacacccggtacggagcccacctgtgcgggcgtctgcggggtccccgtgccccgcccccagccccgccgggcgtcccaccccgcccagccccgggctttgtccgcctggggcggggtgggcagggtcggtggaggcgatcaggggtccggggccgtgggggcttggggggccgaggcagggggttgcgttcgcggtgggattctcagctatgggccgcgcgacgctctcctctcctaatctggttgcttccttttgtgccccccgggggtcaggaatcccaggtttctccgctgccgcccttgatgggatccgtgaggcctccagcgggcttcgcacgaggacgcgcctgttcggggcaggctgtttacttgtcggggacccagcagtggctgtgcgcgtcctcccctccccctgccccctattcgggacggagcctcctgcgctctgtccctcccgagctgtgcccttgagcccaagggggctagagggtggcagacccagatcctgaggtcctgcggcttcctccccgggggagcgccttctccctggccgccctcttgtggattttgtcctggctccttatttcctgacccgaattcctgaggatgaattctctccttctcttccttctcggctccctctgcttttggctttgtttttcctgttttgaaagggctttccttatgatcctgtctcatttccctgtgccagagctactataatttgtcgtggtaacgggtattggccagtcacttaattggtcagcaatggaagggatttcttccttagcctttggtgctgacctcctgtttctctggtggcagtgccttgcgaagtgcttgccactgtcccctggattttgagggaagggagcatccgagcccgcatgcctgggctcccgcagcagggtccccggagcatctttgcagggatagaggccgcagggaggactccagcttggtccttgggagatgtgttcctgcaacccatgccttttccagcgggttcctagggctctgctgtttgactcatggagaagccggtggttttggtgttgtgctaaatcgaagcccacctagtgggctctgggccgaaggctcccagctgtggaggtagctatgcccagggcctggggttgggagaaggggttgggtctttagactgggctggagctctagtgtcttttttccctctttggggttctgttatttcctggagcggctgaggtgggggaagaagcaccacagatgcaaggagtgggc

SEQ ID NO: 829 - DNA, 821 bp, Artificial sequence
  DNA replication origin
gtgtctgccactgtgcctggctgattttttgtatttttagtagagacagggttttgccatgttggccaggctggtcctgaacccctgacctcaggtgatctgcctgcctcggcctcccaaagtgctgggattacaggcgtgagccaccgcgcccggctttgattttatgttttgtctccatcattcagtccgaggtagattcatttatcccaccagtatctatggagcctgattaagtgccagaaattacacgaggtgcaggggatctcgtgggaaagggactcaagtcttctagaacgggccactacagctggagcagggggtggtgggcacggaggggagggtgtggcatgagcaagttgaagacttcaactgggctgggtcttgcagagccttcagaacaagggctggcacctggggcttgtgctgagcggatggacagccctggaggattttaggtgagggagtgagggatgcgattttcatccacaactatgctgctggctgcggtgtggaaggactgcggagaagcagggaggaaggggagtagggggcaggggaaggaggccggtgccactaatgacagtggcttgacccagaaggagacagcactggagagcaacggaatccagacatacttaaatcagagggacccttgggggacggtgcaggaggaagtgaggatgacagccaggtttgggcttgggagatgggagtggtggtgggaatttactgagacaggaaaggaagagatttctggtgggataagacagccggagccccattttagaccaaatgaatctcagctgcttaatgaatag

SEQ ID NO: 830 - DNA, 2144 bp, Artificial sequence
  DNA replication origin
acccaaatcaatctaagatgaaaataaggctccaggtctagcctctgtcttatccaaaaaatacttaagaaagtctgtaagaaaatgcaacactataacgacttttgtagaaagatgaaaaaatatttctcacaaaatgttaagtgaaaaaatatttttaaaagattctattagtagtaataacagcagcggcaaatactgtaggtggtaattactgtaccacccactgtttaaagctcttcacacgtatgaataaagaagctaacattcccccaaaccaatgaggtctgtgacattaatgaggtctgtgacatcttatccttttacaaatgatgaaatggaggcacagaaagggtaagtaatttgcctaaggccacacagccaataagtagcagagctacgattcactcactggtccctcggctctagggtctctgttcctgacctcccttgctcagtctcatagggtcctgttctgtgctgggtggcaccatgggggcggggttgtcctggacggcaccatgggggcggggttctgtgttcggtagcaccatagggatggggttctatgttgggcaagatcatgggggcggggttctgtgctgggcggcaccatgggggcggagttctatgttgggcggcaccatgggggcgggattctgtgttgggcggcaccatgggggcgggattctgtgttgggcggcaccggggggcggggttctgtgctgggcggcaccaggggggcggggttctgtgttgagcggcacaatgggggtggggttctgtgctgggtggcaccatggggttggcgatctgtgttgggtggcaccatgggggcggggttctgtgctgggtggcaccatgggggcggggttctgtgctgggtggcaccatgggggcggggttctgtgttgggtgacaccatgggggcagggttctgtgttgggtggtatcatgggggcggggttctgttaggtggcaccatgggggtggggttctgtgctgggtggcaccatgggggtggggttgtgttgggtggcatcatgggggcggggttctgtgttgggtgacaccatgggggcggggttctgtgttaggtggcactatgggggcggggttctgtgttgggtggcaccacgggggtggggttctgtgttgggtggcaccaaagcaacagaagagggagggagggaggaagcaacacagggagaaagtaaaggagaaagggaaagagggagggagggagggaggaaaagggggaaggagggaagaagggatggaaggagtgagggaggggggaacagaaggagggaatgagggagagagggagaaaggggaaaagggagggagggagagggagggagagaggaaggaaaggacagagggaggaagcgaaggagggaaggagagagagaggaaggaaatgagagggagagagggagggaggaagggagggaaggaaggagggagggaggtaaggagggatacggctgcaggtcaggtgctccctcccccccatgcagctgcccactcctccagcagaggaccccacgcttcagtcaaggggatcagttgcactcctgtgtgtatactaaaggactgaaaacctatgtccacacaaagacctgtacaggaatgttcacagcagcatgacccataatagccaaaaagtagaagcaactcaaatgtccatcagtggatgaacagagaaacaaaatgtgatctactcatagaatgaaataatatccagcaacaaaaaaaggaatgaggggctgctaggcacctaacacaggtaaactgtgaaatcaccatgctgggagacgcccatcacaaaaagccgtacagtgcatttacatgattatccagaatagagaaatctgtagtggtagccagggcttgggagtgaaggagactgagggatgagtgccacttggtgcaagggttcctttttggggtgatgaaaatgttctggagttagacagtggttggcaggtgcatggtttttggaacattctaaaactcaatgagctgtacactttaaaagggtgattttttggcagggcgcggtggctcacgcctataatcccagcattttgggaagccgaggcaggcagatcacgaggtcaggagattgagaccacggt

SEQ ID NO: 831 - DNA, 980 bp, Artificial sequence
  DNA replication origin
ggatcatgaggtcaagagttcgagaccaacctggccaacatggtaaaaccccatctctactaaaaatacaaaaatcagccgggcgcggtggtgggtgcctataatcccagctactcgggagggtgagacagaagaactgctggaacctgggggacagaggttgcagtgaaccgagatcacaccaccgcactctagcctgagggaaagagcaaaactctgtctcaaaaaaactataaaaatgataccagctacttgggaggctgaggcaggagaatagcttgaacctgggaggcagaggctgcagtgagccaagatcatgccactgcactccagcctgggcaacagagggagactctgagaaagagagagagagaaagagagagaaagagagggagagagagagagagaaaggaaggagggagggagggagagagggaaggaaggaagggagaaggcagggaggaaaggaggggaaggaggggaggaagggagggaaggcaggcaagcaggcaggcaggcagggtatggtggctcacgcctctaatcccagaactttgagaggccgaggcaggtggatcatctaaggtcaggagtacgagaccaggctggccaacatggtgaaaccccatctctactaaaaatacaaaaattagtcaggtgtgggagtgtacacctgtaatcccagctactcgggaggctgaggcaggagaattgcttgaagccgggaggcagaggttgcagagagccaagatcatgccactgcactccaggctgggcaacagaatgagactctgtctcaaaaataaataaataaagactggggacactagctcacgcctgtaatcccagcactttgggaggccacagcagatagatcacctgtagtcaggagttcgagaccaggctggccaacatggtgaaaccccatctctactaaaaatacaaaaattagccaggtgtggtggtgtacacctataatc

SEQ ID NO: 832 - DNA, 789 bp, Artificial sequence
  DNA replication origin
taaggtcaggagtacgagaccaggctggccaacatggtgaaaccccatctctactaaaaatacaaaaattagtcaggtgtgggagtgtacacctgtaatcccagctactcgggaggctgaggcaggagaattgcttgaagccgggaggcagaggttgcagagagccaagatcatgccactgcactccaggctgggcaacagaatgagactctgtctcaaaaataaataaataaagactggggacactagctcacgcctgtaatcccagcactttgggaggccacagcagatagatcacctgtagtcaggagttcgagaccaggctggccaacatggtgaaaccccatctctactaaaaatacaaaaattagccaggtgtggtggtgtacacctataatcccagctactcaggaggctgaggcaggagaatctcttgaacctgggaggcggaggttgcagtgagccgagattgcgccactacactccagcctgggcgacacagtgagaccccaactcaaaaaataaataaataaaattaaaaataaataaataaataaaaataaaatctaaactgttgaccacatctacctagaatgcctcattccacatacctccggatcctctctcctctctgttctctgatcaattctcttgctcctgggaccctcacaacaatgtatgatatactttatatgcaacaagaaaaatgcaatcaacacaatctgttcagacccactgccatatgcattactttaagtagcagttaaaaagcccaaaccttctaagaac

SEQ ID NO: 833 - DNA, 1061 bp, Artificial sequence
  DNA replication origin
gagctccccgcgccgcggagcagctagccccaggcccctagagccccgagagctccgagagctccgctcggcgtcccgcgcgcctccctgccgctcccgccccgggctggcgatgctgcgccgccccgctcccgcgctggccccggccgcccggctgctgctggccgggctgctgtgcggcggcggggtctgggccgcgcgaggtaagccccggggctgggccgggccgctgggtcggtgcgggattcgggtccgggtgcaggattcgggtcccggtgcggggattcgggtccgggtgcgggagtagggccggatgccgggattcgagccgggatgcggggagtcgggtccgagcgcagggagccgggtcagggcgtggggttcgggttgggggtcgggctcgcggagccggggccagggcgcaggagactgtgggcgcgcgctgcaggcgtcccggggaagccaggctccgtcccgggcggggctcctgagcctgggctgcccccactgcagcccatggtggtggctgcgctgatttgggggaacgtgcagacgggccgaagggtcagtccgccctgctcagcggcgcacgcaggctggggctgcacccctgggtgagatgctctgtgtacgtgtgctcagatgtgcatcaggcggggggtgcacgcacagttttggtgtgtgcttacataagagcccactcctccgcatcccgtttccaagatcccgattctgtgttgctgcaccgcggacaccacgacttcgcccctttccgcctcctcccagagtccttcagacgttgtctgtttccagtggagccgaggctgaaacttagtgcttccctcccaccttttcacccaaaggtgaaatcgcgatgagatttgcgaccgcgggctcacccagtgttagaaatctccgtctctgctacccctggtgccttggtgctgtttttctgacggtcatttagaccgtggagggttagatgttctctacaaaaacgagaaacctctctggttttttaggattgtaggaccgaaattattttatggctcggtgggaag

SEQ ID NO: 834 - DNA, 1892 bp, Artificial sequence
  DNA replication origin
atcatttcatttaattctcacaactctaagaagtacatattgttccatttcgcaggtgaggagattctgaaagttccataacctggccaaggtcgtttgcatttgcagaggccagcactgaagtccagtcccgtctgactagaccatctgggtccttcccactagaatacagtggggaggagaaaaggacactgatggattagtcagtcgacagcacaggcagcagattataaagctgaactgtttggttagagcagctcggggctggagagggagggctggcaggaggacttcctgaaggagacagcccagaagctccttgtaaggacctgaggcttgggtatgggtggaggaggaagtgtgatgttggccctgggaggggaatgaataagaagagacagtggcagacagcatgccctgaggtcagctgggtggaggatgggaagcccagcagagatgtctggacctgacgaggtggcagcagggaggcactcactgagtttataactccaggaggggcagaagcaatggcaacacccgtcaccaggggagaggatgactcaaagccttggctggaaggagtggtgggtgtggcttggagcctgcccgggccaggcaggtgctttgggaagggtccagccaaggagagtccggtcttcctccacgcaggggagggggagcaggggaaggaaggagagacattaacaagatggaatctgtaggctttggtgcaggacgcttacggggaacacggctcagggagttggattccagattgcttttgaagccttccccaggtcacatcacaccgctgttcccagccgttccaggtcttcctgttgactgtaggatcaagtccattcccccaatctgacctcagtctacgtttttgggctctttgcccactagtctcctaaataagtcctctgcgccccacaaaccagtctccacccagcctccagtgctgccagcctcctccacccccacctggagcagtgacattcatggatagctcctccagcggtctcgaaaaatgaacattttagggttccactttttgctgttggtgtccccctaatgcgaacatcctgtccttgagggctgattctttttacaatagttgtcccaacgggggaagtcatttcacctttctgacttagtttccttatctgcaaaatggagccagtagtgtctcatagggtacagtgcctgcacacacgcccatccacggctgttccaggcctttcctccactgcgggggggtgccaggggtccagaggcgaggaggagggggccgctggacgctgggaaattgggaggaccccaagatccctgtagggatccacggtagagggggagggcttctctgtcctctctatccattcggacctccgcatttctaagaaccagcatcgcaccatgtcactgagaaagagcgcgcacaccagccgccttttgaaagtcacaaatagattccttcagtgaattcaggacagactccccgggggcaggtcccggggcgggagccggtgtgggtagtgctgcgcggcccttaactgtttaccaggcgcgtttcgctgacctcgtctcctggaccccctttcgtgacccctctcaacacctctactggggagacgaggaccccgaggttctggggggcgacgcgacctgcccgaagtgacaagggtcctgggccgcactgctccgccggggtctgcgctcctcggcggagcgggtgggaaggatgagtcctcggggtggagaaggaggagcgggtccccgggtaccgctcacccggccttaggagcccgggagcgcgcgtagggacgcggagttgaggctctccatctgcggccagggaaagggatacagtcccccgggcccctcccggc

SEQ ID NO: 835 - DNA, 1254 bp, Artificial sequence
  DNA replication origin
aagtagacactaaatggactcaagaaggatttactgaaacttttctaggtacacacagccctgaaccaggcttggggagcacaaggtacagaactggggccgtgacactgagcctgcattccagttgactgagtggctgaggaaaccacacaacacaaggcaaagagaaaaccacacaaataatacatgataatgagccaaaaagatatgttaggtcaagacacaaaccctcctacagtgccaaccacatattatgtactgtgccaagcatctcccctgaggaaagaagacccagggccttaagccagcataggaagtggcagagcaaaggggtgtagtgagctctgcaggaaggcaggggagaggctggctgccaatggctccagggagaagtcactggagctgggccttgaaggatgaacaggagtttgctggtagagagaaaggggaaggcacaagacacagaagttcagcgaacaattactgagcatctattctacggcaggcattgagaatacacaggtgagcaaaagagccacggctcacatgtgatgagaggcttccaatgagcagggggagacagacaccagtcaagtcacccagatcaatgatctcagacactgagacaaagaacatgaaggttaagtttgagtcgcctcggggatgtgcggctgggagcctggaggagaaggaggagttggtaggggtggcatacacgtaggaaggcccgaagcaggaagagttgtggcttaggccaagttagagctggaccacaggggcactcagtgggaggggaagaggtgtttcagcagaaggaagtcaagcctcagcttgaaaagaccactgtggccaaggtgtggagcagaggctggggtggagcagcaggaagcaggagaggagggggagcagccaggcaggggcttggttgggtagagaagagccaggaggagtgtaagagtggggctgtggctgtggctgtggggagaggcctggcacatgtccagggtgaggccccaaaggacaggctggacagctgggactgagaagcccatggaggcgcaaaagcagaggaatggcacaagtgcacgtgcccttgggatcaagtcagcactacggtgaacatttgcagagggttccagggccagaatcgaaacacggtgacaagctagttccgggaaacatcaggggcacttctgggggctacttggcctggagtgagaatggggggcctcaggaagaaaacacgtgcaagca

SEQ ID NO: 836 - DNA, 1367 bp, Artificial sequence
  DNA replication origin
catgtctactcaggccccacaggctcctgtccccatcacagccctcactaagcatgggactgccccccatgcacatgctccaacaggacaggggctgcttcagtagctgtaacaaccccatgccagcctgatccagcacctggtgtgtggcatggcaggcccacaaggagagcagggaggatgagtggcttctgctcttcttcctctgcctagaaaccctttccctccctcctcatggtcctcctggaactcagtactcacccagtgctgtcaccgttgtcaagtctgtcggtccctgcaagagggagaagaggggcagaatcttgcctgtcctttcccaggtgccctggcccccacttgctctgcctgagagctgtgctcagcctcaggtgagtcttaacctcggctttgcctcctccaggtgggtcggctgacttaacggtgctgggggagctcaggggaggtcaccacccaaacagtcaaggaggaagaaggtgggggaacgggagtctgaagatgctgtgggcaggagggagggaatccatggggaaggaggaaggaggaggagggcagggagcagaggaaggggagagtgaggcagaggcacagaaaaggctcccgtggaagggggagggcacctgggccagcagattgcctgtggctgggcctgtaggcagagccggggtacaagggacccaacagctgctgggcagtgagtgggggcgacgggactgggccagaggggaggaccagctaagctcagttaactggatgccctttcctgggaatggctccaggcacactccccagcccacagcagggagggagagatcagccagcagccagccaggctttcaccaggggccatggcagcccttggggcagggcagtctggggaggaagagagcaccattgtagaccccacagctcaagggaggagggaagacagccaggccttaatccccgagagctgcccagccccaggcctcccaacagaaatcaggatctgaaaggaagactcaggctgcccagagccacccggacccacaggcaaagcttctatctagcaggtcacaaccaggacaaggtgtgggagccaaggggacctggtcaccagttcagagtcagctgcccaaggaaccctgaggaagaggaaggtgctgtcatgggaggatgagaagcatttgctatgaattggaacacatcagagaaaaaccagccccaaatgcgtatgtacatcctagagagaggggagggcagacaataaaacacgagtgatggggaaatccttagcacacaggaaaaagacaggtgctggggccaacccgcgggtgagtgggaacaggagtgtgagggtgggcagcggg

SEQ ID NO: 837 - DNA, 909 bp, Artificial sequence
  DNA replication origin
cagctgcccaaggaaccctgaggaagaggaaggtgctgtcatgggaggatgagaagcatttgctatgaattggaacacatcagagaaaaaccagccccaaatgcgtatgtacatcctagagagaggggagggcagacaataaaacacgagtgatggggaaatccttagcacacaggaaaaagacaggtgctggggccaacccgcgggtgagtgggaacaggagtgtgagggtgggcagcgggcccttcctgagcaaagacgggaagacagtgagggagggagttggggagcagagctggacagaggccctatggtgggggcacaggggcggctgcaggccagcactggggtggggctgcggtggaacaggcccaggcagaagaggggacagggcctgtgtcacaagggcagctgggagctgggagcagaggaatggctggtctgactcggggtccagcaggaccacctgactgttgaatggagacaggcccagggccagagtagaggccgtggcaggaatccaggcagatctgctggtgtctcaggtgagagggcagcagcagagggtgagggttcaaggcagccagctggggactcgtggcacaggcagacaacagggagcgcactgtgggatgtgggggcaatggtgacggctcccgggttttcagtctaagtggctgaaggtcgacattcctatcaattgagatggggagaagcaagtggaacaattttgggggacaatcacgagctgaattttagactttaagaggtttttccatctctgagcctttgtttccttttctgtagaaagggggtgataacagcacctacctcaagggcaggttgtgaaaatgagataacatgcaaagaaagcacttgaagcctgggcacataatgagactccgtctc

SEQ ID NO: 838 - DNA, 1200 bp, Artificial sequence
  DNA replication origin
ctaacctcgtgatccgcccgcctcggcctcccaaagtgctgggactacaagcgtgagccaccgcgcccggccacagattcttatatgtaatctggcccctctccatcttcatagcacttaccactactgaaattattttgtccacttgtttgtttactcacttattgtctgactttcctcctctttaaaatgtcatctctgaggagggcagaaaccgtgtctgtcttcaccactaaagccccagtacttggaacggtgcctggcacatagtaaatgctcactactgaatgaatgaatctccatcccatagaggtgatttgtatttacaagggaggaccacgaactcccccagcaaaccgtgaatgacacattggcatttaacagcccgcacctttatttatgatccaaagtcctactttaaatctgaggaagctgctggtatctctggacattttaatggcacaagagatcagttatcacttggggacacactccaggaactggagcccagtggttgtagcagggagctaagagccaaggctcctgcgaacagaacttcaagacaaaccatgacttgcctccaggtcccttacccacacaccctgtacctcaatttacccagcagttggccagacatgttcctctcagttctgtgagtgacaggagacaaaataattcacagctggagcatactgagatcctcagacaggaggtggtgcaagccacacgtctcattattcataaaactcttgatttgcggccaacacggcccccgccgccttcccaggggctaacctgacaacaggcactgctcagacaagttcagctcacaaggcagagggagggatggagggcctagcagaggctgggtgtccagacctgagtgtctcggttaccaggttccaaaaaaaggaaggtggttggggtggggtgatgaaaaggaggtgagaggtgcagtttggggctccaggtggttaattttgcaggttcgtgcatacacgcccgccatccaggtgagatatgtgcccccaccaggtaccttccaggaaggctcaccggggaggggtggaatcgggagacgacagttcaatcaaactacagagggaggaagggcggcccagcgtttagtttggggaaatatggagagtaagagtctcagagtgggcgcaggtgagggaagaggcaggggcccagaggtcg

SEQ ID NO: 839 - DNA, 1415 bp, Artificial sequence
  DNA replication origin
agtcaggggtccgagcggggtcgggggcgctctccgcggcccctccccggcagacaaagggctggccgctcccccaagccccggcgcggcgcggcgcgggcccgggcggtgcaggcgcggcccggcctcggcgcttacctgggccgcccgacccggccgggccggcaggggcagcgggtccggcgcgcagcgcgcggcggcctgttccggggcgtgctcagcccgagcagccgctgcggcggcggcagtagcagcagcaggagcggccgcctcagcctccgcctcccgctccgagagtcaccgcggtggggagggagggaggcgccaggccgccgggggagggaccggcggagggggcggcatctggctccgcgcgggctgctgaggcgcggcggcggcaacgccccggagggaggcgggcgcgtggggccgggcgccggggcggggcctgcgggcggggcggggcccggggccgcgaattggttaactcagcctgtgggcggggctgcgcggtgcggggcggggccttgtggcgcatgtgaacgctcattgggccctcctggaagggggcgagaccagcgacatagggacggggccatgcggtgggcgggtggaacacggcgccggtagtgagtggccgagtccgcgctgagagcaaaggggaggagcgggccgggggtgagcagggaaggcgggttgggcgcgaggaggaggcggtggcctggaggaggagccgggtaaggctgaagctggcgctgcggtaaagccactctgcgtgtccctatctgctccaggagcacagtgttccggaaaaataatggcctctcccacacaccggtctgtgtttaaaaacgggagcaacaagacggggcagaatccttggtgaggccagtttacccagaaccccggaaaattctgaaatggacgaggttgcagaacatttagaggcgtggtcttcctgcgtcgttgagctgggaacgttgctacctctgagcttggggcctaacctgggattaacctagcccagagagcccagggatgggcctccgtaggtccattaaactcagaaggtcgtgtgtactggtagtgagtggatttttcgggggaagggtgcccatgattaaaatgtttctacagaaagtctggctgtatttggagagggtacagggagaagcagcccattttaggtaaaatgcaaattgcttttaacatccgccttccttttaaagggacctgtatctttaagtgtggtctcattttcagcagtttaaattatcagttacacagtgtgacactaaccccagttcagaagccctcctaccctactcctcccacagcctttctttttacaccttttctgtaccatcctcttccactccacatttcttccccttccctatgcaaaaagaatacga

SEQ ID NO: 840 - DNA, 1119 bp, Artificial sequence
  DNA replication origin
agcgagccgagatcacgccactgcactccagcctgggcaccattgagcactgagtgaacgaggctccgtctgcaatcccggcacctcaggaggccgaggctggcggatcactcgcggttaggagctggagaccagcccggccaacacagcgaaaccccgtctccaccaaaaaaatacaaaaaccagtcaggcgtggcagcactcagcaggctgaggcaggagaatcaggcagggaggttgcagtgagccgagatggcagcagtacagtccagcttcagcttggcatcagagggagaccatggaaagagagggagagggagggggagggggagggggagggggaggggttatttgtcttattgttgagttataagagttcttttgtttgtttttatgttgtttatatttatacgattcccaaactatttttcttttattattattttttgagttgtaaaagttatttacatattctggatactagtcctttatcagatatatgatttgcaaatatttctcccattctgtggatgtcttttcactttcttgattgtataatttgcagcacaaaaacaaaacaaaacaaaaatacaacaaaaaaaaacttttaatttgggcctgatatagtggttcacacctgtaattccagcactttgggaggccgaggtgaggggatcgcctgaggccagcaccagcctgggcaacatagcgacactatctctacagaaaacaaaacaaatcaaaacaaaacaaaaaaatagtcaggctcatggcctggtgccgtggctcacacctgtaatcccagcactttgggaggccaaggcgggtggatcacctgcggtcgggagttcgagaccagactgaccaacatggagaaaccccgtctctactaaaaacacaaaattagctgggcgtggtggcatatgcctataatccaagctactcgggaggctcaggcaggagaatcgcttgaacctgggaggcagagattgtggtgagccgatatcacgccattgcacttcagcctgagcaacaagagtgagactccatctcaaaaaaaaaaaatagccaggctcagtggtgcctgcctatagtcccagctacccaggaggctgagac

SEQ ID NO: 841 - DNA, 1213 bp, Artificial sequence
  DNA replication origin
tccctgggtacttgagattagggagtggtgatgactgttaatgagcatgctgccttcaagcatctgtttaacaaagcacatcttgcaccgctcttaatccatttaaccctgagtggacacagcacatgtttcagagagcacagggttgggggcaaggtcacagatcaacaggatcccaaggcagaagaatttttcttagtacagaacaaaatgaaaagtctcccatgtctacttccttctacacaggcacggcaaccatccgatttctcaatcctttccccacctttccccactttctattccacaaaaccgccagtgtcatcatggtccgttctcaatgagctgctgggttcacctcccagacggggtggtggccaggcagaggggcgcctcacttcccagtaggggcggccgggcagaggcacccctcacctccctcccgggtggggtggctgccgggcggagacgctcctcacttcccagacggggtggctgccgggtggaggggttcctcacttctcagacggggcggttgccaggcagagggtctcctcacttctcagacggggcggccgggcagagacgctcctcacctcccagacagggttgcggccgggcagaggcgctcctcacattccagacggggcggcggggcagaggcgctccccacatctcagacgatgggtggccgggcagagacgctcctcacttcctagatgggatggcggccgggcagagacgctcctcactttccagactgggcagccaggcagaggggctcctcacatcccagacgatggtcggccaggcagagacgctcctcacttcccagacggggtggtggccgggcagaggctgcaatctcggcactttgggaggccaaggcaggcggctgggaggtggaggttgtagcgagccgagatcacgccactgcactccagcctgggcaccattgagcactgagtgaacgaggctccgtctgcaatcccggcacctcaggaggccgaggctggcggatcactcgcggttaggagctggagaccagcccggccaacacagcgaaaccccgtctccaccaaaaaaatacaaaaaccagtcaggcgtggcagcactcagcaggctgaggcaggagaatcaggcagggaggttgcagtgagccgagatggcagcagtacagtccagcttcagcttggcatcagagggagaccatgga

SEQ ID NO: 842 - DNA, 821 bp, Artificial sequence
  DNA replication origin
ccgaccatcgtctgggatgtgaggagcccctctgcctggctgcccagtctggaaagtgaggagcgtctctgcccggccgccatcccatctaggaagtgaggagcgtctctgcccggccacccatcgtctgagatgtggggagcgcctctgccccgccgccccgtctggaatgtgaggagcgcctctgcccggccgcaaccctgtctgggaggtgaggagcgtctctgcccggccgccccgtctgagaagtgaggagaccctctgcctggcaaccgccccgtctgagaagtgaggaacccctccacccggcagccaccccgtctgggaagtgaggagcgtctccgcccggcagccaccccacccgggagggaggtgaggggtgcctctgcccggccgcccctactgggaagtgaggcgcccctctgcctggccaccaccccgtctgggaggtgaacccagcagctcattgagaacggaccatgatgacactggcggttttgtggaatagaaagtggggaaaggtggggaaaggattgagaaatcggatggttgccgtgcctgtgtagaaggaagtagacatgggagacttttcattttgttctgtactaagaaaaattcttctgccttgggatcctgttgatctgtgaccttgcccccaaccctgtgctctctgaaacatgtgctgtgtccactcagggttaaatggattaagagcggtgcaagatgtgctttgttaaacagatgcttgaaggcagcatgctcattaacagtcatcaccactccctaatctcaagtacccagggacacaaacactgcggagg

SEQ ID NO: 843 - DNA, 1477 bp, Artificial sequence
  DNA replication origin
ggcgggcccccgggccgcgggccagcgccaccttctggtggatcttccccgacgcgagtctgggagtcgtccctccccttgccagcctacctggctcaggcccgccgcgcccgcagccccagcgcggtcgccgtggcaacgccccgcccagccgccagcctccctttgcccctccccacgtccggcgcggctgcgcgggacggggtgggacggaggcggggagaggacgcaggcgagaggaactcggcggcgcggcgcccgcggcctattggctgccacgtcccggcgccagaagccccgcctccctgacgggggtcacgtgatccctttcaaagatggccgccctgttgttttgatgaataatacttggtggggcgagggggaaagagtaggggtggaggggtaggaggatttactcttccagcgagagctacgcgcatcccatcctccccctcccccctacccgggctccggcgtggaggcggggcgtggccggcctgctttgggaggggaggggcttcccttacagtgctgggctctgccaggacggctgtggggtcgccttacctcggggtatccactctgcagtcgaccagttcccgccaggagcaaagggtaggaaggagagcaggatctgctgtaggaacgcagctaccgcgccactatcacgaagaaacagcaggctcggggcacgagacgaactggagaccgcgctgcctagctgggtaacctgggaagcagagggtaataagtggcgccttaagacaaccctgtagcagcagcagtggcggccaaaggaggctgctcagggaacaagcggctgtagtagtctgtggggcgactggagtgaccgaagccaaggcagtttagtgcctctcgtgttcttattttttaacctctgactatgcaattctgaaacctcccccattcgggggaccagacagcctgatagacaccttccactctccttcctcccgccgtggtctcgagaacagaaggatctctccttaacgcctttcaccattaagaggaaagcgatggaggagctgagcgctgatgaggtgaggaggttgggggacaccttgagggattagttggcaactcgttagcgctttggacagggatggtattgcgccagtgctgtctggcctttgggcttggagaaggaacggagatgatattttccaagaataacgtgactccccgatagggtctctggttttgttctcctttattctgttgccttctttcttcattctgaactccatttgcttctttccgagtgttcttttagggtatgaacaagaggagagagcatcttgaggtgtttattcttttcttcagggtatgcgaacaagaagggcgagatttacatgaagttaaagtgtgtgtgtgtctgtgtcttcaggaatttaaagaacaattttggatggaatgagaatgtatggtgggtgaatatttttaaagaaagcatttg

SEQ ID NO: 844 - DNA, 1122 bp, Artificial sequence
  DNA replication origin
gtcaacaggagccgcggcgcgcgggggcgcggggggccgggcaccgacgcacctcagcgcgagcagcggccgccgcgagccgcagggcgccgctccgcagccccatcacgcagcagcccggcaccgcatcgaggtgggaggtgggcggtgggcggcggacaggagtgcgcgagtgcgggaggccagggcgcggcgacggccggcggtgacggctgcggaggacggggagctgctccgacgcgcgcgggcgcctcccaggaccgctgccgtcacactgccccgcttcggccctcgcgaaactccgcccgcagtcgccggcgcgggacaccgccccgagctgggcctctgcgcgtcacctcgtatccgccccggcgcccgcgacggacacgggctgtgaccaatcacagcacagagctcggggcggccagccaatcgtagggtgagccggggagtggggctgctgcggggggctgcaggaacatcgagcgccccctggtggccctcgggccggctcaaccaggggtgcgggctggccaaagccggagcccggagttccctcccgggtgacccccaagggcattcgtcggaatcagccgcccccagccaccccgataatccgccttatacggggacaaaagattgactgagtggagcggggcggggcccaggggtcctgacgcccgcagaggagctgggatcaacatgggaggcgccgagagtggaatcattgtccgtcggaaaacatctcgcaggcggaaccggccgaacgcggcgcggtgggagcggaaccccgagaggggatgagcgcatcccgcgggaagctgcctggcctattcttacagaacccgagcaaaacacctcccacgcgccacctcgggagagaaggcggaatgagtaatggaaaagcatgacttggtgggcattccacttgtctccttgggagaccgcggaagggctgtgaggagaggaacaaacgctttgcaccgtccctgagttaacgagcccagcccccttctgggagatgcccttgaaggagggagagtggaagttagaaacccggaggacacaaaagcacgagcagtgatttctttaaaatcagatttagattcagctggaaagaaa

SEQ ID NO: 845 - DNA, 998 bp, Artificial sequence
  DNA replication origin
ctcccacctcgatgcggtgccgggctgctgcgtgatggggctgcggagcggcgccctgcggctcgcggcggccgctgctcgcgctgaggtgcgtcggtgcccggccccccgcgcccccgcgcgccgcggctcctgttgacccggtccgcccgtcggtctgcagcgcggctgaggtaaggcggcggggctggccgcggttggcgccgcggtcgcggggttggggagggggccgcttccgcggggaggagcggccgggccggggtccgggcggggtctgaggggaggtagcgcgggacgggcgccgggtgcgggagcctcgccctcgggggaggggacccctccctaggccagcagcgagtcccgggccggcgtccagcggtcggctggggcccccgcagtgccctgcaccggccctccgtttcccccgcgctgccaggccccggctgtgcccagcgctctccagacccgccgctgcctggccgttccctgggctccgcgcacgttgcagcccggggggcggctgtgcttcgtttgaagccatcgtttctcattttccctctcccctttcctcctttgtggtgggcatcgggcttcggctgggaatgtggttatgccctttgccagatggcgataggaaaggtcatcgcttggcgctgggggagccgagggctcgaggcctggaaagaggggtgcgataggaagggagggggcttgttggatgctggccaggtgtgaggaaggctggtgtggtctcggcattcagccgactgggattactcgggcagccatattgggaggatgatctgacaaatcctttaggagccaagtccagttgttggaaggcaccgagtgacagccctggcagctttcagggtgactggccagaccagaagccaagttgtgggggttgggaggctgcttgagcaagctagtcattgttcatgcaacacaaaacattcccgcccctaacgccagaatggagcttccagatccctttt

SEQ ID NO: 846 - DNA, 1197 bp, Artificial sequence
  DNA replication origin
gctgggaatgtggttatgccctttgccagatggcgataggaaaggtcatcgcttggcgctgggggagccgagggctcgaggcctggaaagaggggtgcgataggaagggagggggcttgttggatgctggccaggtgtgaggaaggctggtgtggtctcggcattcagccgactgggattactcgggcagccatattgggaggatgatctgacaaatcctttaggagccaagtccagttgttggaaggcaccgagtgacagccctggcagctttcagggtgactggccagaccagaagccaagttgtgggggttgggaggctgcttgagcaagctagtcattgttcatgcaacacaaaacattcccgcccctaacgccagaatggagcttccagatccctttttttttttttccttgattgctaaatgagcttccaaggtaaactgccttcaagattccattcttgttggggtgaaattccgtgtttctctattcatcttctgcgtccagtgcgggggctgtgaaaggcctgctgatgctttacatgtgcataggccgatctgagaattgctaaggccactgtatcagtatggaggcctcgagtagccgtagagcattggatggatagattttcagagtcgctcgacttgcagagaagaagtaaaccagagtattctgatagtgggcgaggctagtggcggcatttctgaggacgcaggctgtcatctttgtggaatctcgaggtagctgaaattagattgtcaacagatcccttgctcatatctcttactgctctgagcagctgttctgccaccattgaacattccgctttgtgtcatgatgtgcctgtctgagcctgatgaaagtgtgctgatgagatttgaataactcttaagaggtgatatcatggtggatattttatttaaaggctggcattttgtctccttagtttagtcataacaaaatctagttcttgtgttcctctaagaagtgaggtggtgctttctgattaagttgatatggttgctggattatagagcaagtgttgttaatgtattgtttgaaggtggaatatgagaattacacataggttggtattgtaaagcaggtctggagatgatcaataactgggttcagcatgagtctgtagatctgttcttttctatatcctagatgtggacaggacctggagagatg

SEQ ID NO: 847 - DNA, 1303 bp, Artificial sequence
  DNA replication origin
gtgagcggccgcagtttctggagggagccgctgcgggtctttccctcactcgtcctccgcgcgtcgccgctcttcggttctgctctgtccgccgccatggcccagtgagtgactcgccaggggcagcccggctcggcctcagcgggcggggaactctttgggggtcgagatctccctcgttctctccgacgcctcccaccctgggggtcgcctgagctcacttggggctctgtgaccctggccctacggcgtctcgggcccagagctccttccctgcgggcccggccccctgccctctcggccgcgcaggcatggggcggggcgggtcccttcgagggccagggaggaggcgcggccaggcctcgccgagtctgcagggacacctgcgggacgcgtgccagcgggagccgggcgcgagggcggggctgggggccgcctgcccggccgaggctctgcagcgtgcgcgcccggcttctgggggcccgcgggaggcgcggaggaaagtgcagactcccagtcacggccaaatgtggaaggaccggacccctgggttgcagcgcgtcgagcggtgctgactctttcctttgttctgtttctgcctctctagagctgacatcgcgctgatcggattggccgtcatgggccagaacttaattctgaacatgaatgaccacggctttgtggtaagcggcgtgggcgcgttgtcttctctctggttcccgggcgctttagccgaggccggcgataggtttgggagcttacgggtctcctggccgtgctttgctaatgtgctctgttgctgctcgtggcatttttgtatggaaaggagaagcaccctgtaggcgtgggcgggccgatcccgaacttagtcctgcggagtgtgcctgtgggtccgtgaggttcacagcccgaatgaacgaattagtgtcttaagtagagaagaagggtgcgggaggagaacccttgctggctgtgtagagctctaacttgattgcctgatgagatctggggagagtgaaaatgtttcttctaaatgttaaagtggcttagacgccaggatgatcaataacaacagatagagcctgttgaaccggccagttcctggatttgattttgagtcctaacacgttgggtgtggattctacctgacacaccgggggtagttggccttcgcctcggttgtccgccgttttcatcctactgaggtgacataactttacagtgagcctcccacagctgggggaagaaaaggcaaaggcaggtctgacctccccagaacttgggttgaatggaaaggtcattg

SEQ ID NO: 848 - DNA, 1061 bp, Artificial sequence
  DNA replication origin
ctcctgcgtttgcccagggtcggcccgcagtgatggaggaggaggcggagaccgaggagcagcagcgattctcttaccaacaggtacaggaaaacgggggtcgggctgggctggggcaggacggcgtcgagtttctggacagaaaagtacccggcagcccccggcggcttctcatcggcaccccgcccccgggcgccccccgcggctgcgcatgcgttggcttaactgccgcgggtggtgctgggaggcggtttccgcggcaacgcggctggaccctggcctgcgctggctggggaggaagcggttctaggggagcgtgcgggcgccggggtccggcggcgagaggccaccttctggccttgcgatgaatcctcggtttccccttctcagatggggttttcgtgagggtacaacgtcggcattagacattccaggtgacgcccgtacgcggtgggcggttcgggccggagctctggaacgctggccctggaggcgtcgacccctcgttactgatgcagggacgcggtgcggaccagtcaggcccagagctcgtccttagatgtgggttcgaatctctgccccgccaacttgtgatcgtatcgactcggcccagacgcaattttcttctctgcaaaatcgtcataagaataatcacttgtcagggtagctgcgggcatcccattcgttcctttcatcagcgccgggcatatggggcgtcagaggctgagaacgttgccgtgaagaggcttaaaagcaagacccggagtggcgaccttaaagaggacggactgaagaaacgcgggaatgagctccagacgcgggagtttcctctctacaaagttacactgcagcagctgtctaccctgccccttgtcttttgagaagttcaaaccttcagaaaagttgcaagaacacggtacagaatgcccagatgcccgtcaccttgattcaccactagttagcattttgctctgtttgctcccatgcttccctcccagccccgcgattggagaattaattgcagatattttgacacttcgcctttacattttaattcttta

SEQ ID NO: 849 - DNA, 768 bp, Artificial sequence
  DNA replication origin
gcggggtggctcctggagccgctggcggggcctccctcatgcagctaggatcctcccccctgcccagggggagacgggcagaaggcagtcagcacgggtgacactacagggaccgtggaggaagcctcacgggagtagcagccgcggagctccagctcagccccaccccagggcccggctgctcccccaggcctgggtcgggtctgtttggcgactccctggccccagcctccgccccagggaaaccgaggctgcgtccaaaacccagagtagcccgctgggggccggggcggggtctcggccaccctggtggtgcaaacaggaaggatgcgcctggttttggctttaatgttcaaaatggaaaaaaatacaagaaagttgtacagtatttttcctgtaaaggttattattctacatagaacaaaaaggaagaaagcaggcgtggtgagagtgcagacccgcctgggcccggcctgaggttggaggctcagtcccgtttatcctgtgggatttggtccagggtttttgtagaggccttaactgtttgaggctgtctgtcttcacaatagcactgatgggagctgcgtgattccaactcttaacttgaattttgtagagacaagaaaaaaggactattactgttgatccaagtttgtagttaatttaacatttgagttctctcttggtgatgcgtgtggctttatagggcttttttttttttccagtttgttttattactttgtttgggatgcttcttcgctggtgcag

SEQ ID NO: 850 - DNA, 3228 bp, Artificial sequence
  DNA replication origin
gggcgcggggccgggggcgcccagggccgccagcgccgccaaggccggggtccgcgcgcccgcgcccgccgcctccgccgccgcctcgggcagcgactcctccgagtcggtgcgcaggtcctcgtcgtcgtcgtcctcgtcgtcgtcctcgtcgtcgtcgtcctcgtcgtcgtcctcgtcctcgtcgtcttcggcctcctcctccggcagctccagctcctcctcctcgtcctcctgcgaggactccccagctgcggcggcggcggcggcggcgccctcgcgcggcccgggggcggcggcgtcgggcgggccggggtcgcccgcgtcgcccagcgccaggcccaggccggcggccgccgactgcaggaagagcagcgagcccggctcggcgcccagcgacagggagccgtccagactgatgggaggcccgggcgcggggccctctgccgcgggctcgccgcgctcctgcttctcgtgcttgcgcttgtgcgagtccatctgcgacatgcccaccaccgtgtggcggcagcccgggaaggtgcagtggaagtgcgagcacttgagcttgtacttgcagtcgggcacggcgcagtcggcgctggagctgaactggcagaagcccgcggcgctgatcacgtcctgtttgccgtggtgcttgcgatgcgccgtgaccttggtgctgtcggtgcagcggaagcggcagcgcaggcagtggaagtgcgtgctggtgcccgagaaggggcagtcggcgaagtggcagctgagtgaggccttgaagcgcttgaagtcgtccagcaccaggttgtccacgcggtcgtggtgctgcgcgtgcttgtacatgtgcgtgcgcccgcagaacttgtagccgcagttctcgcgcgtgcagtggtagtgggtgaccttgagcgagaactgacaagctgcgtccttgcagtcctcgtaaaggtcgaagcgccggaagccctccagcatcatgccctcgtccagcatcttccgggaggacgccgtcttccgccgcttgccgaagggcgacatgtcctcgatgatccagaagcgctttttggcccccgaggctgtcggcatagagatggtgttccctggggaggggcagggaggtcagtgcagaagagggacccacgtgggcaccatcaacagggttacacccacatgggacccctgatctggcatggcgccagagggcggcatttagggagccctcggcttcccctggcttgggaggcctctcctgccccgccccctccctaccctggcacagcaggggtcctgggcttcccctcctcatccctgtctgcagaagggccacacaggcctctcccccggggggtggcagcccaaccagctctgggggacgtggtggctgcttcctggccagtttgggtgggaagtgaggacacgtcctggcgctaattgaagctgaagggggaatctaggtcggcagagtgcaattagccaagttggactcgggccaagacgccagctatagctgcctctaatgagggacaggccggctcctttcccgccggctacccggcttccctggctgcgcctgtctgcacagggggagctgcctactcacagtaggggtgccaagtgccccagggctgtgcggggctgcaactccctgccctaaggagcaccttgtccttggtaccagaaggttctttaaggtcttgttggggttttctaccccaagggctgggagagggcagccctgatggaggaccaggactcagggagctcaatgcctctgccctctgctcagagtcgtaatttacctgggtcaggaccagggcaggggctcagccatggggagcggagcccatttatgtccagctggcccagactgcttcctgggatttaggatgcccccctgccaaggccagggttgtaaccctttctgggaggtacctgtgcccctatggccatgggtgaggggaagccccagctcctgccagaggcacaggcagctagtcctggctccccacgccaccctccacaaacaagagaagctctctgaccagccccaccagagcgtgggtagcctctgggctcctcccacacggctgacctgcctggctcccccagagcctgcttagaaggcccagcagtcactctagccaccaaatgtctgccctgcccatttcaggccaggccccataggccacccggagtggacaaaaacggagagagactaagggctgtgacggtgtaggggcacccaggcagggggcaagggatggcctcaggcccaaaacctggtgggtgaggagcggctttgggtctgaagtcacagggtctggttatgccagagtggagcttccaacagccggaagtccctgaggagggggaggctcggccctgccctggccataactcctggggcctgtactcaggcagcacgtgaggcaagaattagcagaggagtccgagcccgggtggtgtctacgctcaagggagggggcgggcagatgccatcccggtgggtatcagatatgggggtgggatgggaggtgcctctgcccctgagcactgccggggcctgagtccacagagacttcccttactgctcagctttgggcgtggcccggggctcaggctggaatctggaccctctgaacctgggcaggtcccagaccccagcagaccttcccgaaagcctcctctatctctccctagtgccagatcccagggggactcctcagagtagaagggacaggtcctgccttgccccaggccgaggaaggcagaccctacagggcctccggcaggatcagccatctctgggactctgagcagttgtgaacaagggagaatccctggcagcagtgctctggcctgcccagcactgagcaggagccacgaggagttgtccctgggatggagaccacgctctctagtctcggggatgcttggctgtgaggggtgcagagtggccccgtccttggcctggctggctgcagaaaagggtcaggccccggagcgtggcctggagggtgggttggggtgatggacagcggtgagaaggcatgtgcgcgttacctgcagcatcctgaactagggggacgtcactttttactggagttggagtggcagtgacgggcgggaagctgggcgggctgcaggtgggatgggccaggccccggccggctccgagagtggcactgagcagagagtatgagagacaggacggagagaagaggcagggga

SEQ ID NO: 851 - DNA, 944 bp, Artificial sequence
  DNA replication origin
aatccctggcagcagtgctctggcctgcccagcactgagcaggagccacgaggagttgtccctgggatggagaccacgctctctagtctcggggatgcttggctgtgaggggtgcagagtggccccgtccttggcctggctggctgcagaaaagggtcaggccccggagcgtggcctggagggtgggttggggtgatggacagcggtgagaaggcatgtgcgcgttacctgcagcatcctgaactagggggacgtcactttttactggagttggagtggcagtgacgggcgggaagctgggcgggctgcaggtgggatgggccaggccccggccggctccgagagtggcactgagcagagagtatgagagacaggacggagagaagaggcaggggaggggggggaggggcggccggagcgtggccggcgagaaggatggagtcgctggcggctgcggggccgtgcgggcagcctcatcaccagcggccgcaggaggaggaagaggaggaggaggaggagccgggcagcctggagagggtggagaaaagcagaaaaaaaaaaaaaaaaagaaaccaaaacaaagaacaaacaaacagaaagaaccaaaatgagaaacccgatggcagaagcaggtatggcatgaaaatgtgtgcacggatgagcagagagagggacacaagaagaaggggcaggaggagagagaggcggggcagtgccaggggtcacgtgggcaggtgtgccgggcaggaccggcgctgggcccaggccgggtgggaggcagcggaggaaggaggctggggctgcgctgctcccgctgtggctcagagaggacgggcccagggtcctctcccggaaactgacgcaaagggcagtgccagggaggcgggaggatggcgggaggggcctcgatgacccagtcccacagaccagctggctctgctgca

SEQ ID NO: 852 - DNA, 1254 bp, Artificial sequence
  DNA replication origin
cgatggcagaagcaggtatggcatgaaaatgtgtgcacggatgagcagagagagggacacaagaagaaggggcaggaggagagagaggcggggcagtgccaggggtcacgtgggcaggtgtgccgggcaggaccggcgctgggcccaggccgggtgggaggcagcggaggaaggaggctggggctgcgctgctcccgctgtggctcagagaggacgggcccagggtcctctcccggaaactgacgcaaagggcagtgccagggaggcgggaggatggcgggaggggcctcgatgacccagtcccacagaccagctggctctgctgcacgccagcctgtcctcctcggaggccgcgtgccccggaccttctgtcccaagctgcacccagcggtgctgggctttgggagtggggcctggccctgccagcagcccctgcctgccgctcacctgccgcggtgctctcgttacccacgggggtgctggagcagctccggtccatggtggatgactcagaggacatggcgcctgggctgcagccagtgtagtccatgcactcatctgtctcagcatccatcaggcctggggggccctgaaaggacacgggggtccctgaggaagtggggctgtggggtatgctgcccacagagggcaggctgaggctccatgcagcacaggcctgagagtgagcgtgggaccatgatgcgttcccgccaccctggctgggctctcacctggggggggctctcacctgggaggggggcacgcggtcgaagttcttccccagcatcctccgcatgtgcttccgcgcgtgggaggtcatctggtgcttgaggaggaaggagaactggcagccctcccggatgcagtggaagtggctgttcacctggttgtacttgcaacctgtggacacagccccacctggcatgagcccccagctggccagcgctcatggcttccaggtcctgttgggcactgttctgggcatgggggcagtgtggtcagtaaggcagatggtatctggggaaagggcgctgagccgaggtggcagtcttaggaggaaggtcaggaagtccaaagccccctggctgtccaaaccctgggcctcctctccagcctggcagaggcgagtgacaatgctgggcaggcccccatcccctggctcacacacagggaggtgcacagttccaaggcaagggaccctcatggtccctgcacactgggccagctacctcccaggaagccacctgtccccac

SEQ ID NO: 853 - DNA, 825 bp, Artificial sequence
  DNA replication origin
tggccccaagaaaggggcaggacaacactgaggtggccaaaagtcaaagtagggggagacagatggggcccgagccctgggatggaagggaaggcaggcgccccctcggctgcccacctgtcttttctgcaggggctacctgccccactcccagcccgcccagttctggccaggtgcagagaccctggctgggccagccgggctctgatgctgagaggtgttaaagggctctctctgtcctgggcttttcctgacacttgaaacagtgcagagctatgaatttttaaagcacagcatctgtttggcttcctacagcaacgagctcactctccagccgccgccgccaccgccaggaacctgtgctgcctcccaggaaacccgtcctcctccaggccccagggccgctgggacgtggctcccacagcctcggtgacggccggccgtggggaggccactctggagaggccacaccatgacgactgtggagaagggtgtgactcagcccgcctgtacccctccaagactgaagtgagattgcaggagacacagagagaaaccccatactgtaatgggaaaaccacgtgcaaacaaatatttaggctgaagtggccaaaagggccatctgcggaggcactaataataatggtaataataataccacagaggagacagcacggggcagagctgaagacagagtgggacaggggggcggagacagtgggatgggggtggacagagacagagcaggacaggggatcggagacagagtgggacgtggaggcggagagacagagcgggcgggaggaacctggaagatctgcggac

SEQ ID NO: 854 - DNA, 2104 bp, Artificial sequence
  DNA replication origin
tcaggacagcggctgacccgccagccccgccccaggggaacagctgtcttttggtttcttgagtccctctgtgcaccctgggtgccaggtggctgcctgtgactgtcctctcctcccctagccgggtcccaggccctccccggagcccacagcctctccttccacatcccgccaggtgtcctcccctccccaggcccagtcctgcccctctagacccccatcccaggtgtctctgaggatcccagacctggcaggttcgcctgggaggagaccccccagccacgccttcccttggctgtgtagtcagcctggggtcctgccgccccaagtgtgcccacgtggctggcttgcacatgagcagagagaacatggtgtccccgggggccgtgcaggtctcagtctcgcgggtgcacctaaccctgatgcagggcatggcacacgggaggcatgtagcacacgggcagtgaaggggcaggtgtgcgtgtgcactggggtcacggctcggccatggggtggggcatgtgcggaagaggtgggtccgcaagaacagctcagaattagcctgggactgaccgccttctccctcattccgagagacccagggcaggggttcagggggttgtgtacctgtatgtctgcagaggcaggaaggcggctagggatgggagctggtgagcccgagtgtgagcgcaagagtctgtgaggtgtgtgagtgtgtggtgtctgtgagtctgtatgagtgtgtgtgttgtgtctgggtatgtgtgttttatgtgagagtctgcatgtgactgtgtgggggtgagcaagtatatgagttttatgtgactgcgtgtctggatgtatgtgagagtgtgtgtgattgtgtgtgtgattgtgagcacatgactgggtgtgtagagtgtgtgtgattgcatgtgtgttgtgtgtgactgtgtgcatgtgaccgtgtgtgggtttatgtatgtgatggcatgtgtgtgcatatgactgtgcgtatgtgcgggtgagagtgtgtaataaggcatgtgtgtattgtatgtgattgtatgcacgtgattgggtgtgtgggtgtgaaagtatgagaatgcacatgtgtgttgtatgtgattgtgagcatgtgactgtgtgtgggggtgggtgggtgtcaatgtatgtgtgtgttgtatgtgattgtgagcatgtgactgtgtgtgggggtgggtgggtgtcaatgtatgtgtgtgttttatgtgattgcatgtgactgtgcgtggggatatgagagtgtatgagaatgcatgtgtgtgttgtgactgtgtgtaggtgtgtgagtgtatgcgaatgcatgtgtgcgttgtatgtcattgtgtgcatgtaactgtgtagggtgtgtgtgagaatgcgtgtgtgttataggtgattgtgagaatgtgggtgtgtgagagtgtatgagaatgcatgtgtgtgttgtatgtgattgtgtgcatgtaattaactgggtttatgtgagtgtgtatgtgatggcgtatgagtgcatgcgactgtgggtgtgtgagagtgtatgagaatgcatatgtgtgttgtatgtgattgcatgtgactgtgtaagagtgtatgagaatgcatgtgtgtgttgtatgtgattgtgtacatgtgactgtgggtgtgtgtgtgagaatggatgtgtgtgttgtgaatgcatgtgactgtgggtgagagtatgagaatgcatgtgtatgttttgtgtgtgtgtgcatgtgactgtgtaggtgtgtttgagaatgcatgtgtgtgttgtatgtgatcgtgtgaatgtgaccgtgtgtgtgtttgagaatgcatgtgtgtgttgtatgtgattgtgtgaatgtgaccgtgttgggtgtgtgtgtttgagaatgcatgtgtgtgttgtatgtgatcgtgtgaatgtcactgtgtgtgtgtttgagaatgcatgtgtgtgttgtatgtgattgtgtgcatgtgaccgtgtgtgtgtgtgtgagaatgcatgtgtgtgttgtatgggatcatgtgcatgtgactgtgtgtgggtttgtgtgtgtgagtgtgtgttgatatgtgagaatgtgtgtgtatgtcactgtggggaggtggc

SEQ ID NO: 855 - DNA, 877 bp, Artificial sequence
  DNA replication origin
ggggtgtggaggggacggtggcccttgtcgcgttcctctcctctcctctcctcaggcccagcacaatcaccttgtgtctggcaacggcaagggcttttcctatcagaggaaactgaaggtcacacttttcctcattgatctcgcaatgtttgttaattactctgtcactgatgtggcgaaggataattaaacagctctgtttatatcttacatgcataattatgtggctgcgcagggctccccgcacggggaggagatgcaccccttgctgcaggggaagggctaggggagcgggcaggggaggcgcagggcaccgggcacaaggctgggaaggaggccgggggcagagagaaggcccagacctgggggctgtggtcctggcgacccccttgcctgctggaacccccggcccaccctcccctgagcagaaggcgcgcagggctgctctcgatccccaggacatggacatggagacaccagcagagcagggcctcagtgcctcgtgggagagaggtcagccaggggaccgtggccggggcagctggctgtaagaggatacgctggccgggctggcaatccatgtggccctgagacgtcctgctgggagggccagggacagcggtgtagggaaggaagaggaggccaaggggagtggcaggagaacaaagcttgtcctgggctcctccgagaaagctccgtaagtagcagaatgtgcagacagcaggctcacaggctcatgccgttgaccgctgcgcccctcttgtgccaggtactgtgcccggtaagctcaggcctcacaggtgtgtgtaaagagtcacctgcccaccatctgtccagccatctatcccatccgtctgtctatccacccacccgtcta

SEQ ID NO: 856 - DNA, 797 bp, Artificial sequence
  DNA replication origin
tttgctgtctgccatccacacttggctgcttacctcctggtaaaaatagtgcaggctcccccactccccccttcccttccccatccagggcaagggatgaggggaccaggtgaggcccgcttccccggaggcctgttggaggacacccggcgtcacagaacctgctgggcagctccgaggtcgagtgggatgctgtgaagaggaggccccgtctcagaacttcgagaggggccccgcatcgtgcttggggtcttgggtgtgggtggcacagacttggagatgtggacgaacctgggtagagtgggcatcggcttgggcaagtgtctaaggccctgaagccagggtcacaggactggaaggcctgggagtgggctgagaagacccttctctggcagtgggcctggctgggctagagtcaccctgtctcgtctgggccaagtgagccatccgtactggccactggctacaagggaaggatctggctgggacggccaggcactgtgtctatcaggggacggttatctgtgcgtatgagtcaagtccacctcagggatgcggcccctgggtggacccaggtattgccattcccgcctgggtaggcctctcatcgggtttcctggcatgtggaaagttggcagggggtgatcattagagtgaagccccttctgaccatggagccggggggccctgccctcagccttcccgcctatgtggagactctgacacgcccattcctcccgtgagggccatggagaggcacattttgttttgtacacagtgagtgtgagccgagcccc

SEQ ID NO: 857 - DNA, 714 bp, Artificial sequence
  DNA replication origin
accaaggagaagagaatggatcttggaacaggtaccggccggtgggaacgcaggggcggctctttcacttttctttcgcttcttttacggaagttcttatttttagcccaatgaggtggcggcggggccgggtgggggccgggagggtcgggcggctgcctcccggcgtcccggcctcgggatcggcgacttctgaggctgttgttgttgttatttgccacttgcttagaggctgtgactaatgtgatgcttgtcattatgaaagaaccgagaggagcaggagctggggggcacccagagagaggatttagggggtttttgtggggtttttgttctccgtgttttttgtatggcttcgtgttttttttctgtgtgtgtgccttttttttttttttttttttttttttgttctctgcaaagatctttgtgtgtctggctctggggtgtgtgtttttatttttttagtggggggtggtttagtttttgaaagcagcgtcctgttgggaaaggtggttagtctggtttcggggcgactgtctcaaggtaaaggaatttaatttatttgggacaaggctgtgtcggatgatcaagctgcttattatggctaatgagtatttttcacctgagaatctgtgggatgaggtggctgttatcagttcaaagtgaggggccccggactgtctcccacctgcctctttagcccccaccctaggg

SEQ ID NO: 858 - DNA, 981 bp, Artificial sequence
  DNA replication origin
cctcctgccaaactgttaccctgagtgttaccggcaggagcaatgacatcagggctttaaaacaacttgttattcggggagtaatcagttgcaattaggcattaattaagtattatgaaagttgattatttaagtgaattcggctttcgactctccgactatggtgagtaccgggcgcgggcgggggaggcccgggggccgcggtctcgggcggcgacccgggcgcggggcgcggtcggcgggacgggggcgcccctgggcctcgcggatcccccggccagggcccccaagccggggccgcgccggccgagagttgctgccttagttggagaaactcaggcggcgcggacccgcgggcgcgtgcggggccgagcgtgagaagcgggcggcgcggaggagaaagtttctccgccgcggcctcggcgcccgcccgggacgggccgctcctgcggggcgggggacaagcagggcgggcggccggggtcccgcgagacgctaaccccgtgtttcttctctcccggtcttcccctggtggcgttctgcgaagagtttgggaccaaggagaagagaatggatcttggaacaggtaccggccggtgggaacgcaggggcggctctttcacttttctttcgcttcttttacggaagttcttatttttagcccaatgaggtggcggcggggccgggtgggggccgggagggtcgggcggctgcctcccggcgtcccggcctcgggatcggcgacttctgaggctgttgttgttgttatttgccacttgcttagaggctgtgactaatgtgatgcttgtcattatgaaagaaccgagaggagcaggagctggggggcacccagagagaggatttagggggtttttgtggggtttttgttctccgtgttttttgtatggcttcgtgttttttttctgtgtgtgtgccttttttttttttttttttttttttttgttctctgcaaagatcttt

SEQ ID NO: 859 - DNA, 1217 bp, Artificial sequence
  DNA replication origin
tgggtgcccggtacgggcagtcatactcccaggcttagacttggggtagttctgttcccttattcagggttttggggccaggggcagctcagtaaggtttctaggcctctccagctgctgttcctatgtagggatgggttggggaatcacagagccaatgaggctgtgtgacggccaggagtggggactgccaggaaggcagtgggaagggcagtggagtaggggagggatgcccaactccctgagaggccatttagaactatagagcaagcaggaaaaaaggagaaaaatgaggggaaagtaggagaaagagtagattgttaactccctgatgtctttgccccaaggcctccctggcccctccctttgcaaaatagaaatattgcaaaaataggccagcgccatgttgctggatgctgtccaaagaccagggaagcctgggccctgctcccctcccctcatctgaaggcagtgtggcccctcctgaaagaggagcgctgggagaggcgaggagggcagcagggtaggtgaagaagggacggagaaccaggtccttccttagcaaggctgcccaaggccctgctcaccccaccgtctctttccttgaggccctctgggccggatgcgtcacttaagtcaccaacatataaggactctcaaaatatatggctgcagcagggacatctggggatgtcccatggtgcacggttcatggaggggagaaccctcaaactgccttctctggcagaaaagaaagaggagcacgggcagcacaaagcgcctggctggccatgggctggcaggaaatgaggttccacgttgaaggggacaggcctggagacggcgtggggcggggggggggggggtggcggggaggggaggaggagccgggatgggcctcagactccctggttgagggtgcctgtgctctactgagcgcccttcctagggcagcggccagaggggcaaggcagggaggaagcgcaagtgatggccgggatcatgggtcgggggctgtggggaaagtggggcgccgatctccattcgtctggctgcggggcggatggcccaactttgagggaggagtgggcagaaagaccggaagaccggggaggctctgggaggacacttggacccgttttaagggcaaaaccaaagcaacgccgaggaaaccccactgcgtgtcccaggccggcgctcctggggcccagggccgg

SEQ ID NO: 860 - DNA, 808 bp, Artificial sequence
  DNA replication origin
tgtctgcctgagaccccccgagttactgggtggccaatccaggtggtcctgcctgggcagctggagggaagatgctttccttttcccctccacaccttcctcatgggtcaggctctgaccactatcagctgaagcccaggaagacattcagagccagccagtggctgtgtgggtcacgtatgcaagcagctccccatctttgcagacatcttcaaatgcacccagaaatcacctcttctatcccttgcctccaggcttcctcctacacacagttgcccagataggagagcagaggctcagaattggggtggggattgatcacctgctgtcaccagccagagctgcaagccttttgttacgatgccttgctttggggagtcattgggagcagcacccagaggcatgtgtataccccacagcggtcctggacacagatgccctctctgagatcccatgtcgggagcagaggcacacagtcctctgtgctgggtgcccggtacgggcagtcatactcccaggcttagacttggggtagttctgttcccttattcagggttttggggccaggggcagctcagtaaggtttctaggcctctccagctgctgttcctatgtagggatgggttggggaatcacagagccaatgaggctgtgtgacggccaggagtggggactgccaggaaggcagtgggaagggcagtggagtaggggagggatgcccaactccctgagaggccatttagaactatagagcaagcaggaaaaaaggagaaaaatgaggggaaagtaggagaaagagtagattgtt

SEQ ID NO: 861 - DNA, 867 bp, Artificial sequence
  DNA replication origin
ggggtggtggcgcgagaaaccgcggggccaccgggcctcgggccccaggcagtgctgtgtcagaggtgaccggtggaacgccagtgttatgtaaatagcggggcctgcccggcgggcgagctggctggctgcagccatccatcatccccgcttggcggggcgggggacagacacggcaccgtgcgcctggctccaaacctgtttgttttccctttgtctctcgcgtttcgggccccggctgcgaccgaccggctctgggttttgtcctaccggcccccttccccccaggaggacggagaagggaggagattccccggctcccaccgcggcatccctttcggacttcaaaggctcccccagcattgtctgcgctggcgggcagtggccctgaaaacgtgatcagaggcggcccggtgtagggcaggcccggcccgcgccctgcactctcgctggggccggtggattcctccctttgccgccagcaccaccctggttacagctccatcccgggtcctctcggcctttctctccctggtgccccttcttgctcccttctggccactcccgtcctcctcttaaccatggcctcacccctgtctcatggagttgagaattctagaatcttcagagctgcgagcctccatgccttcacatggtccatgaggatctgagtgccgtggaaggctcctcaggatgccccaagctgggaccagttcctggatattggcttcccacgccgtgccttgttctctgtcccttcctttgctctaccctctgatcacgagaaccttgcttcctctagaaacctccgcccatgaggtcctgacagggtagataactccgtccccaggcagcagggtgaagcca

SEQ ID NO: 862 - DNA, 989 bp, Artificial sequence
  DNA replication origin
cggattgggtgctgtgaggtgcggattggatgctgtggggtgtggattgggtgctgtggggggcggattgggtgctgtggggtgtggattgggtgctgtggggagaggattgggtgctgtggggagtggaggaggcatctctgctgcctctctctgcccggctgctcccaggctccttgtcccttcctaatggcacgatccaacagagccaagggcttggggttctcaccgcagatcctgcctagcgcgggtacaggactgcttctaccatcgtagacagtcaccaagaggtgactcacagagttggttgaggaagagaggtctctgcccacatagttgtccccaaacatggccgagaggccaaagcttgccaaggcccacaagccgacccctcaaacaggatggaggttgctgaggccagaggatgcttctggggcagttatgcggagcccagagttgggccaaccggaggccagggtgggctgactcggagagtaactctgaactggacacctagtccctggagccgaggaaaggtggagcccgtgtgctccctaaagtcagctaatggaaggaagggaacctggaccaaggttaggcccgcggctgagcggcggcaggtgggtctcataggaattcctcggctttggatgctggagcaacaggactggcatggctgcttggggagggccaatgctgggctgggtggagacaaggcagctctgaggagagggtgggggttgggctggccagggaaggggcagagggtggaggaaactgcagaaaggccgaggcctggagacagacaggaggaataaatggaagtgacagggtcaggccagacctttgtcctgcagcctgattagagagtctgccctggatttctgaaactttgggatgttgtcggacaaactggagcttaattctgtcagagcgctggggagattagaattgacatcctgggagcacattcctggctgggcagaaat

SEQ ID NO: 863 - DNA, 1468 bp, Artificial sequence
  DNA replication origin
ggtctcagcccagggaggtggcctggccctgcctactagtggcattccaggactttctgtgctacctgccactgggcagctcttggggagcccctccatcctggccagtctagatttattgtgctgtctagagggtcagcagaacagcagagtgccacttccgcctgttcttcctcttcttactctctgcaccggggcattcgttctgctgctctcgcttggggagccccttcccttgggtctggctttacgctcagcacaggggctcaagtgcagccaccctcagtatccccccagatggtccatacgtctccctctgcccactgctccccatgaatcttttgatgtgagcaagccagatttaagccggggtccccatccatgcctctctgcctgtgcctcttctagccggcttgtgcatgtgacttcctctggaaatggaggcaggtatcagcactccgggtctacccgagagccatgtggatggggagcggattgggtgctgtggagtgtggattgggtgctgtggggtggggattgggtgctatggggtggggattgggtgctgtgagtgtggattgggtgctgtggggagcagattgggtgctgtggagagcggattgggtgctgtgggttgtggattgggtgctgtggggagcggattgggtgctgtggggtgtggattgggtgctgtgggtgtggattgggtgctgtggggtgcggattgggtgctgtggggtgcggattgggtgctgtgggttgtggattgggtgctgtggggtgtggattgggtgctgtggggagcggattgggtgctgtggggagcggattgggtgctgtggggtgtggattgggtgctgtgggaagcggattgggtgctgtggggagaggattgggtgctctggggtgtggattgggtgctgccgggagaggattgggtgctgcggggagtggattgggtgctgtaggtgcggattggatgctgtggggtgtggattgggtgctgtgggtgtggattgggtgctgtggggtgtggattgggtgctgtggggagcggattgggtgctgtggggagcggattgggtgctctggggtgtggattgggtgctgcagggagcggattgggtgctgtggggtgcggattgggtgctgtggggtgcggattgggtgctgtggggagcggattgggtgctgtggggtgcggattgggtgctgtgaggtgcggattggatgctgtggggtgtggattgggtgctgtggggggcggattgggtgctgtggggtgtggattgggtgctgtggggagaggattgggtgctgtggggagtggaggaggcatctctgctgcctctctctgcccggctgctcccaggctccttgtcccttcctaatggcacgatccaacagagccaagggcttggggttctcaccgcagatcctgcctagcgcgggtacaggactgcttcta

SEQ ID NO: 864 - DNA, 1151 bp, Artificial sequence
  DNA replication origin
cactagtttcttctccagaaatgctaatcgggaaaagcaattaaaagcgacttttttttcccttagtaatctgtgttaagagctggtaatgaagtttagggccgttgtgactcaatatttcagcttcaccgactcaagtcaaaacaatccgagcccaggagtttgccagcagctgagctgggcccgggcagcagctgtgagtcccacgccgtgctgctctccaggcagagagaggatcggtcccagctgcggggaggaggtctggtgacacagagatgggtcccctcgggcacccctccaaagaccctggaaatgcatcctagtgaaaatgcttaggacgagggtgtgaggagcacctggtttagggggcaggactgaggaagcctggggtccagtagggtcaggggagaggaactggatgcttgaggagcccactgggttgggccagggctcagcctcaggggttcagagccggaagaggtggtggtccaagtcctgacctgtcacctctggctattcattttccatttccattcagcgacactgtgggtagtcattgtaggtgctcgaaatgaagaagaggccaacgtcctgccctcatgaggtttacattcggatggagggagccaaatgatacaggagaaaaaggaataaaggatgtgctggatggcgatgcgtgggaaggagaaaacaagagcctctttgcagactagaatagggagtgagaggcaggtggatggatggtttgtcattttagatgtggctcccagggaaggggtcactgcgatggtgacatttgggtgaagacagaaaggaagtgagggagtgagccaacctaatcgatatctgtaggaagagcattcatagcaggtgtgagatcccagaggcgtgttggagaagcaaggagaccagcgtggctagagcagagtgaggggcagatgccatctgaagtcgagggggtcagggtggggggccctcagatcccgtaggccttgcaggccattgtgagaactctggcttttacccagagtgaaataagaagctttttgaagagttctgagtgccatgatctgattaggaacaagctctttattaaaaaacaagacccacctgtcaccgactccgcctctcacaggtcgcatatgtgcccg

SEQ ID NO: 865 - DNA, 1362 bp, Artificial sequence
  DNA replication origin
atggccctaaggtaggatgccctcagtgcatccagtgactggaaagaaaggcagagtggccaggacgtggatggggacgtggatgaggtgggtgtcaggaggtgcagggctttgtgtgcctggggagaagttgggattttatgcttaggtgataggaagccgctggagggttttgagccagaggtaaagtgatgtgatggttttctgttttttgttttttgtttgagatggagtctcactctgtcacccaggctggagtgcagcagtgcaatcttggctcactgcaacctccgcctcccgggttcaggtgattctcctgcctcagcctctcgagtggctgggattataggcaagcgccaccatgcctggctaattttagtgtttttagtagagacggggtttcaccatgttggccaggctggtctcaaactcctaacctcaagtgatccacccacctcagccccccaaggtgctgggattacaggcatgagccactgcacccagccaatgtttgttttaaaaaggtagttggggctgccaagggaagaaattgggaggccagaggggcagctgctgcagccgatggtgtgagaggatggtggctgggtgaggaggaggtggacaggcggggaaggggtcagagcctgtatgtgtatagaggaagagttagcaggactcaatgatggattcaacggggcaaggaaaagagagggccccaggatgactcaagcattctgtgcccgcggatttgtggctctgtgtcttctcctctctctcctgccccctgaacacagcagtaccaagaaagacccatggctttgagagggttaacgtctcatgcattaggggagaagtgccatcttggaaccatgctgggtgctgagaaaggctcgtttgagtgggtcgggctccttgcggagggaactgcttctctccgacaccgttttcaggagtgagcctgggagcaggccaggacacacactatcctttcagccctggctctgcactgaagccagctttgtgtgtttgctccctgggttctgtgctgggtctgagattgggtctaaaagttggctgagtttctcttactgtggctttgaatgtgatctgtgcgctcaagggctgagcttctgcacacctttttccacgtgccgggtcatatagagcgtcgttggtgagctgtgagggctggcagatgggtttgtctgaagcccccatatttccatggggtcagctcagcctccagccgctgctcatctgctcatcggcagggatcctaatagtgtcgccacacacaaaggtgtgaattgccccagtaccccgctcgcctgaaggccagtctcccttttcccagtgcctctg

SEQ ID NO: 866 - DNA, 875 bp, Artificial sequence
  DNA replication origin
ctctgcagaagagctggttgaatttatccagcagtacagagggtctggggccaggtgcggtggctcaagcctgtaatcccagcactttgggaggctgaggcagacagatcacttgaggtcaggagtttaagaccagcctggccaacatggcaaaaccccatctctactaaaaatacaaaaattagccgtgtatagtggtgcatgcctgtaatcccagctacttgggaggctaaggcaggagaatcacttgaacccgggaggcggaggttgcagtgagccaagatcgcgccactgcactccagtctgggcgacagagcaagactctgtctcaaaaaaaaaaaaaaaaaaaaagagagagagagaagagggtctggcgtctgtcagtcactcaccagcaaacagagtggacaagaccgcccctgttctcatggagtctggtaggcgaggcagcgtgaaacaaacccacaaaaacaaaaaaggaagacgccagcagagaatggaagtaggaggtggtggtgggaagtgactgcttggcactcctggcaggctgctcagaggaggtttctcaaggacgtggtgacatttagctgagattgaaggacaggaagtggacagatcagtgaagagcaggctggagaatattctagaaagaaagaacagctagcctaatggccctaaggtaggatgccctcagtgcatccagtgactggaaagaaaggcagagtggccaggacgtggatggggacgtggatgaggtgggtgtcaggaggtgcagggctttgtgtgcctggggagaagttgggattttatgcttaggtgataggaagccgctggagggttttgagccagaggtaaagtgatgtgatggttttctg

SEQ ID NO: 867 - DNA, 1196 bp, Artificial sequence
  DNA replication origin
gatccttggggagaccatgggtcaggccccagcatctctggctggggatcgggggacggggtgagacacgggtggccccgagctccactcaggtctaactgtccactcccctacccttctgcgagccccacacttaaggtcttgcgagatgtggcctgatgggctatgcatctggggaccctgttctggtactggctctgcagtaaatcactgtgtggccttaggtagtcattttacctttctgggcctcagtttcctctcttgtcaaatggcctctgaccgtaccaccctcggaagggtgtcctgatggttggctgggctcttagctatgaaagtcctttttaaagtaattaaacgtaacgaagaatttatcatggttggcattgtcaagtgcaaggtgtccccaaggtcaggggagccggtttttatgtcatatggtatcagtctcaaaggggacccctgtgaattccattccagaaagccgtgagcctgggtgtcgcgggtggtgctggggttacatttttgtgtcaggttgcaggttggttctgttatcattgggaacttgggggtgaatttgggggctgcctttcaggcagaatgggggatcccattcaggatatggggtgtgctttactgttttgtgcctctggagccaacaggttcatttgaggagctgtatatagtgtagatggtgcattctggagcgagttagctggggatcaaaatcgtgtgacctttcatcagtgacttaactggccggtgcctcatctatgaaatgggcataatagtacctacctcgtggggctgatgtgagggttacacgagctaagacgtgtgaaatgttaggaccacatgtctgtgtgtgttacagacccatgcgggagaggacacggaaacacttgcggcttatcagggattgccatggagaggggaactgggagagcttgctctctgtctgtctggagctgggcccctagtgcagggtgacgtggtgctgcacacagattctgcattttgtcctttacctctctggcctgcctggggtcctcctggtgtttttgctgctgggtctggaggggatgagaatgaagactctgcccacatgcggagtcagtccctcaagtggggcaggggccattgctctttctttcccacactggccagaccaagtgttcctggagctcggtggggtgagg

SEQ ID NO: 868 - DNA, 872 bp, Artificial sequence
  DNA replication origin
gaagttcaacaatattccccataaactctccttaaccgcctctaaggtggctaacaagaagggggtgggtggcgggggggcggggcggcgatctctccaattcgccggactctggggacagagatggtggctacctcctggaaaggagaagttctccactctgccctgaagagggtccaggagctcccgcgaggggcacaccctaaaaaccgaagtttgggaagtgggaaagcggctgggggtcgggggagtggcgcgggcggccggagattgcgcaggtcgcgacgcccgcccgggacgcaccgcctggtcgccaccaggacgcaaacccggcgctttgcgctcgggcgccgaacggcccagcgccccctccgggcacgtggagcgcagccccggctcagcccccggggaacaactacccccctccccatgcccggcgcagctgctcctgctcagccgggacagctccctttaggacggcgacgtgtgtgtgtgcgcgtgtgtgtgcgtgtttgtatgtgtatgcgtgtgtgtgtgtgtgtgtgtgtgcgcgcgcgcgcgcgtcgtgggttgggcggggggacaccaagattatccggcgatctgttttccagtcccctcgtgcgctctcaccgcgcgcctgtaccagctcggagacgtcctaaatttactaactttgccccgcgactaccagggccttttccccctcgccaccccctgagtgtaccgggtgtcggcgggacaactacgcacaatgagggccgcacccccacactccactcggtcagaaacgcacactccgccccgtggcccagtgatccaggtttgggggagctccatactcaggagaggcgctactgccgcttttccgg

SEQ ID NO: 869 - DNA, 1349 bp, Artificial sequence
  DNA replication origin
ggcctcccggggcgcctccccgtctctccccctgtcccggtgcaccccccccacccccggggctgccgcttgcagcagggagcgggcgagcgagcgagcgagcgagccagccagccagcctgcgatcggcggctgccacccaactccggccgtgcggaggcagggggcacggagggctggcacccgggcgcggggcggcgcgttgcctgccgtggccaggggaatgcccggcgcgcggctccgggggaggggagggctgctcctcctgggggtcgcttactccaactgagggggtggcggggtaggggagaagagagggaggtgccaggcgcgagcacaggactttgcaaatagggtgggggcgccccacgcgctgtgggctcccgggggggcaggtgatctccaataccgggtaatcactccttccccttaaacccccaccccaccccaccccccagcagcagaggggtcgtgcgctctccagggcagagaaggaggcggggtgaggggtgcctggggtgactttgcaagactttgcccatgggaaggggtgggtggggaacccctccagccggctcttgtgcccggataccgggtgtaggtgctgccagcagaggtaggcagtgttcgcttaggcgcggggtgccaaagggtatcccccataggaaatcgaaggcaagagatttcttagatggggggagcggcgccccctttttcatctgtgcctgggaagtttatctcaagtgcgctgctccaggcgcggcaagtggcgttcctcactcccttccccaccccaccccctgcctccccagctgaagggctggcaacacagggcacggggagccggggcatcggcccagagctgcccggctgtcggctggagcccgcctgggtcccggggaaagttcgggcgagttgttgccggctgttgtgtgcgccagaagagaagttgcgcccggggacgtgggacgctgggctggcgggctagcgggctggtagagtggtgcgctccgggggggctctgcagcgtgggagagggtcggtcggggtctgttcccccagggtgggctgagggtgacctcggagctcaacaattggggaggaggagccctgaatccaagggcacagggctgaaataggcacctggtgaaggacagagaaaaaagtagtttgtgggggcgcagggaacaccaaagggagagagccggtttcccggtcacttagggtccggcttaacggcaaaggagagcgtggtgactgacggaggagcgtcggggagcggggatccagggggcgcgcgggaatgggggatcgggccagaccgagtcagggatctcccggggcagggg

SEQ ID NO: 870 - DNA, 929 bp, Artificial sequence
  DNA replication origin
ctggggacccagccaggtgtgggggtgatgagggtgttggtagaagccccattgggtgggggagtgggggtggtctcctccacagaggcctcctcaggtagcgcaggccatgggcttctgtattgctgaatcagggtgtgggggcaatcagctgggtgattgtcgctgaatgttattatccttgataagaaccagattaaacgggggagggggcagaggggagagagggcggagagaggggcgggagggcgaaggagggaagcaaagtgcagcctccctcttgctgagccagcccttggctgctctcgggctggtcagggcccagttaggaccccagagtcaagctccttccagggggcactgggaggggcggggatagagggactcgtgggtgagctgccaggcgtgggccaggctggccagcggaaggagaggtacagacctcccacgccgagggtgcccacacaggccccaactctggtcctcggcagccagccatcacctagggctgcctgctgagacgccccaaccggggacaggagccagtgaccctgggaaaaccaagcccatgctgccagcctccgtttctccaccagtaagctgtgtgatgagtgtgcctcctgcaaggctcagggtgaggaggaaacaaggtggagggggcagggtgtcggccacacagagacacacctccctcctcccaccgcatccttccacaaaatcaatgacgctctgacgccgtctttgcccggctttgcccttgtccctttccctctcttgccatcatgggggcctagctgggggacccgctgaccctctgccccattctttccaagcctccggatacttccccaccgtgggaagcaggcaaggcccaacgttcccattttacagatggggaaactgaagcctagagagggataatggctgcc

SEQ ID NO: 871 - DNA, 1259 bp, Artificial sequence
  DNA replication origin
ctagagcaggccagagggggaacaaaggcctcaggccagggctgggctgagggtgaggggcttgctgtgggcttctcgcggggctgatgaatcctgagctcgcagcagctggcagagtctctctgggcttcagttttctcgtctgtgaaacgggtgtccattcactaaatactgagcatctgttccgtgccaggcaccgctctgggcaccagaatagcagcagtgagcaaactggaagcaaatccctgttctcgctgcactcaagtcctagtgcaaaagacagacaagaatcaagattaagtaatgggccgggcacggtggctcaagcctgtaatcccagcactttgggaggccgaggcaggtggatcacttgaggtcaggagtttgagaccagcctggccaacgtggtgaaaccccgtctttactaaaaatacaaaaaaattagccaggcctggtggcgggcacctgtaatcccagctgctagggaggctgaggcaggagaatcgcttgaactcaggcagtggagattgcagtgagccgagatcacaccactgcactccagtctgggtgacagagtgagactccatctcaagtaaataaataaataaataaaataaaggaatggcacacataatcgctcagctaggagcagcgggcccgcagaggaggaagctgggcgaaggagttgcgacctgggataggaggtccgttccagaaggaggtggggcacaagccaggccaatctggggaaaagcattccagccagagggagcagcaggtggaagattagtggtcctaccctgtagggtttgcctggagctagaggaggggacacaggtgaaacacctagagcccggctcaccggctcaccgtcatgctcccgatgtgaggcagtgacctcaagtctatggtggtttgtttgtctgtccacccctgtaacccctgagcccctgagagctggcatcatcagcccatctctgccaggacctggtgggtgagtaaaatgccttgcagtttggaaatcttcctagtcattctcagctgagcttcaagggaccaagggcctgtggggacagagacaggaggatctgagaagggatgggggagagtccaaccctcttatgttaccgagagggaaccaaggcccagagaaggcttttggagaagcccctgctcatccccggccttggtgattgcatctgtgcagtgggggtggggctctagcgggtgtggagtgccagccgctgcagaggtggaag

SEQ ID NO: 872 - DNA, 2112 bp, Artificial sequence
  DNA replication origin
attctcctgcctcagcctcttgagtagctgggactacaggcacgtgtcaccacgcctggctaattttctatatttttagtagagacggggtttcaccgtgttagccaggatgatgtcgatctcctgacctcatgatccacccgcctcggcctcccaaagtgctgggtttacaggcatgagccactgcgcctggcacacctctttcctttataaattacccagtcttgggtatttctttatagcagtttgagaacagactaatacagaggagttgactgcaaggagacaaaggcttgctggggattttacaggatggtgcttgtactgtgtgctgaagagggctttgtgcagtaccgataatgccaaggttgctgtgagctaacttgcaggtgtctggtgagaagttgggctcaggagggctacatgtcctggaccatgaagaaaggcagacttagagcttatctgctttttctttctgctttcccctgctcctgccagcctgactccttttccctaattaggactcaacagtggtagcagatggtgatgtggatgttgatcaggatagtagtagtggtgattttggtggtgacggtggtagtcattgtagtggttgtgatgtgatatgctgatagtggtagtggttatgatgacggtggcaatggtggtaatgatggtgataacaatagtggtagtgatagatggtgatgattatggtggtaatgatggcagtgataatgatggtgacagtcatcctggtgatggtagtgatggtggtggtgatgatggtggtgatagtggtagtgatgatggtgttgatgagggtggtgatggtggtggtgatggtgatgatcatagtgggggtgctggtgcctgtgctgaggctagtgattgtggggatggtaatgatggtgatcagggccatggtgatgatggtggtggtggtgacagtggtgatgatagtgatgattgtcatagtaatgatgatagtgatggcaatggtagtagtgatggtaatgatggcagtagtgatggtagcaatggttgtggtggtggtgacggtggtgatgatagtgatggttgtcatagtaatggtgatggtgatggcagtggtagtagtgatggtaatgatggcagtagtgatggtagcaatggttgtggtggtggtaatcatggtggtgattgtgatgttggtgatcatggtggtggttgcaatgctgctcatggtggtgcctgtggtgtggagtgaggctatcgatggtggtgatggtgctgatggtcgtgatggtcatcatggtggtgatcatgatgttgttgtttggtggtgacaggtgtgatggtgttggtggtactgatggtagtgatggtggtgatcatggtggtagttgtgatggtggtagtggtagcgcctgttgtgtggaataaggctatcgatggtgatgatgatagtggtggtcatcagggtggtgatcatggtctggtgatgatggtgatggtgatggcggtagtaatggtggcagtggtagagatcatggtcatggtgatgacggtgctcatggtggtagtgctagtaccagtggaggaggctagtgagggtggtattggtagtggtggtgctcatggtgctcttggtgagcaaggtggtgatggtgatcctgatgatgtttgtcatggtgacaggtgagtgcaactaaaaggagtatttcccccagtgtagttcaaggcaggaaggtgggagatactaatcctgatcataagggaacgtcaagatctcaattcaactctgaatgcccagggtgacaatctaggtgagaagggaaatagggaagaagcaaaaaggccttgatcctgaaggatcaagtgctggataaagtagggaccagttaggtcatggggctcagatccaagtctgtccacgtgtcttgggtgagtcgtcttttgcctagtagctggcatgggcgtcagggtaggcctcatgacctagaggcttcccacagggcctggactctccaggtggacgtcagccacagcaggatgggtcctggggttggtctttgggtctgagagagggaaatggagcccaaggaccccacccatcttaataaggacctg

SEQ ID NO: 873 - DNA, 1096 bp, Artificial sequence
  DNA replication origin
gaaagtgctgggaaaatggaccatcgattttagacttgatctgcatttcgtattttaataatgctctctctgtctttccttttctctctctccctctctccctctctctctcttttgcaaaatataaaagctgatctgataaatattaatttgaaccatcataatgtatttgaaaattccagctaaaatgtcaccacatggaacattaatgtaatatttcaaggccctgagagcaatactcatattgattgcatttatttcactctagggaggagagataattcttcaatgtgggacacatctgggagccaaggaggcagaggctgaggggagaaatgcgaaattatatatggtcataaaaaatacaaaacagaaaatcctccccaaaactctctcctcacccatggtgccccgcacccaaacttgccattttcatttcccagagtagcctggggcccgcgggaaaggcagaagcccagggccctccgggaccgcggttgcgggattgagagcggagcagcctctcccagggccccactgtgtaagcctgccttggccaggacagacagacagacagacagacagacagacagacagacagaggggctgcccactggagcctccagctcgctgggtgaaagtttgtgaatgcccaagagctgtgaggtcctgggaatggggagagaagaaggaaaggaggggaggggagagaagagaggagaggagacagctgagagaaaaaggaaagaaagaaaagaagaggaaagataccaggacccaagggagaggaggggagaggaaaggagagaggcaagcaggagtgagggagagagaggggagaggaacggaacaaggagagagagagtgagaaggagagaggggacatgaatcaggagagaaggaggaaggaagagtgagccgggaggggagaggacaggagaggcggaggcggggtggggggctcgggctgggccgtctggagtcccagctcctctcactgtcattaaggatattgatgtgctcaggcgtcaatgagtctttgtacaagtgaaaggaaatccgatgcttgtgaccctgagcccacgccctccacctg

SEQ ID NO: 874 - DNA, 1042 bp, Artificial sequence
  DNA replication origin
ggctctgtgcagcctcccccgcctccccaaactcattcctcggtcttggcgtgagtaggaggctgctcccctgacgtggagggtgggggaggagggcctggccgggtcggggttgaggcggggatagaggcaggagctccctcccgggtgggcagggacacgtgcgggtcctgggtccggccgggttcgggcgcggcggggccgtccccgcgccgcccgcggccgccggtagggggcgccttggtcatgcattattcatcgccggcgcccgcccgcccgcgcctccctcacggcccccgcgcgggctgcgggctgcgccgcggagcgggagcgcggagccttcacaatattgtggcagctccgcgagtgacggatccggggaggcgggggcgcgcagcctcgagcggctgcgggggcggcgggggttgggaggggtcccggggtgggggcgaggctgggtcacccggcctcgaagcgggctcaggcggggggctggccgagcggagggcggaggctgcagcgtccgtctgtccgtcctccatcgagtcagctggggcagagggagcattggctcagcgtgaggggcgggggatgtgatggggagcaaggtaggcgcggccccatcgttctcaaacttacattcaaaggttgcgggggtgggatgccgatccaaagcatgtaaacagacaaggaagataattccaggcgagcgctctgcagaaaataaaactcggctggggctgttcggatggccagggaggtgacgtttgtgcagagacactactggcaaagaggggcctgaccttggccagtccctgggccactggagtttctctctgcccggcccctggccttctaaaggtgctgtaaaagtcagcaccccaaaacctacacacatcctgagaagcaaggaggagggtcttggggagaccctgctgcgggctgaggccctgagatggggttcctgcccagccttcttctggttacagcagccagtaagctctggggccctgggcactggacatcagaagggtcaggttca

SEQ ID NO: 875 - DNA, 982 bp, Artificial sequence
  DNA replication origin
cagaagaggggcaggagggaggcgagagggggccggagtctggcccgagacagaaggggcggaggggcgcggggtggacgcggcccgggggtcccagacggggcgcccctccccacccggcccgccctgccccaccccccggcgcgggaggcccctgctccgcagtcggcggcgcccgggggagggggcgctgtgggggctcccggccgcccgccgcctgatgcgtatcgatcgcagcccggggtcgacgcgggggcaccagctgccggcgggcggggcgaccgcacattagcgcggccgggaccactccccggaacgcgggccgggcagcccattagacgcccccgggcggccgggcgaccactgcacgggcggggcgaggctggctccaagcaggcggcccctgggcggccggggcgggcgggctgcgggcgcagcagggggtgccaggcctggctcgacgggcgaggctgcaggcccctccgaatccccggcacgcccgccccggctggctggctccctccgtttcccgaactgcgctccagcctccagacctttgcccgcgctctgccccctgccagggacgctcccctgccatcgctcctcaccaagcctaaccccgctcgttttctggctccctgcttattagtgggttccttgaggagattgtcctgacacctctgatccagccgctggccttgcacttcttcaaccgaccccatgaaagcatctagctccccggtaccgaaggcataaacacaaaagcagcaggaggcaaaaccagcacagctcacaggcgcttctgacagggagctcccagtccgattccctcttctgatccctgagagcaggagagtattgggcagaattggggatgaattagaatctaccacttaacagctgcccgaccttgggcaagtgacttagcttctctgggcctcgttcccacatctgcagcttcatcgaggcctggtgggaaaag

SEQ ID NO: 876 - DNA, 1003 bp, Artificial sequence
  DNA replication origin
atttatggaattgctgttgagaagaactgaagctggatgctactgattaaaccccagagccagtgcccctccccctcccttcgcaaggaccagtctgggctgcctggccaggcctggagcaagcgggtgcgctttgcctcctcccatccagccttcccgccgttggatggaatcatgtgcagtgccaagttttaaagaaagtttcttttgccttagaaagtcactttctcctagctggctaagggctgtatgagcagaggcagctccgcctcttctccaagtgcagatgtggagcagacaggctatggacatgcggggggctctggggagagaactgagccacagatagaagtttagaaattgtcggcatacgcttggtgtttaaagagtagaggcacgcaggggatctcggagggagggggcacgtggagaagagtcagaggatgcttgggtgtttatggtgaggacgaggaagaggaagctgcagaggagactggaaggagcagctgaagaaaacggggaggaacagccaaataaggaacgttcaggagggcgtagggaccactgggtccagtgcactgatgggactcgtagaacaatggctgcgagctgatgactgggctttgctacctggaccctagattagagcagttagtgacacagaggatgggaggagaggaaccggagctctctgagtctgagaataggatggtagtggaggggaggtggggttaagggagaaatgaggctgatgagcccaagacagagacagctcctgtcgcttgaaatggagttggagcgctgtccccaggcagtgagagggatgagtccggggcccagcgggaggtgctggccttagatgggagatgccatctcccattagattgccaggttgcctgtgtggagtttccccattctaggcccctagcagcgcctgaggatggcctgtttcccgtctgccccacaccccgctggagattccacagtgcgtgcagagcccacc

SEQ ID NO: 877 - DNA, 854 bp, Artificial sequence
  DNA replication origin
gagccattgcctgaccccagggaggcggccctcccgctctccttctgtccacatgaacatgccccatggctggggaacagaccaggagctgccaggtctctggtaccctctgctgccaccatgactcttcgtaaaaacaataattgaagcctcacactcaaagaaggctttaggacatagaaaataccctgtagggggccgggcgcggtggctcatacctgtaatcccagcactttgggaggctgagggggcggatcacttgaggtcaggactttgagatgagacttgccaacatggtgaaaccctgtctctactaaaaatacaaaaattagccatgcgcgatggcacacgcctgtaatcacagctactcaggaggctgaggtaggagaatcccctgaatccgggaggcagaggttgcagtgaactgagatcgcatcactgcactccggtctgggtgacaagagcaagactgtctcaaagagagagagagagaaagggaggaagggagggaggaaggaagaaaggaaggaaggaaggaagggtcctgtggggggtcagtgggggagcagatgtaatgattttcaccccattttgcagatgaggaaactgagtcttggagaagtcgggctgcctgaatgaatgagcaaatggcaacacgttggggcagttagagcgcagggaggaggaggaggaagaggaggcgctgggtgtgtgatggggatgtgggggtgctgaagttgggggcaggagaacatctcccagttgatgtgttctcgtgggaagagcactgcactgggagtcctgcggcctggtagagccctggctcctgtactgacacgttgagcaagccctgc

SEQ ID NO: 878 - DNA, 908 bp, Artificial sequence
  DNA replication origin
aaataaaaacaccggccgctcgcggctcactgatgtttatgcctcagtaatacattatgtattattttgttttaagcacagcttttgcatcctgacagtaacaataaaatgtgactatgggattgctaatacagacagactaatgtttccatcgcccgcctcttttttttgcgtcctaagcacttttgaaaacgctccttttatattcctaataaaattatagcaaaatacatcgatttactggaaaagagtttagggtcggggttgggttttttcctcgtcctcccccatgtgtgggcttcttcttttcccccccaaagactgatgaatattctgaatcaaaccttctaagtgctgtttgacccccgaccctggctgcatcttcctgctgctggagggccaggctcacctggccccagcctgctgcgggcgagtgtggacgtgctaagcacttgagccgggtgttgggaagtgggggcgtgcccgtgtgtatgttggggtagccatatgtcagtgagggcgttcgtgtttatgtcggggtgccatgtgaatgttggctgtgcctgtgtgtatgtcagagtgtccacgtgttggggtgtctgcatgcatgtcagggtctgcccgtgtagaagttgttgaggtgtgtgggactgtgtaaaggtgattgcggttctgtgtgtgtgtgctagcttgtgtgctcggcaacacctaccagtgtgactgtttctgtgggagaatgggagagtggtgggtgttggggtgtgagcctgtgtgctaaggtgctggtgggtgccctagaagcagggtgtggtgagtactgggcagtgggtgtggatttatggatgcagggctatgagtctatctagagtgtcctggggccactgatggtcagagtcaggtttgtgtca

SEQ ID NO: 879 - DNA, 905 bp, Artificial sequence
  DNA replication origin
ctgcgcttgggtccgtcgctgcttcggtgtccctgtcgggcttcccagcagcggcctagcgggtgagtcgcggagccttctcactgaggacgccgtaggtgcctcggcttctgcattggggcggcccgaggcagacgcagcggcttcggaccctgccccgggaagtcagccgtgagaccgggcctagtcctgcccgagcgggctcgcgcgggagcgtcgttaggtcctggcacggggaggccggtggcgccgaaacggggggccgggcccgcggtgccgcgtagcctgaggcggaggttggccccggacccggacagtgccggagccttcggtactttgtacttcgagggacgctgccagcttgggcctggtgctcctgcgccccaccccgggccgcgccgagaaactcctccctcggctggcacgcgcgggcttctgggaggcgacggccggcaccgccaggacctgtcgccgcgggccttggggctcgggctcgcagagcccccggaagccccaaaatgaggaacagagggaaacttttctcctgttctttacacctggttcactgcccatattcagtcttcaggttcagctgatggatcgcttgcttaggaaaatcgactgggacctatcacgcccatgcctcagccagttaggctcctcctctgccttcaggattacttaacgactaacccgattgtcataaaatagctactgtttattgttcccttgcataccctagcttgtaaccagcaagccacgttggactcacagttacagtttcagtacctgacgcatcataagccttcagggaaagttttttgaatgaatgaactggcgaggcatcacattttgataggaaatcactacccttaccttcacctcgtcatttttcagggataacc

SEQ ID NO: 880 - DNA, 1904 bp, Artificial sequence
  DNA replication origin
gcgccgcccgcccgcccgccatggagcccggccccgacggccccgccgcctccggccccgccgccatccgcgagggctggttccgcgagacctgcagcctgtggcccggccaggccctgtcactgcaggtggagcagctgctccaccaccggcgctcgcgctaccaggacatcctcgtcttccgcaggtaccgccgctgcccgcaggcgcctgccccctaggctcagcccgggccgcctgctgcccgcctcacgggcctctccacgccgggacccaagcgggctggacctcgtcctgccctggccccctcgccacccctcacaccgcctccctgggctggggctgggactgcgggctggcctcttgggtgggggagtcggagtctgcgccccgctccacgtgtcagccctcaggacacgtcagagcccgaggagaccccgggtcccaccccggcctccacccggcggcccgcctgccgttcctcgccacgtgtcaccatcgctcctcatccctgggacccctaggcgggatggggagaccctcctcacccagggcggcttggggtacgttttccccaccccagagaacccaggtccccgactgtcactccgcccgcagtaagacctatggcaacgtgctggtgttggacggtgtcatccagtgcacggagagagacgagttctcctaccaggagatgatcgccaacctgcctctctgcagccaccccaacccgcgaaaggtaccccagtgtcccctggaacagtgccggacgaggggcggccccaggtgtgctccgggctcttcccagatgctgcctgcatggttgtcagagaaagtgctagcgaggccaggggcgtcccgcggaggggtgggggccgacactgacgcggcctcggaatcctagggcagccctggaaggaacttccaggaaaggggacaccggcacgaaagcgtttccgagggtagaaaaagatgaggcccgtgggtccgaggggtcagggggtctgcttcaggggcctgggggctcccagtcctgccagggcccctgccttgactgccccctcctcccaggtgctgatcatcgggggcggagatggaggtgtcctgcgggaggtggtgaagcacccctccgtggagtccgtggtccagtgtgagatcgacgaggtgagtgccggcgtagagccaggtttgagtcctggttctcccagcggccagctgtgccctgaaatggctgcacacccccgagcaaggcaggtagggcctgtttctccatctggaaaacacctggtcggggagggttcagtaggaaaaccagatggcagagggcctggcaggtggtgagggcacctgcgtggcgagctcttactaaaactgagctgattttttttttttttttttttttgagacagagtttcgctcttgttgcccaggctggagtgtgatggtgcgatctcggctcactgcaacctccacctcctgggctcaagtagttcttctgcctcagcctccggagtagctgggattacagacatgcgctaccatgcccggctaattttgtatttttagtagagacagggtttctccatgttggtcaggctggtctcggacctggcgaccacaggtgatccgccagcctcgtcctcccaaagtactgggattacaggcgtgagccaccacgcccagccgactaagctgatttttaatctgagccccaggcagggccccaagacagctcaactatttgtacgttaccccttacactcagtagctgctcactaaaatcatgctacgtgccaggtgttgcccgggtatggggacagtggtagacgacagatcagtccctgccctctaggagctgatgtcctagttaaaggagacatcagatggccagacgtggtggctca

SEQ ID NO: 881 - DNA, 1467 bp, Artificial sequence
  DNA replication origin
ggaaccagccctcgcggatggcggcggggccggaggcggcggggccgtcggggccgggctccatggcgggcgggcgggcggcgcggggcgcgggcccgggactgcaggccgcgcggcgccgcagcacaacgggaccagctccgcccgccgcccgcgccgcaacctaacccgggcgcggggcggggcctgccggcgggggcggagcccgcgctcgccaatggcaaagcggcctcgcctggcgctcattggccaccggctcgcagagcggcgcagagtggctgtggcgcgccgtccgtcggcggcagcagggtagtgcggcccgctccaggggccacgtggggcccggccggggccgggcggccgggtcgggttccggggcgggctgggccggcggaaggggtccgggtccttcctccgccccaagcagccggggcggtgcaccaccggcccccgcttccttctcggggttgggaggcaccgagggcctcgaggggctgcgggactcgggcttggtgtggagggcaagagcgctgcgacgtgcggactggagagtcagcctttgggctggagacacgggagcgggtggctacagtggtttacgttgttgcacggggcgagtagaacgtatccttctttgcgtccaaaatctggttccttgttggatttgaacagattatgtggctcgtcggggcgaaccgagggtttttatttacttggaaagaatcatcacagcccgcgaattcacaagctggatttagccattttcccttagattctgcgccatgagcctataggctgttgaatacgagagaagtgcttttctaaacgagtttctaaatttaccagcagtgtccaggaagaggcccagaacatacatattcagcaccagaaaagactggcacgcaatttttcttgacaaactgggtcttgctctttgaagggtgggtgggaatgtgctgtttttatgagaatgtcaaagaacttctcagaatcacattaagcatgctaattaccaaatattaaatgctaattgttccacacgcagttcgaatgccaaggaaggaagatgaaactagtataagctactcttgacattatgtcagggatggttttgacacgttttgcagcctccacctggaggtggggaacgtttcctgtgtcgtccccagagcagagtaacagcgttgtttatgggtgagagcaagcctcaagcctaggcaacaatgtgccttgcttgcttttaagctccttctaaaggggaggtaaaccaagaccgctaaagaattgctaggtgcctgggcgtgatggttcaccccggtaatcccagcactgtgggaggcggaggcggaggcgggcggatcacgaggtcaagagatcaagacgatcctggccaacatggtgaaaccccgtctgtactaaaaatacaaaaattagctgggcatggtagtgcgcgcctgcagtcccagc

SEQ ID NO: 882 - DNA, 900 bp, Artificial sequence
  DNA replication origin
gcttaagactcactggttgaggggcgcctctgcccggccgcccctactgggaagtgaggagcccctctgcccggccagccgccccatctgggagggaggtgggggggtcagccccctgcccggccagccgccccgtccgggagggaggtggggggtcagccccccgcccggccagccgccccgtccgggagggaggtcggggggtcagccccccgcccggccagccgccctgtccgggaggtgaggggcgcctctgcccggccgcccctactgggaagtgaggagcccctctgcccggccagccgccccgtccgggagggaggtgtgggggtcagccccccgcccggccagccaccccgtccgggaggtgaggggcgcctctgcccggccgcccctgctgggaagtgaggagcccctctgcccggccaccaccccgtctgggaggtgtgcccagtggctcattgagaacgggccatgatgacagtggcggttttgtggaatagaaagggggcaaaggtggggaaaagattgagaaatcggatggttgccgtgtctgtgtagaaagaggtagacatgggagacttttcattttgttctgtactaagaaaaattcttctgccttgggatcctgttgatctgtgaccttacccccaaccctgtgctctctgaaacatgtgctgtgtccactcagggttaaatggattaagggcggtgcaagatgtgctttgttaaacagatgcttgaaggcagcatgctcattaagagtcatcaccactccctaatctcaagtacccagggacacaaacactgcggaaggccgcagggtcctctgcctaggaaaaccagagacctttgttcacttgtttatctgctgaccttccctccactattgtcccatga

SEQ ID NO: 883 - DNA, 1453 bp, Artificial sequence
  DNA replication origin
gaaatagttcttgtgcaggtggtttgtaaattataagaaactatccaaggctgggcatggtggctcatgcctgtaatccaatccaagcattctgggagaccgaggtgggagtttgagctcaggagtttgagaccagcctgggcaacataatgagaccttgtcactaaaaaaaaaaaaaaaaaaagaaactatctaaatataaggtattaaaatttcataatttgttcattcattcaacacatattaattgagcacctagtatatgccagctacactgtgtcctaagagctagaataatccagcagtgaacaaaatagattccattcttataagggaagatagataatatacaagtaaaaacctattatatatcatatggttataagagctatggagaaaagtagggcaaggaaggggaatagagtatgctcacctggattaaggattacattttaaaacacggtgctatttgagcacagccatgaaggaggttagaaaaaagccctacaggtatctggggaagagcattctaggcagtggtccctgaggcaggagcgtgctggtgtattagaggagcagcaaatactgcagtagcagctcccctaccatggctgagcagagtgagcaggagaagtgtgtggggatatggggtcagaggaacacctaagggaaggaggggcatatcacatagggcctttgtgtgggaagcgggaagctataagtgggctttgagcagtggagtgacatttaactcatatttcaaaaggatcactcttgccattgtgttgagaatggattgttagagggtcaaggactaaagccaggaatccagttaggagggaattgccatggtcttagtgggggatatttgtggctcagaccacagtgggagctatggagttgcaagaagcaactggattctgaatttgggatttgctgatggtttggaggtagatggagagaaagaagtgtcaaggtgtttggcctgagtattaggaggatgaagttgccattcactgcagtgggaagactgaaatgggagcagcaggcttgcgggagaagactgggaatttggttttgaacctgttaacttagagacctgttgggcacctgagtgaggatactgaatagttctggggagagagctgggcaagggggatggatttgggcattgtcagcgtatagatgttatttcatcatgagactgggtgagaagcacaagggaactagtacagttggagaagagatggagtctgcaaacctgaggtcaggagatgaagaggaccaaggcagatggggaaggaacagccagggagggaggaggagagccaggagagtttagagtctgagaagccaggtgaagaaagggcgtcaaggaggtggaagtatcagttggatgaaatgctgcagataagtcaaataagatgaggactaagaattgaccattggattt

SEQ ID NO: 884 - DNA, 833 bp, Artificial sequence
  DNA replication origin
tctgagatgtggggagcgcctctgccccgccgccccgtctgggatgtgaggagcgcctctgcccggccgcgaccccgtctgggaggtgaggagcgtctctgcccggccaccccatctgagaagtgaggagcccctccgcccggcagccgccctgtctgagaagtgaggagcccctccgcccggcagccaccccgtctgagaagtgaggagcccctccgcccgccagccgccccgtctgagaagtgaggagcccctccgcccgccagccgccccatctgggaagtgaggagcgtctccgcccagcagccgccccgtccgggagggaggtgggggccagcccccgtccgggaggtggggggcgcctcagcccggccaccccttctgggaagtgaggagcccctctacccggccgacaccccatctgggaggtgtacccaacagctcattgagaacgggccatgatgacgatggcggttttgtcgaatagagaagggggaaatgtggggaaaagatagagaaatcagattgttgctgtgtctgtgtagaaagaagtagacatgggagactccattttgttctgtactaagaaaaattcttctgccttgggatgctgttgatctatgaccttacccccaacccggtgctctctgaaacatgtgctgtgtctactcagggttaaatggattaagggcggtgcaaaatgtgctttgttaaacagacgcttgaaggcagcatgctcgctaagagtcatcaccactccctaatctcaagtacccagggacacaaacactgcggtaggccgcagggtcctctgcctaggaaaaccagagacc

SEQ ID NO: 885 - DNA, 2029 bp, Artificial sequence
  DNA replication origin
gggagtggtgatgactcttagcgagcatgctgccttcaagcgtctgtttaacaaagcacattttgcaccgcccttaatccatttaaccctgagtagacacagcacatgtttcagagagcaccgggttgggggtaaggtcatagatcaacagcatcccaaggcagaagaatttttcttagtacagaacaaaatggagtctcccatgtctacttctttctacacagacacagcaacaatctgatttctctatcttttccccacatttcccccttctctattcgacaaaaccgccatcgtcatcatggcccgttctcaatgagctgttgggtacacctcccagatggggtgtcggccgggtagaggggctcctcacttcccagaaggggtggccgggctgaggcgccccccacctcccggacgggggctggcccccacctccctcccggacggggcggctgctgggcggagacgctcctcacttcccagatggggcggctggcgggcggaggggctcctcacttctcagacggggcggctggcgggcggaggggctcctcacttctcagacggggtggctgccgggcggaggggctcctcacttctcagacagggcggctgccgggcggaggggctcctcacttctcagatggggtggccgggcagagacgctcctcacctcccagacggggtcgcggccgggcagaggcgctcctcacatcccagacggggcggcggggcagaggcgctccccacatctcagacgatgggcggcagggcagagacgctcctcacttcctagacaggatggcggccaggaagaggtgctcctcacttagactgggcggccaggcagaggggctcctcacatcccagacgatgggcggccaggcagagacgctcctcacttcccggacggggtggcggccgggcagaggctgcaatctcggcactttgggaggccaaggcaggcggctgggaggtgaaggttgtagctagctgagatcacgccactgcactccagcctgggcaacattgagcactgagtgaacgagactccgtctgcaatcctggcacctcgggaggccgaggatggcggatcactcgcggtttggagctggagaccagcccggccaacacagcgaaaccccatctccaccaaaaaaaaccgaaaggcgtggcggcgtgcgcctgcaatcgcaggcactcagcaggctgaggcaggagaatcaggcagggaggttgcagtgagccgagatggcagcagtacagtccagcttcggctcggcatcagagggagaccgtggaaagagagggagagggagaccgtggaaagagagggagagggagagggagagctagaattaatcttaaaaggtttccataaagatgatgatgatgattatctagggataattctaggtgggcgcacaggcttactgaatgctggcacagaggggcgggggaggggtcgcccctccaagcaatgcccccagcccctgtgggccacacacattttcctgctccaagagtgtccccaaaagctcccccgactccctgtcctcactgcatcccagctcttctgcgttcgcgtcacaaagtcttgcttccctctggtggcccttttcccctcccccaactcttccacccacctgcccacccctgctcctatgctcggatctggtgtggcaatagaggtgtgctctggaccaaagggctttgccctgaggatgcaacacaaagacttaggctggggaggagccatgagaagttggaaggctatatccttgcctccgaacagggactcctgattcaatagctcagaaggcagtgactgcctacctctgggacttgggccatgggcttttaaaggcctgttccccatgcttacacaatcctgcagaactaatctatggtgtcagaaggcaggacagaagttgcccttgttggggtgggggtaggggtctgtttaaacagatgtattcactttgtgaagattcattgaattacacacttaattgtgcacccttct

SEQ ID NO: 886 - DNA, 1068 bp, Artificial sequence
  DNA replication origin
tgctggccagacaataggcaaggccttaattggaaaacagtgggccgggagcagtggctcacacctgtaatccctgcaatttaggaggccgaggcaggtggatcacttgaggtcaagagtttgagaccaacctggccaacatggtgaaaacccatctctactaaaaatacaaaaattagctgggcatggtgacacacatctgtagtcccagctactcgggaagctgaagcacaagaattgcttgaacctgggacgtagaggttgcagggagccaacattgcgccactgcactccagcctgggtgacagagtgagagttgtctgagaaagaaagaaagagagaaagagaggaaggaaggaagggagggagggagggagggggggagggagggagaggcagggagggaaggaaggaaagaaggaaggaaggaaggagaaagagagagaaagggagggagggaaggaaggaaggaaggatagaaggaaggaaggaaagaaggaaggaaggagaaagggagagaaagggagggagagaaggagggagagagagaaggagggagggaggaaggaagaaaacagtggaaaggggaaaactggacaggctcaggctctcctacttatcaagctctgcaactttggacaaattattaactgcactaaccgtctctgcaaagtggtattttaattgcacctgctttaaaggtggttgtacagactggagacgatggaggtgagaagactgagaaatggaagttgctcagaggaagaagctattgtcaaatgtctggggggtggtgaggaattgggcacataggtcttcaccttcaatcccaggcttccactctgcatgggcacacctgctcatctgccatgaattcacctcccctgaaccccaaacatttaccctgaagacttggaagcagtttgtgtagtgcaggatttgggggacaaggctgattggaggctttctctgtccctttaagacatgctctgcgtctaaaggggtaacactcggctgggcgtggtttgggatgccgaggcaggcagatcacgaggtcaggagttcgag

SEQ ID NO: 887 - DNA, 1416 bp, Artificial sequence
  DNA replication origin
cagtggagcagatgtgagtagcagccccaggcctgcctgctgggtgatcctgacacaggcggttgcattttctgatcctcaacaggctcgttgtgaatggatgctgatacctccctggcagggctgctgcagggatcaggccagacttgaatgtgaaagggctctgaatagccgagtccagggtgggtgagggaaggtagcatcggcaacctgcgggtgggccctggccacactgacggaggaattgtctccctgttatcctgctcactctctgtggggttttcagaggaagcagagtccctcagcttcaagccagatctgggattccaaagacccacaagggaggcccaagcagggaaggttatgggaggattctggagaagagggtgcagggggcaaagcctctgccaagcagctcctcccctgtgcatgcgtgtgtgtggatgggtgcgtggagtgtgtggtgtgtgtgtggatgtgtgtgtgtgtatgaaatgtgtgtggatgtgtgtgtgtggtgtgtatgaatgagtgtggtgtgtgtgtatgggtgtggtgtgtatggatgtgtgtgtgtggtgtgtggatgggtgtgtgtgtggatggatgtgtgtgtgtatgtgtgtgtggtgtgtgtatgagtctggtgtgcatgtggatggatgtgtgtgaatgtgtgtgtggtgtgtgtgtgaatgagtgtggtgtgtgtagagtgagtggtgtgtgtagagtgagtggtgtgtgtgtagtgtgtgcgtgtggatgggtgtggtgtgtatgtatggatgggtgtgtgtggtgtgtgtggatgggtgtggtgtgtggatggatgtgtgtggtgtgttgtgtgttgtgtgtgttgtgtggatgggtgtgtgtgctgtcttgtgtgttgtgtggtgtgttgtgtgctatgtggatgggtgtgtgtggtgtgttgtgtgttgtgtggtgtgtgtggtgtgtgggtgtgtgtggtgtgttgtgtgttgtgtggtgtgttgtgtgctgtgtggatgggtgtgtgtgatgtgtgtggtgtagtgtgtggtgtgtgtgtggtgtgtgtggtgtgttgtgtggtgtgttgtgtgctgtgtggatgggtgtgtgtggtgtgagtggtgtgtggtgtggtgtgtggtgtgtgatgtgtgtggtgtgttgtgtgttgtgtggtgtgtggatgggtgtgtgtggtgtgttgtgtggtgtgttgtgtgctgtgtggatgggtgtgtgtggtgtggtgagtggtatgtggtgtggtgtgttgtgtgttgtgtggtgtgtgtggtgtgtggatgggtgtgtgtggtgttttgtgtgttgtgtggtgtgtgtggtgtgtggtgtggtgtgtggtgtgtggtgtgtgtgggagtgctctctggccaggtgcaatctccttcc

SEQ ID NO: 888 - DNA, 844 bp, Artificial sequence
  DNA replication origin
ttcctccaggtctctggggcatgctccccgactcccctagaaggctccagcagggtttggtgctggtcaggaggtccaggggggctggctgcatcttgtatttgagttgcacgttgtgtttgtgtatgtacgttgcatagtgcacatggcatgggtttgctgggtgtgtagtatgaggggtggattgtgtgttgcccatgtgtggtttgtgtatgtgtgaactgggtggtttgtgggtcttacagggcacatgcgtgctccaccctttattcgttcaggctgcaggaaagccagcctctggggcccactctgctcaggccgggactggacctagcgtttggggaagtatgagctgcccaccctttcagcagagcccttggtgggcaaaatggccattatggttgactctgtggggccagttcaggggacccaaggcctgatgaccagtttccagtggggtgttattccactcaggcgggtcaagggagagggcaggagaaagaggagagggagctgggcgggggcgagcatggggcctcctagggaagggcagggatggcaagaggtgaaacagcttgggcatcgctggaccgggaattcacctcctaactcctcagctccttcaagtctttgtgcaaatgtcaccttctcaaagaggtctcccctcccctcctgattcaagatcacaacttcgcacctcacttccaccgtcctaactctcccctgctttgtcttctttttgctgacatagtctgtgccctcttctaaccaccgtataatttactcatttattatgtgattctttattgtctgtctcctctcaccccaccccaacactgggatt

SEQ ID NO: 889 - DNA, 734 bp, Artificial sequence
  DNA replication origin
aacttcattaaacacagacatgacaagctttcagagcaagctgagacctccatgcaaggctccgcattggagcaagagatacaaggctgggctccagttgaggaggagaaggaggaggagggggaggaggagaagggggagaaggagggaggaggaaagagggaggagggaggaggaaagagggaggagggaggaggaaagagggaggaggaaagagggaggaggaaagagggaggaggaaagagggaggagggaggagggagagctatcacgaaagagtctcagctagaaatgcagccaatcttgggtcttccaatttctctccctaccctttagggacacctcctggggaacctccacctactgccaccctcccctatccatgcccatgtccctccctctcagcagaggaggaatactgggaagggtgaggacagcctctgctgtcctgctgtgaatccctgctgagtccagcaccagggccacggcagtggcggagggggctgggggagggaggaaatggaggaggggaaaataaaggaagggtggtgggtcccaaagcgtgtgtgtgtgtgtgtgtgtgtgtgtgtgtgtgtgtgtgtgtgttgcccgcttcgtgagattacagattcatgccttctggaaaccctgcggaaggaggaggctgccaaactgctaacagtgtttaccttggtggggagcagagaaagcggtgggataaaggagggagagaa

SEQ ID NO: 890 - DNA, 1096 bp, Artificial sequence
  DNA replication origin
gagccctgcaggattaggagttggaagcctaggttcagccatcccccaggaagcaccatatgatcatgagagagtcgttcctccattgtcccatctctaaaatgagaagaatatggtctgaccccagcttcagacctatgagccaggtcctggagtagatgggcctggctctgctgcttatgatctgcctcccccgtaccccagccctggcctggggagtggcccccctagagagtcatcatgcaccctcacgcttagacaacagactgtatatagaaaacacatcagcctatgataaatgcagaaatagatgtgtgaaattgttccaggagcaaagaggagagagaattgaaggctctctgggggaaagagtagggtagggcgtgggggtggcttccccatggaaaggatgtgctgggccctaaggatgagtaatattcccactggtagggaagaagggaaggagcactccaggtagagggagtggtgtggggaagggctgggaggcaggaaggagccggcatgtttgagcaacaatcaagccaggcgggtcggggctgctgggggtgtggacagggactgccaattaatggggtcagagagacgtcattgaggaggagcagaccttgagtgccatgttcaatgtcagggctgtgtctgtccctcaggcagtggggtgggggacatgcagtgcttggagcaacagacactccccaagtgaccggcaggagtggctggagtgtcttaggtctcctatgagcccagtggggagcaagacttgaatttggggtttctacaggcacccatgccgtgggaaccctgcaaagtgagcaagtttcaagcgtaggaagccccaaggcactcagctggagttaaggaggagtgtgttttagaaataaacaattcagtaagaaagggcaagcttccagctgaggcaggtacaagagaaagcatgagagtgggaagaggagctcacctgggttgtggcattggaggagactggctgagccacaggtgggacccatgaaccttagagacatgaggctgcagcgggaaacccttaggcctgggaaccagtcagaccccagttcaaagg

SEQ ID NO: 891 - DNA, 1096 bp, Artificial sequence
  DNA replication origin
tccccctgccgatccgcgcggtggttcagcccggccctggcgcccgcgggcgggggaagcgcaaggcgcagcgacccctgggggtcggtccccgcccctgcagacggtccgggccaggcaccaccccccagccccgcctccgagtttcctgatacccaagtctctcccgggcccgcgctcccgctcctctccagccagcccgcccagccttggcaggtcaccagcctcctggacactcgcgggcatccccgggcgccctccggagggagctgccaagcccaggctcctggcgccgtcccttcctcgtttgttcttcatttacccctctggcaccagaacccggagccataccagcccctgggaccgggcatccctccagctctagcacatgacctgcctgacacccctagccaaagggccacaaggagaaagagcctgggggaggggggcaggccagtaccctggcccatttctctccatcagggctcagagagcattggcattggtgttgcccagggagagtgaagtgggacccctcaaaagggggccagctgccagcccccagctgcagggtggagggatgtcagtgacggaagccagaaaggagggaggccattgccatgctgtgtgagggtgagccatgagcttgtcatttgtcctgggtgtgtgccgaccaaggacctgggaagatagggcaatggtgagacacaatccttgccttcaggaggtttccggcttatgggagagagaagaatatgggagagttatgaatgaaatataacaaacccggccagccaacacactgatgctgaacccacagcagcccctccccatccccagcccttatttttaaaagaggaaaactgggtgagacgcacctctaaatgtcagggtgctgagtggatctcctgtgctgttcacctgctgctcctgctctgtctctctgctgtacagtccctggctggaagctgtacccactgactggctgtcaactagacgcattggtatttatgactctgggtgccctgagagcttatctatgcagaagcaaatggcctgagccagtgtccctgccctggcactcactccccatgtg

SEQ ID NO: 892 - DNA, 1554 bp, Artificial sequence
  DNA replication origin
ctctaaggaaggggaaaggtagggtaatctttggggttagaatcacaattttcaatcccacccacactcaagagactcactagagagtcaatgttccagattattagggccagaaagtgaccctacaggtcacctcaggcagtcctttaacagacgggaaacctgaagctcagagaagggaagtagtttgcccaagggcaaactgggagtctgtggttaagctcggactaggatccaggtcccctcacttccagtccagtgctccttccaccacaccatgctgggactactcttctttcaacccagtttctggatttgaaggacaacagcaggagaggtgtcaaagggcaagccaggtcatggctaccagatctcatggctagccagatctcgaggggggttccagaatgcttcacccaaagttcttggccccttggagagatcactggggctctgtggcatctggccctagaaaacttcctggggaggggaacagaagctgctgaggccacggtggagggtcgtcagatttccaaagagagagtaacggggacatggaacctgcagtgaagaaggcaagtctgagagaatggagtcagctccccctaagggtcagctgtgcccacatcccagcaaagactgggtcagacccagcctaaggaaagttggggagagaagtgaagacagtggggaaggatgactggaaagaccaaaaaaagagggtgcatgtgcgtgtgtgtgtgtgtatgtgtgtgagagagagagagagagagagagagaaacctgggggagggaacagagcagggaaacagagggtacaagcaaagaatgcggaccctgattgtacatgtgtgtgtctggactaaggttagagaaagaggagtgagtattgaggtagagagccaagcaaaatggaccctgggctgaaaatggagattctgtaaggcacctgtccaggctgggcttctgcctggagcttccaccgagccacagcctcctccctccctccagaagatcccctggtcccctggcaggtgtagtagtaggaggtggggagggggtgtttgctctaaatccccatgcttcgcccataggagcaggacagtgtgtgtgtgtgtgtgtgtgtgtgtgtgtgtgtgtgcacgcgcgcgctgggggtggaagtgtgtctgtgcttgggagtctgagtggctttgtgagtcactgggcatcggtgagaacaccaggtggtgggctctggaatctggggcttagtcagtgagtccggagacagcaacctcgagtgcagagcgggggcgaagatgctgcccaggtccacgaacgtgtgtgcttgtgagatctgtccgcccacgtgcgtgtgaaccgtgggtctgcgtggattgtgtgcgcctgaggattgtgggtgggtgtgtacttgcgcgagtgtatgtgtgtggactgttttccagtggtctgtagatatgtgtgtgcgcatggatgggtgtgagtgtgcgcgtggactgtgggtgtgcgcgggcttctgagtttctagggcggccgcgaggcgctgtccgc

SEQ ID NO: 893 - DNA, 1149 bp, Artificial sequence
  DNA replication origin
ccggaagcctgggtggtccatgatcttgcgctcgatctcatggatcgtgaccaggcgctcactggtgaaaatgttgcgctccgcgtcgccgcgcgccaggaagatgagctcgatgcgccagtgcgcgtgcgtctgagtgttggcactcacataggcgcgcgagtagtcccagcgcgaggcgcctcggcgggcacggctctgattggccgcgactgccgcgtggggcgggatgctgggctggtaccgcccattcttgctcagccgctggtttcgcgggtcttcactctggttggctgccagatcctccaggggcggggtctcacgccgaagtcgcccgctccgattggctgtgggcttttgagccgcggaagtgtcccggtaagggcctgggccaccgagtgaggccgcggggatgacgcggggggctcgggaggcttgccgcgagcggttgccgagatgcagctgctgcagctgctctgagataaggcgctgaagcgtctcggaggtgaagtcggccaaatcgcgccggttccgcccccaggatccaaactgggacttaagcgccagagtgagagcgtcgaaacgctgtgaggcctcgtggttgcggatctcaaaggcgttgtaggagatgtcaatgtccagcggtgggtagtaaaggaacatgaaggctgacagggccatggggatgctgcagcccaggaagagcaccagcccagcacagcacggattggtgaaggcccagcccagggtactccagaagcccgaagctgggggtcgggaagccaggggccagtgccgccagcaacactgtccccctgccccaggttggggccctggcttctgggcccctaaaaaggtttcacccgttgcttcttcctcctcctgctcctcctctagccacacatcctgcagcaaggggtcatcctccgtgtccatagtctgcaggagagggagagggtcagcaggctagagagacagtgaggggaaggtgccctgtggtgcagttcgcccagccctaggtaccaaccctgtccactcataaccaaatactaatactgcaatggaattgcatcaagcatgcatcaacacaactgaattaaaccaccggtaaaaaatacagagaaaattcctgttatttgcccatcactt

SEQ ID NO: 894 - DNA, 998 bp, Artificial sequence
  DNA replication origin
gcccgccgaggcgcctcgcgctgggactactcgcgcgcctatgtgagtgccaacactcagacgcacgcgcactggcgcatcgagctcatcttcctggcgcgcggcgacgcggagcgcaacattttcaccagtgagcgcctggtcacgatccatgagatcgagcgcaagatcatggaccacccaggcttccgggagttctgctggaagccccacgaggtgctcaaggatctgccgctgggctcctactcctactgctcgccccccagctcgctcatgacctacttttttcccaccgagaggggcggcaagatctactatgacggcatgggccaggacctggcggacatccggggtgagccgccgggatgctgggagggggcgtaggtccaggtttcatacagctctttatggagatttggcccaggccaggcccaggcccaggcccaggcccagtcagtctggaactgagtcctgggcatggccggagggcaaggtgaaaagggctgggctcaggtgtgagatgagcgtaagagggaactgaagagggaagcttggacgcagacccaggtgaaggatggtggggggttctgctgtggtcagaggtagagaaatcgtggggtgggcctcgggtgtgaggctggttaagaaaagggccaggatgtggttatacagaaccagaaatctggccataggaaggcaggagaaatgattggggttgaagaagactgagatagggttcgttttaggtaaattagggatggggcttgaggaagggtggggcagggtcagagagaggttgtggggcctggggtggagttttggtggatatggacagggggaatcctgggaggcagggctgcaatgagactggatgaccttgagggagggttggtgggagctgaccagctgaactcttggggcccccacccctgtccttgcaggctccctggagctggccatgactcaccctgagttctactggtatgtggatgagggcc

SEQ ID NO: 895 - DNA, 1717 bp, Artificial sequence
  DNA replication origin
cctggcccgctcaggtgtccgggtcccaaagactgttggtctgagagatgcaggatccagggtccccatcaatgccagacctcaggcaaatcccactcccctctgagcccccatgttcccacagttcattcaacagatgcctgctgggtgcctgctgggtgctggctctggggaggtactgtgggcgggaggcataggcttcccaagctcagggagttcacattccagctctagggcccggtcactgtaatagtagatctgagctttggcggaggaagaatagggtgtcttagaggcccacgtcatggaaggcttcctggaggaagtaacgtctaggccacaactcacaagaattgggaggagttagccaggctgggaggggagaggaggaaagaagaggggtcaaccaggtggggaggggaaaggagggaaggggtggggttaaccaggctgggaggagaaaggagggaagaggaggggttagccaggtgaggaggggagaggagagaaggggtggggttagccaggctgggaggggagaggagggaaggggttagccaggctgggaggggagaggagggaaaaggaggagttagccaggtgaggaggggagaggagggaaagggtggggttagccaggctgggaggggagaggagagaagaggagaggttaaccaggcggggaggggagaggagggaagaggaggagttagccagttgaggaggggagagagggaaggggtggggttagccaggctgggaggggagaggagggaaggggttagccaggctgggaggggagaggagagaagaggagaggttaaccaggctgggaggggagaggaggcaggagtctaggcagaggagagcaccagaggtgggaaagaccaatgccacatttgagagaggcagctgcaggaactaagtctggcccagtggactgggatagggcagatgggctgaagtgaggggtctggattttattctgattgtcactggaagctagtcacgtggtttaagtggagaagcggggtgagggagtctcccaggtgctgtgtggaggtggactagggcactggggtggaagctagctgggaggctgagagctggtggtgctgggaccagcatgctgatggcagcgatggtggagtcaagaggtttttaggaggtggtttccataggacttggtgacggagtgggagtcgggaatgagccaggagggaagacagagatggctccttgattttgaggtagctggcccaggccgcattttacagagggggagcaggcgaagtcaacccaaggtcatctgactttgccagggcagttagaaaccaaatgagaagacgcctgggtgagtgcttccagctcacaggagcagatctgctggtgctgtcattacctttatttaattagggcggtgctgagatcaacctggccttccccttggtaatggcagccaaatgcgtgataatccactgcagctccgagaggcaccagaagagcccctcacacttcggagccagccctggccacgtccccagctcctctaccccactgccaggatgtggcattgctccccatcatcaccgccgccacaggcctcctgcccacagatggacaaaccccgaagctccctgacaacatctggggccaggacccagccagagcccagccaggacccagccagagcccagccaggacccagccaagaccc

SEQ ID NO: 896 - DNA, 1214 bp, Artificial sequence
  DNA replication origin
atttgaatccaggcctggctgactcagaagcccacgctgctaccactcggcaggtccctgtcacagacatggctggtttaggggaggggggtcttcatcctcaaagctgcttctccctccctattggccagggctgcccaccagtgtggccctgagagccccccaccacccacagtggtggcggctcacttcacgacagcccaggctcacctggaaggagggcacctctccatccccaggcgacacagcctgccaaggagcaggcaggctggcattgagggagagcctgtagacagcggggtggccttgactcttcactttagagatgtacacggtgcctgggaaatctacggacaaataagggatgaaagaggggtggacttgacctcgactggcttctcctgaccctggagcagcccaccctcagctctgtcgactaacgagctcagtcctggccttgggctcatctcaaaatgctggctgtgcccctctctactggaccaggtccatggcaataatagtgggggaggtggtgggcacaggatggggtggcagggatggtgggggaggtggtgagggagatagtgggcacagagatggggtggcagggatggtgggggagatagtgggcacggggatggggtggcagagatggtgggggagataggcacagggatggggtggcagggatgatgggggagatggtaggcacagggatggggtggcagggatgatgggggagatggtaggcacagggatggggtggcagggatggtgggggagatggtaggcacagggatggggtggcagggatggtgggggaggtggtagtcactgggatggggtggcagggatggtgggcacagggatggggtaggagggatggtgggggaggtcgtgggcactggatggggtggtagggatggtgggggaggtggtagtcactgggatggggtggactagatagcggaggtgacagtgatggagggcatcctgctgaaaatgtgctagtgttggtacagggctggtgctgggagtgacagtagtaggagagaggtggcaacagtgccatagggtgacagggacagacacagctgcctgatggggcattcattcccccagtacacttgacccagcacccacctctgagggagactccagcagggacaagccagtgttcagggcccaggatgcccacctctgcccctggacac

SEQ ID NO: 897 - DNA, 909 bp, Artificial sequence
  DNA replication origin
aaccgcactcggcaggtggacaaccacgtcattggagacccggtacggggcatgcgtcgggcagatgccgagggccccagctgcaacagtcttgcaaataagcacctgtccagggaaccatgtccagctcctcacaccccctcttggctcctcaatggctcctctaacccagacagaacccctatgggcccctgggggtccggtttttcttgaggactcaatggcgttgacctcttagattcacccaggaatctgggtttagggcccaagctggatgcctgtgagggactggaatggagagagggcaatccaggtggacacctccgtgccctcctccttgccctcccccttcctctgagctcggccgtggctttctctctgaggcctccctccctcacatgcactcctgtccaatgtggggctcttcagtttttgaaagcactgcttgagccgggactgttctgggcacgtagtgggtgctaaggattcctaggaggaaggacaggtgggtgtcctttgcctttattagtcacagcccagcggggtacacgggaatggcagccatggagtaagtcgggggcaaggtggagtcggaggagatctgtgtgttcagtccacactgggtgtctgcaggcgctcggagcaggggtggggggaccaggcaggttctgcaggacagtgaggatgtggctgtctgggagggtggggagaaaagcaagaagtccaggtgagaaggtggtgagggaaggggaggaggtgaaacagagggtcctgtgtggggtgggcagtgatgggagcagatgttgctggcgggggcagggcagagggttagggtggagcagtgggtgagcagttgcaggctgccaacatgagggtgacaggtagcaggaagctgctggaggttctgcc

SEQ ID NO: 898 - DNA, 774 bp, Artificial sequence
  DNA replication origin
caggttctgcaggacagtgaggatgtggctgtctgggagggtggggagaaaagcaagaagtccaggtgagaaggtggtgagggaaggggaggaggtgaaacagagggtcctgtgtggggtgggcagtgatgggagcagatgttgctggcgggggcagggcagagggttagggtggagcagtgggtgagcagttgcaggctgccaacatgagggtgacaggtagcaggaagctgctggaggttctgccccagggttgggggtgagcacccaggactgagtccccgtctcactgagcggcccgggccggcttgtttctccttgggaaagggtagtgttgtctacgacagcagctttgacctcttcaaggaaattgggcacctgtgtcacctctgcaaggccatcgcagccaactccgagctggtgaagccgggtggggcccagtgcctgccttcaggtgcgtggggtgtggggagctggttcctccgagggaggatggactgactggggaggcacagaggccgtggtccaaggtagacagcccgaaggacagtgtctggcatgtgggggtcttttgcagatgtgtatctgtgctgagcatgtccacaccagggtggggtgtgtgccggcagtcgagggtttttggatgtgagcaggcttgtgtgtgaacaggactggtgcagaggtgcatgtgtgtgggatgggggcacatctgcgggagtagcttttccaaaattagggggcggggccaggggctggccccacagccaatgtgga

SEQ ID NO: 899 - DNA, 1099 bp, Artificial sequence
  DNA replication origin
gagatggagctactgcactcctgcctgggcgacagagcaagactccatctccaaaaaaaaaaaaaaaaggtcaattttatgttataggaactatgtttcaataaaaacatttttttttaggccaggtgcagtggctcacgcttgtaatcccagtactttgggaggctgaggtgggtggatcacttgaggtcaggccttcaagaccagcctggccaacatgatgaaacctcgtctctactaaaaatacaaaaattagactggcatggtggtgggcacctagctactcgggaggcggaggcaggagaatcgcttgaacccgggcagtggaggttgcagtgagctgagatcacgccattgcactccaccctgggtgaaagagtgagactccgtctcaaaacaaacaaaataaacaaaaaacaagctttttttttttttgttttttttagtggatgcatggaaaggatccttttggctgctccatggggaatcagcaactaactagccaggagcctggaatcatgaagcacagcagaaagtgccatgggcacccgtgcaaaagaccaagcagcagtgatgggaagcacccagtcagctcccccacggggcttcatggagaggagggaaagaaggaacagggaggaccccaggcctgagcctgtgggtggaagttgccactactggtcaagagggagcagactaggcttgggccggaacagcttctgcttcacgtttgttagattccacgtgttggggtggtcattagggcggttctcctccaggcacttgtaagctagagggatgtgcaagcggggtggagcaggtatttgattgctgatcccagaggtgctggaactagccgcaccagggtggccaacaacattcaaggtagtggctgccccaccagcctgagtcctggatggagaagacacaagcaaagccccctgtggctcaggacagctgtcagcaggtgaggaacacgcctttgttgttgcgagcccctgcaatctcaaggtggttgtggttgtgagaggtgacagcgtgctggcagtcctcacagccctcgctcgcttgctctcggcgcctcctctgcctggattcc

SEQ ID NO: 900 - DNA, 817 bp, Artificial sequence
  DNA replication origin
ttgctctcggcgcctcctctgcctggattcccactttggcggcacttgaggagcccttcagcccaccgctgcactgtgggagcccctttctgggctggccaaggccggagccggctccctcagcttgcagggaggtgtggaaggagaggcgcgagcgagaacccgggctgcgcgtggcgcttgcgggccagctggagttccgggtgggcatgggcttggcgggccccgcactcggagcagcaggccggccctgccggccccgggcaatgaggggcttagcacccgggccagcggctgtggagggtgtactgggtcccccagcagtgccagcccaccgtggggcagggctcgggacctgcagccctccatgcctgagccttcccccacctccgtgggttcctgtgcagcccgagcctcccccacgagcgccgccccctgctccatggcgcccagtcccatcgaccacccaagggctgaggagtgcgagcgcatggtgcgggactggcaggcagctccacctgcagccccggtgtgggacccactgggtgtagccagctgggctcctgagtctggtggggaggaggagaacctttatgtctagctcagggattgtaaatacaccaatcagcatcctgtgtctagctcagggtttgtgaatgcaccgatcgacactctgtatctagctactctggtggggccttggagaacctttgtgtggacactctgtatctagctaatctggtggggacgtggagaacctttatgtctagctcagggattgtaaatgcaccaatcagtgccctgtcaaaacagacca

SEQ ID NO: 901 - DNA, 944 bp, Artificial sequence
  DNA replication origin
tttcaagggtgtcctgctccctcctgggtccctcaggtcctcccatcagtgcctttgccctacgctgctgcgtttcctgtgccctgaaacacacagggctaccttcctgagcgcccaggcctccctgctgttcacccgcttggactggctgtgtccacagctgtcaaccctctgtggcagtggattatattcaatttagcacttgattaagccctgatatttgcttttccttaaattgctttaacttttccaactgatttcaatcccctttccccgagtctgctctggtacccccctgcttgactgcaggccacactttttggccctctcctatgtacccaccctgagttgctcaggcacagaggatccaggttaaacacatggatgttggctccaaggatatctctcccctgcctcagctctgtaccagatgctgccttggccccaggatgagggaagccatgggagaagctggtggagtgtctccgatgcttcctctgaggcaggttggggcaggccgggctgtgacaacaactgtgtccgcaactggtgggtttttggtctcactgacttcaagaatgaagccgcggacccttgcggtgaatgttacagctcttaaggtggcgcgtctggagtttgttccttctgatgttcagatgtgttcggagtttcttccttctggtgggttcgtggcctcgctggttcaggagtgaagctgcagaccttcacggtgagtgttacagctcttaaggcagcacgtctggagttgttcgttcctcccggtgggctcgtggtctcgctggctcaggagtgaacctgcagaccttcgtggtgagtgttacagctcataaaaccagtgtggacccaaaaagtaagcagtagcaagatttattacaaagagcaaaagaacaaagcttccacagtgtggaaggggacccgagcgg

SEQ ID NO: 902 - DNA, 1496 bp, Artificial sequence
  DNA replication origin
ttggcccaggctttggcctgggggaggggaggtggggagggtcttgtgccagactctgtgctccggcacgctccttccggccgacccagccccttccaaagactgtcagctgctggtcctaggggtgggcatttgaagggcctggaaccctctgccctcctctcctgaaatggagaccagtaaaatcaccgagagtctccagctttgcctcggttctgaaccctgatgctacctgctgttctggtgggattgcagggttcaagctggggcctgcctgcaattgtttattcattcactagttcatttatttacaattcccagagccccaaccccaggccaggtcatgtgtgggggccctgaagttacggtggggaataagagactccttcccaggaagaatcagcagcctggccacatgaagggtgggacccaaggggagggggagccagtgtcctgggccctccagtgcagtggtggagatgcagcccctgctctgggggcatcctcagtctgacaagggagacaaaaccttgacttcagaaaactctcagtttcaagggagaggcataacctcttccataaggatgccctccgtcctgtctgggggatttcagtctgctggggaaggcacagtccatgttcacccgagctgccaatcagacaaaggaactgatgccttgccctcagggtccagcttgatgaagggctatggaggaacaggctcaccccatgagctcccatgcttaggggtgggagactaagggtgggcatgtggggagccaggttaagaggagatggggtgagtggagaaaggaccggagcctgcactgggctatgggaggaaactgaagatggagacaggtcatgggcatgaggggccaggaggccaggtagggcctggcccttcaaggactggaggtcagcataggaatgtggggggtgtggaatgtgctgcaggtggaggggagcgcccctgagtttcaggtgcgcatgggacgttcgggaaagaggcccataaagagtgtggggccctgggctgccgatgcaggtataggagttgcagtgtctgtggccagcaaccaaagccaagggcgggaacaggtgcagagtgaggcaggagaggcctctgggctcacgacagaccggactgaccggggacagggaaagcagggcagccaggaaggcagggagatgggtgggaggaaggtgcaagaccagaaggccacctgcagccaagagcctgaggaaggagccagaagccctgcccagaagcccagaggctctgagcctgctgtggtctctccccagagcatggggccctcagaggagaccggaggggcctcaggctcactcttgctgtcactagagggacatcgggtacaccagtggtgtttaggtcaggaagataagacaactgcttctcagccttcaaagggctgtgtgaggtgggccagaaggctcactgggcatagggcacgtcctatcacaccacccta

SEQ ID NO: 903 - DNA, 1225 bp, Artificial sequence
  DNA replication origin
tatgtttgtatatatgtaatgtatatatttcaaaatcagtctgcggtccaaaccaaaggccactctgtggactggctttggccccaagctggggtctggccaacttggaatgtagtcctcgtgtttcgctcgtgggctgtcactttctcttgctggcctcgtttcccttatctgtaaactgggaacactggcagtgctggctgacagggatgttgggcgcacaggaggacttttgtggaaatccccatccccaggacgtgttcagcagggctgaggccatgcccccaccccacctcccgccccccacctcgctccctccctctgagcaggtactcgggccgcagcgacgctggttgcctctacgagctcaccgttaagctactgtccgagcacgagaacgtgctggctgagttcagcagcgggcaggtggcagtgccccaagacagtgacggcgggggctggatggaggtgagcctgggggacccagggcggaggggtggggcacggacatgaggggcgtggctcgaggagaccccgcccacagcgctcctgggctggggtgggctgggctgggctgggctgagatagtcaccgggtggtggagagagttctgaataccgcggagaaaccgagtgggggagctgcaggtcggtcggtgtaccggggtggggcggcaggagaggcctcaggacctccgaggctgactcttgttacctccacccccagatctcccacaccttcaccgactacgggccgggcgtccgcttcgtccgcttcgagcacggggggcaggactccgtctactggaagggctggttcggggcccgggtgaccaacagcagcgtgtgggtagaaccctgagcgaccctgcctccactctcccccagctgcctggaggggcaaaggtcgagggtagataggccttaacttagtccatagcgtcctcaccttccccaagccacacatcctcctcccatcccttgctccgatcccagcccctgagcagggagagagaagttttgttggcataggtttgcttaggtagccggcttctagaatgtagatccgtgagggcgtgagcttggactggacccactgctgattccctgcacctagcacagtgcttgccacaaagtgggctctcaataaatattatttgtccaaggaaggaatgaatgaaaaaatggataaacactgctcccttcccatccttttctgtctcctg

SEQ ID NO: 904 - DNA, 1353 bp, Artificial sequence
  DNA replication origin
ggggttggtctgtggccttgtggccctcctccttgggcaccagtatggagtcacagaatctccggccccagctgtggattgtcccacggtgggtgggggaggttacgggcacattgcagtcctggggcctggaggagtacagggtggaggaatcacagcctcccacccatccctgcctgcagagagcgtgggccagcccgaggaggcaagcccggaggagcagccagaggaggcgagtgctgaggaggagcggccggaggaccagcaggaggaggaggcggcggccgccgccgcgtacctggacgagctgcccgagccgctgctgctgcgcgtgctggccgcactgccggccgccgagctggtgcaggcctgccgcctggtgtgcctgcgctggaaggagctggtggacggcgccccgctgtggctgctcaagtgccagcaggaggggctggtgcccgagggcggcgtggaggaggagcgcgaccactggcagcagttctacttcctgagcaagcggcgccgcaaccttctgcgtaacccgtgtggggaaggtgagaggccctcgctgggcgagctcagcttcccctgctgcgaaatgggccgaaacggcgccgcctggctttgagggagaaatgggattaagcgcctggctcagtgccagcactgggtagccccaaggctgtctattactgtagctctctggccacctgtgccctggggtctcccgggtcctcccaccctcagccagctggggcagggcgggatgggggacatacctcccgggaggcagatttagaaactgcccactggtccaccctctcattcatcatctgcccaccaagacaccaagtgcgacctttgccctgccccccaccacatagtggcaagagccagccttagcagggactgagtgaccagggtggggctgtcgtgtccctacagaggacttggaaggctggtgtgacgtggagcatggtggggacggctggagggtggaggagctgcctggagacagtggggtggagttcacccacgatgagagcgtcaagaagtacttcgcctcctcctttgagtaaggagaagggggtggaggaggtgggaaggggggagcgttcgctctgtcctaactccagttctcccaggtggtgtcgcaaagcacaggtcattgacctgcaggctgagggctactgggaggagctgctggacacgactcagccggccatcgtggtgaaggactggtgagagggtcctggggtggcatggggctgggaggagcggggtaaggcagaggggagagccagctggggaaccccccgcctgggggtgctgcctccccactgcaggggttgaggc

SEQ ID NO: 905 - DNA, 1991 bp, Artificial sequence
  DNA replication origin
tttcatcagctcttccagctctgggccttgggccgtctgaatccccgtgggttccttggggtcccaggcctggcctcacctattcctgccttcctcctgagctcccttgtctggaggggctgcccctccccggggtggtgagatgcccagtggggacccgactagcggtgagggagcgttgggggcagctttggctggtgctcagggccttcccaggctgcccagtcatcctctctggcacccaagacccctcacccccatccctccaactccctgcggggcctgcaggggttgcctgctgagtcaggatggaaacaagacctgcctgcagacagccctcactctttcctcatcaggtccagctggggatgggcattgcttgggttaggcggtggcaaacagactgatgaaagctcaggccccccctcaccccccattcccccgcctccagccctgaaaattccagctctcgcagcccttgctcccaatccacggccttctggccacaccctctgtagggctccagaactggctcctgctttttcccagggatcagctataccctggactctggggcccactccaggtgagtgagtcagcctcgcaggcaggcagcttccaggggccagataactttccgccggcaacaatgtggggagttgtgtgtgtaagagagagggtggggggagctgtaattggatctggggcctcgagtgccaggccccggggccagaagaggggactgggtgaggtgcacctttcggggagcatcaggtgtccgatggggccagggccggagggagggctggagaggtgaggacactgggcctagctccccagagagctgtgggcatctgcctgggcaggtgatgtgacttcagggcctggcattttcctctgtcttcctgccgttctgcgatgtggtctgggagaagctgttaagccttttttggcctcagtttcctctttgccaaaggggccggtgtaaatccccacatcataaagatgtggccaaaaaaatgttaataaggaaggagaagtgctgtgttcaatgaggttcactcagtaagattgactgaggactcactgtgtgctctgggctctgtgaaagctctcaagggcctgactgtgggttgggcagggaggagaggctgcatatgaggaggttaggggctggtgggcctggagacttgggtctgggtcctgccacctgtccccttccccagtgcctggcctgttcccaccaccgccttggctctccagggcctagcccatgggaactccccatccgtaggtctgagagctgtagtcttcctgatcacccagagtggccccgtctcctcctcactggctctccctcgtccaggcatcttgggcactcggtgtccacttactcaaggctgtgatggcccagctgaagccgactgggatgcaagagacagtccggctgccgcggtgacatctgcctgcctccttacaattcagaatgcccttgtccccttcctcaggggatttggacgtctgtcctgtttgtatggcctggcacaatgattacccccattttatagatgagaaaactgagggccacggatgggaaaaggaggtggagaaagtttccttccccaagcccctatgtcatctccttgcttgatagagtttcttttaataagtccctcctcatccccaagtcacacaatagctggggacagctgggtctccaggctctgttctccagcccctgaaggccccaggtcccatgtccccttccctaaatactggcagtgtgtccttcaacaagtcacttcatccctgagcctgagcatttgcacctgcaaagtcaaaatcctggcctgggtgtagtggagcatgactgtaatcccagaactttaggaggccgaggcaggaagattgcttgagtccaggagttggaggtcagcctgagcaacagagtgagaccctatctttaaaaagaaaagtcagccgggcgtggt

SEQ ID NO: 906 - DNA, 1155 bp, Artificial sequence
  DNA replication origin
tggggggtggggcggaaggcacctcctatactccgactccgcctgggccacccgcccctcaccctcggcctgacccagcctctccgtgcctcccctagccgcctcctcccagcagtcccccaggagcgagctgcgagatgccccaaatcggacccctccccagttggaaaaaaaacgactcctgacctttcccagcctcctcggtccgctgaggaacccgcagccccgggcctcgagcagactgctgggactgcggggcggccgggcgcggggccagaggcggggcggggcgggtcgggtcgggggcctttaagaggcgcggtcgccgggaccgacacagacgcggacagcgccgggactcgccgccccgggactcgcgcagcccgcagcgctccggctcctcctctcgcgaccgccctccgcagcgatggacggagacggtgacccaggtagccgacgcctggaccgctcgctgcggcggggaggggagatggggtcggcgggcgagcgctgcacagaggggcgtcagagagcgaggggacccggagacctggcgcggcaaactttcacgccagcgaagccctagaggcggtctccaaagagcacgtctctctgctatcttggtctggcgggaggccttgagaggcgactggcaaggagagagaactcctgggtcccatttagccaggaagtagcaccagaggacccccacattcccgcctcccagcttcctgagggtctgtctggcgggggcctgggatgcgtctgggagggaggctgcgagccttttctttcatcagctcttccagctctgggccttgggccgtctgaatccccgtgggttccttggggtcccaggcctggcctcacctattcctgccttcctcctgagctcccttgtctggaggggctgcccctccccggggtggtgagatgcccagtggggacccgactagcggtgagggagcgttgggggcagctttggctggtgctcagggccttcccaggctgcccagtcatcctctctggcacccaagacccctcacccccatccctccaactccctgcggggcctgcaggggttgcctgctgagtcaggatggaaacaagacctgcctgcagacagccctcactctttcctcatcaggtccagct

SEQ ID NO: 907 - DNA, 1648 bp, Artificial sequence
  DNA replication origin
gcagctcgctcctgggggactgctgggaggaggcggctaggggaggcacggagaggctgggtcaggccgagggtgaggggcgggtggcccaggcggagtcggagtataggaggtgccttccgccccaccccccacaccaggtaattttcctacgacgcggtgggggtgcgtccctggcccagcgctgcgcggggcggggcgcggggcgcgggggcggggcctggcgggccggggcggggcctcgctttccaggcaagcgcaggtccaggcggtgcagcttgggcggcccaacggatcgtgccgcggcggccgagcgcaggtgaccggcaggagggggcgcggggggcgctggggagggggcgcggctgggcgggggctgccgggaaggctcctgggttccgggtcgcgccgcagttgccgagggaggcctggcaccgaccaggcccaggccgccgagcttgcccgggctgcgctgcgcggctgcgaacgggggctggggtcgccatcgatgtacaggggtccgagcccagactttggggggcattttaaggcacagcgtgggaaggggaggctgcaggcgcgctggcggacttggggctggcggagcccagccgcggggctgggggtgggagtgggggtggggagataggaagggcccttccctgtcgcccaccctcttgccactcccacctaggcaggagatcatgtcctctgagatcttgagaaggtggctggagccctttggacctccgcgggaggcagtgataattagcctcctcctcccatcatgttctgaggatgggagagaggatggtgacggcaccggaggcctggggtgctctgcccggctgcgcattatatccccattaaagactggcctactgaaaaaggctggccctggaatcaaagaagatccgggcttcttccccctctgcccttatttttgaccttgggcagtgccttccacctctattgtgagaggccagagaaaaaaatcagagctcaccttttattaaagtacctgatgtgtcccaagctccttggaccgccccagtgacccctggaggtaaggcatccatttacagagaaggaaacaggctgggagaggcaccatgctctcccgagataaatggcagagcagggatgaggcctgcagcatagcttttcaacagctacaggagggtgtccagaagccacaagccatggctgtggggaacatcaacgagctgcccgagaacatcctgctggagctgttcacgcacgtgcccgcccgccagctgctgctgaactgccgcctggtctgcagcctctggcgggacctcatcgacctcgtgaccctctggaaacgcaagtgcctgcgagagggcttcatcactgaggactgggaccagcccgtggccgactggaagatcttctacttcttacggagcctgcacaggaacctcctgcacaacccgtgcgctgaaggtggggtacaggccgggtctggcatgcctccagtacacagtcatgacaccaggaacatgtattgagcacttagtatgagccgggtactttggatggtttaacacctttacttctctcacagtaacccaaagaggtagctactgttagtgcacacatttttcagatgggcaaactgaggcca

SEQ ID NO: 908 - DNA, 1964 bp, Artificial sequence
  DNA replication origin
tgtggctgggcctccagaggaagccagcagtactggacggctgccaggtgagatacctgcagctcactgaggggtctgcccatgaacctgtttctgtgatggcctggttcctgaaatgccaacccctctgtaccttagacagaagccatgccattgtaccatctgcaggtccaggcaggaccacctaaagtctgcctttccttccagaaaccacagggcacaggttagactgggcacaccttttatttggctgcatgcagtagggcgaagtcaggagaacactgctatctttccagcaggacaagaggcaagttccaagggtggttggctgggagacagaggtcttgggaatggcagttctaggggtggggtgggggcttggaatgctctccaagccagagggggccgggcctggatttgggaggtggacaggggattcttcaaaccccctaccatactcatccagggctcatgtgtccagctgtcagagcaggtcccaatcctgctccccatctaccctgggacatcctgtacaggattccctcagtcctctgggaacctaaccccacctggtacccatctagcttctggggctccactgacagtgaggacagtccacacccgacctggaccccaccccaccctgggtctgtccatctcagtcccggcctgagcctctgggccaaagccacctcttctgagcaggcaggcagagcgagagactgggagcagcagacaggggcagagcacggcccatgagcccaccctccacttcccagattggtcagagttacatggtcacctccctgcacctgcaccatcagggcagctgcaagcttgccagttgtcttgcctgtccctgctccgagggtcaaagaacacaggtagaatggtcccaggaggggaagggagagacagatccaggctggcctccaagctcgactttctgaggggcccaggggaacatgctgcacctcccacatctcaggtgctccgtctctgaaaggggcacacgcaggcttccccggccatcattcaggtcaagacctttcggggagagctggcccgaccccagcatgcgagggctgcccacactgagaggctccacaaagaagaggctgctaggggcaagggttagaggtctggggacacctggcctccacctccccttcccaagcccagcccttttctgacagcagttgtttaccagtcagggttcagcagatgggggctcagggggtgtcagggcagcgggggcccgatggtgatgctgctgttggtgaccctcgggccgtaccagccggcccagtaatgagtgtccacgccgccgtgctgaaaccagatgtagcggacgccgggcgggtagttggagaatgtgtgggagacctggcagggcaggtagaggggggagaaaggtcaagggagctgactcaggctgggtgtggcggctcacaccgggaatcccagtactttgggaggctgaggtgggagggttgtttgagcccaggagtttgcaactagtcttgtcgcaaaccagagagtgagataccatctctacaagaaaaaaaaaattagccaggcatggtggtgtgtgcctgtagttctaggcaggctgaggcaggagtacaggctaaagtaggagttcaagactgcagtgagctgtgatcacgtcactgcgctccagcctgggcaacagagtgagaccgtgtctctaaaaaacaaaagaaataaaagatgagccttaacaaaaagggtgggagcagactctgagtgtggcactgcctgaggggggcaggggaacaaggaaggggctgagttcttggtgccagctagaaatcagtggagttctagtttgaactctgtgatttgggacagaccaattcctttctctgtgcttcagtttcctcatctataaaatggagcaaaatcctgctggtctactccacaggattatcattcagccc

SEQ ID NO: 909 - DNA, 965 bp, Artificial sequence
  DNA replication origin
gagccgcccgccgcctggagggggagacagcttcaggacacgcaggccgcagcgagggcccgggccctggggatcccaggttcgtcttcccgcggcgagggttaggggccgggccgagagggacggcagcggggtccggggcgggggtggggaccgagcgcagcgcgtgacgcggcggcggggcccagcgacaacgaagccgaggccgtaggctcgggccgacctggagctccgccgctgcgcccaggtcgcgtccccggggggacgggcggcgggcgagtggggagccggggtctccggcgcctgggcgttcacggagcctgcgggcgctggtccgggcggccaggggtggggggcgcgggcggctgggcccggacttcgactgggggcctggccccggggccacccaggcggaggctctgcggccgcctccaccccggccacatcccgaggccggcgccgggttcggagaactgtcaagggacctccaggcccccacacgcctgcgagatccggcgcttgccttgccccagccacagtttctgtttccgagaaaccggtgaagtaacaatgccactagagcttgctgggagggtgggtgcggagaaggcgagcacgagacgccgggccgggcagttggggaccccgatcggtgtgagagggcttcctagggctggcatggacttccccaccacaaaatgcccagggccgggggggggaaggggcgcaagaaaatgcggactgggccagagaccagacttcggtcaccacggtgggaagctattggtgcctagatgcctctagcttggagcccagtgacttttatttcgtctagagtctagacagtgcctttagaagctgccagcatttatttatttatttatttatggcagagtcttgctctgtcacccaggctggagtgcagtggcatgatcacggctcactgcagcctcgacttcctgggc

SEQ ID NO: 910 - DNA, 2163 bp, Artificial sequence
  DNA replication origin
gctcagatgtggctgccgttagtccccagctgcgcgctcccccgtccctccccagccctcttccggcgcctgctaaagcgagagaaatgccctcgggggaagatatgtagcgatccaatggaacgtggagatcaacgttgtgttttcttcgcgcccacccgaagttgaagggaggtggcgcggcgggtctcagcccctcccggacgccgaggcccggcccccgcccctcggagacccgcccccgcatgcggaaccgccctctgcgaggcccggtttgggccgtgcgggaatgggcgtggcctgggcggggcgggcgctaggacccaccggagcgccgtgaacgtcaccgagcggcgccgaggccccgggttgagcgggaggcgcgatcggtccggtcggtggctccccgcggcggggccgggcccgatctcgggcgggaaccgagcgcagagccggtactgggggaggggagagggggcgggattcccgccgggagggatccggcgtagcagggggcggagtcttattccaaccccgcttcgctttccgcatgtcccgctttgcgctcccggccctgggcatcccgctgtttccctctgcgtccgcggccctgcccttttcgggggcacagctgtggtctttccaccccgcgagacagcggggcgagggggcgcgggcggccagtggatagaggctgatgcccccaagcacggacgccagcgtgggggtggaggttcttccagctgccctgagcctgtgcgaagcgggaggtccttccccagttcccacagactgtggggagggaagagacggtggaagcgagcgggttctgggctcctgggtctctggaactaccctctgcccttgccccaacactcaggtagcgggaaggatgaccacgctcacacgacaagacctcaactttggccaaggtagggaggctggacctgcgggcccgggggcgggggcgtctgggccggcgggcttcctcgagcgcgccaccggcttgtgcccccctgcagtggtggccgatgtgctctgcgagttcctggaggtggctgtgcatctcatcctctacgtgcgcgaggtctaccccgtgggcatcttccagaaacgcaagaagtacaacgtgccggtccaggtgaggcacgtcccagaaccacagagtgggtacagggtggacttttaaaaattctttggtcgggcgccgtggctcacgcctgtaatcctagcactttgggaggccgaggcgggcggatcacctgaggtcaggagttcgagaccagcctgacaaacatggtgaaaccccgtctctactaaaaatacaaaaattagccgggcgtggtggccaaggcctgtaatcccagctactcaggaggctgaggcaggagaatcccttgaacccaggaggcggaggttgcagtgagccgaaattgtgccactgcattccagcctgggtgacaagagcgaaactccgtctcaaaaaaaaaaaaaaaaaaaaaaaaaaacctcttccacttcgggccaagccacctcattccgcagggccctgcccatgccttccaatgccttccagttccaaagtggtgatgcctacccacccctcagaagagagttccccttgccagaagttagggaccaggcctgataagagttaccccgggggtggccgggcatggtggctcacacctgtaatcccagcactttgggaggctgaggcgggcgaatcacaaggtcaggagttcaagaaaccagcctgaccaacatgatgagatcctgtctctactaaaaatacaaaaattagcctggtgtggtggtacgcgcctgtaatcccagttactagggaggctgaggcaggagactcgcttgaacccgggatgcagaggttgaagtaagcccagatcgtgccactgcactccagcctgggcgacagagcaagactatgtctccaaaaaaaaaagttaccctgggggcatggtggcactttgaaggagctcgtgaagctggtgaaccttggtgtgaggagggtatttccaaaaacctccaaatcttctccctaccatttatcctaaactcaatgggttaaggctaaaaggcagacaaagcagtgtgcatcgcactgtagctccagtccctagaagtgcctgtctctggaaggcactc

SEQ ID NO: 911 - DNA, 1369 bp, Artificial sequence
  DNA replication origin
gaccacagctgtgcccccgaaaagggcagggccgcggacgcagagggaaacagcgggatgcccagggccgggagcgcaaagcgggacatgcggaaagcgaagcggggttggaataagactccgccccctgctacgccggatccctcccggcgggaatcccgccccctctcccctcccccagtaccggctctgcgctcggttcccgcccgagatcgggcccggccccgccgcggggagccaccgaccggaccgatcgcgcctcccgctcaacccggggcctcggcgccgctcggtgacgttcacggcgctccggtgggtcctagcgcccgccccgcccaggccacgcccattcccgcacggcccaaaccgggcctcgcagagggcggttccgcatgcgggggcgggtctccgaggggcgggggccgggcctcggcgtccgggaggggctgagacccgccgcgccacctcccttcaacttcgggtgggcgcgaagaaaacacaacgttgatctccacgttccattggatcgctacatatcttcccccgagggcatttctctcgctttagcaggcgccggaagagggctggggagggacgggggagcgcgcagctggggactaacggcagccacatctgagctagcccgagtcaccatccctgcagctgcccacgcaaaagcgaatcctctggctcgggggcgggaacaggggaggacaggattgtaccggttgtcaaggcccgggtgaaattttaaaaataaaaaaaagagggcgtgcaccggcgtcgcccctgctccgcccccaccgggtacctaaatgcagcctggcctgaccgcccaagaggatgaaccctccccgccctacgcttcataacaatagctgacctttttggagctccagccgagtgctgggcactgggctaagtgtgtccgtggattatctcagtcctgggagtaactccatgaggcagttactgtgactgttctctttatacagataagtcaagcgaggtgcagaagggtgaataacctgcccgagtctcccagctggtggggtgggcgatggccgaggtgcctcctgccactacattttactgctcccaagtcccccaggggcgtggactcggtctggaagtcctgtaagggccctcagagatgatattactaaaataataaaaaataatgactaacatcgagcacttcttatgtgtcaaacactgattccgttaattctctcattaaccctagcagctaagtctccattttatagccccactttacagatggttaaacaggcccagaaacgttctctaattcgccaaaatcacacagtgggaatacaaacccagctctgatgcctcttctgacacc

SEQ ID NO: 912 - DNA, 1999 bp, Artificial sequence
  DNA replication origin
aacggggccggcgtggagaggtgcgcgggcagccggaggatgtgcccgggctgagcgggactggaaggaagggggagtgggcgggcaggagggaagggggcgggagcgcggggaggggacagaggaggggcggcgggtggcgggctcgactgcccccagccgaggggcagccccggggccgggcccggcgcgcacccggccagcgcgccctcgccagctgcgctctgagttctgggccagctccccagaggcctaggcgccgccgccgcgagggcgcggggcagacaaaggaggcagacaaaggcgggcgcagcccagcagccgtgcgggcaccgggcgaggcaggcccactcctcccggtgcgtaagagccgcctcggcgcggcccagggcgcgtgggacgggaggggctccggcagttgtggcgcctctggagcggccccgcgcagggcgggcgacaaagggccgcggcgggcggtcctcggtggaccccaacaatggagcgaggctgcgcgctcagctgcggccgcgtctgtcagggcaggggcccggggccacaaaaggattattccgcctagactgtcaaaagggacggaagaaatgcccagggcgggggaggcgggacggggaacggcggggcctttgtagccgcagaaagtgcgcagagtgggcaggcggggttctccgagaggtcgctcctggatgtaggggtacaaagggtcttcaaagtgctaccagctcacctggggcgctgacggcgcacctgtgccctctttcccggtagggaagggagaaagacaaccgccccaatacacacacacacaaacacacacacacacacactcacacgcggcgcggctctcgccacgccccgtccaaagccggcctgaagcttctcagaccggcccaacccggacaaagccagcgctggggccggctcatccatcaccgcgcggggcgccgtgtcctgacgaccctgggagtctgagaatgctgggttatgggtcccgtgcctcccataactcacgacggggtcggtggggccacggacgctgcaaagatcaaagagcgatggggccggactcccatatgtgggaagcagcgctcccacctggcgccctgagctcgccaggtggcttccatttcgactgttttctttctccagcgtgtggcaaattatgactttgaggttttagaacacagttctgccgtcaggctaaatgtctgtgttcctcttctgatgccgtcccctatgacctcgagcaagtcgcctgacctctgagctcatgattatacctaaatttcagtgttctaggcgtgaatgcagtgccctgtgtaaggagataacgtttctaaggtctggcccataggaaatgctcctgtaaaattagctgccattgttaccgtgatattattagcttggtgggcaccaggatggattgatgagaacactgaactgtttattcactgaaaggtttgagtcatccatcccataaatacctattgaacacctactatgtgccggcaccggaggtacagtagtaaacaacatggacaagaatccctgcccccatggagctcagattctagtgaaggagacagaagataagtgaacaaataaatataaatgatgtcaggtggtgattagtgctatgaagaaaagtaaagcacattacagacaaagcatgaagggacgaggtgttgttttacataaagttattaggaaaggcctctttgctggggcagttcttttggcaaagaaaaggaggtaatgagccacgtggttgtggggagaagacttgcaagcagaagagccactgcaaaggtcctggagcgggagtgtgcttggtgtgtttggtggagaagagtcagtctggaacagagtgaggtgacatcagacagggagctgggataggaccatgttgttacaggaaaggggtcctgacccagacctcaggagagggttcttggatctcgcacaagaaataattcagggcgag

SEQ ID NO: 913 - DNA, 1303 bp, Artificial sequence
  DNA replication origin
gatggtatgaagggccgggttcaccaaagtagggcctgtctgccaggtcggatttcgagcaggagcctggatgggggatgtcgtggggatatccagccgttcttgcctctaaagagaaaggttccagttgccagccctggctgtggctgaaataagaactcagccaggggagcctggaacctgccagctgggaggtttccctcttctgaagttgccctcattaagacactcaggccacgtcactgccagactcctggagtggtgtgtcacatgttatgaccacctagacagtggtcagggggcttgggcaagcacacagcaggtccaggagccagcaagacaatcccctcagaggaaaggaagtggcctgtgagctggtgccgctattaaaggcatcaagccaagactgaggttcagaattgggggtgagtcaccggacgccttctgatgggtgatcagttgttggcaacaccagctcagccacactgatctcattttgaaaaaaagtgacccattggccctgattgttttagctgattttaggacaagcaaagaggaggagagagagaaagagaagagtgcttgcaagggtgtggacgcctgtatgggcacgaggaggtgaaggtgacaggaagtgtgatgggggaagaggctgtggtggtggggttactctgaagtgtctctaagccttgactttgagatccatttctgtggagccccctgtccccaccccatcccaggtctgtagactcccctcccctcccctcccttcctccacagggtgtgtgaaccagcaccaagcggcaccccacaatttccacacacatccctataggtagggactagcaccatccctgttttgtgacaggaacactgaggctcagagaggtgcattcctttgtccgagatcactcccagagccccagtgtacccgactccagatgcatagtactgaaccggttccagacaccagtgtgtcactgggctgggaggtgggcagcgtggagggagcatatagggcaggggagaccaccgggcggagaggatggcccagggagcacccagctgaggaaagcaagaaagacttggcgggaaaccccagccctctctcatctcataccccggccccgaaggcggctgagacccttgacgagcggacggagaaaagccaaaagccggcggtggggagcaggagggacagagcgggagaccacaggcgaaagaccagcgccgtcgggggagccaggctgagtaccttcctgggcacagatgggacggcgcggggccaccggcggtgctggtt

SEQ ID NO: 914 - DNA, 930 bp, Artificial sequence
  DNA replication origin
ttttagagcccctggctagactggaagctcataaaggactctgcacattcccttctgctctgcggcccctccagggccctgcacataataggcgctggtagccatggatcagaacagaagtggattgagcacaatccaatttatgtatcaggccgggcacagttgctcatgcctgtaatcccagcactttgggaggccaaggtgggaggatcacctgaggtcaggagttcgaggccagcctggccagcatggtgaagccccgcctctactaaaaatacaaaaattagacgtgcatgatggcatgcgcctgtaatcccaactactcaggaggctgaggcaggagaattgcttgaaacttggaggcggaagttgcagtgagccaagattgtgcctctgcactccaacctgggcgacagagagagactcaaaagaaaaaaaaaaaaaagaattcatacctcggcagaagatcataaataaatccccaggatgtgtgagtgtgtgtgtgtgagcatctggcatgtatgtgtgagcatgacgtgtgtgtggagcatgtgtgagcatgtgtgtgtgtgtactatgatcatgtgtaagcgtgaatatgtatgggtgtgtaggtgtgtagtgagtgtgtgggagtgttagcatgtgtgtgtgtggagcatgtgtgagtgcatgtgtgtgtatactatgatcatgtgagagcatgaatatgtgtgggtgtgtaggtatgtatgtgtgttgtgagtgtgtaggagtgttagcatgtgtgtgtgaacatgtgtgagcgtgtgtgtgatgatgtgtaagcgtgaatgtgtgggtgtgtaggtgtgtgtgttgtcagtgtatgtgtgggagtgttagcatgtgcgtgagcgtgtgtgtgtgctgtgagcatgtgagtgtgaatatgtatgggtatgggtgtgt

SEQ ID NO: 915 - DNA, 716 bp, Artificial sequence
  DNA replication origin
gccaatggctgggcctgccatccacaccgctcccatgctgttcctcgtcctcctgctgcccctggagctgagcctggcaggcgcccttgcacctgggacccctgcccggaacctccctgagaatcacattgacctcccaggcccagcgctgtggacgcctcaggccagccaccaccgccggcggggcccgggcaagaaggagtggggcccaggcctgcccagccaggcccaggatggggctgtggtcaccgccaccaggcaggcctccaggctgccagaggctgaggggctgctgcctgagcagagtcctgcaggcctgctgcaggacaaggacctgctcctgggactggcattgccctaccccgagaaggagaaccgacctccaggttgggagaggaccaggaaacgcagcagggagcacaagagacgcagggacaggttgaggctgcaccaaggtagctggagggctgcgaggggtggggatgggggtgattcctgccatggactgaggggagcaggagaggatgcaggcaagggtcaggggcatgaggtccagaggagaggaggggtctcactgaagccagagggacctggtaaggggaggaggctgggagaggcctggggttggggcatgggaagaggagagggatgtgttgcaatacaatctgtcttatcgcggcccggtgccgtggctcacgcttgtaatcccagcactt

SEQ ID NO: 916 - DNA, 2090 bp, Artificial sequence
  DNA replication origin
ggatgtcctgcccctggggttcctaccagtgggagccgggggcatgtcctgcagccccaagaggcataggtggtggggacatggctgggggtatcccagatgtgcgggggctccaggaggcagctctaggtgcgggaaggagccaagaggaggcacgcctggtggaggaagcccagaccccagtgatgctgccacaggattcggggcagagggtggaggaggttcccggggacctgatggccaagagaatgtcgctcatcttgcacgtgcaaaagttgccctgggaccacgtgccttgcctgcggaggacccggcaaaacctgtaccaggacgtcggtggccacgcccacggctcagggctgggcggggccaagcgcggggcagcacgctctgctctccgacgtcccctcccgcccgcgacctgccgacctgcggggatcgttagcggtcccagcccccgtctagattcaaatccgactgggtgaaggaggacccgaggaggacccacgcacgtgagggcagatccatgagggcaggaaactgacctcagactcttttggtggcaagaggagggaggctgtgagcccccttaagtggacaggggtgggggtggagtgggaggggggagtctgagggagacggacgaggagcggagaaatggaccgaagagctccggcgtgaggggcaggggtgcaggaaggtctcctgtggattgagcggcctcaagtcaacttgggcaagaggggatggtggggtgttcttggttaggagtctgcgctgtggagccagccctggggtgctccctctgaggccttgggtgggacaggcccttctaagctcctgtcctcatttctaaaacagggaacctaagtcccagggctgcagtgcagattaaatggcaggacgcctgctgaaggctgcaaggtgcctagcacggttgtcatttattcaatgtgcatttacaagcccctgctgggggtcaggcattgttctatgggctgcaaatccagcagggaaacaaacaaacaaaaaaaaccagcctgccctcgtgtggctcctaggccactggagggagaaatacactaatttcttcactatgttaggtggccgcaagtgcagggcaaagagagtgaggagaggccaggttgctgcagttggagagacagtgggcagggagggctcactgtgatgtgggaggcaagacttgaaggcagaggggacagcagcacagaggcgctgaggtgaggtcgtgtgtgccatttggaggagcagccagggggctggtgtgtgtggaggacagtgggcaaggggaagaggaattggggaggaccataactggcagccagattttaaagactttgcggggctgggtgtggtggctcacgcctgtaatcccagcactttgggaggccgaggcgggccaatcacctgaggtcaggagttcgagaccatcctggccatcatggtgaaaccctgtctctaccaaaaaatagaaaaattagtctggcgtggtggcatgtgcctgtggttccagcttgttagaggctgaggtgggaggatcccttgagcccagggaggcaggcggaggttgcagtgagccgggatcacgccattgtaccagcctgggtggcaaagtgagactccggctcaaaaaaaaaaaaaaaaaggttttgcagcctaaggtatcttgcagctattgagctctgctattgcagctggaaagcagacagtctgtaaacaaatgggctttgtttcaatataactttattcacataatagaccactggcccaggcagtaatttgctaacctctggcctacagccttgaaggctcacggggcattgagggggctggagagcttctgtggcattagagttgaggcagggcatgatttgatttcagtgtttacaggatcaccctgccgccgcatgaagaggaggctgtcgggcgtgaggacgaggcagaataagggtgaccagttgggaggtggcaggtgagggccactccgcccagtgctccaggggtcagatcctggatgcgtgtgggaggcagagcctgtcagagcagccactggtgtgagggagaagggg

SEQ ID NO: 917 - DNA, 901 bp, Artificial sequence
  DNA replication origin
cccttaatcctgagcaggggctccctcctgcccaccccctagggtcaggggacagctgctccccctggtctcaagatggcagggcacagaggggtgaccccagtctccctcgaggggtgggaagcagggggaccgacccctgttcctcagccttctccaacacagcctggggagtctcacccaagcagaaaggagaggagggggccccgagggagcgggtccacagggaggaggagaggacagctttccatctgtcagacacagtcccagcgagcagtgcgtcgaaggtagaggcccggggaggctggaggtggggtagggggtaggaggtgttgctccagggcagggaggcttggcagggggtgccctgtcctgcctgctgcttggcctgagaactgtgttatgtactcttgctttcccagaacaaggcacaaaacatcacagccccagagtctgaggcaatctggtgaggccatggctgggtggggacaggggttggagttgggggacacgtgctcaggactccgctcccatttgcctgtccaaatggagatgagggcctgatggagaggaggcagggtttcaaggaagaggaacttactacctgtccctgctgggggatgaagggagcctccagggccccagggacaagaacgaagggactgatgctcatgggtttgggacactgagtgtcctgaacttccaaggccaccctgggttttcggcaaacagggcaatctctggctggatgcggtggctcatgcctgtaatctcaacacttcgggagactgaggcaggcagattgcttgagctcaggggttcaagaccagcctgagcaacatggcaaaaccccgtctctacaaaaaaaattacaaaaatcagccgggtggggtggtgcatg

SEQ ID NO: 918 - DNA, 804 bp, Artificial sequence
  DNA replication origin
gcttagtatcccagtgcttggcgcagactagttgttcagtaagtggcagaggcttattttgagagagtggcagcacctggccctttggcgctcagtgaatgttggctatcaccgtgtgccaaactctggggataccccaggcaggacaccggtcctgtctcagggaactggggaaagagaaaggagacaggccttttcacccacagttacaacccagggtgctatgggagtccagctgataacggataaatcgtgggagttggcttacaaatatggcacatgcgtggcatatactaggaatgcaataagtctttgaaaatcagagggtttacaggtggttcagcttcctcctactctaggttctgttccagcaagcaattaacgaggtgcgcccttaaacgctggaggaaagccaactggctgctcttgctgttactcctcccccccgcccccgttcctcactccccacagccatccccactgagaatctggagtttgaggtcagaatgaaagagagcagccctagagggagaaagctttggcccagggttcttagtctggaatcaactccttgtctttggatgtatccccgtgtagtctgtgcacctgtgtgtgtatttcaggggaagggagcagtgcatttaatcagattgtcaaaagagtctaagaccccaaatggttaggtacacagggttagtggtggacagtctgaaagaaatgaacctcacctgggctttcctctgttgtgccatgtcaccacacacccattcactactgtgtgtttgcccattgctgtgcaagtgt

SEQ ID NO: 919 - DNA, 1117 bp, Artificial sequence
  DNA replication origin
gcttggtgggggagaggaggtgttgacacgtggaggacacacatataaggcattcttgggtgacttcgtcatcactggaccctatctctcaaaattccagcgaaatctgctcttccctttaaggagtgaaagaagggtcagcattccagaagttcctggtcatacccaggcttttaatgaattgccactggggaatcagcatcccgttgctgtaaggactataagatggcggattgtgagagcatagggaaaggtctcggaggtctcttgtccttgctccacgcaggtctttctggcctgaaaatcccgttgaagagagcagctcttgagagtttgctccaagttccctcggggtgatcagcaccacggacagcggccagggcgcccccgaggacccgcaggcaggcagggtgcacagcggcgagcaggtgctgcgctacgtgcgggccagggaactcgcgcggggaggggagaggcgccgcgggtggcggggtcttggccggggctgttttcgctgtgagtcaccccgtgctccccgcgctcacgtcggtcctcggaaagccggggtcctccctgccttttccagcaacggtggggtggggaggcaggaagaaagcgccaacctaggacacctggacatttgcaggaaaggaagaagcgggagacggggacttgtctgtgtctccagcgcgttcctgccccccggcccgacccggcccatttctatacaaggtcggctctgcccggtctccacctcccacgtcgcaggcgcggaggggctcattcccgggccctgatctcagaggcccggaatgtggctgataaatcagagataaccctgcatggcagggcaggcccgacactcagctccaggataaaaggccacggtgtcccgaggagccaggaggagcaccccgcaggctgagggcaggtgggaagcaaacccggacgcatcgcagcagcagcagcagcagcagaagcagcagcagcagcctccgcagtccctccagagacatggatccccagacagcaccttcccgggcgctcctgctcctgctcttcttgcatctggctttcctgggaggtcgttcccacccgctgggcagccccggttcag

SEQ ID NO: 920 - DNA, 1469 bp, Artificial sequence
  DNA replication origin
aacccagcctggccttgggctgggccaccaccctgtcttcccacacctggtcagcctgctccttcccaaatcaagcatgcagtgtcgcccaggtaaggagagagcctccagcgccacctgctggagatgcagtagcagcgccctccaggggaccctgcatccccagagtgtctggggagagtggggtgagatataatgggggaaagggagggggtcagtgcgtctcgcaggcaattatctcctatacttgaccccatgaacaggggtgagtattcctccttctagaacctcagaaagttgcagctggaaggctcaaagcagggaactgatcttgcaaggatggatgggtggatgggtgggtgggtgggtggatggatgaatgggtgggtgagtggatggatggatggatgaatggatggatggatggatggatggatggatggatggatgggtgggtgggtggatggatgggtgggtggatggatgggtggatgggtggatggatgggtgggtggatgggtgggtaggtggatggatgaatgggtgggtgagaggatgaatggatggatgggtggatggatggatgggtggatgggtgggtggatggatggatgggtggatgggtggttggatgggtgggtaggtggatggatgaatgggtgggtgggtggatgaatggatggatggatgggtggatgggtgggtggatggatggatggatggatgggtgggtaggtggatggatgaatgggtgggtgagcggatgaatggatggctggatgaaagcatggataaagtcatgtcttctgccaagggccagaccaggagaaaggctagctagtttctgtgcatggaaacaaggcagttttctgcacaatgtcctggctgtttgaattcagagaggaagaacagaggagccatctggggcctcatgtcatccctattttccatcagcctgaaattttcataccaatcattatcattagcaagcgttgcaactataaacctccccatcttccttctcccagccttgctgctggcacagcctccagtgatggggagacagggacagggctcaccctgaccccaggaacctggcaggggcaggcagttcatctctggggaggaaaagaggcaatccagggctgtccccacagctcacatagatcaagtgtgtgctatgtgtcaaatcctctgcccagcacactgaaggcatggtctcattgaccctggccgtgacctatgagggaggaagggagggaagtttatacccagagtgaggcatcagtgtcccccagtcctctgtctgcatagaagtccccaggacccagtcctgctgacaccttctcctgtgtaggccacgaagggagaagcatcagggacggatgaagcaagccacttccagagccagactgccttatctggtgatcactgatcagcagtgtgatctcgagcaagttactcacctt

SEQ ID NO: 921 - DNA, 858 bp, Artificial sequence
  DNA replication origin
gagctgagatcgcgccacggcactccagcctgggcgacagagcgaggctccgtctcaaaaaaaaaaaaaaagaaagaaaagaaaagaaaaaaaaggaaagtaaatctattgcggagtcacatcgtgcactcccaagccaaggtgaaatgatgtaaattcccgaggcctgtgtttggcccgctctatccacctggatggcagagcactaaccgggctagtgggtgggagatggcctggggacagggagtggggacgcagaggcgggataggaagccgccttctccgggatgcccagacgcctaagcctggcagaggcaaagcgctagacggagcaccgcaaaagcccccatggagcggtgggagggccgaggcccagccgggcacagttcaggccagagacttgaattctgccggcgatttagaagtcgcctggggtgggtggggggggctgtatcgaatttctggagccgctgggccatgggagggctgactcggggatctgggttgccctggtccatgttctggctcccagtgccctggggcgatggaagctggcggggtcagggcgtggggaggggcggggagcggctggtcggggctgcgcttgagaaagggggtgtctctggaagggccatgcgcttgggcgggcagggacaacgtcccgcacctgtgctggccccggcttctccttagagtgcctctggctgcctccctgctctcacctcggggttttcctttttgcgccatccccggagggcaagactctgtccaagctgagacaaacgtggggggcggtggggagactaggtcttctcctgcccctaccccagatcgcagagcccatcttggctgccggga

SEQ ID NO: 922 - DNA, 968 bp, Artificial sequence
  DNA replication origin
ttttttttttttacttttatttgcttttttgttttttgcttttttgagacagggtcttgctctgttgccccagctagagtgcaatgacacaatcatagttcactgcagcctcaaactcctgggctcaagggattctcccatctcagcctcccaagtagctgggactacaggcacaagccaccacacccagcttgcagttatttttaaatgctgagatttatgatgcgggaggaggggagggctgccctggaaagccagaagaccatcaattcacacctggatttccagctttcccttcctcgtcgtctcctctcaaaacacttgtgcgcgctctctggtgtcaagggctgagggcatcaggacacccattcctgcccaggcctcaccccccctcgccaggctagccccttccgagacacagggctgagagcaaggccaaggcctcgggtttcgaccagatggcggcttcctaccttactcctgaagaggggcttggctccaggcccacagtactcgttgtagatgagcttgaagaggaagaggtggaagagggtgattagggaggccacgctgaaccagaagaggaagggcagcccggggtcctgctgggccatgtgctcatcatgggccaggatggccttgaggtgcagcgtgtgccgcaggtcctgcaggtgtgtgaggtcggtggagatgtagagcagtggcgtgatgggctgtgtcaccatgaccgagaaggtgtggcccgtgggcgccgaggtcagctccactggctcgtccaggcagcctgccttgcaggcatagatcttgacaggctggccacgggactccacggacacgtgtaggtagggcttgccctcggcatccgccagcacggccaggttgatatggtcgttcttgtagcggatgccatgcaatgcatagctgttgtgcagcacgtcggggtcggcctggaactggaggtggttctc

SEQ ID NO: 923 - DNA, 1285 bp, Artificial sequence
  DNA replication origin
tgggtcctggagtgccggccctggtggccaacggcttcctggccctggacgtggctgccaatcggctgtgggtgactcccggggagcgggagcccgccgtggcgccggactttgtgcccttcgtgcagctgcgcccgctgagcgcgctggctgaagctggagaggcggtgctgctgctgcgggaggggcttctgcgccgcgtgcgttgcctgcagctggggtccccaggtcctggccccgtggccgccggccccgggcccgcctccgtctctggccttgccgcggggtccggccgcgactgcgtgctgctgcaagaggactttctggcgcacaggggccgaccccacgtctacctgcagcgcatccagctcaacaaccccacggagcgcgtggccgcgctgcagactgtggggcccactgccggcccagcccccaaggccttcaccagtaccctggagaaggtcggagaccatcagttcctcctctactcaggccggtccccgcctacgcccactgggttggtgcacctggtggtggtggccgccaagaagctggtgaaccgcctccaagtggctcccaagacgcagctggatgagacggtgctgtgggtggtgcacgtctctggccccattaacccccaggtgctcaaaagcaaagcagccaaggagctcaaggcgctgcaggacttggcacggaaggaaatgctggagctcttggacatgccagcggcggagctgcttcaagaccaccagctcctctgggctcagctcttcagcccaggtgagtcctggccagcgcttggtccaccctagatatgtccctcccaagtctgcagaggtgacactgaaggtgatggtggggtggttgaaacttgggcttggcgtttcaccagtggttgaatctgctcaactgcttagtgtctgtgcgacctttggattcgtcgcctaatctctctgggcctgtatttaataacaataacgcctacctcagaaggtttttatgagactgtagtggacaattgagtgtaaaggtcaattctttctgttacttgttttggtagatggggcctgatgtgagcagagtgaagtgttttagagtcagtttgcagaggtgaaaccagcaggtggatcccctgattctttgctcagcaccgcagtcggcctggtgacagacgtgggcttcttgacataacccctgctaggctgaggtgcgtcctggcagttgtggctgcaactggttcacagggaggttggagaatcccttttagcaggttgagatgctcccg

SEQ ID NO: 924 - DNA, 1352 bp, Artificial sequence
  DNA replication origin
gccgattggcagccacgtccagggccaggaagccgttggccaccagggccggcactccaggacccagcggtaccacctcaccgcgctcccgcaggccgcgccaggcgcgggtggccgcctccaggcaggcagacggctcggcggcgcccggctcaccgcgggaccagggcagcaggtgcaggccgcccgccgcccgccgcgcgccggaccccccaaaccacagaagcagcagcaggaggccaagcaggcagaggaggcggcgggcccagctgctcgacagcagtcccggcagccccttgagccgctgctgcagccacatcgggccgccaggcgcgggcaagggtgcgagggcggccgccgggcccgccgcccagcccaccggcccggccgcccgcgcctcactgcccggcccggaccgcggcgcccaccccggcccccgccgcaaccgccgcagcagccgccacccctgcttcctccttcttctcggtggcctccagccgtcaaacgacgccggcggtcaagcgtcgccgtgtcttttacgacagatggaaaacgggagggcggagggaggagagagagcaggccggagagaagggggcggagccacggcgagggcgggacaaaagctgccgggggcgggaccactcgttcccaggccggaagagtgaagtccagtggagttaagtgcaggggtctggggaggactggaagcatccaattcactcgtgaaaaaaacatcgagccagccaaaccgaacacgtgttgggcccctttgctactgatggattcaacagccccaaaatttaaaaacatacacacacacacacacaacaactttgtttctgtaaaaatgaccatcctctcgccgcgcgcggtggctcacgcctgtaatcccagcactttgggaggccaaggcgggcggatcacgaggtcagcagtttgagaccagcctgaccaacatggtgaaaccccatctctactaaaaatacaaaaactagccgggcgtggtggcgcatgcctgtaatccctgctcctcaggaggctgaggtaggagaactgcttgaacccgtgaggcggaggttgcaggcttgcagtgagccgagatcacgccactgcactccagcctgggcgacagagtgagactctgtctcaaaaaaaaaaaaaaaaaaaaagactatcctcactgcaaaaaaacacttggaacaatacgaaaaagtggaggaaaaaaaaaggagagagaagaagaggaagaaagaagaagaaaggaaaagggaggaggaggggaaggggaaccaccagaggccaggagtggtggctcacgtctgtaattccagcactttaggaggctgaga

SEQ ID NO: 925 - DNA, 1433 bp, Artificial sequence
  DNA replication origin
accacctcctatgggcacacctgtgcacccagacaacacacacgcacccagtgggtgcaggtgaacacctgcctctgtcaagcacgtacaccttcactcccactttgaggggtctgctctgagcatccctggcagttgagccaatggtgaggaccctagcctgcttcccacttcccacaggactggaaggagaagtacatccaccagaactacaccaaagccctggcagggaagctggtggagacggtaagggccatggacaccctcttggaccagccttgcctgctgcagggggcagggcacagaagggaaactgcttgccctggggagtgggggacagcaggatgggagttgggggtggagggatgggagttggggggcggcaggatgggagttgggggtggcgggatgggaatgggggggcggcgggatgggagtggggggtggtgggatgggggtggggggaggcaggatggcccctctacctgttggcactttcctgctggaggctgtgggagtctgcagggcctctctacctggcccaggcaggaaggaggaaaacatcctggatgtgatggccactgtggcccaccatgcctggaccacttcggggagtggctgcttctctccactcactaatgtctgcttcccccgagcctggggcctctgccccctccctccctccatgcccatgtttctgtctgaccttggcgctggtagctctgtgacctcggctgggaaagtctgtctctgggctctgcctcctcctccccactcagtctctccaggattgacaaggccctgctccccggggacactgggagggctccctggcttgggtgtgtggccctgaagaggaaggaggattctgtggtgccactgtggacccccttgactgagtccctgccctccccagccctgcccggatgtctattggttccccatcttcacggaggtggcctgtgatgagctggtggaggagatggagcactttggccagtggtctctgggcaacaacaaggtgggaccctgatgcctgggctggggccgcagggaggctgcctctccatcagtgccgctcactgtctggggtcttctggcaagctggcctggccaccctttctgggactcttgacataggggtgctggcatgggtatctgcaggcaggtaggagtagagggattgagaaacctgagatggagtttggtccctgagctgctgttgccaccgtgtggctttgagttgccttgaccgtaagctactaggttttcagttcctggtttgctattggaatggcttagcttggttccctagacttcccccaggtggagctggggaggaaagggccaaggtgggatgaggggcattaggaagggctgtcgggtccaagttcatcagacagcaggagcaggtggcctgctgagggtgctag

SEQ ID NO: 926 - DNA, 959 bp, Artificial sequence
  DNA replication origin
ctgtttctaacgggcaggtaacaagagcttgttggcctgctggctctcgcttttaagtgtagtcacatgcttgagagccagcttcctccgagggacattccaaaggccatgcccaggtgcccatataagggaggaatattgatgcatctggggcagaggtgaccggtggacatagcgggaggggagatgggggtgttgttgacttggtcatttcctttcatggcgctggctgtgggggaaattcactgggcaggcccttgtcatgcttcagatgctttcggagtgttctcagggctggggcctgtcagcctcatagttcccaggagtgtgcagaggggctaaacacccgtctgtgttccagccagctgaagcacctgtctggtgcgagttctagacaggacagtggtgggatctcactcagttgctcctgtatggagtaatttgttggccatctgcctgttaagggcactgggaaaaagcagtgcagtgatccaaaggtctgctcacgtagcaaacatttgtgcacctgctgggtgctggggtcagatagtgtggccctcatgaggcagatgacacagacaggtgagctgtacagttaccttatggtgaggtgagagctgagatgggagaagtgcagggtgctggggcacacagagaaggggtccggggtcctgactcaggttagaggggtggtcagagaaggcttcctgggggcagtgctgtctaagctagaccggaggccaagtgagaatgagccacgctgccccaaggcagtgtagtgtgtcagttcttcagagagtggggagggggtttgggcagcagggaatggagccagagggccgaggaagctggtgagtttggggatatggtgagggagaccgtgaggcagcgggtggcaagaggccaacagggccagggcagggagggcctcaagaagtgacatagaggccgggcgcggt

SEQ ID NO: 927 - DNA, 771 bp, Artificial sequence
  DNA replication origin
acctcttcccggccgccatcccatctaggaagtggggagcgcctctgccccaccaccccgtctgggatgtgaggagcgcctctgcccagccacaaccccgtctaggaggtgaggagcgtctctgcccggcagccgccccgtctgagaagtgaggagcccctccgccaggcagccgcccccgtctgggaagtaagcgtctccgcctagcagccgccccgtccgggaggtggggggtcagtccccgcccggccagccgccccgtccgggagggaggtggggggggtcagcccccgcccggccagccaccccgtccgggagggaggtgggggcgcctccgcccggccgccgccccatccgggaggtggggggcgcctctgcccaaccaccccttctgggaagtgaggagcccctctgcccggccaccaccccgtctgggaggtgtacccaacagctcattgagaacgggccatggtgacgatggcggttttgtcgaatagaaaagggggaaatgtggggaaaagatagagaaatcagattgttgctgtgtctgtgtagaaagaagtagacataggagactccattttgttctgtactaagaaaaattcttctgccttgggatgctgttgatctatgaccttacccccaacctggtgctctctgaaacatgtgctgtgtccactcagggttaaatggattaagggcggtgcaaggtgtgctttgttaaacagatgcttgaaggcagcatgcttgtcaagagtcatcaccactccc

SEQ ID NO: 928 - DNA, 966 bp, Artificial sequence
  DNA replication origin
tctgatttctctatcttttccccacatttcccccttttctattcgacaaaaccgccatcgtcaccatggcccgttctcaatgagctgttgggtacacctcccagacggggtggtggccgggcagaggggctcctcacttcccagaaggggtggttgggcagaggcgccccccacctcccggatggggcggcggccgggcggaggcgcccccacctccctcccggacggggtggctggccgggcgggggctgaccccccccacctccctcccggacggggcggctggccgggcggggactgaccccccacctcccggacggggcggctgctaggcggagacgcttacttcccagacgggggcggctgcctggcggaggggctcctcacttctcagacggggcggctgccgggcagagacgctcctcacctcctagacggggttgtggctgggcagaggcgctcctcacatcccagacggggtggtggggcagaggcgctccccacttcctagatgggatggcggccgggaagaggtgctcctcacttcccagagtgggcagccgggcagaggggctcctcacatcccagacgatgggcggccaggcagagacgctcctcacttctcagacggggtggcggccgggcagaggctgcaatctcggcactttgggaggccaaggcaggcggctgggaggtggaggttgtagcgagctgagatcatgccactgcctgggcaacattgagcactgagtgaacgagactccatctgcaatcccggcacctcgggaggccgaggctggcagatcactgccggttaggagctggagaccagcgcggccaacacagcgaaaccccatctccaccaaaaaaatacgaaaaccagtcaggcgtggcggcgcgcgcctgcagtcgcaggcactgggcaggttgaggcaggagaatcaggcagggaggttgcagtgagca

SEQ ID NO: 929 - DNA, 1566 bp, Artificial sequence
  DNA replication origin
cagtttcctcatctgtagaatggggattagaatgctacctactgggccaggcaccgtggctcacacctataatgccaacactttgggaggccaaggtgggtggattgcttgagcccaggagctcgagaccggcttgggcaacatagggagacccctgtctctacaaaagaatttaaaaaattagccaggtgtggtggcacgaacctgtgtttccagccacttgggaggctgaggcaggaggatcacttgagcccaggagttggaagctgcagcgagccacggtcgagctactgcactccagcctgggtgacagagcaagaccctgtctcaaaaaacaaaacaaaacaaaacaaaacaacaacaacaaaaaaaaaaaacccagaaaaccaagaatgttacctactgcgttggggtttttagaggatgaaattagatgatcaggagatgaaatgcgtagtgcagtactgggcctaataaatgtgcaacattattatttgaaaccagggcctgtgtgcatattggcagatgaggatcctgtctctagaggggtccaccccacctggccagatacacagtaaggaatgagccgagtgggagcaggggaagtttcaggtgattcttccatgaaatgatggacacagggcgctggcccagtgtctgtgctggagtagggccctgcgggcctccaagcctgggagggtcagaggcctgaaaaccactcaggcccttccaggaatctttggttgggaactctagggactctgtaggacacggtgtgggaacagagcaggatgggggcagttacccacacctccattccactcctcctgcagggtaagacctgctcaagtcccgccttcaggccggattgcccaaacctttcctcagtctccctgcctggccacgtggactccccatccccgtaaaaccctcctgtggttctcctgaccgggatgggtgggttccttgggacttcttgccttgctgggctgggcccttctgaaggacaagggtctcccaggtgctgatcctccctgtgggcctcagctgccaaaggactctgaggacactgacatttgggagagccggcatcttctctgggtccctgatgtgggttcagaggtggccccccaaagatatgtccacctagaacttcagagtatatgaccttatttggaataagggtctatgcagatataatttttttctttttttttttttttttttgagatagtctcaccctatcacccgctagggctgtataacagaacaccacagactgcagggcttaagcaacataaatttcttttctttttttctttctgttttttgtttgtttgtttttggttgcccaagctggagcgcagtggcacgctctcggctcactgcaacctgcgcctcccgggttcaagtgattctcctgcctcagcctcccgagcaactgggactacagacgcacaccaccatacctggctaattttttgtattttcagtagagacagggtttcaccatgttggctaggatagtcttgaactcctgaccttaagtgatccacccgccttggc

SEQ ID NO: 930 - DNA, 1140 bp, Artificial sequence
  DNA replication origin
cctggcccatgttccctaattctttgtgtctctgtggtgtgtccttttctgtatcttataagacacctattattggatttaaagccctccctaaaccaggatgctctcattttgagatcattaccctaccttttttttttttttttttttccgatttctcaatcttttccccacctttcccccctttccattccacaaaaccgccattgtcatcatggcccgttctcaatgagctgttgggtacacctcccagacggggtggtggcctggcagaggggctcctcacttcccagtaggggcggccgggcagaggcgcccctcacctcccggacggggcggctggccgggcggggggctgaccccccacctccctcccggacggggcggctggcctggctgggggctgacccccccacctctctcccggacggggtggctgccgggcggagaggctcctcacttcccagacggggtggctgccgggcggaggggctcctcacttctcagacggggcggctgccgggtggagggtctcctcacttctcagacggagcggccgggcagagatgctcctcacctcccagacggggtcgcagccgggcagaggcgctcctcacatcccagccggggcggcagggcagaggcgctccccacatctcagacgatgggcggccgggcagagacgctcctcacttcctagatgggatggcggccgggcagagacgctcctcactttccagactgggcagccaggcagaggggctcctcacatcccagacgatgggcggccaggcagagacgctcctcacttcccagacggggtggcggccgggcagaggctgcaatctcggcactttgggaggccaaggcaggcggctgggaggtggaggttttagcgagccgagatcacgccactgcactccagcctgggcaccattgagcactgagtgaacgagactccgtctgcaatcccggcacctcgggaggccgaggctggcggatcactcgcgattaggagctggagacgggcccggccaacacagcgaaaccccgtctccaccaaaaaaatacgaaaaccagtcaggcgtggcggcgcgcgcctgcaatcgcaggcactcggcaggctgaggcaggagaatc

SEQ ID NO: 931 - DNA, 1014 bp, Artificial sequence
  DNA replication origin
aggccaccaccccgtctgggaggtgtacccaacagctcattgagaacgggccatgatgacaatggcggttttgtggaatggaaaggggggaaaggtggggaaaagattgagaaatcggaaaaaaaaaaaaaaaaaaaaggtagggtaatgatctcaaaatgagagcatcctggtttagggagggctttaaatccaataataggtgtcttataagatacagaaaaggacacaccacagagacacaaagaattagggaacatgggccaggagtggtggctcacacctgtaatcccagcactttgggaggctgaggtgggcggatcacctgaggtcaggagtttgagtccagcctggccaacatggtaaaaccccgtctctactaaaaatacaaaaaaaaaaaaaattagccaggtggtgcgtgcctgtaatcccagctactcgggaggctgaggcaggagaatcacttgaacccgggtggcagaggttgcagtgagccgagatcacgccactgcactccagcctgggcaacagagcaaggcgctatctcactgaaaaaaaaaaaaaagcaagcagggaacatgatgacaggggcagagaggactgatgaaggatggcaggcagctgctagaagccaggggagaggcataggagggacagattttctgtcagagcttccagaaggaagcaaccctgccaacaccttgatcttggacttccggtctccagaactagaggctagaagtttcaattgttttaatcataccgtttgtgagcagttactacagtggccctaagaaatgaacacagactgggcgtggtacctcatgcctgtaatcctagcactctgggaggccgaggtgggtggatcacttgaggtcaggagtttgagaccagtctggctaacatggtgaaaccccgtctctactgaaaatacaaaaattagccggtgtaatggcatgcacctgaaatctcacttactcgggaggctggggcacgagagtcgcttgaacctgg

SEQ ID NO: 932 - DNA, 793 bp, Artificial sequence
  DNA replication origin
ttctacaggcatatgggtaccaggccccaggataggtgctggggttcatcagtgaacaaggcttttgccctcagagggatgggagccactaggagtttggatcagggaggggcatggcctgacttgggttgtccgggtcactccggctgttgcgtgggaaatagatggcccaggaaaagagggggaggacgagagaggggagagcaggcaggggcaactgaagcatccagggtggagggggtggaggctggggccaggagggagctgtgggagagggaaggggccggattaggggtgaactttggggatgggatttactgaaggattggatgtgtgcgagaatgaggcaaaggtttggcctgggaaactggaagagtgacgttgccttcagctggggtgaggagggactactgagggagggcaggggctttaggagcacctgtcagcggccacctacccagactgtggtggggtggatgcagtggtcagtgagggcttcctggcagaggtgaggctcaagctgagacctgaaagaaggagcaggctggggagaaaggggtgagaacagcaaagagtgggactgctgggaagagctcgctgagggtggctgggggaactttcagtggccccaggggggcccgagggttactgacagggaaaggagagagctccagatgaggccagaggggcaggacgggtccaggctgcttactcagcaccaacagggagggaggcttggccatgagcagcccaatcagaccgagaaatggagacgggtaataaatagccacag

SEQ ID NO: 933 - DNA, 756 bp, Artificial sequence
  DNA replication origin
ccagcctgaataacagtcagcctggccctgactctaaaaaaaaagaaaaagaaaaaaaaaaagaacctgttgatagcatctacggatatgggtagacactgacccctggggtcccttccttgtactccagggaccagcacttgaccatccaggcctgtgtggtctgtcaagcagacctggtgcccagcaagacctggggctctgccaggaccactcctatgagacctgctcttgctgcagtgtctaatgtgcctataggagcaagaacgcttggacgaaaggaacacatccctgcttaagaggcaacgccatggattaatattcatttaaacaaacacttctacaggcatatgggtaccaggccccaggataggtgctggggttcatcagtgaacaaggcttttgccctcagagggatgggagccactaggagtttggatcagggaggggcatggcctgacttgggttgtccgggtcactccggctgttgcgtgggaaatagatggcccaggaaaagagggggaggacgagagaggggagagcaggcaggggcaactgaagcatccagggtggagggggtggaggctggggccaggagggagctgtgggagagggaaggggccggattaggggtgaactttggggatgggatttactgaaggattggatgtgtgcgagaatgaggcaaaggtttggcctgggaaactggaagagtgacgttgccttcagctggggtgaggagggactactgaggga

SEQ ID NO: 934 - DNA, 1146 bp, Artificial sequence
  DNA replication origin
gatgataaattggtggatggatggatggatggatggatgcataggtggatggatggatggatggatggatggatggatggatggatggatgcataagtggatggatggatggatggatggatggatggatggatggatggatgcataggtggatggatggatggatggatggatggatggatggatggatggatgcataagtggatggatggatggatggatggatggatgcataagtggatggatggatggatggatggatgggtgagcagcaggtgagtgggtaaatgggtgggtggatgggtggatggatggatgcatagatggatggatggatggatgcataggtggatggatggatggatggatggatggatggatgcataagtggatggatggatggatggatggatggatggatggatggatggatggatgcataggtggatggatggatggatggatggatggatggatggatggatgcataagtggatggatggatgcataagtggatggatggatggatggatggatggatggatggatggatgggtgagcagcaggtgagtgggtaaatgggtgggtggatgggtggatggatggatgcatagatggatggatggatggatgcataggtggatggatggatggatggatgagcagcaggtgagtgggtaaatgggtgggtggattggtagatggatggactgaatgttggaggaactgatggatggtatagatcattttatttccctgaggcctgaccctttagagttttcttcctggaggaggcggctggcactctctcctaacagaaatgattcaagcctcctcgtactatgttctcatttgctggtgaatgattttcccttccagtgcttccccatcccctgggttttctctttgctccttttattccacattccgtgtgtctgtgttgagcatctgctgggtgggccacaggtcaagggttcttttgactgattttgtttggttttcagatgtgaaagccaaggctcagaaataggcaggcagtcctaggtgctctaattaagggtgggccagttattttccctgagcccagaatagcctaaggatactctggcttctgtgtctaccttgatctgtcctgcgaggtaccag

SEQ ID NO: 935 - DNA, 1727 bp, Artificial sequence
  DNA replication origin
ctagtgtgccttttcctgagtcatctctgcacgtgtttgcccccttttttcttcgctgcttgtagctaagtgttcctggaaccaatttgatacgggagaactaaggctgaaacctcggaggaacaaccacttttgaagtgacttcgcggcgtgcgttgggtgcggactaggtggccgcggcgggagtgtgctggagcctgaagtccacgcgcgcggctgagaaccgccgggaccgcacgtgggcgccgcgcgcttcccccgcttcccaggtgggcgccggccgccaggccacctcacgtccggccccggggatgcgcgtcctcctcgccgcgctgggactgctgttcctgggggcgctacgagccttcccacaggtaagcgggtgacgggcgcctggggaggtgccggcggtccagagcccggacagtgtggggtgcgtgggacgcaagggaggacactcctcaccccgttccctgcccagctggagtgagggggcgcgggtgacaagcaggaacaccggaatatgctagcacccacaggtgggaggctggctgaagggctagtggtggggggcgcctccttctcaccccgcgatggctgggactgattcattcattcagtgtgaattggactgagagcactgccatacgcgggaggcgctctttagcccgcctacctgcgggcccgtcggggtcctgggcagatcaggtgaggccgtgggagtagtgggcaggccagatggggcctcccttagccatgggaggttggtcgtccgcgctctaccctgttgtgtgcgcggtcccgtttgcccccttcctaagctggccactggctggagggtcaaggaaaggagggagagttggctgtgggtgagagtggggtgagggtgcaggaccaccgggattagcttccccaatccgcgtccggcaaagcaacgctgtggattgaattcgctggagcacgtggtgggcatttgcccctggaagaaggtcagtggtggggctgaagtctatggtgggttgcctcagaattgagtttggggactgctttaggaaaactgagcacttaccagtggccagcgccaaattaatcactgtggggagaatgcaaagtaaccaggcgtgtttcacggagcccaggggctgctggagagagaggccctcagctgacccaggaccccggtggacccctgcatagaaccatagtaggtgcgagtggatgcctgctgaatgatacagagggaaaggaaggagcaggctgttagtccagcggtgggtcacggtgggggagagggaagacccagttcccctttaatcctacaggaagagaggactccatgctatggatcaattctagtcatctgaaccttaggcagtgggaggagagtggcagagtgggctttaggcaggagggaggaactatgcagcaaaggaggaactatgccctcttccatttccaatgggcaatgtgaggtattccccctttccccccaagagggcagaggggacaaagccctggctagagacaccctgtcccagctctgcaagccctcacctgggggaaggtaagagtttggagtgccaaggtcttggggagatgaagggaaggaagagatgtgagaggtgcttggggggctttgctggtttggtttggcagctgaagctcatgtgcttcctttctgtagagtgaagccccctccactttttttaatgttagagacagggtct

SEQ ID NO: 936 - DNA, 1546 bp, Artificial sequence
  DNA replication origin
gtgtcctaatttccttttataaaggcaccagtcatattggatttgggcctatcctagtgaacttattttaactcaattgcctttttaaagaccccatctccgaataaggtcacactctgagattctggggttaagacttcaacataggaattggttgggggatacgggcatgactcagcccataacagtctacttctgggggaattcaaactatggcacccccttttcttacaagcaggtagaaaagtctcaaattggtataatatttgtcttattgagattgagtttgtgagggcaagatgatagctgcccccccatggttgaatctctagggtctgatagaatgcaaatacacaaaacatattgggtgaatcaatgaatgaatgagtgggtggatgggtgggtaaatggatgagtgggtgggtgggtggatggatggatgagtgagtgcataggtgaatggataaacgagtaggtggatgagtgggtgggtggatggatgagtgggtgggtggatggatgagtgggtacgtggatggatgagtgggtgggtggatggatggatggatgggggaagggtggatgggtgggtagatgggtagatggatggatgggtggaggaacagtggatgagtgagtagatgggtggatgggtagacggatgggtggatggatggatggatggatggggaaaggtggatgggtggatagatggatgggttagggaagagtggatgagtgggtagatggttggatgggtagatagatggatggggaaaggtggatgggtggatagatgggtggatagatggatgggttagggaagagtggatgagtgggtagatggttggatgggtagatagatggatggggaaaggtggatgggtggatagatgggtggatagatggatgggttagggaagagtggatgagtgggtagatggatggatgggtagatggatgggtagatagatggatggggaaaggtggatgggtgggtagatgggtagatagatgaatgggttagggaacagtaggtgagtgggtagatgggtggatgggtagatggatggatggatggatggatggggaagggtggatgggcaggtagataggtggatagatggatgggttagggaagagtggatgagtgggtagatgggtggatgggtagatggatgtgtagatgaacggatggatggatgggtggatgcagaccagtggtataggggcttttcctcactgtaagctcccattcttcctcctttgaaactatcttagcacagataccctctggagtatcagatatatataagcatgtcacctcccctactagtgggttgctcccaggaggcaggaccttgtccttctctcccccaaataaccctatatccaacagagctcaataaatgcttgctgcattgggccagtcctatttccttctactgccttccatttcctcccttccacgcccacatacttcctcctatacaaaagaaccctggtggatttttcaggcttaaagaaaagactaggatgtacctgc

SEQ ID NO: 937 - DNA, 1469 bp, Artificial sequence
  DNA replication origin
caaaacccggggtgaccaacttgtccagcttgcccgggaacattcctggttctactactgcaagtcccgtgtcctgggagtcccctcggtccgggcaaactcagccagcctgtcacatcctgcagaaaacccggccccctcaataggtctcggcagcccatgattgagacagcctggctcaggccgtgaatttcggggcttactgctcacagccggtctcctgcctgcagcgtgcatggctgtgctgtgagcacatggtgggagcttggacggagggccggtcctcgccacagtctgatgtgggggcttctggtgtggccttctgatagaggggacatgggggctcaggttcagtggcccgaggagctggggagtggggaagcctggcctccgcccagctgatggtgtctggctcagggtgggctggctcccagctgttctgcgctggactctggaggccagaatggggaagctcaagagggaacttgagagctggggtggggtgggggtgcagggacccctgcctttctgggtaatgcagttatacccctcggattcaggaaccccaaaaaggttctcgagtcccccacaccctcaaccctattgcatgacgctggttcttctattctggttttgaacacccccaggaaagagagaagtgcgccaaacggcagcaagaggagaaggcccagagtgcgggacaggctatgggctgggcgcccccacagaccccaaaacagagcagggcctcagcactccccacacctccatcaggcttgtgggctcccagccctaggagccctatagagggctgggcaaaagatgggggccgggggtggtgagagaggagaccccaggaggggagagaaggcccagagggggatgggcagagaagatgagaggcgggtggggtcaggtgggagggaagtgagggtgggggtgctggattagggagaaggagccacagctggggacaggctggtcccctcacattcctcagggaaatgggcaggagtccccaggaaatctggaattaactggattcaaagcggtggaattggctgctctgggtgaggaagcagctcccactgagctcggaagtgaaagaggggtctggaaacttcagagccggccatgaggggtctgccccgctctggctctgcccccatcacaggctgcctactccccaggctgtgggggtggcttccaagggctgcatggatttcctgccccctccccagagctccagagtccagggaattcatcttggctatgtggggagggcaggtgaggaagttggggggaaaggggttcttcccttgcctggttcccaggggaagagggacgatgtacagaccccagtgtgacccctcttgggaactggatgggaagggggaacgctaccctgggctggcattaggaggacaagggggttgcctgtgtcttgggtgcccaagagaacctccaag

SEQ ID NO: 938 - DNA, 804 bp, Artificial sequence
  DNA replication origin
gggggacagccgccccgcatgtccacccggctggtgcgcagccttcgggtgcccgggccgcgctctcccggggcgctgtcacgggctgggaggctgggagtcccagtcgccgccccccatccgcatcagacacgcgcgcctctggggacccgctggggactccgggcccggcacacgtgcgctcggggcacaactctggcccccgaagcccctcttacccgcgtcgtgacaggggcgcaccctggttcctccgcgagcgcaggccggggcatttggggctgagcagcgggtcctgggcagacccccgctagacccgggacccctcttccctcaccccggcgactgccgcgacagcccttccctcccacgcggtggagaaggggctgtgccggggcgctgccccactgcccacgccgggcaccctcttcaaaagacttccttttcctctgggcgacggttttccgatttcttagaaataccagggtcctgtgtctgaagagcaggaccaggtgtgtgtcaggtccactgagggcacagctggagggcgagctgcctgtctgcttcctccgatgcgtccgggggctactgcagagtctgttttctgcggcctctggggacagggcaagcgagggaggtctgggctggtaatcgagcaaggcaaatgaagtctccgggggccgcaggaaaatggagacagcagaaaccctagggctcctattcaatatgaacgtcactcccacagtagcaacgggcgtacaagggactgtgcaccctttgcctgtttttgactgtctcctggtctgg

SEQ ID NO: 939 - DNA, 1231 bp, Artificial sequence
  DNA replication origin
cagtgcctggtgtttagtgggtgttcagaaatcaggagctatggcgatgctactgatgagaaggaagaggaacccacagttctggccctgaagacaccttccatccactgagggggataaaacacagctagattaaaaagcagaatgcaatctgtcctcaaagggaacaaaagggcctgggagttcgaagagaagatcaaatccaactgagaatgcggaaaggctttcctggagagaatggcatttgcagaaggccttgaaggataggggtaagaagtgtcccttggagaggggatggcacggacaatgctttttgcacaatgacacacacgatgaccatcatcagttctacagaggcgggggagcacatgtgcagggaggcgcgaggaagagttcaggtaccttactctggcctgggatctccaggggagtttctgcctcaaccattgggagccacaggaggctccccaggcaaacagagaggtgcctcatgcttgagaagggtctctctgccaaggatcagcgggagagggggcagggccgggagaccagctacaaggctgcggcaatagtccgggtggggtcgtggggagcagggatgagggaggagggaatatgagctgccgcaggagctggtcaggaagggaaggaagtgggagggaacctcctccagctactccaggactgcagcctggtgtcctgctgagccctgtgcctgacacccctctcccatccaggggctcacatgaccccagagttcacccaggcaggcccaagctcagcggcaggaagaccccctctgaggccagagtatatggcatgaccccaaagtcaagctggggaccacggtcgtccccattcacactcggccctagagtggggactctcctgacccaaaggccacccaggacttactctggggcagttctccaggacccactcctgacacccactgtcggtgagtcaattctagtctgacagcccccatcttccacccacaagaactggactctctggcctcagatcaacaagtcaccttatgtcaccacagaagccagtgccacctcccaccttcctcctcggtcaagatgtcagatgggggcagatgggccatgtgtccatcaggggcggctctgaggaaggatgaacgcccaccttccccgcagcctcagggcacaggggccgaaggcaggagaggccccctttggaggaagagttccccccagaccct

SEQ ID NO: 940 - DNA, 931 bp, Artificial sequence
  DNA replication origin
tgtggggacagtggatgagcccagggtcctggcagaaggctcgcccagctgagacctctggcccttgtttcctcaggccaacatgcaaaagtcttctgtaccaagacctcggacaccgtgtgtgactcctgtgaggacagcacatacacccagctctggaactgggttcccgagtgcttgagctgtggctcccgctgtagctctggtgagtaggttcagagaaaaagggggcccttacacccctgcctccaacttcccccggcaactccagcctctttggcttccagctgtctggagttaccccaggctggttgttggaagtggcacaggtgcagctgtttacccctaccactggcattttcctcctctgtctcaccaaagcctcttcacagccccacggggcaggcggtgggagaactgtgcccacgtgagggttgaggaggtggtgcgtgggagagtggtgcgcatgctcgtgctgcgaggagcaggactgcggggaggagcgaaactgctgggaagagcgggactgcggggaagagcgggacttcggggaggagcggcactgcggggaggagcaggactgcagggaggagcgggactgtggggaggagcgggacttcggggaggagcgggactgcgggggacgagcgcgactgcgggggacgagcaggactgcggagagtagcgggactgcggagagtagcgggactgcggagagtagcaggactgccggtcctgcccctggactctggccggtgttgtgtgtgccccatgctgaggcggtccgccagcctcctggagatccgctgtctgagagtgctgggctgtctgggagggcagcgtgggtgtggcggaggcaggcgtgaccgtttgccgccctctcgctgctctagaccaggtggaaactcaagcctgcactcgggaacagaac

SEQ ID NO: 941 - DNA, 1230 bp, Artificial sequence
  DNA replication origin
aagagcgggactgcggggaagagcgggacttcggggaggagcggcactgcggggaggagcaggactgcagggaggagcgggactgtggggaggagcgggacttcggggaggagcgggactgcgggggacgagcgcgactgcgggggacgagcaggactgcggagagtagcgggactgcggagagtagcgggactgcggagagtagcaggactgccggtcctgcccctggactctggccggtgttgtgtgtgccccatgctgaggcggtccgccagcctcctggagatccgctgtctgagagtgctgggctgtctgggagggcagcgtgggtgtggcggaggcaggcgtgaccgtttgccgccctctcgctgctctagaccaggtggaaactcaagcctgcactcgggaacagaaccgcatctgcacctgcaggcccggctggtactgcgcgctgagcaagcaggaggggtgccggctgtgcgcgccgctgcgcaagtgccgcccgggcttcggcgtggccagaccaggtacggggtggggctcaggtccttggggacgcccatgggcctctcctttgtagacatccttgcagtgtcacgggcatcaacccattaattagtccagcagggagcactgttagtggtggccaggtgcctgctacccatccgtctgtccacctgtccaccgttcattcttcctgccagcactcccgattaggcacctcttatgtactggaaccaggagacccagagatggatcagaccaagccctaagctaggaaagttatgtgatgctgcaagatgaactcacataactctacagcccaatcccgtgcatgtgtgtacaggaatctgtgtgtgtgcatgtgtgtacaggcatctgtgtgtgtgtgtgtgtgtgtgtgtgtgtgtaaggggtggaggtgcagacagagctccttgggcccctcagacctctcctagggctctagtgccaaggcccagctgtcccgcagagtgtctgagtggttgacaagttcggattgttccctgaaggaactgaaacatcagacgtggtgtgcaagccctgtgccccggggacgttctccaacacgacttcatccacggatatttgcaggccccaccagatgtgagtagctgagtcctttggttctggaggagcagggaggggctgtccctgggtgactgtgggtccaggacacagagcagctcaccaaccaccattgtccag

SEQ ID NO: 942 - DNA, 939 bp, Artificial sequence
  DNA replication origin
acgcctgaattttaaatgttggtaatcaattcacttaaaaacatcaccaccaccaccaccaccaccaccaacaaaaaaacccgtagacttgtccctgttacaggcactaggaacacagcagggaacaatcaaaaagtccctggtctggccaggcaaggtggctcatgcctgtaatctcagtacttcaggaggccaaggcaggaggatcacttgagcccaggagttcgagactagcctgggcaacatagcaagacccccgtctctactaaaaaaataaaaaaaaaagtccctaccctcctgggttcagagtctggttggggaccccaggagctgggggctctggagatcaggagatcacagaaatggggagggacccagagagtggtggataggatgggaagtaaatgtctctagagagggaggccagggggtggagggcgcttcgtggaggaggtggcctttgagctaaggcctgagcactagagaagagctctctaggctgagggagcggcctgtgcaaaggcccaggggacctgaagggctcaaggggctgtagcagggggtggggaatgtggctggaaggaaccccatcaaggtcttggagcggcaggagagggggtgggagaaggcaggctccagatcagacagggcctggtaggctgtagcaaggactgtgggtttttgagcccccaaggaagtgatctgccaggttcaagggccagctctggctgctgatgggaaacagatttcagaggggtggggttgaagccaggacagatggaggctgttcacacccatccagatgggagtgaggggaggcttccatagcccaccatgcagcagcagggcagggtgacccttgcagaagtcatcttttgtttttgtttgtttttgagatggagtttggctctttcgcccaggctggagtgaagtgacgtg

SEQ ID NO: 943 - DNA, 941 bp, Artificial sequence
  DNA replication origin
cccagaggttcagccagccccgagcctgtgcttggggagctcgcggggactcggacgcaggggtccccggaggtggcgggcttggggcccggggggagcagacgcccagggttaccccgaggggctcagaccgaggccggacgacggggcccccaggctcctagcatcgctctccccagggtgggcccgggcccccatgtccaggcggagccctagcggcggcccgcgggtccgcgccggccctgcagttcccgaccctggccccgcccggcacggagccgctcggcccctacctgtcggtgtcccgggccgcccgccccagcccggcgctgcgcggcgtttcctccccgccgctcctcaatggcgcaggcccgcggcgctcaggccggccccgacccgaccaatcgagcggccgacgcgccggtgcctggccagccgagcgccgagttatcgaggaggcgccccctggcgccggcggccgctcctgcagtggtgcgggcccctccagggttcgcggacactggggcttattttataggtggggaaattgagtcccaggggagggcagggccacaaatgactctggttcagacagcatgggaacccaggattcttcccacctacaaccaccctgccttccatccaagcgaaaggtgcgattggccgtccgtctggcccactcacccacagtccgttccccacttcgcagccacaggggcctgttaattcagaccctgcccttccctgcttaaaacggcgtccccaccgtacttcagttaaaacccacctccttacagagctgccaccaaggtcccactggatctggtcccttcccatttcagccactttttccccggccgactctgcctcagcatccttcagtttctgccccaggaactgtacctttgccgttgtctctacctaggacccttctcctcaga

SEQ ID NO: 944 - DNA, 1192 bp, Artificial sequence
  DNA replication origin
gcgctcggctggccaggcaccggcgcgtcggccgctcgattggtcgggtcggggccggcctgagcgccgcgggcctgcgccattgaggagcggcggggaggaaacgccgcgcagcgccgggctggggcgggcggcccgggacaccgacaggtaggggccgagcggctccgtgccgggcggggccagggtcgggaactgcagggccggcgcggacccgcgggccgccgctagggctccgcctggacatgggggcccgggcccaccctggggagagcgatgctaggagcctgggggccccgtcgtccggcctcggtctgagcccctcggggtaaccctgggcgtctgctccccccgggccccaagcccgccacctccggggacccctgcgtccgagtccccgcgagctccccaagcacaggctcggggctggctgaacctctgggaaccccgacgtccgtgtcctggggagcccgagcccccgctggaccccggcacactttccggggtcccagcagcctggcgccctggaattggggggtgtcagtccgcgcctgtccgcctgagccttggtctcaatgcaggaccccagtgtgcgagccccccacattacgccgaagagtggggtgtcagttctctagaatgccttagccacctcccttaatcagccacccgaggtcacactctcgcgtggagacatcaggcctaaaacctctctttaccttttgccccccagggtcacgccctggcccagccactcctcctaggtgtgggatgccagacatcaggcctaaaacctctctttaccttttaccccccagggtcacgccctggcccagccactcctcctaggtatgggatcccggcgccgttccctccaggttttacttgggtggtggggtctctgtcccctggagggggctgagggttccgagagctgggggcgggagggttgtgggagcgtcgccttccgggcagtgccgttcctgtggggccaccggtcgcacagccgtccccgccccggttttggagctccctggcgccggcagcgttcagccctggccgcctcggggagggacgcccaggtccggttgccagtccttcctattcccggtctggccgctcctcaggggaggggcctggctcaaggtcatgcccggctgtctgcccgcccgtgggctcagcactgatccct

SEQ ID NO: 945 - DNA, 1659 bp, Artificial sequence
  DNA replication origin
ggtggtcttccagctaggtcaacagtgctggggtgaccacttgtctccacggacatctgaaccctataccttcctgcaagcccccagctttaagctttcctctctgtcaatttgcccagcaattcttagggcccccagaggcacctctccctacctcagccagaccccaggggactgtgcaagccccatggtcctgttacacataggagccagaggtaggatggggttaggcagggaccagaacagaagaatggaaaccaatgattacctaccccttgggctgacatactcagaaaccagatggatggatgggtgcagtggggctgatgggtgggtgggtgggtgggtggatgaatggatagatgaatggaattgggcaggtgagtaaatggatggatggatgcatgaatgcatggatggatgaagtggagtaggtgagtggatggttggatagatggagtagggtagatgagggatgggtggggggatggatggatgcatggatggatggacagatggagtggagtgggtgagtgcatggatggatgcatgaatggatggagtagggtaggtgagtggatgaatgggtggatggatggatggacagatgaatggatggatggatggagtggggtatgtgagggagggatggatggatggatggatggatggatggatggatggatggataagtaggtgagtggatggatgggtggatggatgggtggatggagtggggtgggtgagggatggatgggtggatggatggatggatggatggatggataagtaggtgagtggatgggtggatggatggatggataagtaggtgagtggatggatggatggatggatggatggataagtaggtgagtggatggatggatggatggatggggtggggtgggtgaggaatggatgggtgggtggatggatggatggatggatggatggatgaatggagtagggtaggtgagtggatagactaatggaatggggtaagtgaggggatgggtagatggagttgggtaggtgagtgggtacagtggggtaggtgagggatggatagatggatggatgggtggagaagcaggtgagtggatggatggatggagtggggtgggtgagtggatggatggagtagggtaggtgtgtggatgaatgcatggatggatggatggagtgggataggtgagtggacagattaatggaatggggtaggtgagtggatgagtggatggagttgggtaggtgagtgggtacagtgggtacagtggggtaggtgagggatggatagatggatggatgggtggagaagtaggtgagtggatggatggatggagtggggtgggtaagtggatggatggatgcatggatggatggagtagggtagatgagggagggagggatggatggatggatggatggatggatggatggagttgggtagacgagggagggatggatggatgaagtgtggtggatagatggatggactggtgaacgggagagtggacggatggacagatagatggatgggtggctgtatacacaggatgataagggaggaataaaggaacctggatgacaatggctgcaaggcaaggcggggggtggtccagaggagtggaggaggcctacaccaaattgcctgcctgg

SEQ ID NO: 946 - DNA, 1167 bp, Artificial sequence
  DNA replication origin
tgagccccagcgcctccctctccaggagggttggctctggcaagccccaggtgtgcaggaagagaatcccaggtcccttcagcttccagaacaattggtttacgcagagggaggggaggggaggcggtgagcgagaaagcagttccaggtggcaaaggcagctccgggggaagaggctgccccagcgcctgggacccacctagcgcagcgggggtgagcccagtttccaataacaaagtgcccgggccgtcccaaccctggccctgacagctaacgagctgcagccggctcggtgcgcggccgggaggccagcctggctcacatgatggcgtgagggggtggcaggaggagccgccaagcctcagcgggtcgggcaggaggctccaggaagtctttctgaaagtgggcccaggggcgggcgcggggcggggccgcgggggtcccgggaggggctgggcggggctgcagtgccgggtggggatcgggctgggatcccaagcggcggatgggaaaggggtggaaaggggatgggaaggggcgggagatagatggggagggggcggggcgaggctggggtcctgggtgcagactggagggcgactgggtggagcgggtgaggagggggccaggtggtgtcccgggagcagatagggagggctttgcggggaaagcggggaaacaggttggggtcctgggccgggcggcgaaggaaggccgaggtgcggtcagggtgcagatggggggcgatgggacaggctgggggctgtggagaggagctgggttgggatcccgggtgcagctggggaggggacagggtaggtggctgcagaagggggctgggttgaggtctcaggtgcagacgaggaggggctgggcggagggggtgaggaggggagccgggctgggggccggggcgctgctggggtccccctcccgccccgggaccgtccgctcttgcccagacccgtcggtaaacagacgccgtgatgtcacgggcgccgctgacctgtggctgaacccggagctgtaaatgagatgcaaggtgccagcagcctccggccgcagggcctacgagccacacgcgctcctccgccggcccgaggttaccccagctgcacacacggacaggatgctgcaaacgccaccagacattgcaacacgcagcca

SEQ ID NO: 947 - DNA, 1385 bp, Artificial sequence
  DNA replication origin
tagtcccagctacttgggaggctgagatggaaaggatcgcttgagcccaggaggttgaggctgcactgagccatgattgcaccactgcactccagcctgggcaacagagcaagaccccgtctcaaaaaagtaaaataaaatagaaacaacctataggtaagtcagtgcactgagggtgaaagtgtgcgcggctgaaggaggggcaggggctgtcaggccacaagcccggggaaggcaggaactgggtctgaaattgtttttgaattctcagaaaagagcccagtgattggcactcggtaaatgtttgatgctaaaggaagaaaggaagggagttagagagagcaggagagaggaaggaagaacggaacaaaaggagggaaggaaggaaggtaggaaggaaacaaggaaggaagggagggagggagggagggagggaggagggaaggaagaaaggagatagggaggaaggaagaagggaaagaagaaaggaaggagggagggaaggaaggagataggaagagagagaatgaaggaaggagggaaggaggaaggaaggagggagggagagaaagaaagaaggaaaaaggaaggaaaggagcggagaaggagggaaggaaggaagggagggagggaatgaaggagatagggaggaagggagagaatgagggaaggaggaaggagagggaaggagggaaggaaagaaggaaaaaagaaaggaaaggagggagagaaggagggaaggaagggagggagagaggaagaaaggcaggcaggctatgggaagggggaaggaacggagggagggaagagagaggcaaacagaatagcagatacagaagagacaagtctatcttgagggagtccgaagagagagagacagaagggaagtgaaagagggaaaagagggtaaggtactgagaacaagagaagaagcccccaggttacgacgtggcctgagagtaaactcaccaaagtgaccaggtagaggaatatgcaatgcaggaatctcaacttggcaggatgctgcaaggtagcagggatatccgtggtgaggaagtgctcaaagacagcccagacaaagacccccaggaaaaagatgggcaatgccaagagtagcactagccaggggacagccatgttcctggggccttgaggagctgctgccctgaggagcttgtctgatagcttatgtgaagaggacctggctgggttacaccctccgcctcctccacctcactctctctgggctaagcctgacacctgacacagtggcctgacacagcttctcagggtaagcacaaaaaggccaatgggaggtggaggaacctatttccctaagcaatgtggggacccagaaaaatcaatactgctcatcatggggagtc

SEQ ID NO: 948 - DNA, 1026 bp, Artificial sequence
  DNA replication origin
atcctcctcatccattgagcctgaggtcaaatctgacttctctgatgagaagagctaaatcggaatgatgctgtgagattctccatgccacctgtgttatcatgatctgcaataacttcagtgtccagctccctcaggtgactgtcaggtccatgaggccaggaactgggttctgttcccatgacaacagatccagctagagactgtccttcgtcactcccaccaccaggtggcagtacatcctaatctcggggaagttatgtaccgggagaagcccgccttttcctatgggcaaatttttctcgtatgtgtccatgcgtcggtccatacatccatatccatttgttcattcgcaagctcatcctttcatccacttattcccccatccatccatctattcattcgtgcattcattcattcaattcaaaaaatgaaaacaacaggcactgaggatccagcaacaaacaaaacttcttgcactcttcatttttagtgggggagtcaagtactgaatatggaaacccatgaaagaacaaaatgagctccgactgtgtcaagtacctgaagaaaattaacaaggatgaagccgggggtggagaccagggtgcagggcagggcagcatcagcgctgggggtggaaacgggtgcagggcagggcagtatcagtgcacggggtgtacacggggggcagggcagggcagcatcagcgccgggggtggatacaggggtgcagggcagggcagcagtcagcaaggagagttcttagataagatgtccagggaggctgagacaggaataacacagggtggttacaggagaatagaaaattccaggccacgcgtggtggctcacccgtgtaatcccagtactttgggaggccaaggcgggtggatcacctgaggtcaggagttcgacaccagcttggccaacatggcaaaaccccgtctctactaaaaatacaaaaattatccaggtgtggtggcacgcgcctgtaatctcagctgcttgggaggctgaggcacgata

SEQ ID NO: 949 - DNA, 1455 bp, Artificial sequence
  DNA replication origin
aggcgggagacacagcagatattactattgttactgcagatgtgggacttggttgttagggaagatttccaatggtgacatcaacctctgacctgacctggaaaggcaagcaagcacagtttcccagatttgcaagaaagaggaaagcaagcacagtttcccagatttgcaagaaagaggacaaagcctgtctattcattctctcactccataggcatttgctgagcacctacaaagtaccaagccccaatccagcctctggtgataaaatggcacaaaaagaaaattcctgtcctcccagacaataaacagacaagtgaggcaggtgatgataaaggtcacagggaaaaaccaagcagtgggggggtgaggaaggtgggggatggggaagatgggggatggggaaggtggaggatgaggaaggtgggggatgtggaaggtgggggggtggaaagggtgggggatggggaaggtggggctggggaaggtgggcgtaggcatgctggcgggagttaaattttaaataagattgccagggatggcctcactgagaaggcaacatttgagcagagaccagcaagaggggaggcatggagtctagccgaggtctaggggaagaatggtgtacagagaatggcttgccgtacaacagctctgggacatcctccacaggctgatggatggatgataagctggagttgaatcacagagtggggggatgaggtccgagggccggtgggaggaatcgtgtttatgatgtccattgtgacttggtggcttatccaagactatttctagttagcagtgccagattgtaagctgggactctagaactttcttttgtggctggatccggctggatgggccactttcttctctgcatgggccctgtcctagaaccacatcctcacctgagcctgtgactcacctgggctgggccagtgtttgtgggacccagggaggtgggggaggacaggtgtgacttataagtggaggaggtctgctggctctgaaccatgtcctaaatggtttacactgcgcacagcttcctctcagcccgctctgagctggaagcagcatgtgggacctggccctgatcttcctcgcagcagcctgcgtgttctcactaggggtcactctgtgggtcatttgcagccattttttcactgtgcacatccctgcagcggttggccaccctgtgaaactgagagtcctccattgcatcttccagctgctgttgacttgggtgagttttgtgctttatgtgtcccctccagctgaccattaaggaaggcggcaggaaaaatcacacaccggaagcttctagctgaatgaacaccggtatcatggggcctgcagtgacagctgatcagaccttctgaaatgtgcataatccctattaggtggttctcagcctctttgggtgtttctgaagctggccctggctaatattca

SEQ ID NO: 950 - DNA, 1376 bp, Artificial sequence
  DNA replication origin
ttagctcaagctagaaaggggcaaagttgagatttgaactccagtctgaatccagagctcacaccctaaacctctgcgttctacagtcaaagagcttcacagatatttttaatggcttgtaggatggattggagggtgggcgtcttagagaaagttgttcaggcagtaccacgaaggagaatcagtgagaagattgaccggaagtttgctggagtagaggaaaacctagtcggcatcggcccaagtgctgtgtctgtaggaagaagacggtgacaatggctggcaaaggaagccttcctagtgaatcttaaaaaccatttattttctagaaacccaccatggcatatgctctcgtttgtgcaaggagagtgactccgtggttctggcagttgggtgagtaaaggggagatcccagggagccagcaaggagcaaggctctgatgtggagagatggggtgagaagtagaaatgggggtggggggtgggggatgggagcagatgggagctggaggaagcccagaggtggggatgggctgggagaagccagtgaagagagaaaaagaaggcggctgggtgtggtggctcacgcctgtaatcccaacactttgggaggccacggtgggcagaatgcttgagcccaggagttcagaccagcctgggcaacatagtgagaccccatttttacaaaaaatacaaaaattagccaggtgtggtggcatatgtctgtagtcccagctacttgggaggccgaggaggaagaagcacctgagcctgggaggttgcagtgagccgtgattgcgccactacactcagcctgggtgacagaacaagaccctgtcttaaaacaaacaaaacaaaacaagaaaaagagagtgaaagaaaaataaggggaggtgaagagagatggagagacagagaatggggaaccccttcctctgtgcatgtgggccttgggtttgtttaaacagaggcgttttgtgcattttgaagctgggtaggaggtggtcttttttaagcagttcaggtgcagagtttcactgcaggaacacttggacaacatagctcttctttgagtaaaacaaccctgcacctccttctgctaaatgcctgtggtaccccgcaccatcactcaaacaacccgaaatgctgccacgttcacttccaagtgctcccaaaagggaggtccccctggctgagacccactgaagaaagtgagaaaaacaaaaacaaaaacaaacccattgtctctcctaacagatctctgacagtcaccgcccagcctggagcctcaaagagggcgtggtgggcatggggtcccctgtcctgctgcctgatgcagcatcacacacgtggttcctcctggttaagtttccctg

SEQ ID NO: 951 - DNA, 948 bp, Artificial sequence
  DNA replication origin
gtcatagatcaacaggatcccaaggcagaagaagttttcttagtacagaacaaaatgaaaagtctcccatgtctacttctttctacacagacatggcaaccatccgatttctcaatcttttccccacctttcccccttttctattccacaaaactgccattgtcatcatggcccattctcaatgagctgttgggtacacctcccagacggggtgatggccgggcagaggggctcctcacttcccagtagaggcggccgggcagaggcgcccctcacctcccggactgggcggctggccgggcggggggctgaccccccacctccctcccggacggggcagctggcctggcgggggctgacccccacctccctcccggacggggtggctgccgggtggaggggctcctcacttctcagatggggcggctgccaggtggagggtctcctcacctcccagaaggggcggcggggcagaagcgctccccacatctcagacgatgggcggccgagcagagacgctcctcacttcccagacggggtggcggccgggcagaggctgcaatctcggcaccttgggaggccaaggcaggcgtctgggaggtggaggttgtagcgagctgagatcacgccactgcactccagcctgggcaacattgagcactgagtgaacgagactacgtctgtaatcccggcacctcgggaggccgaggctggcagatcactcgcggttaggagctggagaccagcccggccaacacagcgaaaccccgtctccaccaaaaaaatacgaagaccagtcaggcgtggtggcgcgcgcctgcagtcgcaggcactgggcaggctgaggcaggagaatcaggcagggaggttgcagtgagccgagatggcagcagtacagtccagcttcggctcggcatcagagggagaccgtggaaagagagggagagg

SEQ ID NO: 952 - DNA, 936 bp, Artificial sequence
  DNA replication origin
ccgggattacagacgtagtctcgttcactcagtgctcaatgttgcccaggctggagtgcagtggcgtgatctcagctcgctacaacctccacctcccagacgcctgccttggcctcccaaggtgccgagattgcagcctctgcccggccgccaccccgtctgggaagtgaggagcgtctctgctcggccgcccatcgtctgagatgtggggagcgcttctgccccgccgccccttctgggaggtgaggagaccctccacctggcagccgccccatctgagaagtgaggagcccctccacccggcagccaccccgtccgggagggaggtgggggtcagcccccgccaggccagctgccccgtccgggagggaggtggggggtcagccccccgcccggccagccgcccagtccgggaggtgaggggcgcctctgcccggccgcctctactgggaagtgaggagcccctctgcccggccatcaccccgtctgggaggtgtacccaacagctcattgagaatgggccatgatgacaatggcagttttgtggaatagaaaagggggaaaggtggggaaaagattgagaaatcggatggttgccatgtctgtgtagaaagaagtagacatgggagacttttcattttgttctgtactaagaaaacttcttctgccttgggatcctgttgatctatgaccttacccccaaccctgtgctctctgaaacatgtgctgtgtccactcagggttaaatggattaagggtggtgcaagatgtgctttgttaaacagatgcttgaaggcagcatgctcgttaagagtcatcaccactccctaatctcaagtacccagggacacaaacagtgcggaaggccacagggtcctctgcctaggaaaaccagagacctttgttcacttgtttatctgctgaccttccctccag

SEQ ID NO: 953 - DNA, 941 bp, Artificial sequence
  DNA replication origin
aggtgccgggattacagacgtagtctcgttcactcagtgctcaatgttgcccaggctggagtgcagtggcgtgatctcagctcgctacaacctccacctcccagccgcctgccttggcctcccaaggtgccgagattgcagcttctgcccggccgccaccccgtctgggaagtgaggagcgtctctgctcggccgcccatcgtctgagatgtggggagcgcttctgccccgccgccccttctgggaggtgaggagaccctccacctggcagccgccccgtctgagaagtgaggagcccctccacccggcagccaccccgtccgggagggaggtgggggtcagcccccgccaggccagctgccccgtccgggagggaggtggggggtcagccccccgcccggccagccgcccagtccgggaggtgaggggcgcctctgcccggccgcctctactgggaagtgaggagcccctctgcccggccatcaccccgtctgggaggtgtacccaacagctcattgagaatgggccatgatgacaatggcagttttgtggaatagaaaagggggaaaggtggggaaaagattgagaaatcggatggttgccatgtctgtgtagaaagaagtagacatgggagacttttcattttgttctgtactaagaaaacttcttctgccttgggatcctgttgatctatgaccttacccccaaccctgtgctctctgaaacatgtgctgtgtccactcagggttaaatggattaagggtggtgcaagatgtgctttgttaaacagatgcttgaaggcagcatgctcgttaagagtcatcaccactccctaatctcaagtacccagggacacaaacactgcggaaggccgcagggtcctctgcctaggaaaaccagagacctttgttcacttgtttatctgctgaccttccctccag

SEQ ID NO: 954 - DNA, 1002 bp, Artificial sequence
  DNA replication origin
atagatcaacaggatcccaaggcagaagaagttttcttagtacagaacaaaatgaaaagtctcccatgtctacttctttctacacagacatggcaaccatccgatttctcaatcttttccccacctttcccccttttctattccacaaaactgccattgtcatcatggcccattctcaatgagctgttgggtacacctcccagacggggtgatggccgggcagaggggctcctcacttcccagtagaggcggccgggcagaggcgcccctcacctcccggactgggcggctggccgggcggggggctgaccccccacctccctcccggacggggcagctggcctggcgggggctgacccccacctccctcccggacggggtggctgccgggtggaggggctcctcacttctcagacggggcggctgccaggtggagggtctcctcacctcccagaaggggcggcggggcagaagcgctccccacatctcagacgatgggcggccgagcagagacgctcctcacttcccagacggggtggcggccgggcagaagctgcaatctcggcaccttgggaggccaaggcaggcggctgggaggtggaggttgtagcgagctgagatcacgccactgcactccagcctgggcaacattgagcactgagtgaacgagactacgtctgtaatcccggcacctcgggaggccgaggctggcggatcactcgtggttaggagctggagaccagcccggccaacacagcgaaaccccgtctccaccaaaaaaatacgaggaccagtcaggcgtggtggcgcgcgcctgcagtcgcaggcactgggcaggctgaggcaggagaatcaggcagggaggttgcagtgagccgagatggcagcagtacagtccagcttcggctcggcatcagagggagaccgtggaaagagagggagagggagaccgtggggagagggagaccgtggggagagggagaccgtggggagagggagagg

SEQ ID NO: 955 - DNA, 1281 bp, Artificial sequence
  DNA replication origin
acccgccctcccccctcccggacggggcggctggccgggcggggggctgacccccccacctccctcctgggcggggcggctggccgggcagaggggctcctcacttcccagtaggggcggccgggcagaggcgcccctcacctcccggacggggcggctggccgggggggggctgacaccccacctccctcccggactgggcggctggccgggcggggggttgacccccccacctccctcctggacggggcgactggccgggcagaggggctcctcacttcccagtaggggcggccgggcagaggagcccctcacctcccggccggggcggctggccgacccccccccccccgcctccctcccggacggggcggctggccgggcagaggggctcctcacttcccagtaggggcggccgggcagaggagcccctcacctcccggacggggcggctggccgggcggggggctgaccccccccacctccctcccggacggggtggctgccgggcggagacgctcctcacttcccagacggggtggttgccagacggaggggctcctcacttctcagacggggcggttgccaggcagagggtttcctcacttctcagacggagcggccgggcagagacactcctcacctcccagacagggttgcggcccagcagaggcgctcctcacatcccagacagggcggtggggcagaggtgctccccacatctcagacgatgggcggccgggcagagacgctcctcacttcctagatgggatggcggcggggaagaggcgcttctcgcttcctagatgggatggcggccgggcagagacgctcctcactttccacactgggcagccaggcagaggggctcctcatatcccagacgatgggtggccaagcagagacgctcctcacttcccagacggggtggcggccgggcagaggctgcaatctcggctctttgggaggccaaggcaggcggctgggaggtggttgtagcgagccgagatcacgccactgcactccagcctgggcaccattgagcactgagtgaacgagactccatctgcaatcccggcacctcgggaggccgaggctggcggatcactcgcggttaggagctggagaccagcccggccaacacagcgaaaccccatctccaccaaaaaaaaacgaaaaccagtcaggcgtggcggcgcgcgcctgcaatcgcaggcactcggcaggctgaggcaggagaatcaggcagggaggttgcagtgagccgagatggcagcagta

SEQ ID NO: 956 - DNA, 906 bp, Artificial sequence
  DNA replication origin
gccagccaccccgtccgggaggtgaggggcgcctctgcccggctgcccctactgggaagtgaggacccctctgcccggccagccgccccgtccgggagggaggtggggggggtcagccccccgcccggccagccgccccgtccgggagggaggtggggggatcagccccctgcctggccagccgccccgtccgggaggtgaggggtgcctctgcccggccgcccctactgggaagtgaggacccctctgcccggccagccgccccgtccgggagggaggtggggggaacagccccccgcccgaccagccgccctatccaggaggtgaggggcgcctctgcccggccgcccctactgggaagtgaggagcccctctgcctggccagccgccccgtccgggagggcggtgggggggtcagccccccgcccggccagccgccccatctgggaggtgaggggcacttctgccgggccgcccctactgggaagtgaggagcccctctgcccggccacgacccgtctgggaggtgtgcccagcggctcattggggatgggccatgatgacaatggcggttttgtggaatagaaaggcgggaagggtggggaaaaaattgagaaatcggatggttgctgggtctgtgtggatagaagtagacatgggagacttttcattttgttctgtactaagaaaaattcttctgccttgggatcctgttgatctgtgaccttatccccaaccctgtgctctctgagacatgtgctgtgtccactcagggttagatggattaagggcggtgcaagatgtgctttgtggaacagatgcttgagggcagcatgctcgttgagagtcatcaccactccctaatcttaagtacccagggacacaaacactgcggaaggccgcagg

SEQ ID NO: 957 - DNA, 824 bp, Artificial sequence
  DNA replication origin
tgaggagcccctctgcctggctgcccagtctggaaagtgaggagcgtctctgcccggccgcgatcccatctaggaagtgaggagcgcctcttcccggctgccatcccatctaggaagtgaggagcgtctctgcccggccgcccatcgtctgatatgtggggagcgcctctgccccgccgccccgtctgggatgtgaggagcgcctctgcccagccgccccgtctgagaagtgaagagcccctccgcccggcagccgccccatctgggaagtgaggagcgtctccgcccggcagccaacccgtctgggagggaggtggggggtcagcccccacgcggccggccgccccgtccgagaagtggggggcgcctctgcccggccgcccctactgggaagtgaggagcccctctgcccggccaccaccccgtctgggaggtgtacccaacagctcattgagaacgggcaatgatgacaatggcggttttgtggaatagaaaagggggaaaggtggggaaaagattgagaaatcggatggttgctgtgtctgtgtagaaagaagtagacatgggagacttttcattttgttctgtactaagaaaacttcttctgccttgggatcctgttgatctatgaccttacccccaaccctgtgctctctgaaacatgtgctgtatccactcagggttgaatggattgagggcggtgcaagatgtttttgttaaacagatgcttgaaggcagcatgctccttaagagtcatcaccactccctaatctcaagtacccagggacacaaacactgcggaaggccgcagggtcctctgccta

SEQ ID NO: 958 - DNA, 1110 bp, Artificial sequence
  DNA replication origin
gtaaggtcatagatcaacaggatcccaaggcagaagaagttttcttagtacagaacaaaatgaaaagtctcccatgtctacttctttctacacagacacagcaaccatccgatttctcaatcttttccccacctttcccccttttctattccacaaaaccgccattgtcatcattgcccgttctcaatgagctgttgggtacacctcccagacggggtggtggccgggcagaggggctcctcacttcccagtaggggcggccgggcagaggcgccccccacttctcggacggggcggccggccgcgtgggggctgaccccccacctccctcccagacgggttggctgccgggcggagacgctcctcacttcccagatggggcggctgccgggcggaggggctcttcacttctcagacggggcggctgggcagaggcgctcctcacatcccagacggggcggcggggcagaggcgctccccacatatcagacgatgggcggccgggcagagacgctcctcacttcctagatgggatggcagccgggaagaggcgctcctcacttcctagatgggatcgcggccgggcagagacgctcctcactttccagactgggcagccaggcagaggggctcctcacatcccagatgatgggcggccgggcagagacgctcctcacttcccagacggcgtggccgccgggcagaggctgcaatctcggcactttgggaggccaaggcaggcggctgggaggtggaggttgtagggagccgagatcacgccactgcactccagcctgggcaccattgagcactgagtgaacgagactccgtctgcaatcccggctcctcgggaggccgaggctggcggatcacttgccgttaggcgctggagaccagcccggccaacacagctaaaccccatctccaccaaaaaaatacgaaagccagtcaggcgtggcggcgcgcacctgcaatcgcaggcactcggcaggctgaggcaggtgaatcaggcagggaggttgcagtgagccaagatggcagcagtacagtccagcttcggctcggcatcagagggagaccgtggaaagagagggagagggagagggagag

SEQ ID NO: 959 - DNA, 1208 bp, Artificial sequence
  DNA replication origin
cgcctgtaatcccagcactttgggcgggtagatcacctgaggttgggagttggagaccatcctgactaacatggagaaaccctgtctctactaaaactacaaaattagctgggcgaggtggtgcatgcctgtaatcccagctactcaggagggtgaggcaggagaatcgtttgaacccaggaggtggaggttgcggtgagtcgagattgcgccattgcactccagcctgggcaacaagagtgaaaatctgtctcaaaaaatcaacaacaacaacaaaaaacaaatgtgagtttcaagctgtaaaaccagaatggttaatttctatgttatccaaaaaaccatctatgggactatttggttggtttcagagaaagaaattacttgtatctaggggcagagaaggcaactgcatttggttgtacaggttgtgcactgcacaagggtgtagcatttccaactgcatgcagcaagccctgcagaggagaatccaggaaaattcatagaagaggcggcacttgagactaagatttcaaagggtgtaagaggttggcagatggcattctaggaagaaggaaaagtacagggagcgctacagaagtgggggcccatgggtggttacggttgtgtgagcgctctgcttttgggaaagacagtaacttgtgataagactcaaaaaggggcttcaggaaagatcacgggaggccttgaatgccaggttcaaaccgcagtttattctctcagcctggggtcagccaattacagcccatgggccaaatctagcctatagcctgttagaataagacctgtgaactaaagctagacacagaaagacgaatactatatgatctcatttatatgtagaatctaaaatagtcacactcatagaagcagagagtaaaatggcggttgccatggacgaggggggaggggagatggggaggtgatggtcaaagaggatgaagtttcaattatgcaagacaaatcagttctggagatctactatattgcatagtgcctgtagctaacagcactgtactgtgtccttaaaatgtgctaacgaaggtcgggtgaggtggctcacacctgtaatcccagtactttgggagggtaaggcaggcagagtgcttgagctcaagagttcgaggccagcctgagacatagcgagaccccatctctaccaaacatgcaaaaattagctgggccgggtg

SEQ ID NO: 960 - DNA, 847 bp, Artificial sequence
  DNA replication origin
ctgtgcggcccaagcctccccgacgagcgcggccccctgctccacggcgcccagtcccattgaccacccaagcgctgaggagtgtgggcgcagggcgcgggactggcaggcagctccacctgcggccccggtaggggatccactgggtgaagccagctgggctcctgactggtggggacttggagaacctttatgtctagctaggggattgtaaatacaccaattggcactctgtatctagctcaaggtttgtaaacacaccaatcagcaccctgtgtctagctcagggtttgtgaatgcaccaatccacactctgtatctagctactctggtggggacttggagaacctttgtgtccacactctgtatctagctaatctagtggggatgtggagaacctttgtgtctagctcagggattgtaaacacaccaatcagcaccctgtcaaaacagaccactgggctctctgtaaaatggaccaatcagcaggatgtgggtggggccaaataagagaataaaagcaggctgcctgagccagcaggggcaacctgctctggtccccttccagggtgtggaagctttgttctttcgctgtttgcaatgaatcttgctgctgctgtttgggtccacgctacctttatgagctgtaacactcaccacgaaggtccgcagcttcactcctgagccagtgagaccacgaaccccaccagaaggaagaaactccgaacacatccaaacatcagaaggaacaaactccagacacgccgcctttaagaactgtaacactcactgcgagggtccgtggcttcattcttgaagtcagtgagaccaagaacccaccaattct

SEQ ID NO: 961 - DNA, 1310 bp, Artificial sequence
  DNA replication origin
ctggagttaaactgagacctgtggcctcggcatcctgaactctgtccatcagccactcccgctgtgcttagcagaggagggaagaacattccagcagcctctccagggctcctctcctcttccagcaccactcccgcagctgggggcagagtagccgctccctccctcctgcatagcaggagctgcggctcagggggctaccggggatttgaccaagatcacaacaacccaacctaggaaagaaaccctgagaacatgcattctgggccctgccttggctgaaggcaatccggatatgctttgctgacccaaagccaccgaggggtatttgctgaaaacaaaaacaaaggccagtgatttgggcccgtccctggatgacccctaggagtgtgcattccttggctcactcactcccacagcctcactgagaccctcctagtctcctacgcagggtgcggctgacagcagcaggcgtgctggcctcttggagcctgcatttctagtgggacaaaatgtatgaatttgataatgtcaacctcagtgaatgttacgacgtaactacaacaagaagatgtgaccaagagtgatggggtaggggtgggatggtcagggaaggcctctcggaggaggtgatgcttgatggaagacctggtgatgaggaagatcggggtcgggggaggtgtccttccaggcagacagcagcaagttcaggggctccggctggatactggcacttgggcgtgttccggggacagaacaaggctggtgtggcctgggtggggaaggggcagggagggaggagaagtgataaggaggggcccgtctgggctgtgggagggagctcggttgattctaaatgcaatgggagccactggaaggtttccaaatatgccctgtgttgtacgagcctctggggattcaaggaagaacaagacacatgttgcctcctcaaaaagggtcagacgtgacctgtaacgtcaggcagtggtcacaggataagcacagcatcccacgagatcgcacaggatgggctcccaacccagcctcaggagcccagggaagaggtggagcatggaaggttaagtgggaaccagaagggtaaagaagtcaaggcagggaatggggaggaagaaagaaccccaggacaggtaacagcacaggcatggacctgcggcatcacagcccatgatgtttcccgggaccgaaagggatgcactcggctgggatcttactgtggccgtgctcaggatatgagttgactcagaaccaccaatgctcctgacccagggactcaccacaactcccagcac

SEQ ID NO: 962 - DNA, 1296 bp, Artificial sequence
  DNA replication origin
gcatccagcggatccccgaggacttcttcatcttctacggcgacctggtctacctggacttcaggaacaactcgctgcgctcgctggaggagggcacgttcagcggctcggccaagctcgtgttcctcgacctcagctacaacaacttgacccagctgggcgccggcgccttccgctcggccgggaggctggtgaagcttagcctggctaacaacaacctggtgggcgtgcacgaggacgccttcgagaccctggagtcgctgcaggtgctggagctcaacgacaacaacctgcgcagcctcagcgtggccgccctggccgcgctgcccgcgctgcgctccctgcgtctggacgggaacccctggctgtgcgactgtgacttcgcccacctcttctcctggatccaggagaacgcatccaaactgcccaaaggtgagccgagccggctaggctgggggagggagggaggggggcagggagaggccaccccagaccccagtctgggtgggaggagccgtgggttgagtttggaagaggaggcttgggggatcctgaacttttcctgggtctctgctggggaagtgggtggagagggacgcatctggaattctttggagtttctgaaccctgaggctgtacttcttcccctgtttctccagtaactcactttaccaagttagggaccttccccttctcgggatgcccaggatcatctccctgggctttgggtcctaggactggcgggtgtggattacttatgcgtccctggtaagcggaatgcagcctactctatgggaaacggccgtattctcagtaccgtgcacggggagtcagccagttccaagggctctccagcagcttcccgagcctaacctggcctctcagcttctcagctccagtttgctcttctgtctaatatgggtgaggaagatttctgatgtggaataatggcagcccattaagagccaatgatgcagtaatgatttgtagttctctgtggcttttcagccagatgtgaaaaagctgaaccaaaatgtagagggctggtgccccctttgctttcctggtgcacgcttccaatggcggcgtgggcataaaaactcacttggcagatgggaacaccagggcggagggagttaaggggctccattaaggcccgcaggaagggagcacgggtggagctgagaaggaggggaccccagcatccacagggatgagcacccagagtgaggaggcaggtggcaggtgggtgtccttcccccaagtggattccagcctcccacttgtgaccctgtg

SEQ ID NO: 963 - DNA, 1370 bp, Artificial sequence
  DNA replication origin
ggctgcttttgcagagttgcaagggtgggagatgtgtttattctgccacctgcctgcactttgtgtgactcttcaataatttatacatcatttatgtaggcagaagcattttcatccactctgggagcattcagaccactcctcccgacacctgcctcttcaagagcatgagactggggtggggaagctgagcccttgaagttggggatggcaatggcaaattgggcaccctgggagagtggagacagagacggagaactgagggaggtctggcttagtggcctggaatgtaagtaggggaaaagctgcaggactccaggtgcctcaaagcttccccctgggtctcccccgcctcttccccagggctcctgcaaatatgctcatctgttgagcccttggctccatcccaggggatcagttttttcatcccatggctcagaggcatcaagtcggcctgtacctttggaagaaggccgagggcttagctttatggcttcagaatccgaggctccaccaatccccagcatggccaggggccagggaagggtctctgggagcctgctgcccaacagctgttccctgggttattttggtctagtgggagtctgtcaattctagggcatttggaccaaaatagccaacagcgggacaatctcttggtagctctgtggggacccctccccatatagaagtttctagaatgaggtgggacagaaagaaaggagtttggcatcggggtggtgaagagggaattttcctgccagtgtcagaggctgacatcagcatttcctcactgtcctttcatctcagccttggcacgttcctgactgcctccctaggctatccaaggtggggttttgagggggagagaggaaaagataatttttgaactttgttcttgacttcttggtcctcccccaaagctgatgagatatatattacctttttccatttcacaaatggagctaccaggtccacagaggcagaggtactggtctgaggccacacagcttggaagccaggcctggtgactccaggcctcagagcctcagcagctggacctctcagaccagcagctgatccttgcatggatgccagttccatccagaagttcggggccggcatggaaagtgctgactggccctgcaggccacagcgggggccctggcagccacttgcctcgctcaccctccagcctaagatggttcaagtgcaggtgggggagggaagagggaagaccagtcactcactctctccccttggaaccccgcccaaattcagaccagcagaccctggcgcggcacccgagaacctgcagggattgcccccggagcagagtcagagtgacccaggtcccactccctttggcg

SEQ ID NO: 964 - DNA, 944 bp, Artificial sequence
  DNA replication origin
tccggaacaggcaaggagagacagccctggtttgaggggttgagccttctgctaatttcaagggttgaacttgacacaacctccccaacctttcctttcttctcaggggaagagacagtagctccactcccacaggtccctaccctaggggaagagagacacagagaggagagagggaaagagaggcagagagagacaggggaaaagagagtagctccactcccgcaggtccctaccataggggaagagaaagagacacaggagagagggaaagagaggcagagagagagaggggggaaagagaggcagagagagaggggaaagaggcagagagagaggggaaagagaggcagaggggggaaagaggcagagagagagagaggggaaagagaggcagaggggggaaagaggcagagagagagagaggggaaagagaggcagaggggggaaagaggcagagagagagagaggggaaagagaggcagaggggggaaagaggcagagagagagagaggggaaagagaggcagaggggggaaagaggcagagagagaggggaaagaagcagagagagaggggaaagaggcagagagggcaaagagaggcagagagagaggggaaagaggcagaggggggaaagaggcagaaaggtgggggaaagaagcagagagacaaagagggagtcagagcgagagaaagagaaagtcaaagagagaaagaaaaagaaaaatagaagtagtaaagaaaaagtgtaccctatttcttcaaaagccagggtaaatttaaaacctatagttgatgattgaaggtcttcttgaccctataacactccaataccacctcattgtcagtgtaaataagggcgtagcctgaaagcactgaggccattgacaatgcgtagccttcctatcaaaaatccttaacccaaagtggctgggtgcggtg

SEQ ID NO: 965 - DNA, 1248 bp, Artificial sequence
  DNA replication origin
agacacggcaaccatccgatttctcaatcttttccccacctttcccccctttctattctacaaaaccgccattgtcatcatggcccgttctcaatgagctgttgggtacacctcccagacggggcggctggccgggcagaggggctcctcacttcccagtaggggcggccgggcagaggcgcccctcacctcccggacggggcggctggccgggcggggggctgacccccccacctccctcccggatggggcggctggccgggcagaggggctcctcacttcccagtaggggcagccgggcagaggcacccctcacctgccggacggggcggctggctgggaggggggttgatccccccacctccctcccggacggggcgtctggccgggcagaggggctcctcacttcccagtaggggcggctgggcagaggcgcccctcacctgccggacggggtggctggccgggcggggtgctgacccccccacctccctcccggacgaggtggctgccgggaggagacgctcctcacttctcagacggggtggctgccaggcggaggggctcctcacttctcagacggggcagttgccaggcagagggtctcctcacttctcagacggggcggccgggcagagacgctcctcacatctcagacgatgggcggccgggcagagacgctcctcacttcccagatgtgatggcggccgggaagaggcgctcctcacttcctagatgggatggcggccgggcagagacgctcctcactttccagactgggcagccaggcagaggggctcctcacgtcccagacgatgggcagccaggcagagacgctcctcacttcccagacggggtggcggccgggcagaggctgcaatctcggcactttgggaggccaaggcaggctgctgggaggtggaggttgtagcgagccgagatcacgccactgccgctccagcctgggcaccattgagcactgagtgaaggagactccgtctgcaatcccggcacctcgggaggccgaggctggcggatcactcgcggttaggagctggagaccagcccggccaacacagcgaatccccgtctccaccaaaaaaatacgaaaaccagtcaggcgtggcggcgcgcgcctgcaatcgcaggcactcggcaagctgaggcaggagaatcaggcagggaggttgcagtgagccgagatggcagcagtaccgtccaacggctcggcatcagagggagaccgtg

SEQ ID NO: 966 - DNA, 933 bp, Artificial sequence
  DNA replication origin
accctctgcctggcaactgccccgtctgagaagtgaggagcccctccgcctggcagccaccccgtctgagaagtgaggagcgtctcctcccggcagccacctcgtccgggagggaggtgggggggtcagcaccccgcccggccagccaccccgtccggcaggtgaggggcgcctctgcccagccgcccctactgggaagtgaggagcccctctgcccggccagacgccccgtccgggagggaggtggggggatcaacccccctcccagccagccgccccgtccggcaggtgaggggtgcctctgcccggctgcccctactgggaagtgaggagcccctctgcccggccagccgccccatccgggagggaggtgggggggtcagccccccgcccggccagccgccccgtccgggaggtgaggggcgcctctgcccggccgcccctactgggaagtgaggagcccctctgcccggccagccgccccgtctgggaggtgtacccaacagctcattgagaacgggccatgatgacaatggcggttttgtagaatagaaaggggggaaaggtggggaaaagattgagaaatcggatggttgccgtgtctgtgtagaaggaagtagacatgggagacttttcattttgttctgtactaagaaaaattattctgccttgggatcctgttgatcggtgaccttacccccaaccctgtgctctctgaaacatgtgctgtatccactcagggttgaatggattgagggcagtgcaagatgtgctttgttaaacagatgcttgaaggcagcatgctccttaagagtcatcaccactccctaatctcaagtacccagggacacaaacactgcggaaggccgcagggtcctctgcctaggaaaaccagagacctttgttcacttgtttatctgctgaccttccctc

SEQ ID NO: 967 - DNA, 1074 bp, Artificial sequence
  DNA replication origin
gtccgccgacccggccatccctgcggcgccgggtccccagcgtgtcgccgccgccgtcgccgccgcgctcctcggggggagggaccagcgtcccggcgcgagcccagaggccgcccacccgcgccactccttacccgcgcccgccgcgccagcgcctcagagcaccgagggccgccgccgccgccgctgtttcgccggccccggcgcccgcggccgcgccgccgccatcttgactccagtcggaagtgacgtcgggcggcgaggcagtggcctgcggggctggggggctccgggacccccggtctccccacgatcccagagcccggcccttgaccctgcgccgtcgcccaatggccaccacccagccgcccctcgtaggtcaccgcggatcccatggcggcgcctcgggaaggaaccccggcggctggcgtcgcggcaagtccgaccgcaccctagggctaggatcctgcgtggttcaaagattctcaaagaatcaaaaagactgaaggaggtgttgggggggcatgtctatcgttggaggtcattaaatatctgacaagtacataaacgtagaccttatacttctacgtttggatctataccaaaaagatccaactccaggcagacagacgcagctgctgggtttatttgctgccctagtacccaggagcagtgaccaacgctgccctgtgcccgcgatgttccagtgcagcgcctctgagagcgcggtagtagtcctgcccttaaggagcttgctgttcccaagcgggcaaacaaatggactgcagagacgacgactcatagatgttctgatgaagatgaactgggtggaactggagatggctcttcgacatccaagggtggaggcctagcacgtggttgaaaatgagttgagtcggggagaagcacaggctggagatgagctggaaagttgggagttgtcgttatagatggtgcctggagccttcagcacttcaagataaagtaatcctctgagaatgaagtcaggaagaatccgaatgtgatggctacgttggccatctgcagaaagcacccagtggaaaaacaggatac

SEQ ID NO: 968 - DNA, 1335 bp, Artificial sequence
  DNA replication origin
ggccgagtccggaaaaggtcaccgagatgccgcgggcgccgccgcccgagcccgcgacccgcctcgcggtcgggccagcagcagcgagggcggcagggcggcgtcctgggcgggcgtggcgccggggccgggcgggcgggccggggggctcctacctttccggctcttgggggagctccgcttgctccgggcgctggctcgctcttcctcaatcgcagctgctatctcagggttgtcttccccattgtaccagaccaggagctcctcgcccggcgcgattggctgcggggagagaagagacaagcgccgggccaatcagagcggcggttgttggcgggggcggggcgcgcaccgggacgcgggcgggagcggcgccgatggcaaacagctgtcggcggcgccgcgcgcacccggccggcaggaagggctcccggccccgtgcgggccgcgccggcgcccggaaccctctgctggagggaggaccgcacccgcggcgtggggcgaggggcgcggaaggcccggtgacgggtagcggagcccgggtgctgtcccagtttcctgtttaaagcctcacgacggcccacgcacgagaaaaaataaaacatgggcccattttgctcacgaaatctaagtcgaggagaaatgtaaagcataactgaaaagcgtgcggtgtggaaagcggagtgctgaaagacaacgactagcgcgcgttccagaccaagagcaacttcaacaggacaacgaggaggaaccacgcgcaagcacttacaaatgcgccgcggtttctatcccagagccgccaacgggaggccgcccggggccaccaacctgctctggtccagggaggtccgtgcctcgcccttcggaccggacatcaaacttccacattttaacttttaaatacagcaggaagtatctcccatgtattatgctcctaaaccatcacattcttaagccacgtatgactggaagtagtgagggccaccatcaaattgattccacccagaacaagatcccgaagaaaagatccactgagtgcaaagttcacacccctagaatttggggaaacagcctattggtttctctcacaacaaatgatctgttaaaaaagttacaagggtatcaatacaagtaaaattctatctaaaacccactgaataaaatgagaatccgtgagtccagcctcatgtgaatgaatgaagaaaggaaggaatgaacaagtaaataaaaaggaaagctcttccttaaaggagatcccaactaatcagtaaaaaagaaatgttggaattagaaaagcgccatttggcaatcatcacagtaatgattaattcaggc

SEQ ID NO: 969 - DNA, 1393 bp, Artificial sequence
  DNA replication origin
aacttgccccccggcccggggctgcttctcctggggtcacctggaaggggcagggtccccgggagcagctcagccccggctgtgttccagcaccagctgccggcagagcgctgcccaggccccgcggcgtctcagtccagggaggcaggcagggcgcgaggctgccccagggtccccggggagctggccttgctggcgccgccccgctgcctgcagcgccgaccctgggctcccgcgtccccgcgcgagcgccgcggccccaggtcctgcacgcgccaggcgtccggctgctgccaaagggagagcgcgggaggcgggcggcgcgggccgcacgggcgcggtgcagctccggacccgcaggcgtctccggctcatcctccactcgggacgcctaggccctgccgctccccactcctcgcgtggcagcagggagggactgagacctgctgcagcggcccccagcccgcgccgccaccccggtgcggcgatgcaaagggggcagttcctgggagatattctggatgcggagggaagtgctaactcagcccagcaggctccagggctgctgtaacctcttcctgcccacagccaaggaagtgccaggcacgggagacccgactgcctgcgataaaatccagagaccaagaagagaaaaggagaaaatgccacacatcccctagggcgctccggtgatacagagatctgagtacttcatcttagccgacccaaccctactgtgtatgaaggatctgtcccctgctccaaaccaaaaggggccgcttctctggaaaaggaggagaggggtactttttgcatgattccaacagctatttctgccagtgctgggtttattttgctattccacctgctaatcatgaagatgctaactccagagaggctgcatcatctcgggccagcatttagggtactttgaggattccgctgagacattggtactggcaatcacctctctaggcagcaacacacgtgcagggagagagaggctgtgccacaatgagctcagctgcagccgtcaaagcacccgtgtctgtttccctccggagaactttgatttagaaaagccatttgcctcttctgtatttaagcaacagaagataaactcacaactgatctaggggccagaaagactctcaaacaggcctttttccattacagcccttggccagcaaacacatgcagcttagtgatgttttgagggttccttgggatgggtaagacaaggcagaggagccttgaagtagttccaagagttcaaaggaagtctgactttgtgttaatgctgcttccaggtagtttaagtgattgagcatcccttttcttgtcatgcatgaggctcttctccgtgtcatgaaactgtaggacaccagggacc

SEQ ID NO: 970 - DNA, 991 bp, Artificial sequence
  DNA replication origin
cctaggcgtcccgagtggaggatgagccggagacgcctgcgggtccggagctgcaccgcgcccgtgcggcccgcgccgcccgcctcccgcgctctccctttggcagcagccggacgcctggcgcgtgcaggacctggggccgcggcgctcgcgcggggacgcgggagcccagggtcggcgctgcaggcagcggggcggcgccagcaaggccagctccccggggaccctggggcagcctcgcgccctgcctgcctccctggactgagacgccgcggggcctgggcagcgctctgccggcagctggtgctggaacacagccggggctgagctgctcccggggaccctgccccttccaggtgaccccaggagaagcagccccgggccggggggcaagttccagccacccttccgggtcaagaagccacgactcctggttagggggaaacttagatttttcttttgcatggaactgctgctgtgcaagatttgccaaggcttatagggtttcattttttacttgactggtgtttgagaaaaactgcaaggaaagggtggcgaaaggaagaaacactataaactttgggggcggggacattttcttggaagtgacaagtagcctcagatctgcagttcctgggccagcgacggcatcctttgctctgacactccaagggtctggacgctgccacatgaccaacaccaaagaccccaaaagagccatggaatccacgctggcgacatccaattctgccacaggccccgtcaccttctcccacgtctttggtcagcagtgccaacttatgcaagcaggtaggaattgcgtcgtgtgtcatgtgcccagagaatgggaagtggagcgttatcccgggtccccaaaaacagcggtctgtgtgtgtctgtgtgtctgtcagtctacctcatctctttcttgatataatgtgggatgtaagacttaactagctagtgaaatgtttgcctggcatttatcact

SEQ ID NO: 971 - DNA, 1147 bp, Artificial sequence
  DNA replication origin
agggatcttgatgtaagaaaacaaagcaggcaaaaaaacaaacaaacaaacaaacaaacaaaaaaccatcttgggctaatgggaaagactaaaaaatggtgacacaaattgctggcttgagctgtctcctaactgctctcatgccatactggatccaggggctgaattaagatgacaggggtggatcactgcccggagaaaggctcttacctccaggaaacatcagccctctcacctgggctctgaatgaacatggggagaaaaatcccaaatgatgacaagacaacacagcaatctacacttccctgaataggtattgagaatgtgagggagggagggaagaggggagagagatgaaggaaggaaggaaggaaggaagaaaggaagggagggagggagggagagagggaggggagggagacagggagggagggagggagggagagaaggagggagggacggggagggagggaaggggaaggagggagggagggaaagggtggttgagtgtatcaatggaaacctggtaaaaaatgatttaatctgcatgcactgatccagctagtgttaataggaccagccaagcacatacataaaagcagaggttaccagggttcctattttagggctttcaggggaaactcactatctcaaaatatatcattcacatcttctgggatgccactgaatagagacgcgtttgggctaatctactacttaaccaaaagaaaatacctctccaagaataacagggatcatcactcatccaacctcagggaagatcaatttcaagtcactgtttcattctcaggattgaccctactgaaaagcaggagtttggatggggaggaggcagaagaggaagaggccacttgggagctgagccctttgggaagagcccagggagacaggctttgaccactaaaggatacagccctctaaggcaggaaggggcatggctggctggagggggcttgagaagagggatgtgggttgttccacagggaatacggtaagcagccacataggttagctttcccggagatatttgttctaaatatatagcaagttttggcagaatcctgcctcccaccacagctgtgagattcattttctatgaccacctggggattgtggagacaacatc

SEQ ID NO: 972 - DNA, 1413 bp, Artificial sequence
  DNA replication origin
gcatgatgcgcggggggcgcgcggccgggcacccccggctctacctgttgtgtcctccgcggcccggcttcgcccgcgccccgacccccaggcaccggcagcgccggttcctccggcacaggaatgacagcggcgcctccagccctagccgcggcggtggcgaggcggcggggggaggaggcggaggagaaaaaagaggaggagaaggaggaggaggagcagcgatcgccgagaccccggcgggcgggcgccgagagctgctccaagaaggacaccgcgcgccaccaggcactctttaaatggagcctaccattcgccgccggctcgggagggggtctcggtcggaggctgggggcacccttggcctcccgcgcccccgtacttcggagacacaccccccgggggggcggaggcggcggacggcagtcgggagggggccaaggtggcgcccctggcgaggggcaggggtcgcctggaccgaggccggccctctgtcccctcccttgagcggtggggcagcccccgccctggagaactggtgccccgagccgtgctaaggttggggaggtgctgggtgctcggaagagagggtgcttggaaagggggcctcagaggggagccggggtggatctccatggaagggagacgcttgcgccagctcaggagtggagttcgtgctccaccggttccttaaactgcgagtacgaaatccccagaggggagctgagctggtgccccgcgtgcctctcactctccaccccccacccgcaggccagacctgcgctgcccaccccaggagggagcgcctatcttcctcggcgtgggccgctggtgctcccgcctctccacagccctagccctgtgtgtgcatccaggtggaggagcagccttagccagctcctaagcttcttagccgggctgaatattggcggggacagagatgaggttgagagataagaaggaaggcgtcgatggggcttcttccctttcttctactgggagcagaagagttgagccctgctgcctcagtttacccatcccctcttcacagaagaactgaggtaacctgacgttgatatgccctctccagctcctctttctctcccagaccacaggctttgcatttttcactggggccctggattccagccaccagaccttgttaccatagcaaacttcattccatgcaaataggacaatttaaaacagccagcaaccctctggtcaacagggcgccatcattccagctcagtcaacctccggagagcagcaaagagcagattgcagaagccagtggggtgctgcgaggaaaaatgaggctgcccacccttcaggttcttacaggaagcccataagaaccaagcaaaaactgcgtgtagagtgcttttatatgcattcttatctcttgtgagt

SEQ ID NO: 973 - DNA, 1182 bp, Artificial sequence
  DNA replication origin
catcgatggggcggtccagtcggccagccaggaggtgaccaacctgcgagccgaactcacggccaccaaccggagactggcggaactgagcggcggcggcggccccggcccgggcccgggagccgcggccagcgcctcggcggcgggggactcggcggcgacgaacatggagaacccccagcttggagcgcaaggtaggatcgccccggcgcccagggcggaggaaggcgagcagagcacgcccggcctcggaggtggccggggacccggggtcccccacacccggggcgaaatcgctttgcattctggcttgtaaccctttccgcccggcggtggccaccgctgctctccggctgggagttgcaggctgctgtcattcacgaaaacccgagcgcagtgtgcacggggtcacacggtcacaccggccccggccagcctgagcgaggcgcagccggcgggtcccttccggcatcagaaagtgccctttccgtggcaccagccccctagctccgtgcaaacttttcatgccggggccttttccccaccccccgcaggggtgaatggcacagttccccccacttccttaggctccttcccagagagagctccgggctctgccgccgtggttgggatagaggattgcactgctgtgcacttttctccgcggatgccaaatcccttggctcagttgcatctggactttattttcttctcatttgaggtctctcaggcattggaatctatagatgcaacagtagatgctcagctcagcagggagtttaaatttccgcaaatataaacaccgagagcactttccagggggatactgtagacctcaaaggttgagcggtagagaaatgaaggcttagggtggtgggctgcagggagcccgtttgaagggactctgcggtttagagaagaggaagaaaaagacagttggtttgtgttcacattgacagagattaagctctgaaaccccctgcaagacataaaggcggatggggcattccctaaaatgtactgtttggtttctgtgacttagaaagtaaaagggtaagcaggctttgggggattttttttttctttttgcctaattgccctttaagaaacagtatcactggttattaatatcatttgaattgcaaattaaactgctgaaatccagaacaggacagaaacaaa

SEQ ID NO: 974 - DNA, 1215 bp, Artificial sequence
  DNA replication origin
ctcattatgaacagcaacttttggaaacacccttcatattttctcagctccactttacaaaataacatccttcctgggctgtcagcctggctgaacatgcgctagaagtatgtcttgcaggcatccctttgggcaccaagccaagatgtaaatgagattgttcgcaatgaagaaagtgtgagcttttgtaggatatatttttgtcccatctgaatgggaatcagctcagatgatagagcccctttcctataaggaggaaatgatgctactttcagtctcttcttggcttccaccaggttggtagggcagcctgagaaggtggcagcttcacagtcaggaaactcagtgggttgtccagcatcccaccatagtgtctggttggtttgtgggttgggtgggtgggtagatggatgggtatgtgcttggatgggtgagtaggtggtgaatgggtgcataggtggatagatgagttggtgttttggtgggtggggagatgggtggatggctgtataaatgagtggttaatggatggatggatgggtagatggatggatggatgaatgaataaatgagtagtggatagatggatgggtgagtagttggatgagtggacagacagataaatgaatgaataggtgggttgatggatagacagatggctggatggaacagctggatggatgggtgagtgggtggatgagtggatgatgaatggatggatagtgagtggatgggtgggtggatggatggatggatggatggatgggtgagtgagtggatgggtgggtggatggatggatggatggatgggtgagtgggtggatggttgggtggatggatggatgagtgagtgggggtggatggatagatggatgattaggtaggtaggtggatggacggatggatggataggtgaagggatggatgagtggatggatggatggatggatggatggatggttggatggatagatggatgggtggatagatgggtgggtggatggacggatgagtaaataggtggatggatgactgagtggtggatggatggatgagtaagtgggggatggatggataagtggatggatgaatgggtaagtaggtggatggatgcatagatgggtgggtggatggatggatggatggatggatggatggatggatggagtaaacaattccttccttcagttttgcatgcccttgatgagctggatt

SEQ ID NO: 975 - DNA, 1606 bp, Artificial sequence
  DNA replication origin
ccgggggccgcgcgggcccggcccccgccccgcaggaaggcgccggctcgccctgcgccgcgagctggcggacgcgctcccacgagcccgagtcggccgcccgcatgccgggtgcccggggggacgctaccagcggctgcgcgaggggctccgacggcgcgcgccgggctcacagacccggaggtcgccgccgcatcggggcgcagccgagcccgcccccgcctcccgcccggccggcggcgcgcgccggaccagggctctcagtccggccggacgccgggcggtccgcgcctgctgcacgcgaggaattcggccgcggagcctctcacgtgggaacggctctcagtcccgcggctcctcctcccgctccttccgggctggcgactgccgaggctcgccccgcccccgccccgcccccgccccgccgcggcgcccagactggccccagtgcccggggagcgccgccgcgtcgccccgttgtgcgcccggcccccgccactcggtgcatccccgacgcggtcattcccggggacacggagggtcagaaagacggccgatgtcacaggggtggctgtgacggaactcgagccccggtctttgaaagcccctggcctctgcctggcaccccactttgctgtgtctctctcctctcctgacaccctgtgacagccttgccgagagccgaggtccccacagctgaccgggagaggtcagaaggagtgggcgggcaggggagcagccccgggacctttccttcgctcatctttgcgtgtgaccggccatcctctaagtgaggggaatgctgagtgcacccaccgtctggtgggggagatcgcgagggggctgagatctggtgggaggccctgtgacttcacctcacttccccagcctcagtttccccatctatgagttaggcattagtaattccccactgtccattatcagtgctgcccatgaactctccaactatggcagccattggcaggggaggccagagcctggaccctgggagtgggtgggggaacagtgacaaggccaggcaaaccctgtaggaagtggcaccttggagggtctgcacaacagaacccacccgctggagtgggtgttcaggctggcagtgctcctgtgaagtaagtgtgcagctctgagccccctttgatctggggattacgatgctgtttagaaagactaattatctccttacagccccaggaggcaggtccagttcccccctgttgtagacacgcgggagccgaggccacacagccaggtgaggagtcagtcacacactcatggagcccccagcctccccttgtaggcagcatgctagcaaccttaccctgcccaggcttggctctataatctgaggctcccactggcccaggcctgagatgtgcaaatttctaggtcactggcctatggctgtccaacaagctgtgagaacctaattactttcccttaagtctacaaaaccttttaggagcagtttcctgcccatgggtcagaagccctggctctcagcaaccacagtggcctggccaccaactatcatggccttcccagcttccccccgcccccgcatcctcaccttcccaatgatggaaac

SEQ ID NO: 976 - DNA, 1274 bp, Artificial sequence
  DNA replication origin
ccgccagctcgcggcgcagggcgagccggcgccttcctgcggggcgggggccgggcccgcgcggcccccgggacccgcagcctgcgagcagtgcgtggacgcggcggggcccggcgatcggccccgcgccggggttccccgggtccgagcggatggcgactgcagccagcccggtaggtgcgcgcggggcggggcggggcgggcggcgcggacacaggcccaggagccgccggggccgggcgcgcgagggcgctcggagccgggatcgggaagccgctggtggcaaagttctcgcagcgcgcggagccccgagccccgggcgggtgcagcgggaggcgtgcgggacgcagagtgagttcctcggcgtggggaccggggctcgggggctgcaccggggggccaggaccgcgcttgccggagccaggcgatcccgcggcgcctggagacccagctccgggctggaccccgcgtctgctgggggaagcgtgggaaaggggccagccctgcgcgaagttggttcggccccctgggaccgcacctgtgagccatgtggcggcccccgcggagtgccgaggggagcccccttcaccgccgcccctccgaggcgaaattgatgcctcgcatttgctaggagcggagagattgctgcgtttctcatacacttgaactccgagtaatgcagaaagagaaattgcagaggtggagacacaaacgcagtgatctaattgcgtttggttggcgaatccgccccaagtggagaacagcgttttactgttaaagtgttcccagcgggtgtgcccgttccatcccactcaggcctgcgctatctcccttccccctgccccttccccccaagttagggcatggggatgggagacaggaacccctgcgtcatcttgactggagtaggaagaaaccttagaagacgaagggcttttctgagaaggggctgccatcaccaggtccaagttctgaatactttttccgggaaaaacgggagggggaggcacaacataattattccttattcatcgaacacctattgtgttctagtaattcacatgcaacacatccttaaaatcttatcacaaccctgggagtgaggctgtgttatctccatgcagatgaggacagaaaagcccggaggttaagcgacttgcccaagttcccagagtcctaaatcatggtgttggaattcccagttttgtccgtggaaatccaaagtcttagcaccataatacctctcccaggcagcaagctcactagctggggag

SEQ ID NO: 977 - DNA, 992 bp, Artificial sequence
  DNA replication origin
gacatttaaggcatgggaagtagccatcacctggagttgggaattttctcaaaactttgggaggcctggcatgactgggccacattcggtcagtcaccccctctaggtggggttggtgttctaggtccccgctcatgcacctgtctgactcatgatccctggtaggctctgtgcacagctgcgggttctacctggatggtcctgggtccctcagctggagaaccagggaaggggcagattaggatatttggaaatggtgagcactgagcctctgacagcctgcttaagcccccaggttacctgttaaccctttcctttacctgccaggggctgtgccgaatgccagctcctagaaatagctgaggcccaggccctgccttcaggtggcctctaggctagtcttaggggtgggtaggtcctgagctgggggtctggtttccaggctgctagtgcggattcctgtagggccgggtagtggatgggcaaggccatgatcacgcttagcatgagctgtgggcttagaaatccaggaacaagctgcattgaattctcagcaggttatggggtaggggagtcttcaggggaaaggaggaggtgcttgcttcagtgaacatttcccacgataaacacagaatacacagtgttaagttggtggccagttcaaaggaaaacaaagaacagggaagggtgtccagggaagaggttgccgagaaaggcatgtttgaataaagaggagatgggaggaagtgagacacgtgggtaggagggggaaggaaggagggccttccaggcagagggaacagctcatgcagaggtcccgaggaaggaggccagtgcatggacagccaggaggccagggcagcttccccggaatgtgagctgggggaggatgggtacaggacctggagacagatcttgggggggtccttgtagaccattggaaggactttgcgctcccccttgatggggacaggagttgtgggagagaagca

SEQ ID NO: 978 - DNA, 1072 bp, Artificial sequence
  DNA replication origin
ttatggggtaggggagtcttcaggggaaaggaggaggtgcttgcttcagtgaacatttcccacgataaacacagaatacacagtgttaagttggtggccagttcaaaggaaaacaaagaacagggaagggtgtccagggaagaggttgccgagaaaggcatgtttgaataaagaggagatgggaggaagtgagacacgtgggtaggagggggaaggaaggagggccttccaggcagagggaacagctcatgcagaggtcccgaggaaggaggccagtgcatggacagccaggaggccagggcagcttccccggaatgtgagctgggggaggatgggtacaggacctggagacagatcttgggggggtccttgtagaccattggaaggactttgcgctcccccttgatggggacaggagttgtgggagagaagcagagaagtgacatggtctgagctgccttttaaggggacagctccatggcaggattgatatctactgaagggttggaaaaccagttaggagactaccgtgtgacccagatatgggggtgggggtggggacacagcccgggtgggtgagcagggtagtgactgaggagtggtaaaaagggcccaggtcctggtgccatgttgaaggcagagctggcgtggtcggctgattaattgggggtggagtatgagaaaagtttgggggggtggtcaaggaagattccagagtttaaggccagagcaacaggaaggctaaggccactgtgaactgagtttgagggcactgagaagagcagattcttggggactggtcagggactatcttggatgtgttaggtttgagttgcttttagaggttcaagcagaggtgtggatgctctgggctctgggtctggagttcagggatgaggtccaggctgaagcctgtggttggactgaagccaccaatgcccagaggtcagaagggaacagagtccaaaacggagcaggcagaaatgagaggaaaccaggaacacgggccctggaggtcaagcgaagacttgtcatcacctgcatcgcctgctggaggcagagctcatcagat

SEQ ID NO: 979 - DNA, 1093 bp, Artificial sequence
  DNA replication origin
tcagacaggatagcggtgtcccctacccctccctctgcatggaggtcactctgagctcctggtctctgactccttgctggtggccaaaggcaatgctgctgagacagcctcaccctaaggagcggaccccaggcccacgagctgcaccccaggcccatgagttgctccccatgccagagtctgagaaagcagcctctgtgggctcccctgcctccctctgccttgcttctgggtcgtccccttcctgccaaaccgtttgcctgtgacaggcatggggaggctcagttcatctaatatgaaagggagccaggccaaacaggcaggggaaggggagctgggtggtcagggcagggggagctgggcaggcagggcaggggagggctgggccgagcaggcagggcagggggagccgggcggggcaggctaggcagagggagctgggcgggcagggcagagggagctgggtaggcagggcaggggagggctggggcgagcaggcagggcagagggggatggggggagaggtaggcagggtagggggagccgggccctgctctcgagtcgggcactgagggcagctagaagtcccagatccccatcaggggctgtggtggcctggcccagagaactctcgaggctcctttcatcatagaaaggaagtgatgtgcatgcccgggaggtgacagtgaggaatcagcggtgaagaccaaagtgggtaggggggaccaagcatctagattcaaatccagtctgaacactctggtctctgaactgcggctcagaggcagcatctgggaaggactcattcacctggcctgctgcttcccactgttcaaaaaaggggcctcgagctgaacaccctgtgacaagggctgtgaccaaggtgcctacgcagggcagaaaacagaggccagaagtgcattcagctcgaggctggagtgcagtggggtgatctcggctcactgcaacctccacctcctgggttccagtgattctgtgcctcagcctcctgagtagctgggactgtaggtgtgcaccacaatgaccggctactttttgtatttttagtagagatgggcttttggccaggctg

SEQ ID NO: 980 - DNA, 1670 bp, Artificial sequence
  DNA replication origin
cctcctgcttcagcctcccaagtagctgggactacaggcgtgtgccaccctgccccactaatttttaaaattttttgtagagatggaggtctcactctgttgtccaggctggtcttgaactcctgggctcaagcgatcctcccaccttggcttctcagagtgctgggattacaggtgtgagccaccgtaactggctgcttttctaaatcctgatctgtcctccttcagggcatgtgttctcagggagctctttcttctagctcctgattcctgggtcctctgagaccctctgtccctcccagaaggacttgtctgggttcctttctgcacaggtcttgcctctccaccccattcccagaaaccagacctacgactggggtctgtgtgggaccagccacagctccaatcctgcccacccggggccttcgtttccttctccgggtttgccagtgagaccaacaacagggagtggcaggtgaggggccggcagaggggctttgaaatccactgtggaattttcatgatcaaatggctgactctgaatccccgaaagcaataataatgataatgataataataatggtagcaggcatatgcccctaccccccttgctttccatgccccgggaacctcaggtctgacagcactgggctgtgagtagttgcaatcttcatcctgctttacagatgtgaaggctgagaccggggagagtcagctgtttgcccgagccacccccatagcgagtgcagaggtgagatgctaacctatctgtctgctcttaatccctgcgtgaccctggtcccaggaggggaggaagctggtggctcaggggacaagtagaaggtcagcttggagcctgtcttctgccccagggccagcacgtcactgaaggctatgggctggttctctggccccactgtgtcctgtccccaataaaaaagaggtaaccaggtttccctgctgctgggcatggggctggtcaggcagaggctctccctgccttgcccactgaaaaaagaccaagctccttaggccgagaatggagaaatgagagaggtggacacagaaggggaggcagggagcagaggcgaccagaagatgctgtgctgagtgccagggggtgatggggttgggggaagaggcgcgctgcacagggggaaggcccgtaggctctggacccaggccctgtaagcccctgccctgccatcgccggctgcatgaccgtgggtgagttatctcccctctctgtgtctatcagctcatctgtgaaatgggaggataaccatatgccccacagtgtccgtgtggatgttaaatgaatggacacacacgaggctctgagaactcttcctgtaagcccttgaagtacatgccgtaactcccacagcacgcccctgtgagcacacacgtgtacctgcatcatcagacaggatagcggtgtcccctacccctccctctgcatggaggtcactctgagctcctggtctctgactccttgctggtggccaaaggcaatgctgctgagacagcctcaccctaaggagcggaccccaggcccacgagctgcaccccaggcccatgagttgctccccatgccagagtctgagaaagcagcctctgtgggctcccctgcctccctctgccttgcttctgggtcgtccccttcctgc

SEQ ID NO: 981 - DNA, 1295 bp, Artificial sequence
  DNA replication origin
tacctggcgggatactcacctctcctccttcctggggaggccaccgcctccctctcccccttctgccctgggctggttcccagcgaggtgagtgaccggcacaagtagggaaggaggaagcgagtttttaaaaactgagtcagctcacgccctcggccagggtccccacccgatgcgtggtccccagggcgccctcgggatcgcacgcccgagtcccggcccaggtggggcccattccgggttcttgcgcgcgggcaatggatgggggcgcgctgcaccgggagcctgccctgctgagggctcatccccagctttgccgagaactttcccggcgaggcaccggctggcgttttcccagcctgcgagtggcaggcgggcagccagtctctgctcggatccacggaggcccggagccgccacggagttctggctccggggagtgcaaacccgaagtcggcgcggaagcctctcacccgcggctctgcctccgccccttggagatctgccctcggaactgcgttgctctggcgcccgaactagggtgggctggtttcagccagaccgccaaaaaacgtggatgctaaacacagagggaagagccagctcccattccctctctgagccttagatttttttgaattccgagagaggtcaggccggggtccccttcttgggtgagcgtccagccctttgaagttcaaacactgagaagccgataggcagctggctggcgtcacaggatcgagccgaggactgaaggcgcctcctaccgggaatccaccgcctccagacgaaaataggctgcaatcaagttcacttccaaaggcggaattcatgggtacatatggtgtccacgtgtgtacacctgcagagttgtaacatgcgggcatttctcccctcagcccgccattctggcttcttaacttgcaccctaacagctcgacagaaccttggcgtccacaaaaaggcaagtttgggtctgccttatgatttgggggtgggaaggcatttggggaaacagtctccatgtctatgacagcaactgctattcctcacatccttgctatgaaccaggggcggggttaccacccacatcccctgaaccatctcatttaatcctcataacctaggaggcggttatttgttatgcccactttatagaagagaaggctgaggcttaaggaggtgaggtcattttgcccagtgaaaacacagctgggaagtatcaggatctagacccaagatgatccactccagagcttctgctctccctcccatagcataattcctcctgt

SEQ ID NO: 982 - DNA, 926 bp, Artificial sequence
  DNA replication origin
acaggagacccaaacgggcctcggcccccttacacggccctgtggggaaccgacagcgcgccgcgggaagcagcgggcgcaaggcgcggcggctgagactcacccgggaggcggcgggtccggctccgtctcggctgggcggtccgggactgcgggcttcgcgacccccgcgccccacccgggcggcctcctcggtgggcgccgcgatcgcggggctggggttcgggggattcttagccgagggaacgcagtggtggagagggcgcactgccctctcagggaccgggttggggacgcaggaagcgcggcctgggagcgccggcgtgcgggagggagggaccgcgggaggcggagggcggtgccggccaggagcggcctccagcccggagaagcaccgcccaccggccgaccctccctcccggccctcggcaccacccccgggcccgaggcgagggatcgcagctgagcgaggcgggcacccactccccagcgtatgccgctggagcgcgctgagcgtgtgccgggggctgggcctaagttctccccaacccttgccagccgagttggataagagggggtcgggagaaaatagagccctgatcccccctcctccctagggcccagagaatcggtgtgcatgcgtgtgtgcgcgcacgcgcgtgtgtgtgacgggtggtggtcggggaatgtctcaagctagaagtcccaggttttaggggtttaagtggagctgggagacccgctttcctcccacaccaggcgcagacgccgaggcacagctccgccagccgccccgcctttacctggcgggatactcacctctcctccttcctggggaggccaccgcctccctctcccccttctgccctgggctggttcccagcgaggtgagtgaccggcacaagtagggaaggaggaagcgagtt

SEQ ID NO: 983 - DNA, 1464 bp, Artificial sequence
  DNA replication origin
agggatttagattcgtgtgtgtgtatgtgtgtgtgtcgctctacaagcaaacacgggggtaaagaatcgggcatgagcaaagtggattgaaactcgagtccttccctgagcgcgtcggtttcttcatctgtgaaactgacatgacaacgtcccagggtgcggcggggcattcatgcccagcacccagcaagcactcagcggtaagttacgttaccgggcctaggggagagcagagtacaaatcagatctcaaatcagcgcacaaacgggaggcgcttggcccggcgcgcctggtctgcattacaggataatggtctctttcccaaccagcggtgggggcgagagacctggcccctcccccacggtttccccagggagcagcccgtggggtgtcctgcgcagcgctccgaggtgcctgtgacggtgcatgggactgcgggtccttcccaacagcaggggaggtctggctgctgggaacccgggcgctgccggagtggggtgggcggggacgaggtgggcggggcagggacccgaaccgggaggtaagtcagcgggtggaaggctttcccctctaggaccggccggcttctggctttccttttgaatgggttacccggagaacagcttgtctagggaactgttggccctgggaccgtgaacagctttcacaccccggaaacctgtcacaagaggatcctgacctattgggacagagcccctgcccctccaaatatctcactccaccaattgagaggtacccccagactgggagaaaaggccaaagaaagagagaggaggctagtggtgaacctgctcctcacggcttcggagctgacagctctctgatggggtgtctggggcctgccccagtgacccagagcccagaagcctcagggagcccccagcctagtgagggagtcagggatactcatgaaaagtgttgcagaattggcgatacagtcaggccacaccacttgctggctgtgtgacctgacctctctgagcctcagcttcttcatctgtaaaatgggatgatgatctccaagggcgaggtggggtatttatgcctagcacatgaagtattctatagtaagttatgtcacagggcttagacgagaacagaagaaaggaaataactcaggaggtcctgctaagaaaagagtattagaatattcatcagggaactggagtccccccagggaacaggggaggaagggtgtctgggcagatcgaacagcacaggcaaaggcacagcgacaggagagtgcctggggtgtgctgggctggggaaggtgctcaggcagtggagggtgtggaaaagtaaagggaatggaaggtccggagtgagctggactggacaggtgggggctttcttggaatcattcaacatatgttggccgagcaccttctgtgggccaggcgctgttctaggtgctcaacaaagatgaacaacatggagaaagac

SEQ ID NO: 984 - DNA, 1283 bp, Artificial sequence
  DNA replication origin
taacccccaggacttcccagagtggcatggctggtgccaaggagggtctaaggctcccgggggcttcctccgcgggcggggtggggcctgcatctggaaaggaggggctggtgttggggtagctactggggtgctcctggggaccggagcctggatccaggaggatggggccggggagccacccctcctcctgccagggctagtcctcgctgggccgccccttccggtccccggtctcggcccgccaccccttcccgcgccgcactcacctggcgggaggaggaagcccacgctccgacctccgccgagagccctgccagctcgggaggcgtcgggccagctccggggcgaagcctcccggccgcgctcccgcggagtctccagctcgcacccggcaccccgcccgcccggccggcctgtgtacgcgcgttgccatggcaacgccgccaggcgccgcggggtccagcctaatagatgagggcgtggcctgcgcggcagagggggcgtggcaccgtgcagggaacgcccactgggttaccgcctgctgaatgctccaggccccacgagcctgccccatttcacagataggaaagcggaggctcagaggtcacagaaatggcccaaggttttacagcgaggaaggagcagggaggagatttgattcaagaatcctttccattacccctcactgtaagctggatgcgttgagggagggtcgggggcgatagggagaggtaggagattgatggagctgaactcatgagacccttggaggttagtatgccccctgccctacccaaatctctagtcctttccgttacaggccagaaaatagaaagagtaagaagaggggatctctgggagtggggtggggattgggaaagggatggggtggaatgaaaaattttgaaagaatgaggatttcttccatgtgctggggaaaaaatatttccaaactcacaatcctgctgcctctgctcctccctgttaagagtgacatttattcattcttttgccctttctctatctctgcaaacatcttttgagtcctatgagtgtcacacgctgatcccagaatacacctggaacagttactgtccttaagaaaccgcttgtcagccggcacaggactcgcgggatggagtgtgttgagcagatgtgcaaatcctatctcccgccactatctccagcaggaaatcctatctcctgctgactctacctggagagtgattcctttcactggcaggaaatggctgaccagacacctcaagaaaaactctaaa

SEQ ID NO: 985 - DNA, 1018 bp, Artificial sequence
  DNA replication origin
ctccgtctcaaataataataataataataataataataataataataataactatttgcaaaatgtacctcaatgctctgactttagaatcctgaacctataggatttctcagtatttgtgagatgtgtctgtttcggtgagtcaaggtaaaacctaacagctttcatctcaggtgtgcctgaagagttcgccaagtctgcatgggcacccaggcagggtggatctgggggtccaaggatgaagcagcagtagtgacctctggctctgaccgcagtgccccaactggagctggggaaaggcaggacaggagccccgggggcacacagaccagggtccgagcccagagtgggcttttgttataactgatgtggcctcccctttgtcatcagcgaaatgggaacaacaaaatcagttttgagaagtgagaggccggtttgcattgtgcgcttccgcctctgcggctggttagcccgcctcgcccagccctctgcatccgtcccccgagcagggtcaccgcctggattacatgtgttgtcgccctttcaggtgtgtgggtatgtgggtgtgggtgtgaggatgtatgtgggtgtgtgggggtatggatgtgtggtgtgggggtgaatgggtgtgtggggatgtggatgtgtgtaagtgtgtatgggtgtgtgtggatatgggtaggtgtgtgtgtgagtgtggtgtgtgggggtgtatgggtgtgtgggggtatggatgtgtggtgtgggggtgaatgggtgtgtgggggtgtggatgtgtgtaggtgagtgggtgagggggcgtgtggatgtgtgggtgtggtgtggtatgggggtgcgtgtggggtgtgtggggtgtgtggatgtgtgtcggggctgtagagctgatgttaggtgggagaaatacggagaaacagcagctccggagctcttctgcccacgaagtgcatttgggttacttgtgtccccatttcccttccccgttgaccttggaacaggtctgccttcttctccaggccgc

SEQ ID NO: 986 - DNA, 1291 bp, Artificial sequence
  DNA replication origin
tgtgtaaaagacggatgtgatttctttgctaaaactcagagcaaggaatgcaggatgaggcccaggtttgagggggaagaggagtgtgaggtgcctgtgagacatctaagatgagatgcccaagagacagctgtttccccaggtgtcttgtctggggataggtaataatgatgtatcctcagcacccagagagcatgtgccacacagcgggggcctaatacatatctgtgggttggagggatggatggaaggaagtgcagatggatggatggacggacggatggaagaaaggatggatggaagcattggtgggtgggtggatggatggatggacggacgggtggaagaaagaatggatggaagggtgagtgggtgggtgggtggattgatggatggatggatggatggatggatggatggatggatggatgaaaggatggatggaagtgtgggtgggtgggtggatggatgggaggaagggtgggtggatagaagggtgggtgggtctgtgggtggatgaatggatggatagaagacaggaaggcaggaaggaaggcaggagggaaggcaggagggaaggcaggaaggaaggcaggagggaaggcaggaaggaaggcaggagggaaggcaggaaggcaggcaagcaggcaagcaggcaggaaggaaggaagattaaagccatagatatgaatggtatcagttaggaagattatttattcttcagtcttgaagaacagccagagaactttgctccatgttttgcctgatgtcatgtaagctcatgacctacatgaaagtaacgagagagaagggaaagagcacagggccgcaccttaaggaactccaacattttgaagcttgttgctactccttcttgccaaatcaccctccagagagcctgcatcaattttatattctttccacaatgaataagaatagagaagtgattttcaaccctggcacttcaacatctgcagcaggatgcttccaaagtatccagaaggtggggtaacattcttaaaaagcaaaagcaaaaccaacattaatttttatgtaggaaccttcccctcatcatatagcagagagcgttactgttcttgcaatcaaggcagagtcgtgagcttacttgaaataaggtaaaacatggagcagagttctcgttgttcttcaagactggaactaaaacaaagaccatgatctccatcctggcaataatagagccaagctacgtgtgcactgtccccttcccactcccaagaccattttagtcatctagactaagtctataaat

SEQ ID NO: 987 - DNA, 1188 bp, Artificial sequence
  DNA replication origin
attcccgctcaggtgacagagcgagactcagtctcaaaaaaataaaaataaaaataaagtagttgataagccttggttgagctcacatccaactttctttttggaggtggaaaacaacccatcaacagaacacctatttactgtctactgtgtgtgaagcatggtgctgagtgtgggggatggtctaaagccaagacctccaggggcttacagttcagtccgaaagacaaggtgtaaatgcctgctggaaacatgcagtgaccccaggtggcatgtgagtgactgctgaaggagaggggagggtgagggtgtcagaggagggggagatcattcacctggagtgagcgagtaagaccacttggttgaagaactactgggtgtggatgctgttgggtgggcagaattcagagagccgggggagggcgcttcagaacaggggtgcgcggggctgaatgatgaccccctacgattccaggtccgaatccctggaacctgtgggtgtgaccgtacagggcaaaaagagcttggcaaatacgattaagttaaggatttcgagatggggtgttatcctggattatctgggtggacccaatgtcatcacatggcttcttataaggagacagacggaggcttgaccacagacagaggggaaggtgatgtgatggaagcagagactggaagatgccacatcgctggctttgaagatggaggaaggggccatgagccaaggaatgcaaggaatgaagctctagaggctgaagaaggccaggaaacggatactgctctagagcctccggaaggaactttagcccagtgaaactgaattaatcctgaatgctaagagaataatgtgttgttttaagccagtctcttgtggtcatttgttacaatagtcacaggaagccacagtttcacaccgggatgtgggggtggtgggggtgggatttggaaaaggcagtgctcctcccgggaagtgctgagcttacttgggctggagtagatgatgggagagggaggagcagacagtggaggaggcatggaagggtgaggtcaagccgtgacactcctgaaaccgtcggcttgagagaggaaacttgatttaaacatgactgaaatgtgcccagtgggtccccaatttatagatgaggcagtggcgttctgagacgcaggcctgcccaacgccacaca

SEQ ID NO: 988 - DNA, 1267 bp, Artificial sequence
  DNA replication origin
tgctccggggtctcgccgccgccctcgccctccatctgcagccgccggctcagcttggtggccagctcgtccgtggccatggtggcccgcgcggcactcgccttggccgggcccctgctctcagcgcagcgccgccggccgcgctcttcctcttcctgacactccccgggccaggcaccgcccccgaaggtgggacttgggccctggcggggaccgcgcgccccgcccccgcccccgggcccgcgcggcgtgcgcgtgatcgctcccggccgccgggggtcgagtgtactctgcgcgccccgcccgccgtcgtctgccccccgcgaggctggggagcgcggccgaaagccatgcccctcttcgtgcccactgtagcagctgagcgggaggggtcctgctgggggccggggccgggcgggaaagaagagggctcctcccccgcggcttgggtgaggagcggggcttgccggggggcggggaagcgagggggggcgccgccccacccccttctccggaatccccacgccgtgaagtcataatcctgtgtctgtgacaccctgtcggttgctatggaaacgactcgctgttaaacactggcgttctcaatgagggttgcaggggttccgaggcggacctggggagcagaaacccctgtttagggtgaaccgtggcgggcgccgatggcctcttggaagaggacagactagcagctgcgagggagatgggactgggtttcacccctgaaagggcccctggagacagcgggtgagggacaggggaaggggctggtggtcctctctcccgaggccccgcaccatcacacggatgacttggcacaatagctgctgggccagtgttgtcgcctgtgactgtactttagggaaactgacagggagatcatgatgtcgccattttgatggggtccccagaggagagatgtcctccccaacggctcctggacaggactggggaaagagttcagataagtatctctgtggtctgggctgtcaccttacaactgcacaactctggacctccagcatcagaaccactggggcctaggttaataatacagattttcaggctccaatttggacagacgaaactgatctctggggtgggacccaggaatctacgtgtaaacaagcacccaggggagttctgctcactgaaatttgagaatccctgatttagaaggaggactatgctctgtgcatgttctctgaaatgttgggtcaatcaggacctgtctactgaaactgctcca

SEQ ID NO: 989 - DNA, 1418 bp, Artificial sequence
  DNA replication origin
atgtggctgaggctgacacccctggtctgcccccacctcctgcccagccaagcgggagccggccttgccgcatccctccctcagccctgggctgcctgtgccaggtggggctagacctcctggctcacccccaagactcagcctcaggccagttctatccccttccagaaccactccagaccagcacccagatcgtggaacgaggctgttccctctccaggagccaggggcagggggacagggaacaggaggtggggaaagctaccaaagggaggggcactggcaccttccccatcccctgggcacacacatggctgggagagagtggctgtgcatcttagacccaacagagtgggacccagggatgggccggagggagctgggccctctctccctagcccctccacagagacattaagattgtttttgtggggggacagggggatgagcccacacgcctgggggtgcccatccaccctggtgagggcacacagtgtggatctgatggaataaagggtaggggtgggggtaacagggcaagtcacataggaaggggccccttttgaccagggtgggtgtgggacatggggggtccctgtggggagggaaggggatatacggagtggggaggagagatggggggccttgcgacagaagcaggggagcggtgactgcaagctgctgggtgcacgggggtggggcgggcaggagcgggagggaggccttccaaacccggaggggactcggcccacagggacgactggagtgaggtttacaccagaggggcaacaggggccgaggggtcccttcctaaggagaccacttgtgagtgaaggatttgggtcctggctaatgagtgggtggggatggaaagggcaagtctttgcccccagtttgctggtagacgctaagtaactggagaggaagttggggggatccctgcccagaacccaccttgagggagacctgagatcgcagaggaaacgaaaagaccttaagggagggaatgtggttggcatgtggtgtcgaggggcactggggtgggtatctttggccagcgtgtgttggggtgggggtggggaacgcgagtagctgggatcggggaaggaaggccgctgggtcctcagcctcggtgtgtgcggtgtggggtggtggagaagccccactaacagcgcggagggcccgggacccacacgtgtggtggtgggggtggggctcgcggggcctggcgattatctggaaggaagcctggggtcccccactctgtggacgcgtctatggtgtaccggaggcagcacaaatacgagtctccgccgcgtgccaggggccgggggtcccccagactaacgtgcgcggtgagatgccgggtctcgatctggaaggggccgccgggtccccaaccccggtgcgtctgggtt

SEQ ID NO: 990 - DNA, 957 bp, Artificial sequence
  DNA replication origin
atcaaggaggtggatgaggactttgacagcaagctgagcttccgggaggtaagcccggcccccagccccactcccctaccaggggcttcacctgaggacctggtggcccgggagagaccaacccccaccctttgtcaatgaatgaatgacattgccattgaacagcagctgtgagcagctgctgcttggctgagtgaggcttcagagggcctgttacagcaggcaccagggagggttctgagatcctctcggggaggaagaggagggagggacagcccttccttcacatagggagcatatattgagcgatttctgtatacttgaccctgtgcaggctctggggtagagaaaggccctgtgctcgaaggttcctggaagtgtagagggggagacaccacagaaggaaatcagggctgtgatgcagaggaagagggccacggcactgggtgacttcacgcccaggatctcactccgagacaggagctaggggcaagccggtttcgcagggaaggaaatggaggcccaagccagacagcgatgatactggaccccaggaagtacagggatggaccccaggaagcacagggttaggtgtggggactcgaggcccaactggggcccaggaggtctggcaggaagcatgaaggatgcagggaaggagagaggtggcaggggcaggtgggggagtgcgagtggctgggcgggaggtgtgggcagtgcagggtaacagcttagagttcgagagcagggttccatccctctgacacgttcaggcgctgagacttggggtgtcttttactgtcatggaggctccctcattctgtcatgacacctgtaggactcaatacatggaacgcagagtaggttcactgggcaacagcgggagacagaggtaagaggtaggctgaggccgtgtcgtcgggagctggtgtgggcgggtcagggctgcagtaggcc

SEQ ID NO: 991 - DNA, 661 bp, Artificial sequence
  DNA replication origin
tgcctggctgggccccagagatctggggttctccaagtcagcatggggtgctgggggcctgcccgggtcccttcaccagaacagaagctccccaccccctctcccatttcagtagatggaagacgcagaggaggaaaaggccctggggaggggtcccctcgtgcctccaattagccccttgggtcccactctgtgggggcagccctgattctatctcttctgccgtctcccagcctgggaaggggctggcagggggccccaggggcggtgcggcctgctggaggagggcaggggttcccgggttggggggacagggatgtgtggagggcaggcggcaggcacatggggctgggagggacctagggccaggagctgggcctggggcagtgccggagcaggcagggggcagttaggggtgcaagagagcccagggattgccagggagggccgggccgggcagggagccagcgccggtgtggcggcctcgtgcagagtggaagggagcggggaggggccgggccacctccataagacccctgaacttgctccattcacagatatttttaggtttttagtagtggtcccgtcagacacaggcaaggattcaggctcggcctcccatgcgccaccctcgcccaccacactggggccggagcagggc

SEQ ID NO: 992 - DNA, 759 bp, Artificial sequence
  DNA replication origin
tcccagccccatgtgcctgccgcctgccctccacacatccctgtccccccaacccgggaacccctgccctcctccagcaggccgcaccgcccctggggccccctgccagccccttcccaggctgggagacggcagaagagatagaatcagggctgcccccacagagtgggacccaaggggctaattggaggcacgaggggacccctccccagggccttttcctcctctgcgtcttccatctactgaaatgggagagggggtggggagcttctgttctggtgaagggacccgggcaggcccccagcaccccatgctgacttggagaaccccagatctctggggcccagccaggcagggtgtgggggcagctgtgccaatctacctcacaggcccaccccctgccgggcatgccgtgggatcatgggcagggaaggctctgggggtcggagacaccgctgcttagcacccccagccagaacaccctgagggtctcggggctctggagagagtggggcgggaggaagaattggcaccttcctagggaaggagacgagcgcttcgccttgattctccgagaagcctccgagaagtgctttaagtgtgtttgcatgcgccaggcggtgggcagcgggggcctgtccagccctctcccgccatccttccccaagtgacgtccactgccttgtcaccagcgacctgcctgtcatgcccaccccctgaggaagcatggggaccctaacaccctggtgccctgcacca

SEQ ID NO: 993 - DNA, 795 bp, Artificial sequence
  DNA replication origin
aagacccgttcagccatggggagctccctgctggacatggggagtgttccttggagatagtctcccttggagagatgggccaagggcgtggagttctgcatgagaagagactggttctggtgggagcctgatgggggcaggcagggaaaggattccttccgtacagagtccatgtccagatgaatctgaggcctcgagggtgagagaatgccagaatccgccccctgccccattgctggaccctgggatttttcaggaggtggagtgtgtctcccaggacccaggacctcaaagtccttgagccacttggggccagactgtgctggaaaaataaccaggggcgacttggcagaggcacgtggaaaggggtggtggtcaggtggtgctctgggcctcaggaggagcaatgccaaggtgggggtggggcgggataagagcttgagaaaagaggcaggtgtcactgacagggctgggattttctggccgctgggacaggactctcgggcggcagctgttacgtcttgggtgaggcccactaaggggccagctgaggggctggcagggcttcgcctccaagccagatggaagcactgggggttagagagggttgtggggcccaatgcggggttggcgttcagcgaggggttaacagttcagagagaggggctgggggttccatggggatttggagctgggactcagtgcaaggaggcttaatgagaggagggaacctgggagttgtttttgtttgtttgtttgtttgttttgtttcttttaagcgacagcgtcttgctc

SEQ ID NO: 994 - DNA, 2200 bp, Artificial sequence
  DNA replication origin
cacctgatccttccactggaatgtaaactctaaaagcagggattttgttttgttcaccttcatgttcttagtgtttgactacaggctcaataaatattcgtagaagtgaacgaatggggctgaggttttggtgctcaagagattatattctaaggtggattcttaagagtgtggcttacagagtcaggttcgggtttcaatcctgcctgcctcggccacttagtacccaagtgaccttaaacattcgtttccctgaaccctagggtctacatctgtaaaaccggcggggggtgggaatactttcctggcaggattgtagttaaggataagtgaaataagcatgaaaagtggctagcacgatgcctgggacttagcaaatgctcagtaaacagaaacgattatttttgaaatgtgaaaatgaaccgttcagaacgatgggagtttacaggactagatttctgccgtttttttttttttctgtgtgggaggtgttagggtgggagggagggaagagggaatggaagactgtgtaaggtgggcttggttggatcagacactcgagtttggaacagtcaactgcgatctgggcacaagggcggtgaggggagcttatggttttacttggggtggaggagggggctaaggggaagccatgccccggaggaggttgaatgggcgggacagatcacggctccactcatggtttccctcttgctggaagtgtgacgactccctccggatctctgtaaaagcggggctatagtgaattctggcgaagggcccgcggtggaccaggaactggtgccagaattgcaaaagggcacctgcgcccggagtggggaggtgatgcgggggcggggcggggccctgggggcggggcgagtcgcggaggtgccgccttggggcggggcggtgacagaaggatggatcctgggggtgaggattgactttgggggcggggcgagagtgcgaactggagtctgaggctgagcggtgacgcaaggacgattctgagggtggagcgaggggaggggattggctcttggaggcggggcggtggcacgaggctagcccttgggggcggggcggtggcgcaagattgaccttgggggcggggtgggggcgtgggttgaatcctgggggcggggcggtggcgcggaatggattctggggtcggcgcgaggcgctgaggtgcgtcctgagggcggggcgatgacgcagagcgaatcctgggggcggggcgagaccttctagatgcgtcccggggagtgggcggtgacgcggtggcaggttctggggacaggcggtgaccccagaattgaccctggggacagggcgaggcgcggaggcgtcctgaaggcgaggcggtgacgcaagagcgaatccttggggcggggcgaggcgttggagatgcgtcctgcgggcgggacggtaacgcgggggcggggcggtgacgtgaggtcagtgcggggatacggggcgggttctggggcggggacgcagtggtggattctggagcggggcggtgacgtggggcgggttctggggcggggcggtgacgcggagcgtgttctggggcggcgcggtgatgggaggcttggccctgggggcggggcgaggcgcagaggtgcgtcctgagggcggggcggtgacgcaagagcgactcctgggggcggggcgaggccttggagatgcgtccggaggcggtggggagcgaagactgacccggggccgtgacgcgggggcaggccctggggcgggggcgggtcctggggactggggcgggcggccgaggcccggaagcggactgaggcggcctggagtcttagttggctactcgccatggacgaagcggatcggcggctcctgcggcggtgccggctgcggctggtggaagagctgcaggtggaccagctctgggacgccctgctgagccgcgagctgttcaggccccatatgatcgaggacatccaggtgcgcccccggccccctgtccccgcgctgcacggccgggtccccacgcccctcgaggaggcgttgtgcgggagcctagccttccctgtggcttcaaacccctcagcggagccaaagaatcccaaacacctcttagtcgggtgttcgctaaagcgattccatgccatactcagtcagcgtacactgttagtgcttgtgtttcttgtgtaaaggaaaaatgtgagac

SEQ ID NO: 995 - DNA, 1391 bp, Artificial sequence
  DNA replication origin
gcgtacctggctctcggctgcggggatgccagactcgagctcgcacagcgcgcggaagttgtgcagctcgaagtcggcgtcgacctggagggaaaaggtcacctcggagaggtccctccgcacacagtacacggtgagcagcatggcccgggcccgacccggctcggctcggctcggcccggcctgggcgcggggcgcaggggaagaggcggcggcgtggcctggctggtgctgcgggaggacggcgccggctgctcgttcgctcgctcgctccctccctcacacacgctcagtgagtcactccctcccgccctcactagcaagcacggccgccgccacacgcctgcgagtccgtctgcctgccggcctgcctcccacggctgccgccaagcgcgccggccgcccggcgccccgccccgccgcaacgcggctgccgtaaagcccgcctcgccttccccgccttcgcaacgcagcggggggcggggccgggaagaggaggaggaagccaggagaggataggagggggaggagtgggaagggggcgtggaagaggagagggaggaagggcaagaaaaggggagggaaggaaaggaacgcggagaaggaaatctctgctgactggttgacttaatgacagaagtctgtggaggagtccccggtcttatttattcaccgaacaggcattgattaagcgcctaccatgtgtcgggcgctggcgatgcagaaatgaataaaaggataaatccttctccgtaactctcaatctagtacaggagttagtaataaaacatatttttcgaggtagaaattgaggctccgacagagtaattcacttcctgtcttagtgatttaggattgaaaccaaaatcattaccctccctagtctacagaagccagttggctgtggcccacgcctacctccccagccccttcttccgagctcttcccacattctctgccctcccagccacataggtcagttcctccaaggctccattcccctgtcttgtaaataattttctctctacttggactgtgtctgtttcctagccctagcaactcctaccacctagcgcagtgcctttttgggcacagcttagaatctactcaataaatatttgctactttaatggcctgtttttaaggcacacagctgatgagtggtagaggcccagaactaaggtgcggatgagtaagaaaaccaaaactgaaagatgaacttgtaatggatgccagattagcatctttccatttactcccactccccctccatggtagggagcccttttccattttaacaggagagaaggagcaaataagatggctgtgggtgcaggtaagtaggtagtaagtaggctgttggtggcaggaaagggagaattagcagctga

SEQ ID NO: 996 - DNA, 1999 bp, Artificial sequence
  DNA replication origin
tcaggagttcaagaccagcctggccaacatggcgaaaccccgtctctactaaaaatacaaaaaaattagctgggcgtggtggcaggcgcccgtaatcccagctactggggaggctgagacaggagaatcacttgaacctgggaggaggaagttgcagtgagctgaaattgtgccaccgcactccggcctgggtgacagagcgagactccgcctcaaaaaaaaaaaaaaaaattagctgggcatggtgtcacatgcacttgtagtcccagctactcgggaggctgaggcaggagaatcgcttaaagctgggaagcggaagttgcagtgagcagagatcgcaccaccgcattccagcctggggaacagagcaaggctctgtctcaaaaacaaacaaaacaaaacaaaacaaaaaaaacaaaaaacaaagtaccactattttgggtctctccttgggaaactaaggggctggggagcgacctttggaggcttgtggggtccctctgagataagcaatgaatcagtatttcagatgctaaggggacttcagggatggggtggcctgagcagagaagagggaagaccagggaaccagagttgagaactggggtgtctgagaataaaaaggagggactaatctatgtgtcaggatatatttatttgggaacttaaggagggaagagagccaggtaggagactgacacctctaagtgcaggggctttatgagatggtggatttgaggagggtgtgtgggaagagagttgttacggtgggtttcaggggctgagggagttgaggcccttgggatacgtggggctgaagaagagggataaggataaggagtgggaatggggcattggggctgaaggtgaggagggtgtgttttgggggtggggaggaacaccagggacctcaaatgtaggactgggccttgagggtgaggcactgaggaggggaggctgtggagggccagggggcccagggagggtctagggctggggactggagtctaggctgacccggtgggggtgctgggtcctccaggctgcgaaagccagggggcctgggtctgcacattgagggggtggctgggctaaggaaggggaggaagataagtggggcttgcaggctaagagggtcttggggtccctggccagagttagtggggtgcactggggtctccaaggaggggtctgtggactaaagagggccggcgggagggggcccagggtctgtgggtgtctcgagtctctgaggagggccggggtctcagggtctgtgggggtctctggcctgtggggtcggagtctccagagtccttggggcctgtgggagtctctggggttttgtggggggatcctgtgggctgaggagggctgtggggagggtctcagggtctctggggagggccagtgcctcggggtctttgggggtctctgaggagggctgggggcccagggtctgtgggggtccccagcaggtggggttggggtctccggagtccctggagtctgagggtgtctctgaggtcccaggggggagtctatggcctgagggctgagggggagggtctccagggtctctgaggagggccggtgtcccgggcaggcggggtcggggtctccggagttcctggggtctgagggtgtctctggggtccctgagggaatctgtgggctgacgaggcctgggggagggtctccgaggagggccggggtcccagggtctgtgggggtctctggcaggcggggtcggggtgtccggagtccctggggtctgagggtgtctctggggtccctgaaggaatctgtgggctgaggagggcttggggagggtctctgaggagccccgaggtccccggcaggcggggtcgaggtctctggcgtccctggggtctgagggtgtctctggggtgccggggagagtctgtgacttgaggagggctgggggcgggtctcggggtctctggggagggccgcggccaagggtctgtgcgggtct

SEQ ID NO: 997 - DNA, 827 bp, Artificial sequence
  DNA replication origin
tggcggtggcggtggcggcgacggtggcagcgccatggagccgggggaggtgaaggaccggatcctggagaacatctcgctgtcggtgaagaaggtgagcgcggcctccctcccggccggggccccttcctcgccgcgccccccacgccctccggcggcgctctcccgggccggggccccccgcccttcccctccgcgacccggggggcgacgagcggccgggagccccgggccggtagaggggaagcggcgccgctcacgtgagcgccgcggcctcggagctatttttaaagaacaaagttgaggtcagcatcctcggagcttccccaaacctggcccggggccctgccctcccggagaggggtcagcgaccctccggtcccccactggggcagcggcgcccccgggagctcctgaaggaaccccatgcagcctcctgtggaatccgctgcatccccgggtccccccgccaggctggcgtcgcccagggtctggcagtcagggtggaggccagtgataagcaacttcactttcccatggcctgggtcccggcgacattgcctctgctcctgggaagtcccctgaataatcttgctcaaggatggtagctttgaagaggttcactaggggctttgattataagaacctgaagtacatggggattgcattttggatgctgatccggggaaccgggtgacaccacagacaccttgctgtggggcttgccgcagtaaacatcactgtcccaattccaggtagaaatgagtacatacctgtcaagggcatgtatttgtgatgaagttggcatatccgcaaaagggtccgtg

SEQ ID NO: 998 - DNA, 1133 bp, Artificial sequence
  DNA replication origin
aaaatacggcgaagaggctgggatgctggacctgggccctgctgcccacattccgggggtgagcccgggccctgggctggggagtgatccacccactgccttcccggaggcctcaccttgcccagggacagcagcgtggacacggcccggagggagaactcgagcaccacgagggcagccacccgggaccccacgaccgtcagaaacagggccagccctgccaggtgcaccgtttccagggaggcccactgggcccgaagccgctccttttcgggtcgccgctgcgggtcactttggggacagaatgggtgtgggcaggggtgcagaactgccaccttcgacccctggtgggggtccccgtgcccccagccacattccctggggggatgaggtgggcactcacttggcacagcccacgaagaagtaaactttcaggaggctgttcaggaccaagactccaagggccccgatcaggcctgagggggcgggagggaggcagcgaggcagcgtgcaggggtgttaggagggcaggcttcattggtagggtcagagggggcggccaaggggcaggggtgtcgggagaccaggtgggtggggtccaccctgcactgcaaagagctggaagggggcggggccaaggcaggaatggggcgaggtgctcaccttgcaggagggagtcaaggaggctagagccccactcgagggaggggaggccggggagccaggaggggagggatggaagagagaacatggcagccccggaaggagccccagcctccggccaggtctgcgtaaggacagaccaacgtcactgggcaaaggtgtcggtggagggaaggagagaggctgggaggggtcaaaggcccaggggaggggaggggaggagagccaggggtgttaacccttcgaggcccagaagggcaaggtcccagctccaggcacacggggtgcctggagccagctgctgcccgggctccccatttgggcagtgtggggtgaagggacaggtgtctctgggctggtctctggtctctgtccctgctaaagtctggcatccactttacttgaaatcttccttgagggaggacaggcgcagtggcttacacttgtaatcccagcactttgggaggcca

SEQ ID NO: 999 - DNA, 1266 bp, Artificial sequence
  DNA replication origin
gaccctaccaatgaagcctgccctcctaacacccctgcacgctgcctcgctgcctccctcccgccccctcaggcctgatcggggcccttggagtcttggtcctgaacagcctcctgaaagtttacttcttcgtgggctgtgccaagtgagtgcccacctcatccccccagggaatgtggctgggggcacggggacccccaccaggggtcgaaggtggcagttctgcacccctgcccacacccattctgtccccaaagtgacccgcagcggcgacccgaaaaggagcggcttcgggcccagtgggcctccctggaaacggtgcacctggcagggctggccctgtttctgacggtcgtggggtcccgggtggctgccctcgtggtgctcgagttctccctccgggccgtgtccacgctgctgtccctgggcaaggtgaggcctccgggaaggcagtgggtggatcactccccagcccagggcccgggctcacccccggaatgtgggcagcagggcccaggtccagcatcccagcctcttcgccgtattttccgtaagactgagaacagaggctgcaggttgcacctttgggtttggttgcggaagcggccacactcacagtggacacagtcccagtcccaagaagacaagagcgacagtttctgtagatccggccccccaaatgccaggccctgcgccgagtgcaccgtgtgcatcacgtaatcctcacagccacaggggtaaaggtttgctctgattccccatttcacagatggggaaactaaggctcagagagtatgtggcttgtctatggtcaacagatagagtcaggctttggacccaggtctctgagactctgaaccaccacccttcagctaacagatgggccccaagtactaagacatgattgaaggctgggcgtggtggctcacgcctgtaatcccagcactttgggaggccgaggcaggcggatcacctgaggttaggatttcgagaccagcctggccaacatggagaaaccccatctctaaaaacaaaaacaaacaaacaaaaaaattagctgggcatggtggcgggtgcctgtaatcccagcttcttgggaggctgaggcaggagaattgcttgaacccaggaggcggaggttgcagtgagcggagatcgagccactgtactccagcctgggtgacagagcaagactctgtctaaaaaaaaaaacaaaacaaaacccatatgattgaaattaaggtgagagagatgatcccctagggc

SEQ ID NO: 1000 - DNA, 897 bp, Artificial sequence
  DNA replication origin
gaggcagtgaattgcttgaacccaggaggctgaggcagagaattgcttgaacccaggaggctgaggcagagaattgcttgaatacaggaggcggaggttgcagtgagcccagatcacaccactgcactccagcctgggtgacagagccagactctgtctcagaaaaaaaaaaaaaaaaaaggaaggtggtagagagggtggagcggctgggcctggagccccgggcgaggctatggactgcgttgccctgaggggagccagcggagggttttgcacaaggacatgacggaagctgacgtacaccttgagaggagtcctctcgtggctgttttcagaatagtttggaagcatttggaataacccaggtgagaagacaggcgttcccaggccaagggggtggtattgaagcccaggtgggtttcaaggctctggagtggactgagggactgaggcagggtcagcgccgctgcagcagaggggtgaggggtgcagtggtgggagatgctgtctcgggggtgggttggggcaggatcacacagggccagggtgaggggcttggcattgtcccagagagcagcggggagccacagagggctgtgcacagaagggcgttagatgctgctttagtgaggtgttctggctactgtgagaagaggggattgtaaagaataagagtgaggcatatgggccaggtgtagtggctcacgcctgtaatcccaacactttgggaggctgagacaggaggatttcgtgagcccaggagttcgaggccagtctgggcaacatagtgagacctcatctctacaaataatttaaaaaattacactttgggaggccgaggcaggtggatcacgaggtcaggagtttgagaccatcctgcctaacacggtgaaaccc

SEQ ID NO: 1001 - DNA, 1943 bp, Artificial sequence
  DNA replication origin
gacgcaaagggcgtgaggaccgcaccccccacccgcaggcccctccaggggcgccgcgccgggggtcccggctggcgaccgagcaggctccggccgagcactgccggcgctgtcacctgtgtgcaccggggacagggacggagggacgcgacccccacccacccggcccgcttacctgggccgcccgcgccccggcggctccgatccgacgcccgagccagcggagcccggagccgctgggcctcccgtcccctccgcccgtccgccctccccgccccctcggctccctccgccccgccgccccgcgccgctttaccataaaaggtgaggctcggggggagggggcgcgggattcccgccccgcggaagcggcccctacctgccccccaacctgcccggccgcgccccgcgccgccccttccccctccctttgttccctggacgacgcctcccctcccccttggcacaggccagggggtgggaatgggggggaatggggatgggggcgatgggggaatgggagggatggggagtgggggtaggagaatggggagtcggggtgggtttccttccctccccgctgcccatcccctcgcgttcttcatggaccccgagtggtccctgccgtcccccttccctcgctctcctgggttggcaaccccacctaccctgtccggcggaggtgagcgcttactttggctctgggatccgccagggtcttgcgtcaaaccgaccagggttctgcggccgtttactaagcgtgagacccggagcagtcacgccacctcctgagcctcagtgtcttcatctgtaaagtggaggtagccactgcctacctctccaggttggcctgaggataaaaggtgacagttacagccaggactgtgattaatagtggttaatatatgctgggttgggggctttttccgggagtgttcctgagggtgggggtctcggagacccccagtggagcaggtcaccttgttctgctctcctgagcggtaagccctctgcaggtgggtcccggtgtcccgggggacaggccgctccaggagctctggaaggcagggcccggctggccctgtggctgaacccctccctccacatccagtgaccctccccctcccagctggagcaattaggacgggagcgggaggggaggcagagcctggactctggggcccgggatggggccgggatggactgcctgggtccctggaggcctcagggacattgtggggaaaggaatctgggtctgattcagaggcagacagattgttcttttgattaaagccacagtggctgaggcttgaggagcgctggacccagcgccatctgcggggtggccagacaggatctggcccgtcctgcaacccctcagctacagtcacccctccagggtggctctggggctgtttctgagggaggctggtttatgagggtcagaggaggctgcctccgccctcacccactgatcatcgcccctcccatccctcttgtcgccccttttcccatttgatcctctcagccaagctgcagtaacagcagcagtcccaggagctgccattgataggggctttctaggtgctggtacccatcctcatccccatcctaatcccacaagagccatgagcaccagggctgatgattcctgttcacggtcaaggacactgaggccccgagaggctcaaggccacactaggggcaaatggcagagccaaattcaaaccagagccgctgtgtccctgggcacacagctctgctagtctcaagaacaggtaccagtgccatcctttacagaatcggaagctggggcttggaggtgctgagagttctgtgcagcagggcgaggctgggactcaaggctgtctgagtccctgctcggctcattcctggcttggcagtgatatcctgcccctgccccccaaaactccagctttgca

SEQ ID NO: 1002 - DNA, 969 bp, Artificial sequence
  DNA replication origin
tggctcgggcgtcggatcggagccgccggggcgcgggcggcccaggtaagcgggccgggtgggtgggggtcgcgtccctccgtccctgtccccggtgcacacaggtgacagcgccggcagtgctcggccggagcctgctcggtcgccagccgggacccccggcgcggcgcccctggaggggcctgcgggtggggggtgcggtcctcacgccctttgcgtcccagtctcttggtctctctccccggagtcggggagtcggcaggtccggggcgagggctcagtgaggccggcggagggccgagtcccagcccgggagcgggagccggggacccggcgcgcagggcggaagctcccgcacaaaaggccggagtcccgcacatggatcgaattaaagctccggcggcgcccagcggtgaccccggcggccgccctgctcggctgcctgcggagggtcccgcgtttccggagcccgggggcgctccaggccccttttcctagccagggtcaggcaaggggagggacgggtcccggggctgctcctctctgggcctcacgcgcccgtcgggggctgagaaggtgtggagatgggcgatacccaggtgtgtgccctgggatgatcttggcgtcggcccctacccctcacctcccacccaagcctgaggaccccggggagaggctggggccgcgcccagattcctgctcttaatgacgctgtaggttctgtccgggtcctggaggcacccccagccgagcccagcccccgggctgcttctccctctcagctgctgcctaaccagctgtccttctctttgcaccttccaagggcctagaccctgagtcttctttccttatatatcctctcagccgccctagggacacactcattctcactttatgaaaaaacgaggccagagagtttctgtgacctattcggggtcaccccgcaggaaagaagtggggccgcgtgtg

SEQ ID NO: 1003 - DNA, 1232 bp, Artificial sequence
  DNA replication origin
gcgagactccatctcaaaaacaaacaaacaaacaaaaatccaggtttcctatgcagcctaagggatttaggtcggactcagggaaacgtcttcctcagagctgaaggaggtgtctgcggcaggtgcagcagcgaggcagtggcatccctctccagggaccctgaaacacttaaccaatttttacctgcctaaatagggacttctgagagcttcaaagagggactgcccccgagcagaagaatgcaccagacaaagtccaggtttagaacccctgaatgcccagaaggcccagactccccgtgccccaaccaaggggaccaagggattgctgggggtcggggggcaggcagtacctgtggtgggggcgggggcggggacaggtgcagctgctctaagtctgcaatgagtgaggcccccattggagcaggagcctcctcttcagaaggcagaagcactggagggggcggtggagggggtgggaggaggtccaggtcaggaagcacgtcctcaccatccaggacaggaggagggggtgggcatcctgcaatgggggaggagagagggctggtcagagcctcccaggtggacctgggagggttttacttacctacatggccatacagagggaagctgagggccccggtcgggatcaccccggcctgggttccatgtctaactctgccactgatttgctgtgtgtccttaggcaagaaacttaatctcaggccaggcacggtggctcatgcctataatctcagcactttgggaggccgaggtaggcagttcgcttgaacccagaagttcaagagcagcctgggcaacatagtgagacctcaactctactaaaaattaaaaaaaatgtagccaggcatggcagcacaagcctgtagtcctagctacttgggaggctgacgtggaaggatcacttaagcccaagaggttgaggctgcagtgagcttagatcacattactgcactccagcctgggtgacagagccagaacctgtctcaaaaaaaaaaaaaaaagccgggtgcagtggctcacacctgtaatcccagcactttgggggactgaggcaggcagatcacctgaggttggaagtttgagaccagcctgaccaacatggagaaaccccatctctacgaaaaacacaaaattagctgggcgtggtgggcatgcctgtaatcccagctacttaggaggctgaggcaggatattcacttgaacccagg

SEQ ID NO: 1004 - DNA, 1070 bp, Artificial sequence
  DNA replication origin
ggaagacaagccagcgcgacgccgtccagcctcatccccggggcacaaaggggagactaatctccaggaaactcggggtacagaatcgataaccccacaagaaactagtttccgcgagtgggccttaaggaaaaagtaggtcgggcacaagcgagctgttcagacgcacttcacagcaaagactcgcggacaacacagcgagacgaaaacggccccgtgcgcaggcgcgcggaaacacgactagcgcgcttcgggacgacccctcccccttccctcaaaggccaaggaagtggctccgacgcgcttgcgcgaggacggaatgttgaggggagggggaattctttcccttcattgtcagagagaaccgcccccgcacggcgagcgcgcgcgcgctcacgcaccactctcacactccggcgcgccaaaggctttccgcttggcgtctcgcgcatgcgcggagggggaagcagtggcgaaattggatgctttttgctgagtttctcagagaagtttctggaaagatggagccaaagggacgctggggggtggggagcgccaggaagcaagcgtttgaaagaaagcgaaaaaacccaagcgcaccgcgacacctccaaccttcaagccacggcccaagcagagcccaaggccactgagaccctcacgccagagaaaaagcacagggaccgcggcagccgctcctccctctgccactgctcagcccccgagactccccagcacggggagagggcagggggtagccatgagaaacctagagcgctcactggacttttgcgaggtggaaggaaagccgaaacccgccctttggagccgcctgtgcgcacgggccccgtcgagtgggctcagtacgttaggactcagcgtggccgccaaagcattggttgggggcgtctttcactaatttttcctaggttttctcttctatcgggctctgtggtcctttcaccacccatcttcactttggtggcctgacgctaacgctgcgagttggggaaaccgtagtaaccccgggcctgaggggcgtcccgggcggcggtgctccgtttcttcca

SEQ ID NO: 1005 - DNA, 950 bp, Artificial sequence
  DNA replication origin
ggctgcggcggtggcgtcggcagcggcggcggctcctccggctcccccccgtgcagagaccatccctctcccccaggttctgactctcgggcctcgcagctcagctctgccgccaccacacacccgaagccgaccctcgcgctccggcagcgcatgcgcccgggcaggggcgggcgggggagcgggaggaggggcgagcgggacacgggcggcagcgactacgacggagctggcgctgtggcagccggacgcttcccactggcgcgcgcggcccgactcccgccgccgcactgcctccccctcgccgcgggcgcgcgcgcgtcctcccgcctgccaaggcggagaagctgagttcctcccagccggcgcgcaggcgcgcggaccgggcgacgaagtgagggactacaggcggggaaggaacgctcgcgcgctcggccccggtgcgcaggcgcgcagctgctagtggagtcccgctgcttggcgggctctcggtcgggttcccgcgccgggcaaggggcggctgaggaagcaggagcggtctttagcccctccagcggcaaccccaggccccggcctggtggaagatatgaagagaaatgcaattggtttccacagggctacgggtcaaagcggctgccaaggcctgtcccctagaagtcaggaccccttcgtcctccgctcacctggcggccagctcctggcgtttccggacacttagattcctgcctgcttgggaaagcgatcagaaaaaggttgcccttctcaccgctctgctgaacagcgacggcttcagaaacgcatcccatccaagagtcactggcttgtaacatgaagcaacttttttttttttaatacggggtctcgctctgttgcccaggctgctggagtgcagtggcacggtctcggctcactgcaatctccgcctcccagactcaagcgattctcctgcc

SEQ ID NO: 1006 - DNA, 813 bp, Artificial sequence
  DNA replication origin
tgggtgggcaacttacccgagaacgtgcgggaagagaagatcatcgagcatttcaaacggtgagtgacacgaggcccgcggccgcgctcgctcctcgggcgccgcttcccgccccggcccgttgccggcccctcccggagcgcggagctggtgaggaggactccggcccggacccacgggcgctgtgggacctcgtcagccgctcggcccgcgtcgcggcgttgggcctcgggtgtcggcggtgcgggcggccaagccgcgccgccttcgaagagcccgcggggccccggcggccgcgtccgtgacgagggaggtgaccgaggctcggcctccacgcagccggcgccccggggctgccctcgcgtcagcccgggagtcggtgggagatgcgctgggcggcggggtcgcgtccttgcgcgcagtgcccggcccggagcagccgggacccgagcccgcccgacagccgggtccggcgccgccactccaagctgctctgcgggcgctcggcaatgtctgacttcgggagggttccgtgcgaagggaaaggcggtgcgaaaacagaagtcgcagtaggtactgtggtcgcgtcgcggacccggagagaccatctaggacctctccggaggatttgcagccttgaaactcactgggaatggcaaacgtttctcgtttttgcggggctgggtggagagtggtgtgaaataagttggtgcgcccgtttgggcttcctcgtccccggcggaggagaccgcgtctgacaggaggttgctagccccggcgcccgtagcctcgggtcgcactcccaggccgccc

SEQ ID NO: 1007 - DNA, 1308 bp, Artificial sequence
  DNA replication origin
aggccgccctaagaccctggtgccccccacccctgaattcccgaatcaaacggtaaaacattccaaaccttttacgatgagaagatgtagcttaaaaaaaaaacctcccctgaatatttttgtgaattataagaataaatgttgtcgttgatacatcttattgagtagcgtgtagtgcgttttctttgtgaaatgcctgtgtaccgtaacagataggcctccgcataaaacacttattaaaatgacgattggcttggacttggtgcagattcagagggaccatagcaaatctgtggttgtcctcgaaaatgacagtttattccgatatttaagaccctggaaggttttaagtttggcttttaatttcccttactatgtagtgagtgaaggaaattatggagcgtcctcattaatgagtcaccatgggaaaaatagattgcgtcgctcgctttgagccgcttggataaggaaatggaagcagcggcggcggagctcctgtcttttaaatggaggatcattgattgtgttggtggttgctgttactggggcattaaaccctcgccgctggagcgcgcgtctgcgcgtgtccgcgtgtgaaaaggagccgggaatcgtggggccattcataacctgcttgagctgtcctcggcaggccggggggaggtgcgcgcttccagggactctcccggtgtttactacgtcgtgcctgagaaaccaggcgggggcggggggaggcagggagcaaaaattcacctctgtgccctaggatgaaggggagaccacgggctggattgggaagcagatgggaactttctcttcctggcgctgctccaccccttacccgccccccacctcctggcttctcctcgagtatcgtcagtgttttgatggaaaaatcatttaggtgtacattattggagtggaaaaaccacttagatgtgctcactttaatcccctgtggactttctctgtaggtctctgcctgggaaattcgtatgcaccgatgtacaagcacgtgcattgcagcattcgctcgctcctcagtgttatgtgcctagacgtgtcatttctcattatgcagattccagagacattgcatgcttatggctgggagtttggcccctctgcaagatgagggggcagagagaagaaagaggaaatcgtcccaggcagctttggaagggttcttagtggacggtgctgcggtctggcttgtgtgaatgactttctaaaatggcggccaggacccactttatgtgggaatcagcagagccgatctcagaatgcacagagggaggagggggcgga

SEQ ID NO: 1008 - DNA, 869 bp, Artificial sequence
  DNA replication origin
ctggtgtcttggcagcttccttccctggctgctgaggggccttgctggctggtggcaccttcaccaccccatccgcggccctgggctgctcgctgactgccgtcacatgtggatgcaccatgatcctcacatcccgtggcacagtataggggtgcagtcggtactcagactgcatgactagtacctctgactgcacaggggctgtggctcgagcgacaggaaggtgataatgcacttcctcctcgggagggtgctgggaggccagtgcaggcacaccagctggggctggctgcggggtgctggcacgctgtggggccctgacctctatttgctggggctgcagcggagcccgaggagagtgaagcgcttctggccggatgctgtaggtgatactgggcagcgtgggagtgttcattctcacctcgccctgggagaggtggctcagggacacagtctgggtgatgctgtggggtggcatgatgacagactgctctgggtggatgctggagatgaactggggcactgggatgcctgcagccagcatgactgtggcgttggtggagagcgccgtagatgcagtactgctggggtggcttgcccttgggaatgaggatggcccgggtccacttggtcgaggagaatgagcatctagctttgcagctgccaaatgggagacagttcgatctgctgggatgctgggccccgaggggacatggttgacttctgtaggcagtttgctgggcagagcaggagggtggtggggcgtgagcgtggaccccaggttggccggctgaaggaccttggtctcgattttaagggtgacggggtcagcaagcttcttgtttgtggtgacaatgcttggggtgagg

SEQ ID NO: 1009 - DNA, 1438 bp, Artificial sequence
  DNA replication origin
acttgtccccacaggagtcacaggcgtagaggatgtgagtgttggggtctgtggaggtggggcagcagtcagagtgggaaggaccccgggctctgcccacattcacacccgggtggcccccctcaccttcttcctgcacttgcttcacagctttgctgatctcggccttcaggacttccgtctcatcggctgtcactgcagctcccaccggcaccactgcgggcagagtcgcagggcctaaggtgaaggcacgggcactgccccatcatcgccaccctggcagcaagctgcctgtgacttccctctgctgcccacagcccgcacctgtgagctgagtgacggctgtcgctgccagtgcctcggtagccagcgtgaccatgtcatccacagtgaccacgctgacctcactgccctcctcgggctccaggatcttgatgcctgccttgccctggtgcacggtcttcacgtgggagcgcaggttgtctacccggttgaagccacgcccacacttatcacacaggtaaggcttctctcctgggggagcaaggttctctcttgcctttgtgggaaggggccgcagggatggggtgggaggccctcaatgactcgtttgcccagcaaccctgtcttttacagcaggaggtgctctggggtggctgcacgggtgcctctggtgacactggcacctctggaagctctaggaaaatggggtcctcatttgaacagaactgccttcaaggccacctgcagcaagagctagcacccgaggctggggtctggggggtcccttccttccccctgctccccacctggcagcagggcctgggaaggaacaggcatggtaggggccacagctcaccagtgtgaatgatgatgtgcttggacaggtcccccacgttcacgaaggccttgctgcacacgctgcacttgtgtgggcggatgttgtcgtggtggcgaatatgattggccaactggctggactggacgaatctgtggggccacaggaagggactcgcatggaactgccccaacctgggcctcctgcctcaccctctagactgaaaaggacccctaggaccagagcctggggcgtgggcagcagtcagctcagtccccagccaagcccccagtttgtcttctgagccccctcactgtggggtgtctggccagtgggtgtgggggagggggcaggacctcttgccgcagcgctcgcagacgtagggcttctccccggtgtgctggcgcacgtgggcgatgagggagctggcctgggtgaaggccttaccgcacatcacacactggcatggcttctcacctggggaccgggcagaaggtgttggtgcctgctcctctccgtgccctcccagtcctgggcatggccgctcaccacccacctgtgtgaatgcggacgtgccgctgcagagcgccggggtctgca

SEQ ID NO: 1010 - DNA, 1227 bp, Artificial sequence
  DNA replication origin
gccgaggagcaggggtgtgagggcagccagggcagccctggccctacctgaggtggtgaactgcttcccacactctcggcacttgaggggcccgtcagcgatgtggatcttcaggtgggccttcaggttccctacctgtgcccagggaggggtcaggggggccaccccacagagctcggccccgggccccctcacctgcccctcccacaaaggaacaattgactctcaggcttgccagggtccgtgaagggctctatctctcctgggtcaggagaggtcccaggtcccagcggtgagaggtaagccgccccaccccattttttcaggaccaaaccccgccctgagtcggcctgccctccgcagagcaaccgggagctcccccgcggaagtggctctcgctgcgcctgtttcctgggtgaacaagctgatgagctcctggaggccggggctgtgctccccgcccgccccaccacgtggcatgcatgcggctgcggccaccggcggctgccaggcgctggttccgggaggggtccgcacacctggttgaacttcttgtcgcagtgtgggcacttgtgctccttgtccgtgtcgtgggtctccaggtggcgcatcttggaagtggggtcggagaaggagcggccgcagtagtcgcactggtagggcttctcgccgctgtgcaccagctggtggcgcttgaggttgcccgaggtggtgaagagcttgccgcagtcctcgcagcggtagcgcgcctcgcccgagtgccgcttcttgtgcaggttcagcaggctgatgaggcggtagctcttcccgcactcctcgcagccgtagggcttcagagggctgcagggccagaaggcgacaggaggcagggctcgctggggcgtgaaaggccgggcctggcaggggccggggtaggaggccggcttggggcagtacctgtgcgtcttctcatgggccttgcacgcggccgggtcggaaaaggccttgctgcactcccggcacgagaagggcttctcccccgtgtggatgcggatgtgccgcttgaagttccccgtgtgcgtgaactccttcccacagtcctgtgggtgcagcggggaagcggggtgtgaggagcagccggtgggaggccggaggggagggacgctggctgggagggctggccatagtctccctcacctcgcacttgtggatgacggagccgtaggccttggactccgtgcggtcgcc

SEQ ID NO: 1011 - DNA, 1314 bp, Artificial sequence
  DNA replication origin
ggctcaagaggtgcaggtgcccgtgctacctgccccaaggcagccctcactaccctgtgcccaggctgctgggaggtgacaggacagccggctgggtccttggcatctgactcaccgctggccgcactctgggcctgaccgccgcgctcctccttgaggtccctgctggggcctatgggtgtgctgcgtcctgcctgctccagcctgctcagcgtgctggtggccaccttctcctctttggctctcttgtcccctcctggagatggaacagggcagacctgccgtttcccatcaagtgcccgccatctggaggtgtgaggtggcccagaacttgctaggtcttcctcgtcctccctagggtacctctaagtagtggtttgctgatttgttcattcaccaaattattcacagggcacccactccatgccaggctgatggctgggcactgggaatacaacagtgatggttcctgcttgtgtgggacatgcagaccccatgtgtgcactaagggagctgatcagaggtcagcactaggaaagggaggaacgcagcctctggaagtctacagcaaggcacctggcccatagtgggcatctgagggcttttatcttagcagctaagggaagtggaaggaggggctcaggagaacagacccgcaggagggtttaggagcctgcccgtgtgcaaaggcactgaaccaggcacggctcccgggtgctctgtaggggaaaggcaggcagagaggccaccctcagacctgaggctaacccttgccagcacccacaaccgaggcagggccagatgaggaaactgagacccagaaagtcagaggcagagcccacatcaaaagccaaggtctctggccatctgcttgggagcagctgccaataacctaccttctgtggccaaggcctccgcatttcccccagggctggtagccggctcagcaagtgacttgagggcatggcaggccgtgatgatgtcctgcatttggaggaaagtggccacggccagcacatcatccacgttctcagggctcaggctcagcttggccgtgtacataaactccagcacctgccccaggcctaccaaggacaggacagctgtcacagacccacctcaagatccggcaccggcagcctgccccaccactccactcagcagcaggacgcagggatttaggaacagctgagtggcaagcctgcatcgccccatctcctctgtggagaggaggcaggtaacctgggggatctcagcactaccaacagcccttgaaaagaagtgctcgctgagggtctgaatgcctgccctgca

SEQ ID NO: 1012 - DNA, 1524 bp, Artificial sequence
  DNA replication origin
ccactgggctatttgcagccccgacactcattggcgcgaggttgggggaggagccagcctggctccccctcccacgccccccacccggggtcaggctcaccttggcgtacggatctcagcgagccctccctcggccggccggtgctgggaaagggggcagcttcccaagtggtcagtggggccgaaaaccacccccagcccccagcagccccctccccagacagcagtttgcgaggatgaggactgctcaggggaccaagcggccgctgggccgctggggcacgtcgggtctgaaggagcccttggccgccagcccggccaaggtgaccctgcggtaggggagggcgggtcggccgcggggctttcgccggctccgccccctgggcgcccagactggccgcggcgctttgtctcccagcgcccccaacccccttccaggctaaatataggcctggctgcaggccctgcgccccgcccccacccggaagagtaattatagccgccccattcattgagcaactagtgtgtgccaggcgcgccgctgattcccacaagagtcctgcaaagcaggtactatgattaacggtgtgcctagaaggacacggaggatcagcgaggtcaggcaactggcccaaggtcacccagcctggaagtggcacggttgggatgtgaatccttgctatggctctggaaggccatctgctgggtcaacctggatcagtcgccaccaccaatgggctgaggcagcttccctcctcccaccctggcagcccccacagggaaagggggctctcgcgtcttgtagctttgggggtgggcctgggcagcaggtaggggaaattgaaaagacgcagctctctggggctggagacctgtgagaaagtccaggtcaggtagtaccagagactgggaggggcagagaggacctagaaggtttcctcactttgaaggcctagcagaggccaaaggcctcctcctccaggaagccctccagagccagagcacaaagagcccaggcagatgttcagagccccttcccaaaccctgtcttcaaagtcagatggaagtagcgcatgctcaggagcctgaggtgagaggatctcttgagcccaaggtttagagaccagcctgggcaacatggcaagaacccgtctctacacaaaatacgaaaattagctggtatggtgacgtgcacctgtggtcccagctagtcgggaggctgaagtgggaggatggctggagtccaggagatggaggcttcagcgagccgtgatcgcaccaccgcactctatcttgggtgacacagtgagaccctgactcaaataaaataaaaaatgaccgggtgtggtggctcactcctgcattcccagcactttgggaggctgaagagggtggattgcctgagctcaataaatacaaagtatttatttgaaatcagcctggacaacatggcaaaactgcatctccacaaaaaatgcaaaaattaacagggtatggtagcacatgcctgtagttccagctact

SEQ ID NO: 1013 - DNA, 1981 bp, Artificial sequence
  DNA replication origin
tgctttgcaggactcttgtgggaatcagcggcgcgcctggcacacactagttgctcaatgaatggggcggctataattactcttccgggtgggggcggggcgcagggcctgcagccaggcctatatttagcctggaagggggttgggggcgctgggagacaaagcgccgcggccagtctgggcgcccagggggcggagccggcgaaagccccgcggccgacccgccctcccctaccgcagggtcaccttggccgggctggcggccaagggctccttcagacccgacgtgccccagcggcccagcggccgcttggtcccctgagcagtcctcatcctcgcaaactgctgtctggggagggggctgctgggggctgggggtggttttcggccccactgaccacttgggaagctgccccctttcccagcaccggccggccgagggagggctcgctgagatccgtacgccaaggtgagcctgaccccgggtggggggcgtgggagggggagccaggctggctcctcccccaacctcgcgccaatgagtgtcggggctgcaaatagcccagtggaatcagtgagtcatggaggctggaaataccgcgccccctctgatcccctcccctcctcctgaccgcagccggtggagctgcactggggagcaagcctgggggtgtgaggggtgggggacccctccggagagctcccctccccaggctccctgaaccaacccggacacccccgcccccaagttccagctggctttgcctctggggctgtgtgaccctgggccagtcactcagactctctgggccgcagaatccccattaggtacaagaagggcttcaagagggcaggcgacccggtgcagcctgcccacctttgcgtccctgcgcctgggactgaaacagtgcccgccacatagcaggacagtaaatatctctggaaggaaagaaataataaaaagggaagggcaggcagttggacgagaaggtgttgcaagggttttccagaaacaatcctggggttcctgcccaggggggtctggggagcccacggaggaggccgaggaacgcccacattttgtgaggtcttcagctttaacttgagctacaacccccatccccaaatctcaaagaaggtgtgtctgtttctctcagggtttccagccctgccctaagtttgagaactccaggcaggcggcctccagaagtctgtgagactgtcctttattgtgtatacaggttccagcgtcagggctctcccacggccccctccccagtcctcccccaaggggcccagagtggtgggagtgagaggccaccctaaggcacactgaccagagaggcatggagggaggaggctgacttgccctggggacccctgctaactgagacccacccttcccctccaccctgcttctgtatgtgggagacgaaaccaagagtcattgggggcagcaggcatttcccagggttaaggctgatggaaggtccctatcccagatgggagatgggggcttttcctatgactcccccccatcccccagctggaagacgtggggagggttgcatagccttagagaggtagaatgaggggaaatactcctcagtgcccagaggtggggagttgagagcagcagttgacaccctgggttcagatctaaccttcagtgacaaagcacagcactcagtggctcggggatgtttccccgttaatgaaaatggagattgtaaatctgatttgagaaagctctgaatttggcctcaaccaatggtaatgctgagtatttgaaggacaacgataggggtgtgtgtgttacacacaccgagcctatagattcatagattaaagagggggatggatggagagctgactgcccggaggggaaggtggcaagaagctggggtccaacctcgaggacccaaagccccatccatgccctggcttccatctctgttaggtgatcctgtctgcatgggag

SEQ ID NO: 1014 - DNA, 2923 bp, Artificial sequence
  DNA replication origin
taatgaaaatggagattgtaaatctgatttgagaaagctctgaatttggcctcaaccaatggtaatgctgagtatttgaaggacaacgataggggtgtgtgtgttacacacaccgagcctatagattcatagattaaagagggggatggatggagagctgactgcccggaggggaaggtggcaagaagctggggtccaacctcgaggacccaaagccccatccatgccctggcttccatctctgttaggtgatcctgtctgcatgggagcagccccaagaacacaggcctgtgggagggagaaggaccagccccacccccaaccccacttggccttgcctggaggccccagcaggcgcaggacggcaggagtttcatgcagtttatcacgaaccagctgtattggaaaaaccccatctatatacagatgtggcatggctctgccctggcacagccagctggctgggggcacggggtgggcaggcagcctgctcgctggcgtggggcttggaggctggtagaggggaagtttaccgtcacggctgtctcctcttggccttgctgagccctcgggcaattagttccacttagataggcacccttgcctgtgaccttccctctgtccctcccactccccttggccaagagggttccaggtccctggtccccttgccctgcagagacttcatagatcagagggtttgtctgtctgtctgtcctgcagagcttgcccatatgtcctgctggtcccattcccctgacccacagtgggttctttagatcttccttccctgaccccagcccctgtactctggattaagtgacggaggccaaatctgaaatctgggcatcatgtgtcaggccagggagtccctggcctgccctggatagagtggagggccctagtttgggaggatggtccacctggggtctggggtgcgtgggggctagaacctgggctgagatgtcctggagctgttgtaatggggttagcgaggctttgctggcaggcgtggggcggggggacagggaaagggaagggagaggcactcagattttgatctccgtccggaaggtctgctggacgtgttctgtatgcgggtgacgccgtgcccggatagtgaggctgccgtcctcccgcagagccgaggtcaccgacgtcgggtccacgtcctccggcagctggcacttgtgagcgaaggtgttcatgacagtgccgtcagccgccagctggggaaggggtgacccgtcaggcaggctgccccgacccctgtcctgcttgtgacaagccagagccctcttctccccattctaaccccagccagaccccacatgccgaggggctctgccctcaggtgccgaggggctgcccagggtggtgatggccacaggccaaaggctctgcagggacagcgcaggggtgcttcgcagagctccagtagctccaaggaacaggccagggacatggggaagaggtggggcttggagagagaggaggctccgtggcagtggctccgaatctggggctcctggggaacgtggaggtgacagaggagagccgtgccttcctggatccccgggcacattgggcatctgcccgccagggctgagcgccggcccctcccccgcaactcagccagcacatagtgtccaggggagtttggggcggctgagtcactgttgggggtggcagggctggcacatgctgcctgtgggttttggtgcccccagtccatggcatccctggcagggacgcccagaaatccacccttgaatgtggaggggaagaagccagtccttgggggcttaggaggaggcttgggtcaggtcctctcctctctcctggcagccgtggctgtccctgggcaacgcccctgttcaggcctggccataccctctccagggtggaggccccagtgcctcctagaagttcggactcagacacgctagagacccagtgaccctgagacctgtgggcgggcgctgtgtgtggtttggagtgtgtgtgacccgaaactgcagggcccctgcccagcctcgggcctaatttaggggtcccaagatgggggatgggtctccagctgtgggagggaagagggcttgaggtgggtcacatggagaaacccctccccccactgcccaggtgagttccccacctacccgcatccgcccccctatagctaccagaggagctgtcctcactctgccatcaccatctcacacctgtcatctcccaccctcaagccccaccccctcaggctccctctgcccacatccctccatccctctcccattcctcggaggctccctcagctgctcaggccctggaagaaaggatctgggaacctcggtgcaaagagaggcagtgagggggccccatggccatgggttgcagggacaaggccttcagttagccctgggggagtttgggtggggaagggacactggccagggtctggggtcccaggatggtaagggggagtaggagacattggaggcaggagcagaatttgggatgcggtgagtagggggtggggggctcaccttctcagcccgcacctcgatgtggttgttggaggtggtgacaatgatgtcttcaggtgagaagtctctcacgtccaccgcaaactcataggcgtctcctagggtcttgatgttgcctgccccaccggggcgggctgtgggatgggctgctgtgagcgaggcatggagcaggccttgcatgcagatccgggggttctggctccttctcttggggcaaggggcggctcccccaggccctacctcccccctagctgtttctccctaagctcctcctcattcctacagcccaccttttctggggtgggggtggggcctcacccagcacagtgtgtgtgtatatgaggctaggtctgtaacaaccccaccccaggcctggagcc

SEQ ID NO: 1015 - DNA, 960 bp, Artificial sequence
  DNA replication origin
ccactcctgccacccccgctcaggaccccttacccgagaagctaggaagtggcccacaccaggcgggtaggtgatggaggcgagaagcaaggtggccagagcggagtacacaggcttgctgtggggggtgggtgagctctagggctggccctccctttcctacatcccgaggagagggaagtaggacctggtccaggcagcagcagagctccccacctgggggctgataccgaggcaaggactggtgaggaggaagggcgggagcagggaacatggccccctccagcgggtagaacccgtggggtgagcccctcaactgggtatgactgagggcagaggaatcacgcaggagattgagaggagaattggggcagaggcaggctaggagggaggagacagtgggccgggccggggcgggccatgtgcatctccggggcaggagggctggccaatgccaaggccaacgccaggggccacacaaggtttgaaggggcacagggtttgaggctcagtgagggggtggggtttcgctgagagattgtagaatgaaggagggatgggggttcaatgtggggttcgtagcccagtaaggaaggggggacagtgactgtggggacttggagagggttgttagatgctccacgggctagggagggatttaggggctcagtgggaggatgggggtggggctttctacataaggtctggagtccacaagggactcactgagatgtccccagcccctagcccagagcctacctagtagccagcagtttggagctgtaccgattggtcttgatgaagctgaggaaggttcgctgacagaagaggtaagcacagctcaggacgccgcagatgccactgcggggtgaagggaggtaagaccagagcctgaccccagtaccaggggccgcagtccaggccttggggggaatgccttttggactctcaggggcccaa

SEQ ID NO: 1016 - DNA, 774 bp, Artificial sequence
  DNA replication origin
tctacaaaatggagatcgcaaccgtccccacccgatagcgagagggcgcacacccgcattccaggctggacgggtctctgggcagcgggctcctccccgcccagggcgcatgccctgccctcccctcctgtctgtccctgtccgggctgcaggagagcaggacagatgggtcagggaggaggtgacatggggagggggtcctacagtcacaggtgggtgggggtggagggcccacctgagatcagtgtcgcccccaggcgtcctgttcagcatcgaggtcatgtcttcccacttctctgtctgggattactggaggggcttctttgcggccacctgcggggccttcatgttccggctcctggcggtcttcaacagcgagcagggtgagccccctgggctgcctgaccctggccctgcctgggggccggggcgagggggccctcccttctcccctgtgtacaccccttgctcttcctttccctctctctccctctttttcctcttccttgttcccacctccttctgggaggatggagggggctgacctgtgttgagcaagaagggcaggggccctgagggtagaagggatgaggctgggcagggaggcaggagcctggttgtgggggcctggaatgccaggacacagattccgagtcaggacctggcaccccctccaccctgggctgttagtctgggacttgagtttgggtcgggtgggagcgccatcttggctccccactgccctccttccccagagaccatcacctccctcta

SEQ ID NO: 1017 - DNA, 1061 bp, Artificial sequence
  DNA replication origin
cagggctctgacctcccgaagctgtagtatcatctataaaataatgctgaggcatctcccttatggggtattggggggattaagtgagatacacgcaaaggaggcaacaaatagggcttccccactcctgccaccccactcaaggccccttacccgagaagctaggaagcggccggcgctgggtgggtaggtgatggaggcgagaaccaaggtggccagagcggagtacacaggcttgctgtgggggatgggtgggctctagggctggccctccctttcccacatcccaaggagagggaagcagggcctagcaaggcaaggactggggaggaagagcaggaatgggggacatggactgggccagctccaggggacagaacctgtggggtcagccccacactcctgggtatttttaggggtagaggctgataggagaattggggcacaggcaggctgggagggaggacagagtggggccaggctagggcagggctcatgcacctggggcaggagggcttggccaatgccatgggcacacatggtttaaagggagagagggaccaacagggggttaaaggtcagtgagggggttggggttcactgagggggtatagactccaggagatatgggggttaaatggggaggtttgaggccagtaaggtagtcgggcagtgactgtggggacttgtaggtggtgttaggggctccacatgtggggcatgggctaggatgggctttaggggctcaggtggcgggtagagctttctacataaggttgggagtacggtgaggggggagctcgctgagaggtccccagcccttagcccggagcctacctggtggccagcagtttggagctgaacctattgttcctgatgaagccaaagaagattcgctgacagaagaggtaagcgctgcccaggatgccacagagacccctggggagcatggagacatgagcccagagcccgaccccagtaccaggggccgcagtccaggccttggggggaatgccttttggactctcaggggcccaaggcacccactcaccccagcgcca

SEQ ID NO: 1018 - DNA, 595 bp, Artificial sequence
  DNA replication origin
gggaacatggactgggagtaggatgctgggaggaaatgtggatgccagtgggtgggggcattaagggaagggggccacagagctcggagggctcagggcaggagtgagcagaaggctttggagggcgtgaggagttagatgggtacaggcccctggggaggtgtgggggcactgatggagatcatggtgcactgagggaatgtggggtacaggccactgggtgggcctgaggcatgggggccaggccctgcgctgagccttgtgtcaggacagtcacccagatgccctccatgccccaggggtggtgcagagcatcaaggaccacatcacaaagcccacggccatggcccgaggccgcgtggcccacctcatcgagtggaagggctggagtgcccagccggcaggctgggagctgtccccagctgaggacgagcattactgctgcctcccggatgagctgcgtgaggcccgctttgctgcaggtcagcgaggagggggactggccagggctctgtgggggtgaagctgggtccttgggggcccagatcactgcatgggcattgtctgggcaggaaaaaataatggcatagggtgg

SEQ ID NO: 1019 - DNA, 985 bp, Artificial sequence
  DNA replication origin
ggggaaggtggacctggaattgggaatcctcttttgcccaggtgtgcttggggtgccccttgggcatccatgtggagagctggaaactcagttgggagctcaagtgaggagtcagggctggaggtgtgcacatgggcagcgggcagcggaaacaggaaggtgagacctcctggggagagagggtggagaagggccaggacagaagtgtgccagccaacgggcaggggtgagccagggaggagccaaagaggggacccaggacagcagccagagaggccagaggccaggataagagcgaggctcaagagggcaggaaggctgcacagctccagctccaagaagaggctggagcagcccccattggagttggccccacggattttcctggcagcttggcaagggctgcctcatgaaagcctgcttggaatgggtggaggagaagtggaggacgaggaagtagatgtgggacacagctctctgcacgtccagcgagaagggagcagaggaacggccaagtcgctggaaggaaacagtggtcacaagcttctgagaagacaggagatgcttgggttgccaggatgctgacggccccacccagtggtaaaggggacagaggagtgagaatgcaggagaaggtccagagcccaagacacatcgcagcatatgagatcccggctgaatgcttcaaagtggacagagtggagagggcacagtgacaccgcaggagggagagcagagcctctggggggagggcaggggcaggacccagccctgggtggatgggccagaaggtcttgggtgcagcaggaacagctcttcctttgttgcaggagggaaaggcgatgatgtgggcaaaggtgcaggcaggctctggtgatttgggtggaaagatccaggtgacacctttccaaggatcctggacccagtgagggaggggcagaagcccccagcagtgtgtggggtaggggagggggtgtgtttcatg

SEQ ID NO: 1020 - DNA, 890 bp, Artificial sequence
  DNA replication origin
agcctggtcctgcagggtactccggagggtaagtgaaggggaattttcggatcccagacaaaagagctggggttctgcacctggtagtcattggcttggggccactctgggtggggccaacagaaatttacctagggcagcccctgtagaaagagccacaggtggtgcctcttagaagccatgcagggcgccagggcaaaaacaggagaaaggaatccaggggaattgggggcagcacccacatggtcccctaaccccagtgacacaatctggcctagagcattaagtccctccgctggcgggcagagagtgagcgcagggaccattgtcttccagggagggaggatgcctgcagcaggggagccctgggagaagggagccgggagacctggaatagacctaagagagggctaacaggatttgccggttgactgcgtggccccggggagagtgggggaaggcaggaccctgagaaactcccagggttgtagttggtgcagtgggggatggggggaaggtggacctggaattgggaatcctcttttgcccaggtgtgcttggggtgccccttgggcatccatgtggagagctggaaactcagttgggagctcaagtgaggagtcagggctggaggtgtgcacatgggcagcgggcagcggaaacaggaaggtgagacctcctggggagagagggtggagaagggccaggacagaagtgtgccagccaacgggcaggggtgagccagggaggagccaaagaggggacccaggacagcagccagagaggccagaggccaggataagagcgaggctcaagagggcaggaaggctgcacagctccagctccaagaagaggctggagcagcccccattggagttggccccacggat

SEQ ID NO: 1021 - DNA, 1234 bp, Artificial sequence
  DNA replication origin
cgcaggtgacacgaagcagggtcccgtgccgtgccgcgctctcatccctacagccacacaccccctgccgggtgcctgggaaccagctctggttcttcctggcttcccggaggaactgcgggcaccgggagaactagcagaccctccctttcccacccctccccaagacacaggtcttaccagctcacccccacagccccttcccacgtcttaccgggtgcccccatctgcagagcccctgaaccctgttggcaggaaagggttaatggtggggcacaggttataaagaaggttcccctgccccctaatcctcctccccacccccatccttggacaggggacagaagggccagagcacagctgatgttcccagttacccctgggcctttctctctgtgtctgacctgtcaccctccactctcccccacgtggtacccaaggaggtggaggggacctgcccttgcctgggggcccagggcaggccccagcctcttctatctgtgaggaggggacacacagtcttgcacagagattgggggatgggcagtttggtctttggagccccctacctccacccccacccatcaccaccagctttccaacaggctgttgggcaacattttagacaagcgattgggctgagcccttctcccaccttggtctgttcaccccacagtgggatcaggggggtgtgactgggagtgggggtggctttggccttggttcaggctctgcaggctgaggccaaacccactgaccaccaccacacccatcacccctagtagcttacccagaatagaggggaccttgtcctgggggtattgagcaaggagcacaatgaccttcccccatcctctggactcgaagggcttctgctcaggagttcctgtgggcattcaggtaagtggctcaggatgtctctgggaggtatcggggtggaatcccggctggggaaggggaaggtacagggtcaggctgtgtggggttcctttacttatccatgcattaagctgatattaacatgatagctgccgtgtgccaggcaccgtgtgcatgctgggcatccagcagcaaggaacccagcacagcacctggtacgggaggcctgcagcctagcgggaggggaaggaagtttgaagagtgaggagtgctgagggttctttaggagcaccaggctccagaaaccccaaaggttctaggcagtctctggctggggccagctccaggtggaggg

SEQ ID NO: 1022 - DNA, 1016 bp, Artificial sequence
  DNA replication origin
agggacagagatggccctcccgcgcgctgcggccacaggtgtgcccgagcctcccggctgcgctcccccgggccccgcccgccgcgccccgcggtgtcgccctcccctggcagcggcgggcactgcgcgggaggcggcggcgcgaggcgagccgggcgcggcggcagcagggacgacccaggctggagctgaggccgagctgagggcgcccgagccccccgccccgcccgtcctctggctccgcagcgctcagccccgggcccgcggagacatgaacgccccgcggccccacgcaccccgggcgcagcggcccggccccgcggccccgtgatgggctcctgcgtgtcgcgaggtgagggggcccggccgggggcggggggatcgggtgccggggacccgcgcagtcccctcgccgctcggagacctgggggatggggctggcgacccgcccttcacggccccgccgcacccctggggacgcggcgtcctgagggggacagagctagggacggtagggggcgggggcagcgcagagagcgcacgtgcagaggtcaccgcatccccgccccagtttgcagccccgcaggtgacacgaagcagggtcccgtgccgtgccgcgctctcatccctacagccacacaccccctgccgggtgcctgggaaccagctctggttcttcctggcttcccggaggaactgcgggcaccgggagaactagcagaccctccctttcccacccctccccaagacacaggtcttaccagctcacccccacagccccttcccacgtcttaccgggtgcccccatctgcagagcccctgaaccctgttggcaggaaagggttaatggtggggcacaggttataaagaaggttcccctgccccctaatcctcctccccacccccatccttggacaggggacagaagggccagagcacagctgatgttcccagttacccctgggcctttctctctgtgtctgacctgtcaccctccactctcccccacgtggtac

SEQ ID NO: 1023 - DNA, 1436 bp, Artificial sequence
  DNA replication origin
ccccgccccctaccgtccctagctctgtccccctcaggacgccgcgtccccaggggtgcggcggggccgtgaagggcgggtcgccagccccatcccccaggtctccgagcggcgaggggactgcgcgggtccccggcacccgatccccccgcccccggccgggccccctcacctcgcgacacgcaggagcccatcacggggccgcggggccgggccgctgcgcccggggtgcgtggggccgcggggcgttcatgtctccgcgggcccggggctgagcgctgcggagccagaggacgggcggggcggggggctcgggcgccctcagctcggcctcagctccagcctgggtcgtccctgctgccgccgcgcccggctcgcctcgcgccgccgcctcccgcgcagtgcccgccgctgccaggggagggcgacaccgcggggcgcggcgggcggggcccgggggagcgcagccgggaggctcgggcacacctgtggccgcagcgcgcgggagggccatctctgtcccttcggggctcccccacctcctggggttgcccgggctgaaggtcagggaaggggacagagggggcggggagactcctggcatttggggcacaaagtaaacaacatgaatttaaccacaccaacgacgactgggcacgaaggcttgggagcgaggaggggtgcgcgcaagaacaacagttccattgggcctatttttagaggatgaaagtgaggctcgcagaagttagaggccttgcctgagagccctaagctgtgagttcagcgacttttgactgtcagcgcctcattcagagctattgaaattaacatatgcaaaataatatatgcccagaggtggggtagagagagtgcgggtagatagtgcgctggtggcctggcggcgggatgaagggtctccagcgatggttgaagaggggggcaaggctgcctctcagggcttgtctagggcagagtaaactgaggcacaggtttttttccccagccctggacggcctctgtagtcattcacacttactcgcacgtacctacacacacactctcccatgtgtacatacccctcattcacacactgatggtcatacacacacatatatatgcacacttgcatttacatacacgcacacacactcacatacctacacatgaatacacagtctcccatgtgtacatacccactcacacccacacaatgacagttatacactcacattgaagcacgcttgcatttacacacacacacacacacacacatcccagctcctgaggtgtgaagatcctttagcaaaatttcccatgcacacagcactcaatgtcagtgtctgagaccctcactcacacatagcatctcgctctctccttcatgcccacctgtgcatcaggcagggcaggcactcttgtgtctgttttccagttga

SEQ ID NO: 1024 - DNA, 823 bp, Artificial sequence
  DNA replication origin
ctctgggtctctggccagggctggctgcctttgcagaaggcagactagcttgtgggggcagaggagatggcccgtccacctggggcagggttaggggaccctgagccatgagtaacccccagccccagggggagatgggagggaggctggcaagagggagtgggccgagtgtgtctgagcagagagcttgatttccgcaagccctgcctgggctgcctgctgtggttctgctcactcctccctgggacctgactagatgcgccaagcctgcacggaggccaaccgtgggcagggccacgtcagattcagagaaacccagccagggacccctgtgcacgggtctgagcatatgagagtgtgtgttggtgtccctgggcgtgtgcgcctgtaagtgtgtttccatatgtatatgagtgtatgtgtcactgtgtctttgtgggagtgtgtgcttttgtgtggatttgtgtgtgacagtgagtgtgtgtgtgtgtgtgtgtgcacgtggtggggaatgaggtcatctgggcagaagggagctgagcttgtccaaaccactggagacactgagggagagagacagactcgggaaggggggcagtgggtgatgaggctggagagaccaagactgaggctgagggagggaaagagatcaaggcagagaggacagatgcagccaaggaccgggcaggggacgaggtaggggtgaagcagacagacagacaggcagacaggatgatggaggataagggggcagataaggtgggagacaaggagaggcccaagagaggcccacagagagcatgtttgagagagggggtgccag

SEQ ID NO: 1025 - DNA, 1734 bp, Artificial sequence
  DNA replication origin
gactcctacaggtgttctgcctcctgaagcactgcccaggtgtgcaggtgagaggacaccatgcagggcgaaggccgcttctcccttgaggtccccttccccaacttacactggtggtgtaggtggcctcggggtcgtcctccagcacgcgggacaggccaaagtcagacaccttgcagaccaggttgctgttgacgaggatgttgcgggcagccaggtcacggtgcacatagttcatgttggccaggtacttcatgccagctgcgatgccccgcagcatgcccaccagctgcagcacgctgaactcgccatccttctcctgccggagcacaggcgctcagctgcaggccagccctgaacccgccaggccagccccgggctcaatggccaggcatccccgccccctacaacccacatccttacccgaaggaacttgtccagggccccattctccatgtactcagtgatgatcatcatgggcttgtctgtaggggggtgggcacaggtgagaggtaagtgggcccaggcatgtgggagaggtgggcacagatatgggggaaggtgggcacaggtgtaggagaggtgggcacaggtgtggggagaggtggaacaggtgtggggagggtgggtacaggtatggggagaggtgtggggaaagctgggcacaggcggaggagtgggcagaggtatggggagaggtgggttcaggtattggggaggagggcacaggtattgaggacaggtgggcacaggtgtagaggaggtgggtacaagtatggggagaggtgggcacgggtgtaaggaggtgggtacaggtatcggggagaggtgggcacaggtgtagaggaggtgggtacaagtatggggagaggtgggcacgggtgtaaggaggtgggtgcaggtatggggggaaggtgggcacaggtgtaaggaggtgggtacaggtatcggggagaggtgggcacaggtgtagaggaggtgggtacaagtatggggagaggtgggcacgggtgtaaggaggtgggtgcaggtatggggggaaggtgggcacaggtgttaggaggtgggtacaggtattggggagaagtgggcacagttgtagaggaggtgggtgcaggtgtggggggaaggtgggcacaggtataggggaggtgggcacagtcacagacagagcccctgctaagtggcccctctccacccagtgtgggcaggccccaagcctcacatttggagatgacgccctctaggcggatgatgttgtggtggctgaactggcccatgatgccggcctcgccgaggaagtccactcgctgcttctctgtgtagccggctttcagcgtcttgatggccaccggcacctccttcttccccgaggatgtcttcagcatgcccttgtacacctccccaaactctcctgtgggcagacagggtcaggggagtgccctggtcagccccggcatgagggctcccacactgtgtcaccaccgctgcctcctcagggccccttggcagggggccaacctcacctgctccgatcaccttctgccgagtgacacaggatggatggatctcggtagtgaacttcaacacagcctggttggggtcctcatatgtgtgggggtccacgtatgtcttcaggggcttcagttgttctggaaggagaaggggtggggtcacaggcagctcaggaggggccccatggggggtgctctggagtcagaggagaaggtcacg

SEQ ID NO: 1026 - DNA, 1719 bp, Artificial sequence
  DNA replication origin
ctacacagccctcccagactgcccaattcctggccccccggcccccattagggcatctattaatcttatgtttaccaaatagaaatgggcacttcatacgtgtctggcacaatgctgggtgctaggatgcgatggtgagacagataaacactgtttcagctccaggggaattcaaaacttggcttttatgctccatttgaaattattcctgcatgtatcaggagcttccgtgagaccagcagctcctgaggagcaggaatggagaccaatttatctgtgtcccatggcccagcggtgctcagttaatgtttgctgaatggatggacagacagatggatggatggatagatgggtgagttggtgggtggatgggtagatgagtgtgtggatggatgggtgggtggatgaatggatggatgggtggaggggggtatgagtgggtggatgaatggacagatgaatggacaaatggatgggtgggttggtgggtggacaggtggatgagtggatggatggatgagggatggatgggtgggtgggtggagtggtggttggatggatggatgtatggatgggtggggaggatggacagatgaatggacaagtggatgggtgggttggtgggtggacaggtggatgagtggatggatggatgcgggatggataggtggatggctgggtggaggggtggatagatggatggatggggcggaggatggacagatgaatggacaagtggatgggtgggttggtgggtggacggatggatgagtagatggatggatgagggatggataggcaggagggtgggtgggtggagggatgaatggatggatggatggatggatggatggatgggtggataggtgggtggttgggtggaggggtgggcagatggatgggtggaggggggtatgagtggatggatggatggatagatgaatggacaagtggatgggtggtttggtgggttggcgggtagacgagtgaatggatggatgatggatggatggatggatggatggatggatgaatggatggatggatgtaggggtggatgggtggaggggtggatggatggatgagtggatgggtggacaggtggatggaagagtgagtgggagagagaatgggtggcaaacctaccatgtgcatgtgaaatatgcactccagggccagagaaatgagcagtgtttcagcgcccagagagacactgtggagaaggtccaccaggatgcctacctgccttacacaagagcctaactttggcacacctgtggcacacctgtggagagctgttctggccccggttgtctggcaggcctgggctactccgagcaggggaactggggcacagtggctgcacctccggctataccctggtttttccagttcctgatgcccgcccctcaggtggcagcatgaggtgactcagggacagacgcccttatcgtgacgcaagtccagcccccagtggagcccctcctcccaaggcacagccacctcccaggctggcaatggcaaggttgtgaggtcaagaggtcatggtggcaattcacctagggccagtcaccgcccaagccaggcccagcaggtgaccgcaggaaccaccttggcccagggatgtggagcttggactttgtctctgggccctgacagacggcaaatggcgacctatgggttactgacccagcaaatgagggagctgacaacctcagg

SEQ ID NO: 1027 - DNA, 2361 bp, Artificial sequence
  DNA replication origin
cacccaacttccattaaggactcggggcaggaggggcagaagttgcgcgcaggccggcgggcgggagcggacaccgaggccggcgtgcaggcgtgcgggtgtgcgggagccgggctcggggggatcggaccgagagcgagaagcgcggcatggagctccaggcagcccgcgcctgcttcgccctgctgtggggctgtgcgctggccgcggccgcggcggcgcagggcaaggaaggtgagtgcgcgcggcgtctggacccctggcccccgggccccagtgccccctagagcccggcgctccttgacgcgcgcaactttggaacctacctggtgtcgcccagtcccggcgaactggagtccggagggcgcacgggctgcgatcgaggcgagccctggcccccacccggggtcataggggctccggagaataagcggtttcagcttggtcgcacgggcctcggaggctgcggagaagaggacgcggcgcaggccacgcggttgcagtccaggcggcgacttcgggaacgcgtcccggcggggggcgtggggagtcccctagagaagggggtgtttgggcagctttccgcgggctcagcttcttagtgacctgaattcactaacccgcttgccgaggttttgcggagaaggcatactgtgcaggcctcgcattttggggagggggctcgggcgggcgggagccccctgtcgaagcccctgttccctgagattttctccacgccccccttcacctccagtcccgggggagagcgtggagataggttcgggccaatccctgctcacacactcctttccctccttcccaagccgcactcccgggctcccggggcaggttaggggccgcgagtgcggacaggaagtcccaaagtcaagcgttctgagcaagggtgactcagaacgaggaaatgcggcaggtgggggtgcggcctcccaaggtgtggagctgtcagcccagggccaccagggagtcaggacacccgggggtgggggactgaatcacccacccccgccccagtgttcccggagccgcgccgagtgaggggccgcagactttgctcatggcgcagcgggtgcgtggtgggggtgttgtccctccgctagggtcagggcgaggatgggggctcctgccctggccgaagaccttcctgtccacccagcccaggccagcttcaatttccaacagtgagggcaaggcttcccctcctgcctgggcagagcgaggtttccgcaggctccacaagggggaagccgggaggaaacttgggccggtgagaagtttccttcttttttttttttttttttttttttgagacggagtttcgcacttgttgcccagactggagtgcaatggcgcaatctcggctcactgcaacctctgcctcccgggttcaagctattctcctgtctcaagcctccctagtagctgggattacaggtgcccgccaccaggcgcgtctaatttttgcatcttttagtggagacgaggtttcaccatgttggccaggctgattctgaactcctgacctcaggtgatccacccgccgcggcctcccaaagtgctgcgattacaggcatgagccaccacccccggcctgtttccttctttttctgcctcccaaactgggtttggaggttttgctgttctgtgttgggaggaaaagaggccggatctggagccgttgggcagtggcaggtgttgggggtggcatcctgtctcagtctctggagtgacagggcccgggttggggtctcaaccgggacttctggttgcaggagctcatggcaaggatttctgccaccctcaatatccgccccaccaacgtttggtcctcccccttcctgggggactgtggttggagagaaggggagagacagctggaatcactataggcctttctcctcggctgcccatgggggggtgggggattaggcgggtgctttgctgctgcagtccccaagctggcctggaagcctggagctgccttgtccttgtcccctgtgtccacctctccccagcctgtgtgattaaaccccacccccacaccccatgggatgcagggggaaaggcttgtgtattgcactggggtgggggtacatttttgcttcgactctgagtccccgtgaaagagtccctagagaagtgtgcctaggtgggggtgggcatgatggcctagctggcagctgctggtttcagttcctgggaatcaggctgtatgtggtgggtctgcctgggggtggcttagggggcaggcaggaggacacaggtgcctttttcacctacccccaggctgcttcagacttctttcttgccccctcacccctaggctatacttggttgcccacg

SEQ ID NO: 1028 - DNA, 1443 bp, Artificial sequence
  DNA replication origin
gttcccgaagtcgccgcctggactgcaaccgcgtggcctgcgccgcgtcctcttctccgcagcctccgaggcccgtgcgaccaagctgaaaccgcttattctccggagcccctatgaccccgggtgggggccagggctcgcctcgatcgcagcccgtgcgccctccggactccagttcgccgggactgggcgacaccaggtaggttccaaagttgcgcgcgtcaaggagcgccgggctctagggggcactggggcccgggggccaggggtccagacgccgcgcgcactcaccttccttgccctgcgccgccgcggccgcggccagcgcacagccccacagcagggcgaagcaggcgcgggctgcctggagctccatgccgcgcttctcgctctcggtccgatccccccgagcccggctcccgcacacccgcacgcctgcacgccggcctcggtgtccgctcccgcccgccggcctgcgcgcaacttctgcccctcctgccccgagtccttaatggaagttgggtgagaaccgactcctgttcattcatgccctgcgtgacgtcaccaacgcccgccctcaggaatgtctttaaaggggccgggctggcacccggaggagagggaggggaagtccggaggggtttggaggaggaccttggggccctctggactcgcgggctccccgcaggccttccaaagtttgagcgtctcaaagcgccagcgcccctacggattagcccccagggatctctgagcctggtatcctcggtggaaacgtttaatggttttgcgctgagccatacccattctgcccttcacctctgagactgagctcaatgcgactgagctcaacgctggcctgaaggtctgagctgaaatggattgggggtccaataagcagttgcctcctaagcagcaggcctgagagagtggcccagaaatagacctggatgccctccttcctaaaacccttgaagagtatatcaagctgctgatggtcaaaaagagtatctctgttcagaagcctataagcctactatgatctgagaataggttcatttcctctgggaatggatcagacatgcactatcttatttattaataattctcatctgggaggcaggggtcatcatccccatgttacagaagaggagactgaggctccaagagcagaaacaacatgcccaaagggtgcacagctcacgggtagtagaagcaggatttgaatcctggtggtctctgcttgaaccactgcttctttttggggaagggggcaaggggcacccctggcccccgaccctggcatgggttgataggttttgacagtttggaggacacctgcctaccacctgccccttgataaggcctcttcacaaaacttcctcagacatgagctcatctcccttcctgacagaagcggctagtgtgagtgaaacaaacggg

SEQ ID NO: 1029 - DNA, 1598 bp, Artificial sequence
  DNA replication origin
atcccggaaaagaaaaaacaaaaccaaaaaacaaaaattagccaggcgtggtggcgcaggcctgtaatcccagcaacttgggaggctgagacaggagaactgcttgaactcaggaggtggaggttgcagtgggctgagatcgtgccactgcactccagcctggaggacaaagcaagactctgtccccaccacccccccaaaaaggaaaaagaatggaggtgggagagttttccagtcgtgtatttatttttgagcaggccattgatgcctatggtgcaacagaccacagggagaatacacagggaagctgctgtgccccccaccaagaggttcccagtcttcctgtccccaacccctccccagctcctcatccaggtcccttgccctctgctcagcacaaggcatgctggcggccacagacatatctactgacatgaacacacgccccccacctacactgcgctggctgggggataccacaggggcctaactagggaacatgtgaaaggtggcaagaatggacaagtggcctgtggcatgatggatgggctggcagacagatggatggatgggttggtagacagacagacagatggagccgctaggaggtgactacctggctggggaggcctgtctgagaagtgatggatgggatgcagagggggctgagaggggctgggccaaggtgggaaggaaggaagaaggaaggaaggaaggatggatggctggatggatggatggatggctggatggatggatggatggctggatggatggatggatggatggatggatggatggatggctggatggatggacagattgacagatgaaggacacagctgaaggggtggggggatagatgggtgggttctagagaaatgatgagagaccctgctgaggacagggacaggatcttgcaggggtgttgtggcagaagtgatgggcagggctgggtagggatagactgctcactgcagggctagctacaggcaggcgacagacagatggacccatgtgtggacggacggatggagggggaacggagggagtgagcaggggcccactgggactggttgatgaagatggatggacagacagagggaaacagggcaggaaggggaatgggaatgggggagggaagaccatgtcctgtcccgaggtggtccctacagagcccctgagacctggccattaggaaagtgtatgcaagtttgcctggaaaggtgtgtgtgtgtgtgtgtgtgtgtgcacaggcatctgtgagagctctggcgtggctgtgttcctggcacttcctggtgtgtgtgtagccttgtgagggcccaggcctggtgatgggcgtggaaataggggcccggaggagtgtaagctctctcctcttccctcaggggctgagggcatcctggtgggtttatccagggagcatggcagccagggagcctgggacagatttctggtgaatgggggacttgtgtgttagtgcctgcagggaggggaaggggctagagtcagactgggaagttctcagagacagaaaacaaacagaggggcttccctgaccccttcctcctttcctcctttcctcctttcctccc

SEQ ID NO: 1030 - DNA, 778 bp, Artificial sequence
  DNA replication origin
aagggggtagatgctctggcttgagctaggagtcccacctgggtgggggtaagctctctattcccaggtggtcaggggaggtccctggcaattaacatctgacccctgaaggatgaggagaggttgtcacgaaaagatctggggaagagcatctggcagaaggaagagccagcacaaaggccctggggcaggagggagcttagagtgaggaacagcagggaggctggtgtggctggagctttgtgagcgagtagggagggaaagtggaggggaaagtagggagggaaagtggaggggagagtagggagggaaagtggaggggagaagacgaggatagcagggggcgatgccagaccatgaagggccttgtagggcctagggaggactttggattttattctaagaggactgggaagccctggagggctttaaacgggagcgatgcagcttgaatcccagttgggaaggatgggccaaagggagcaccagagtgatgttaggggcacattgcagggccgttactgttttctgtggggtatctgggggcagttggacgttggggtctgaaggtcacaagcaaggtgttggcttgagctggggaggggacagcccttggtatagaggcagaaactgaagctgggagggactggattaatcctgcacttgtgtttagggtaggagaggagataggccagggtgggcagagggtatgcctgcttgaacgtgggcctgtggcatggcagtggcagaggaatagaagcctcaatggccaccttcc

SEQ ID NO: 1031 - DNA, 907 bp, Artificial sequence
  DNA replication origin
ggcctacctgtgattccagagtcctccccattttccagcctggagaaccccaggttccctggcatcctggctcgcctggaggagtctcctgtgtgccagcgtctgccccttacctccttccttatcctgcccttccagaggatcacccgcctcaagatgttggtggaggtacctcgaggggacaggccacagtgagggctgggcgagggagatacacctgtgggcgggccgggtctcgggagtatgaggactgcctcattgtgctgatcccaccttccagaacatcctgaagcggacagcacagggctctgaagacgaagacatggccaccaaggccttcaatgcgctcaaggaggtgagctgggcagggcaggggctgcttggctcctgaggccccccctggacccccagcacgtctctaaaacagcccccagctgtcagagtctccggtccccaggcaagagtctgaggctgggctctgggagccggagctgaggggctgcaggtgacctccccacggctcccccagctggtgcaggagtgcaatgctagtgtacagtccatgaagaggacagaggaactcatccacctgagcaagaagatccactttgagggcaaggtgtgtgtctgcagccagcgggatggggaccccaaggggcagctcttgtttcttccttgccctgggggcttcaggccagttaatcgctgcccacaccctcccatctaccatcttgtgctctctgcctggtgcccctgggcctgacccatccttctccatccctctagattttcccgctgatctctcaggcccgctggctggttcggcatggagagttggtagagctggcaccactgcctgcagcaccccctgccaagctgaagctgtccagcaaggcagtctacctcc

SEQ ID NO: 1032 - DNA, 2109 bp, Artificial sequence
  DNA replication origin
ggaactgtcggtatctagcactcagtaggtgctcaatttgtttatggaatgaatgaatgaatgaatgaattcactgtgtccagatatccgaaccgcggcaaaggttaagtgacgcgggctcttgagggaaccgaggaaaagccgggcaggggctggcgggcgccccacgctctcccccgcccgtctttcccccagccgtcctctatcaggaatacagcgacgtggccagcgcccgcgaactgcggcggcagcagcgcgaggaggagggcccgggggacgaggccgagggcgcagaggaggggccggggccgccgcgggccaacctctcccccagcagctccttccgggcgcagcgctcggcgcgaggctccaccttctcgctgtggcaggatatccccgacgtacgcggcagcggcgtcctggccacgctgagcctgcgggactgcaagctgcaggaggtgggcgcgcgcggggacccggcggggcgggggcgggccggggagtacgcggtccggggacttagcgggaaccgggccatagagggagggggacacacaaagggggttgctggcgcgactgtccgcgcggaaggttggctctaggacctgactacacgaggccgtctggaagcgaggacagcaagccgctgagcgagaggcgaggggagccgggcttgggtgcgggtagggggcggagccagcgggacgaaacctaggataggacagggccggatgaggagcggaaccattggaagagcaaacgcctggtgggcgcggaacaaggcggggccaggatcaggggcgggacctggggggtgggcggggctctgggaagaacgcgtcggggcggggcttaggagaggggcgggatcgaggacaggaaaggcttgcacaatttcccgcggcgggacgtgggtcgccgggcccgcccggcgccagattaggagtggggctagagaaggggcgaggacgcgaggtgtggcgtcctggggtctggggatgtgaggccagggcctccgaggtgaactggtcctgccctttcgaccccgtgtgtgccctccctcaggccaagtttgagctgatcacctccgaggcctcctacatccacagcctgtcggtggctgtgggccacttcttaggctctgccgagctgagcgagtgtctgggggcgcaggacaagcagtggctgttttccaaactgcccgaggtcaagagcaccagcgagaggtgaagaagtggtctggcctggcccggggtggggacggagccagtggttggccagctcccagatctggggtctccatcctggctctgactcctcaggttcctgcaggacctggagcagcggctggaggcagatgtgctgcgcttcagcgtgtgcgacgtggtgctggaccactgcccggccttccgcagagtctacctgccctatgtcaccaaccaggcctaccaggagcgcacctaccagcgcctgctgtagggctgggggctctgaaaggggcgggggcgtggagggagtctcaggcaggtgtaggcactgagggctgggtgacgtaaggtgactctgggaggggaggggtccctgaaaaggtctctgtgaccaggataaggtgagatgcaaccccaaagggcagtaaggatgtgctgagaagccccctgaggaccccgtggatggccagggttgtggatcccaggaattcaggcctacctgtgattccagagtcctccccattttccagcctggagaaccccaggttccctggcatcctggctcgcctggaggagtctcctgtgtgccagcgtctgccccttacctccttccttatcctgcccttccagaggatcacccgcctcaagatgttggtggaggtacctcgaggggacaggccacagtgagggctgggcgagggagatacacctgtgggcgggccgggtctcgggagtatgaggactgcctcattgtgctgatcccaccttccagaacatcctgaagcggacagcacagggctctgaagacgaagacatggccaccaaggccttcaatgcgctcaaggaggtgagctgggcagggcaggggctgcttggctcctgaggccccccctggaccccc

SEQ ID NO: 1033 - DNA, 964 bp, Artificial sequence
  DNA replication origin
ccccaaccctagggcgcaagatgcgggtgtaccagcgtgaagaggtccccggctgccccgaggcccacgctgtcttcctagagcctggccaggtagtgcaagagcaggccctgagcacagaggagcccagggtggagttgtctgggtccacccgagtgagcctcgaaggtcctgagcggaggcgcttctcggcatcggagctgatgacccggctgcactcttctctgcgcctggggcggaattcagcagcccgggcactcatctctgggtcaggcaccggagcagcccgggaaggtaccagctcctcccatgggccctgagggcagccagatgccgggtgggggtgggggtgggcgatgcccactcaccggccgcctgaggccgtcagggtgcctgggccggggcccaggccccaggcccactctctggaccccccaccctcagttctcgccctctccagggaaagcatctggaatggaggctcgaagtgtagagatgagcggggaccgggtgtcgcggccagcccctggtgactcacgagagggcgattggtccgagcccaggtaccacctcccgtttgggcttgggtccgagacagggtgcaggcgaactagggccgtgacgctctctctttcctaggctagacacacaggaagagccgcctttggggtccaggagcaccaacgagcggcgccagtctcgattcctccttaactgtacgtgggaggggggtccctgggaggaggtaacggaggaaggggctgcggtgtggaaacggggaaaagagggtttggagagttgagaggtagggatcgagtgagaaacggagaatggaactgtcggtatctagcactcagtaggtgctcaatttgtttatggaatgaatgaatgaatgaatgaattcactgtgtccagatatccgaaccgcggcaaaggttaagtgacgcgggctcttgagggaacc

SEQ ID NO: 1034 - DNA, 984 bp, Artificial sequence
  DNA replication origin
tggccagccccactgtcctctgtctaggtctgatatcttctcttctgcagggccaggtgggtggcagagcaaaagaggaatggactgtgggccacctgctaccctccagccccacctgactgggccacctggcactgcccaccaccctgtagcagtgtgccagcaggagagtctgtcctttgcagagctgcccgccctgaagcccccgagcccagtgtgtctggaccttttccctgttgccccagaggagcttcgggctcctggcagccgctggtccctggggacccctgcccctctccaagggttgctatggccattatccccaggaggctcagatacagagatcaccagcggggggatgcggcccagcagggctggcagctggccacactgtcctggtgcccagcccccagctctggagggaccctggagtccccgacacacacagccacagcgccgggccagccacggctcggagaagaagtctgcctgtgagtcaccctggggaaggcgggtgtgggtgccatggcagggggataggggaggggctgggcagctccttaacctttatgtcccaaggttcccccaaaagtcaggacaagtggtagattagtgataaggaaactagtggggctcagggaaggcaagtgacttgtccaaggttatgcagtgagtgagtcaccattctgggcagcctgatccctctgtctactgcagccaggccctgtgctctccttacccctctcgtggaccccagggctctggggaccagatgctagcagaaacacaggcccttcccttgggcatggtgcctgaacctccccaggtgctcagggccaggggcagcagcagggaggaggttgggggagaccccagcccgtgctctcactccttgcccccaaccctagggcgcaagatgcgggtgtaccagcgtgaagaggtccccggctgccccgaggcccacgctgtcttcctagagcctgg

SEQ ID NO: 1035 - DNA, 738 bp, Artificial sequence
  DNA replication origin
aaggctcatcctgccacgggagggggtctggatccgagttggggtgagttagggggttgggccctgaaggccctctggctctgcaggctttcgtctcgccttcatctcggacttctgccgcatatcccgtaacagtacgaacaccacacccagctgcacggatttgtgaatttcacgcgggcacccgcgccccatgcccacctggcccagagcaaacacactctgcccttcaggctggggaggaggggcgcggcgggaggggcggggccctgagctttggtgggcgaggccttcctgggaagggcgtggcgctgagccttggttggcgggacgctgaggcgggaggggcagggctgtctgggaagcacggcgctgagccttggtgagggaggccggcctgggagagggcgggtgctaagctttggtgggcggggcctgtctgggaggggcaggtgctgaggagggaggggcggggcctagctgggaagccgggagccgaaactggacgggtggggtggtgcctggctggggtgcagtgagctgattctgccccggacaaatgcgcggagccggctagggtactggctgaacgggcagggccagattctagggagaaggaggggaggaaatgcggggttcggagtcgagatccgagagcctctccagaccccgcaacccagatacaaggcctctcgcgacgtgggggtgaacctcgccctcttctactggaagctgctg

SEQ ID NO: 1036 - DNA, 845 bp, Artificial sequence
  DNA replication origin
aaatcatcatggtgcctgcctctaaggggtgctggtgatagaagtggcagttcctagcacaaggccctgttatgaccattatctggttgccctgcctccaggaaacggaaggcttggtggcagaagtggcagctggcagggcagagggacacccagatcgggcaggagctgcagcactgggagaaggaaggactatgagctcatcaagtgtcagggcctgtttgatgaatacccagggatggaggagcagtcgctcagcagcgtgtgccctgggcatgagtggggcccctgggggcctggcacaacaggggaggtggccccgggcctgacactccctgcctgccagagctgcagtttgggttcatcaccatctttgtgggagccttcctgctggcacccctgttcactctgctcaacaaccgggtagagattggactggacgcccacaagttcctgtgcaagtaccagcgaccaatggctgggcgcggctggacatctggatctgactgctcctgctggaggccatggtacaccttgaggtcaccgtgaatgggagtgaggtagatgaagggaatacaggggcagggggcgggggagatggagctcagagactggggaagggggttcaggaatagggaaatacagggctggagaaggaaatccgggtcagagtttgggaaataggggagaggaggctaggatcccgggccaaaggctcatcctgccacgggagggggtctggatccgagttggggtgagttagggggttgggccctgaaggccctctggctctgcaggctttcgtctcgccttcatctcggacttctgccgcatatcccgtaaca

SEQ ID NO: 1037 - DNA, 724 bp, Artificial sequence
  DNA replication origin
tgcagggccagggcagcaaactgtagatgtgggcactcctatcacagggggcaacagaaatgtgcatcctagggccaagaggctggtgccatgatcctaggctaggggaagccccccaccttttcctgactgcagagggagctctggaagtgcagcaatgggttctaattcatttttggttttgcaggacctttttccccagggcatggttaaaagcatgtggatggatggctagatggatggtgggtagacggagaagtaaacagcaaatgagtggacatgtggaaaagggatagatagacagatgagtgagcaggcagtaggccgacaaatgggcaggtaaactaggcaagcaatcagtaaatttctatagtttattcacaagtaagtgagtagacaggcaggtgggtggagggatggatggatggccaggtgggtgagcagataaaagtctagtgggatggttgatggacatgaggatggatggatggatggatggatggatgatggttaggtgagtgagcagatgaaagtctggttggatggttgatggacatgaggatggatggatagatggatggatggatgaatggggggatggatggatgaatggaggatagacagatagctaggtgggtgagcgatgaaagtctggttggatggttgaggattgatgaatggatggatgaatggaggatggctggatgattaggtgggtgagcag

SEQ ID NO: 1038 - DNA, 1248 bp, Artificial sequence
  DNA replication origin
ctccagcaacagcgagatgttgtctcaaaaaaacaaaacaacaacaaaaaaagggatctgtcacctcccggccgagatcgtgaggggaggggcttaggggtccttccctctcctcctgggagagcagcccaggagagtaccccggcatagcgccgcacccttcgccgagctgagcgcgcctgggagccgctgtgctacgccgaggaactgagcctgcgcgcgccgtctcatgtggaggggtggggcggggtccgccaggggcggagtctccctagggggccgtaaccctgcccttgaccccaggcccggcccaaccccgactctgagggctcggcggagccacggcgacgcctgcgcctgcgcaaccctctgcagcagtaggtgcccagccggccgtaggattcgtgcgccttccgcagctcggagccggacaagtgagaccaggcggccccttgggtgggcagggtctgtccgcggaggggctggagccagcagaagccttagcccagccaaggctgatttgcccttcctcggcgtgcctcagaggcaattcccgcctcactcgctttaggtctctgaccctgtcctttccgcaaactggggccccagccctgcccaccatctctgattcccacctgttcaatccgctctgatgcacacctgactggagcacacccagcccaggctgcgctctgtggccagaagggctctctggcagtggcagctggcatgtctcacctgcctgtctccaacggagaggctctggactggtattaggtttcagatcgggcagagggctgggcttctgacccctgttcctctcacagattcctgggcagagattcccatggctcctacttctcttacatgtggatgcactgagtggtgagatggctgcttggggtgagtccagctgggaccttaagcgggcagttgacacgaggactcctctggcaagtggcagaaatcctggaccgcacaatctccaggaagaagaaacatacagagatgggcatcgcccacctgctggtagagggagtctacactgcggccttcccactgcgtgaggaagagatgtcccaagctcagatctctcccaggcctgacagcatagcagcagtggctggggcatccggagagcactctcaaacctccctgcagctctccctccttttgtcctcctagggcctctttgaactgcctgggtaccaggtacccggttcagatctcaactcttgccaattgctg

SEQ ID NO: 1039 - DNA, 1076 bp, Artificial sequence
  DNA replication origin
gcgccgccccctggccgcccctcgccatcccgccgcgctgacgtgagtgcgcgcgcgtccgccgcgcccgccccggcgcatgcgcgctctgcgctgtcttctcccggcctgagcagcagcagctgcggcggcggcggcgtttgagtggaggaagatggcggctccgggcggctcggggtcccgccagctgtgaggagccccgagcacggctgtcgcggcctgaggcagagcgcctctgctctggccctgtccctggctccctcattaccgtcgccagcggagcgaacccgagagcgtggagcgggctgggccaggtgaggcctctcctcctccccgggccgcagaggggagccggcgccttctgccctttatgcccgggactggcaaggggcagcgggcgcccggggtctgacgcaggccccgtatcccacgcgggggtcggtcctggttgggcagggtgacttgctatcgccgtcctcgagtgaggcgaggaggaggacagctcctttccagccagcccttgggttgggagcgaacccaccccctctcctcagcagggtggttctcgtcccctcacccgggcagtgaaggggtgtgtggcccgggcaaggatggctttagggtgtcaggtaatctttcatcgctcctccgaacatttcactcctttgcgagagaggagtcgggggtcgggtgcccatcaaaattggggctgcggctgggggctagcatctctgaacctgcagctgcaaagggataattttggaattggtttacgttaaataaaacacaaaaggcctttcctatcccctagcttgttgagtgttcccttagagaaatgggaactgcggatctccttgcttgagacagcaatccatgctgtgactgtggaaggcttctcttggcgagaattgtgtgtgcaaagggaacggtggagggtgggaacgaatttgtaagcgaagagaaaacgattgtgagatcttgatggtcgctgcagagtaacttcagcgctgagttcgtttgaaaccttcggtttgttaagattcagaataaccaattgctttgtctgttaaatctcc

SEQ ID NO: 1040 - DNA, 1030 bp, Artificial sequence
  DNA replication origin
cctcctcctcgcctcactcgaggacggcgatagcaagtcaccctgcccaaccaggaccgacccccgcgtgggatacggggcctgcgtcagaccccgggcgcccgctgccccttgccagtcccgggcataaagggcagaaggcgccggctcccctctgcggcccggggaggaggagaggcctcacctggcccagcccgctccacgctctcgggttcgctccgctggcgacggtaatgagggagccagggacagggccagagcagaggcgctctgcctcaggccgcgacagccgtgctcggggctcctcacagctggcgggaccccgagccgcccggagccgccatcttcctccactcaaacgccgccgccgccgcagctgctgctgctcaggccgggagaagacagcgcagagcgcgcatgcgccggggcgggcgcggcggacgcgcgcgcactcacgtcagcgcggcgggatggcgaggggcggccagggggcggcgcagtgttgagaaaggccgtggtcacaggccgaggttctgtggagggtggaatgcgctcgggggagctaggcctccgcacccgccttcgccgcgtctctagcgtcgacctgatagccgcacccaccctccgctgcactgtctggggcaactgggtggttttcccggtggtttgagactaacatttagccaggaattaactcacttctaccccgagggcccgatgagcagagagggctgtggcggatgtgagtgctcttggatatcgccaaggggagggaaactgtgcttgaggtgtgcaggagaagtcttcccttaaccgtagcctcgtagcaaccactgtgagttcttactagctccacttttcagatgaggaaactgaggcacagaaaacgatcacttatttgcccggagtcacacacctatcagtggaggtggggcggcgcgggaaagaggatttaaactcaggcttgtctggttcccaagctcctttacttcctactagctaggttataggatccagcaaagtccccctt

SEQ ID NO: 1041 - DNA, 891 bp, Artificial sequence
  DNA replication origin
tatggagaccccgataaaagctctcatatggggatgtgttgagaaaagacaagcggaggaggtgagggggacaattattgagggatggggctgcaaaggggagcaaggaaagacggcttttgacgccaggtatgtttgtacacgcctgtagtcccagctactcaggaggctgagactagcttgaacccgggaggtggaggttgcagtgagccgtgatcacaccactgcactccagcctgggcaacagagactctgtctcaaaaaaaaggaaagaaagaaagaaaggcagcttttgatattgtggaggctgagccatgtttgtatgctgatggaatcgtcctgtagtaacgcagagagggatcatgtggtggggggaggggacgagagctaatgaataaatggggagacagccatgggagcaggggcccatcttcacagctcccattgcagccaaatcaaggcagggagggtggtgggtttggggatgcttcttctcatctgatgcttctgtttgtcagtgacacatgagtgagatgaggggcgtgggggatgctgttgtgaaatgatgacctggagcggagggagggcggtgtggccaaggaaaagtgagacttgcaggcagcatctgacatgagtggttaatgcttgaaagtgaaacccatcaataagacaggatgttctccaaccgcattaagctgctcaacatgggtacaaggctgagtgagtttagccagggtggggttttgccaatgaacagaacaggatgagacagggcagatgctggcagggcatgcatgctagtgactgtgtatttgcaggttgcctggtcaggtcaaagaactaggaagtggcagagcttggggagggaaggatggctgggaggggtcgggg

SEQ ID NO: 1042 - DNA, 1550 bp, Artificial sequence
  DNA replication origin
ctgtgagctgaggactgagctagcggaggaggtgaaatcaggaaggattcttgtaagagggagcatttgggatgaggcggcccccagcctcacctgggcgtctttgccagctaacactgcggttcctaactctgaggccttcttctgcctgcctcccctaccctcagtccgtcctgtcggacacagagcggcgtccagctgagcggctccgagcgcaccgcggatgactccttcggcagcctgcgggggctctcggcccagcagaccccgtccccaccgcggcgctcctcgcccggccgaggccgttcaccccgccgaggcccctccccggcctgctcagactcctccacgctcgccctgatccactccaccttacacaagcacgagctgcaggtccaggtaggaaggggcttgagcgttctgggctcagccagaggcctggagggagcgtctggcgccctccgggtaggggcggggcgggggcaggtccggggccagggtccgggggaggagtccgagcgccttggggtgcagccagagctctgagaaagtgtctgagggtgtcaggatcccgaaggaggtggccgagagctctgcggtgaagccagcccagaagtaggggtgcttgggcagctgggggtgggcgcttgggcaggtggagggaggaggctgcggcagtgttagggtcctggtagagagggagacaggtccctggtctacagagccaggaccctgggaaaaggtctagcaaggggaatcagagcttgggaactaggggcagagccagggtagggaggagtctgagagtggaaccaggatgcaaggaggaggagcctgggagccctgggggtggggtcagaacccaggagacgagtgtgcctgggggtttgtctggcatccggggggctttgataggagttgtccgggaccccagggaggtgagggctcagagggtggtgagggcacataggaggggagcgggagcctggctctcaggcctaggcccctatcctgccccaggccaggtccaggccctggaccccgcctagcgtaggctagtgtgtatccctggaaccagaagagagtaggtgggctctggaggcctcaaaggacccccgctagactctgtgatccccgcgccccaggacatgcgtgggcgctatgaggcaagccaggacctgctgggcaccctgcggaagcagcttagcgacagcgagagtgagcggcgggccctagaggaacagctgcagcgcctgcgggacaagaccgacagcaccatgcaggcccacgaggacgcccagcgcgaggtgcagcggctgcggagcgccaaagagctcctgagaaggtgccggggaggtctgagctgggggtgctgaagaataagtcggcggctgggcataacatcagtggagccttatgcgtgtggctctgcactaatatggtcgccactagctgcatgtgcctattaacgtttaggtatttatttatttatttatttatttttaagatggagtctcgctgtgtcacccagggtggagtgcagtggcgcg

SEQ ID NO: 1043 - DNA, 2187 bp, Artificial sequence
  DNA replication origin
tggctctgtagaccagggacctgtctccctctctaccaggaccctaacactgccgcagcctcctccctccacctgcccaagcgcccacccccagctgcccaagcacccctacttctgggctggcttcaccgcagagctctcggccacctccttcgggatcctgacaccctcagacactttctcagagctctggctgcaccccaaggcgctcggactcctcccccggaccctggccccggacctgcccccgccccgcccctacccggagggcgccagacgctccctccaggcctctggctgagcccagaacgctcaagccccttcctacctggacctgcagctcgtgcttgtgtaaggtggagtggatcagggcgagcgtggaggagtctgagcaggccggggaggggcctcggcggggtgaacggcctcggccgggcgaggagcgccgcggtggggacggggtctgctgggccgagagcccccgcaggctgccgaaggagtcatccgcggtgcgctcggagccgctcagctggacgccgctctgtgtccgacaggacggactgagggtaggggaggcaggcagaagaaggcctcagagttaggaaccgcagtgttagctggcaaagacgcccaggtgaggctgggggccgcctcatcccaaatgctccctcttacaagaatccttcctgatttcacctcctccgctagctcagtcctcagctcacaggtggcctccaaaagggccgtgcctcccctctgagactgggggctccccagggccgggggtgctgagcagctacagcctgggtcccaggcccccacccatttgcagttcagtcccaggccaccaaaagtcgtggcgggggagcccaggactgcctggcagtgccctgtcttcccacctctttgggctcacacctgtgccaggtcccttaggctctgctgtagcccctctccgtcctctgtctccagggccacctgctcctgtagccgcagggattcctggagtgtagttagggagacaaagggtggtcctggttctgtcttatctgaaacctcccattcccctcccttcctggtccaccactgaccaggtggcctctgaagctatgtccataggccagacatctggtagaccccacagcaggcccgaggccctcaatgaacagaccaggcgcagagaacagctgtgtcctgccccaggtcacacagtcgattggaggagagccggacctagaacccaggccaggccccacacagaggggtgaccaaaccaggctgtaccctgggggagtgagtgtcccactagtggggatgggcagctgggattccagaggcagcatctggacctggagagcacggatgggagttcaagtcccgactctccagcttactggctctgagactggacaagcatttcccctcttgggcctcagtttccccatctgtgtcatgaggattatgctacagggctgctgggaggaagaaatgggatggaggaggtgaatgttcttaccacaaagcctgcacacctgtgagggctgaacctgagtgtgagtgggatgctgggggtggtccaggcagcccagccctaagcctgcgtccatggatctggccggtaccccatcccaccctgccccatctcaggggcagctgcagctcaccagggcctcaagcttctcagtgaggtccgtgttgacctgatccttctccggattctgcttctgaagacgcttcactgccaggcccagctctgtcactctggagttgggggagcaacagaggtgaatacgggaccaccccagcctctcaaatccactagctctgtgtccaccatgcttctccaaacccgagggagggaccctaacatccacctccctggctgtgtgaccttaaacaagttgtggctcctctccagacctcacacttctcatctgtgaaatgggaatgaggttcccaccagctttatctcatgggaaaacactggaggacttgtccaggtagcaggagtaaggggcacaagttgtttttttgtggttttcttttgagacagagtttcgctgtgtcatccaggccggaatacagcgatgtgatcttggctcactgcaacctccacatcctgggttcaagcgattctcctgtctcagcctccctcgtagctgggattagaggcacacaccaccacac

SEQ ID NO: 1044 - DNA, 1134 bp, Artificial sequence
  DNA replication origin
ccagggggccatgctgccagccctggccctccctgttgtgcccccacctctgcggctcctcctccagccggatgagggcactctgcaggtcttggctgtgctctgtgtcctgggtgggagagaggttaaagcatcaggcagggcaggtggagggcaggggcaggcctgcccctgccccaccctggcacccacccttagccgctgctgctccagctctccggatctctccagcagctgctgctccagctccgagtacctcttcttgtactggagaatgtggggatggggagctgatggtgacccccatgggtgggggcagggcaaaatgaacatgtgggagggcaggagcaggagtgggtggccctgaccttgccctgcagccgctgcacacaagctgggcctgccgctgctggccctccaggtaggcctgcagcttgcgctggtaggaggcctgctcctcctgtagctgcctctgcaactccaggctctggggtgggggctgaggagggaggggatggaaaaggacaggagaggagggaagcagaggtggggagccaaaggaagaggaaggatgaagagaggggaggagaagggagagaaagggagggaggagagagaagagggaatggggggaggaaaggaggggaggcagctggaggtcaggacctcacacactcttcaccctccgcaggttgttgggtcctagagccctccaagcccagggggtggggtcagtagccacgtagtgcgaaaggccagagtcctaagtatttgggatcatctttgctggcccagaacgggggtcacaaggttagctaagaatgagaggatttacgttttcccacaacaggtgtagggcaaagaatgcaggctgtgagatcagccaggccaggcttggcacttagttgggcatgagcggtccagcctggactgatgagcatttatgcaacacctgcagcattcctaggtctgacctagacagagtggtagagcctcgaactacaaatgccctagccttgcccttcaggcacttattgggaagcttctggccccttcacacccaccccagcccctactagctgggtgcaccagggacagtgactctgcctctctctgagactcagtgtcctctta

SEQ ID NO: 1045 - DNA, 1273 bp, Artificial sequence
  DNA replication origin
cggcccctcggcctcggcggcagcggctgcggagaaggcgagcgaaggtaggaggctgggggtgcgcgcgtgcgcgggggctggaccgacgcgctccgggcgaaggaggccgctcgcctgggggcgggctggagccatgtcccggggctaggggcgctgtgggcgccgcgcccgccgctgcccggcaccggaagccaagagggcgttcccgacgggctccgcagatgcccctccgcgtcctgccgcccatcctgcccggattgtcgcgggccgggggcgcgacaggaggccgaggcctgcccgggcgcagaggcctgcctgggcgcagcggcctgcagggcgcagccgtccctccgccggtcggggtcccctcgctccgcgggcggccgtgggaggccctcgcgacggccgctacccctcgcagatgccctctgcagctcctgcgtgcgggccccgccctgcactgccctcctagtgtgggacgcggtttcgtcttcattgcaaccctgccgagtcggaagcatctccattgtgcggatgggtaaactgaggcccagagcgcgcggttgggctggccacggaggcagggccgccggatgctgtgcggggatggggccctgcaccccttgcgcctctcaccatggggcctcaggcccctgtgcccggcagcgtctctggagtgggcattttgaacgagctccctcctgattttcacacagacttaagcctgacgaccgtgctggggcggatgtctgcccctctggtgaccaggtcacagctcccttgggaagacgattgactggggaatggggaccctggggagggggccttcagggtgccatctgtctgtttacgccagaaaacagagatttctgttttctttcgctgggctcacagcaggtgcttaataaacagatcttgtggcgggagcagaggacagcgaggttcaggcacgactccaggagtcaacccctggatctcggaggctccccacccgcgcacatttccctgacttaaccctcccctccccagtctttcagccctaggaggggaggccccctttccacccaggtggcccctgtgggggtcactccctggttttcaccctgaacttctgggatgcggcagatgctggatatgtgttcgctggtgtccttggctcttagcattcattaattcattcagcagctcttcatggagctttggccttagcccatgcactgtggaagtggcagtgaactaagccaacctggcactttgggaggctgaggtg

SEQ ID NO: 1046 - DNA, 1323 bp, Artificial sequence
  DNA replication origin
cccggcccgcgacaatccgggcaggatgggcggcaggacgcggaggggcatctgcggagcccgtcgggaacgccctcttggcttccggtgccgggcagcggcgggcgcggcgcccacagcgcccctagccccgggacatggctccagcccgcccccaggcgagcggcctccttcgcccggagcgcgtcggtccagcccccgcgcacgcgcgcacccccagcctcctaccttcgctcgccttctccgcagccgctgccgccgaggccgaggggccgcaccgggtgcggcggggcggggcgtcccttccactaggcggggagaaccgggggcggagcctgcgccgcgcgagagaggctcaggccggggcggaggcgaggccggggccgaggcgggggcgggggcggggccgggcgccaggggccgcgggtctgcggcgcttacagggaccaccctgggcggaaacgcctggtgagccctcccgcttgcagcctcgcaccgccgggcaagctaggctcctcctgcacgcacgaaggaggattccacaggaacgaaccacgacccccaaggtttcgcagttgtaagaccgcagcgcaggatcgaaaccccgacccggctgcagagtccccctgcggtttggccgggcctcaaaggcctgaaactcctgacccatcgcccagccagaacgaggggacgtttcatgccagccctgtcacagcccccaacgacgatcccgaagcttcggtgatttgaccggtcagagagaatgcctttgttttcctgactgacgtgcaatcctggggaaggcactctggcctcattttgttcgcgagactcaacccggcggcgcgcctgtctcgtgtcctttctactgtaacaatatgttcgtttcaacccccgactgggcttcgacctccttctgttattgaaggcatgggatgaaatcattcttctttttttttttttttttgagggagtctcactctattgcccaggcagtggtgtaatctcggctaaatgcaacctccgcctcccggattcaagagattctcctgcctcagcctcctgagtagctgggactacaggcgcccgctgccacgcccggctgatttttttttttttttttttttttttgagacggagtcacccaggctggactgcagtggcgcgatctcggctcactgcaagctccgacttcccgtttcccgccattctcctgcctcagcctctctgagtagctgggactacaggtgcccgccaccacgccgggctaattttttgtatttttagtagagacagggtttcaccgtggtctcgatctcctga

SEQ ID NO: 1047 - DNA, 1199 bp, Artificial sequence
  DNA replication origin
tcctgtctgaaatctacttgtaaatattcaaatggtctttcacttgggcattccaactttgcttacttcacagtgtttcctgcgtaatatataagaaaagatgatccagacatttgttaaacatctcaaataagatgtagcccaggtatttgtgtcaaatttggattattttggtttcgtctttgcagaatataaaaaactaacatgaggtaagcactaaggtgtggagatggctgtgcaagagatgacaaagtccagcaccacgcttgagagtgtccaatcatctcttctgggacagcatatttttctacaatacggatttttgaaaaaaaaacaacatcaaaaaaaaaaaacctacaagattcatgaaactggacaactgtctttataacattaccagtgataaaaccagtaaggaaggctggtttgcagtcatctgagcagcctctttactttcataaatatggcttctctctgatattaaacggcttccaaatgcaagcggaatgctgcatcacaaggataaggatgtgaagagaaccggtttcttttgtaatccgaaacattctagtctgcgaattaaaagccattatttgaagaaggatgccccggctccatctggccaccgaaagattgctccttaacacaggctaaggaccagcttctttgggagagaacagacgcaggggcgggagggaaaaagggagaggcagacgtcacttcctcttggcgactctggcagcagattggtcggttgagtggcagaaaggcagacggggactgggcaaggcactgtcggtgacatcacggacagggcgacttctatgtagatgaggcagcgcagaggctgctgcttcgccacttgctgcttcgccacgaagggagttcccgtgccctgggagcgggttcaggaccgctgatcggaagtgagaatcccagctgtgtgtcagggctggaaagggctcgggagtgcgcggggcaagtgaccgtgtgtgtaaagagtgaggcgtatgaggctgtgtcggggcagaggcacaacgtttcatacttacctggcaggggagataccatgatcacgaaggtggttttcccagggcgaggcttatccattgcactccggatgtgctgacccctgcgatttccccaaatgtgggaaactcgactgcataatttgtggtagtgggggactgcgttcgcgc

SEQ ID NO: 1048 - DNA, 849 bp, Artificial sequence
  DNA replication origin
ctttcaccgccgcggcccgggttcgattcccggtcagggaattgttttacactggccgccctcccgcaggaatcttccttcactacgctgtcagccggcctgctccaagggccagaagcagaacagtctccgcagcggggttaaagccgggcgaaggagggcaagtgcttgtggaccacctctcacgacacaccgttcctatttgtctccgtgtccgtcatccgcgggagcagctttagagagcgactgagcttctcgctcaggtgtacacagcccggcagagatgccagcccccgtggagctgcacccaataagcccaccttctttcccgtcgccaccccggagacgcccatcgggctgagctgcgaataactaagagagaggccaagccaagtcgtggcgtttgtggcagccccggacacgggcaccagccagtcagcggagcctcctcacctccgttgccagcgaaggcgctcgttaggccttgggaagaggcgaccggaggcgatgcccgcgaatttgttaggggggtaagcggcgggtgaggtcctcgagggcggtcccgtttgctgattgagcggtagagggaggcgatgttcgctgacccaacaaggacagcaggtggagtaggcacagacggaaaactgctgccggtgccctaagcagaaggcaggtggaaaaatcagcactaggacgtcgaagcgattgtaccacagtcaaatcccacgacgtctacactctaccaagcacttgcgcacgctcccccttttccattcagtactcccaagaggggttcggaagaaccccgagtccactgtaagctcaggggagagcgggagccagggaggt

SEQ ID NO: 1049 - DNA, 1063 bp, Artificial sequence
  DNA replication origin
ctgaggaaaaaactccagagtcagagggaactctcgaagttttgcccggagcaaacggaagggtggcgttgccatcgcctaagatgggaaaatggcaggtgtcacaggttgcaggggaaggtcggagaccagctgagggccccggagccttcctggaaagagtttcccatccagcccgtctcggtttccgcatccgtctgattccttatgacgttgagggtgctggcgtctgggtcctttatgatgcagagggtgcccccgtctcaccccgggcgcctccgcgctcccgcctcctcctggcaacctggtgcgcggctccggacctggcgacgcacgaccgactggtcacttgctgccacctcgcaaaggcgcatctctagtccagtggtgagctgcggccgggtcgctgcaactcgctccaggccttcggactcgtggcctcggtgtccctcgcggagccctcggtgtgtcgcttgcaggctctttttttgaagaaagcagggagggaatggccttgtgagagactccaggagcaaagagcgaccctcacaaggcccaagtcctcccagagctcagggaagctgtcgcttctgacagaagaagggagagaaagctccctcctgtgtgtccctggtggtctagtggctaggattcggcgctttcaccgccgcggcccgggttcgattcccggtcagggaattgttttacactggccgccctcccgcaggaatcttccttcactacgctgtcagccggcctgctccaagggccagaagcagaacagtctccgcagcggggttaaagccgggcgaaggagggcaagtgcttgtggaccacctctcacgacacaccgttcctatttgtctccgtgtccgtcatccgcgggagcagctttagagagcgactgagcttctcgctcaggtgtacacagcccggcagagatgccagcccccgtggagctgcacccaataagcccaccttctttcccgtcgccaccccggagacgcccatcgggctgagctgcgaataactaagagagaggccaagccaagtcgtggcgttt

SEQ ID NO: 1050 - DNA, 1297 bp, Artificial sequence
  DNA replication origin
gccctccttcgcccggctttaaccccgctgcggagactgttctgcttctggcccttggagcaggccggctgacagcgtagtgaaggaagattcctgcgggagggcggccagtgtaaaacaattccctgaccgggaatcgaacccgggccgcggcggtgaaagcgccgaatcctagccactagaccaccagggacacacaggagggagctttctctcccttcttctgtcagaagcgacagcttccctgagctctgggaggacttgggccttgtgagggtcgctctttgctcctggagtctctcacaaggccattccctccctgctttcttcaaaaaaagagcctgcaagcgacacaccgagggctccgcgagggacaccgaggccacgagtccgaaggcctggagcgagttgcagcgacccggccgcagctcaccactggactagagatgcgcctttgcgaggtggcagcaagtgaccagtcggtcgtgcgtcgccaggtccggagccgcgcaccaggttgccaggaggaggcgggagcgcggaggcgcccggggtgagacgggggcaccctctgcatcataaaggacccagacgccagcaccctcaacgtcataaggaatcagacggatgcggaaaccgagacgggctggatgggaaactctttccaggaaggctccggggccctcagctggtctccgaccttcccctgcaacctgtgacacctgccattttcccatcttaggcgatggcaacgccacccttccgtttgctccgggcaaaacttcgagagttccctctgactctggagttttttcctcagatccaagagccaactggtcatcaattcgtaatttcccatcggctaagtgcgtgggcattgagctacacgcgagtctctccacctctgcggaatggctacttcggggtaggggaggggccctcccgtggattgtaaggtgtttagcagcagccgtcgcctccgctgactagatacatgccagggggttagcattctccctccccgcttcccccattcgtgacctagtgtcccagcgtggaggtgagaggcgtgtaagggcaaagttgccccctcttgagaaccactgatgcgcgttgtcctgctgtctgagcttgtgcagaggactctccagatgaaggctcaggggtcgatccagcttgagaccccctcgctcccccgcacagtcagaccttaggattggaggcttttaacatctctacatcatgagattcgaaacctttaggtcttttcttccgttctgtcctccaaatcggcctc

SEQ ID NO: 1051 - DNA, 1061 bp, Artificial sequence
  DNA replication origin
cgccttgggttatcctgacacgcccatcgggatcctgaggagccagtgggctgcaggcgcaggcgcaggcgaggggctgggtggcggttgagacagcggcggtactgggaggcgtaggtgagggtcgcgaggctgcccgagcttctgagcgagcgcggtgcttttgggaacgcgggacgggcgatctgcggcgccaggagctgggccgaggcgcggcggcgcggctgccggctgccctgtgaatgggaagttacgcgaagtccacccagcgtttctgaggtgagggcgccgcgccaggctgggcgggcggtgaatccgggacccgcgggcgcacagctgggtcgaggcgcggccgtggcaagttttgttgcgcgagcgcgggggcgggtgggggctgtggggggtcgtgcaccgccggggcctgagttccccgcgctggattcttcgcctgccgctgccgcccgcagcccaactctcgtgggcgctggggaagaaactcgctggcgggtgttctgtggcatcccagggggtggagggacggagcagcttcgggggcacgtcctcctatatcctgtagaggacactgaccccgcaccccaccctccaggccagaaatccgttccctctgcggacctgagaggcgagcgcgctcgcgcccctgacttgcaaagttggggtctttactggcctccgggcttctgctcctggcggtgtctccaggctggtgatgggcaagccaggtgtgccagctccaggatgcacatgagcagcatttgtagccatcactgaatcacctcctgactagcggggcaagcctcaaatgaaccgcaggatttcgggtagattggattgtggggttgctgtttgcactccaaagagttgctgtgatttccctgcgtctggctggctggctggcttcttagatcatctcatgtggcgtcctttcagcggagagttaaccaagacgtttggcctggcttccttgttttcctcctatcttttgcttagagctgctttcgaaaagaagtcttttctggcagtggtatcttttctttgggtta

SEQ ID NO: 1052 - DNA, 735 bp, Artificial sequence
  DNA replication origin
gcggcagcggcaggcgaagaatccagcgcggggaactcaggccccggcggtgcacgaccccccacagcccccacccgcccccgcgctcgcgcaacaaaacttgccacggccgcgcctcgacccagctgtgcgcccgcgggtcccggattcaccgcccgcccagcctggcgcggcgccctcacctcagaaacgctgggtggacttcgcgtaacttcccattcacagggcagccggcagccgcgccgccgcgcctcggcccagctcctggcgccgcagatcgcccgtcccgcgttcccaaaagcaccgcgctcgctcagaagctcgggcagcctcgcgaccctcacctacgcctcccagtaccgccgctgtctcaaccgccacccagcccctcgcctgcgcctgcgcctgcagcccactggctcctcaggatcccgatgggcgtgtcaggataacccaaggcgcaggcgcggcggggccttaaagggacccggcggcctcttctgcacaacgggttcgagcaggttaggggccgcgcaggcggaggaaaggagtaacccaggggaaggaccgagtgcagcggggacggggaaatccctctctcccctccgcctgtctttcaaagcaccagccctcgaccctccaaatcgctggtttccccggccacttgaacagcccctgccaggttgaagaggcaggagacacaccccctctggggctggagcgaccccgcgctta

SEQ ID NO: 1053 - DNA, 2027 bp, Artificial sequence
  DNA replication origin
ggggaggcacggccctctcggagcccacctgtgagcaatgccaaatgatgtcttcgcaataaatgggatgcctcagcggcgagctgaggactgagctagtggaggaggtgaaatcagaaggcttcttgtaagcgggagcatttgggatgaggcggcccccagcctcccctggtcgtttttgccagctaaccccgaagttcctaactctgcggcctcctgcttccctcccttaccctcaggccgtcctgtctgacgctgagagcggcagcctgcgtccaacagcgtccgaccgcagcctgcgggggctctcgggccagcggaccccgtctccaccgcggcgctcctcgccgggccgaggccgttcgccccgcagaggcccctccccggcctgctcagaagactccacgctcgcttgccctgattctctccgccctgcacttttgccagctgaaggtccaggtaggaaggggcttgagttttctgggcgcagccagaggcccagggggaggggctcgcgccctccaggtgggggtgggggcgtgtctgggggaggagtctgagcgccctggggtgcagccagagccctgagaaatagtgtctgagggtgtcaggacccccaaggaggtggtcgagggctctgcgctgaagccagcccagaagtgggggtgcttgggcagctgggggtgggtgcttgggcagccggtggagggaggaggctgcgacagtgttagggtcctggtagagagggagacaggtccctggtcatacagagccaggaccctgggaaaaggtctagcaagggaaatcacagcctaggatgagagcttgggaactaggggcagagccagggtagggaggagtgtgagagtggaaccaggatgcaagggggaggagcctgggagccctgggggtgggatcagaacccaggagacgagtgtgcctgggagtttgtctggcatcccgggggctttgataggagttgtccgggaccccagggagatgagggttcagagggtggtgagggcacataggaggggagtggaagcctggctctcaggcctaggcccctatcctgccccagggcaggtccaggccctggaccccgcctagcgtaggctagtgtgtatccctggaaccagaagagagtaggtgggctctggaggcctcaaaggacccccgctagactctgtgatccccacgccccagaacatgcgtgggcgctatgaggcaagccaggacctgctgggcaccctgcggaagcagcttagcgacagcgagagtgagcggcgggccctagaggaacacctgcgtggcgccgtcggtcttgtcccgcaggcactggccaacatggcgaaaccccatctctactaaaaatttaaaaaattgcccaggcacagtggctaacgcctgtaatcccagcactttgggaggccgaggcgtgcagatcacttgaggtcaggaatttgagaccagcctggccaacatggtgaaaccccacttctaaataaaaatgcaaaaattagctgggcgtggtgataggcgcttgtaatcccagctactcgggaggctgaggcaggagaatcgcttgaactctggaggtggagattgcagcaagctgtgtggagtgcagtgagattgtgtcactgcactccagcctaggcaagagtgagactgtgtgtaaaaacaaaaaaattgctggacgcggtggcccacgcctgtaatcccaacactttgggaggccgaggcgggtggatcacgaggtcaggagattgagaccaacctggctaacacggtgaaaccccatctgtactaaaaatataaaaaattagccgggcatcgtggcgagtgcctgtagttccggctactcgggaggctgaggcaggagaatggcatgaactcgggaggcagaggttgcagtgagccgagatggcaccactgcactccagcctgcgtgacaaagcgagactccgtctcaaaaaaaaaaaaaaaaattagccaggcgtggtggcgggcgcctgtattcccag

SEQ ID NO: 1054 - DNA, 2637 bp, Artificial sequence
  DNA replication origin
gactggagtgcagtggcatgatctcagcttactgcaacctcctcctcctaggttcaagcaattctcctgcctcagcctcccaagtagctgggaatacaggagtgcaccaccacacctggctaattttttgtatttttggtagagatggggtttcaccatgttggccaggctggtctcgaactcctgacctcaggtgatctgcccgcctcggcctcccaaagtgctgggattataggtgtgggccgccatacccagccccagactagttttaatttgtagttgggagtgagccccatcccatccccatcctgtgttctcttcccaagggacccgctgcagctgggaggggagctgtccaggaggccggcctgggaatgagcacaggcctgcggctggcagagagccgggtcgagccagccctggagaagcaggcccagctggaggagcagctgcgggacaaggtgctccacgagaaggacctgtcccagcagcagatgcaaagcgacctggacaaggctgacctcagtgccaggagggtccctggtgggtgctgcatgaggcaggcgtcactgcagaaggtaaaactggagagttggggagaagggagcatctgttcactaggagcagggccttcctctgtgagctcagccagccttcccaggcaccccactgaggttccgaaggcagttgcccagtgtttatcataaacagcttagcctcctatgacagaacttgtggccgggtgctgtggctcacacctgtaatcccagcactttgggaggccaaggtgggagattacctgaggtcaggagctcaagaccagcctgcccaataggcgaaaccctgtctctactaaaaatacaaaacttagtcgggtgtggtggtgtgtgcctctaatcccagctacgagggaggctgagacaggagaatcgcttgaacccaggatgtggaggttgcagtgagccaagatcacatcactgtattccggcctggacgacacagcgaaactctgtctcaaaagaaaaccacaaaaaaacaacttgtgccccttactcctgccacctgggtaagtcctccagtgctttcccatgagataaagctggtgggaacctcattcccatttcacagatgagaagtgtgaggtctggagaggagccacaacttgtttaaggtcacacagccagggaggtggatgttagggtccctgcctcgggtttggagaagcatggtggacacagagctagtggatttgagaggctggggtggtcccgtattcacctctgttgctcccccaactccagagtgacagagctgggcctggcagtgaagcgtctacagaagcagaatctggagaaggatcaggtcgacaaggacctcaccgagaagcttgaggccctggtgagcttcagctgcccctgagatggggcagggtgggatggggtaccggccagatccatggacacaggcttagggctgggctgcctgggccacccccagcatcccactcacactcaggttcagcccacacaggtgtgcaggctttgtgggaagcacactcacttcctccatcccatttctccctcccagcagccctgtagagtaatcctaatgacacggatgggaaactgaggcccaagaggggaaatgcttgtccagtctcagagccagtaagcaggagagttgggacttgaactcccatccacgctctccaggtccagatgctgcctttggaatcccaactgtccacccccaccagtgggacactcactcccccagggtccagcctggtttagtcacccctctgtgtggggcctggcctgggttctaggtccagctctcctgcaatcgactgtgtgacctggggcagaacccagctcttctctgggcctggtctgttcattgagggcctcgggcctgctgtggggtctaccaggtggctggcctatggacatggcttcagaggccacctgatcagtggtgggccagggagggagggaaaggggaggtttcaggtaagacagaaccccgaccactctttgtctccctcaccgcactccaggaatccctgcggctacaggagcaggcggccctggagacagaggatggagaggggctacagcggagcctaagggacctggcacaggtgtgagcccagaaaggcgggaagacagggccctgccaggcggtcctgggctcccccgcctcgcctttcggtggcttcggattgaactgcagatgggtggggccctgggacccaggctgtagctgctcagcacccctgctagctcacccggcctctgccctggggagcccccagtctcagaggggaggcacggccctctcggagcccacctgtgagcaatgccaaatgatgtcttcgcaataaatgggatgcctcagcggcgagctgaggactgagctagtggaggaggtgaaatcagaaggcttcttgtaagcgggagcatttgggatgaggcggcccccagcctcccctggtcgtttttgccagctaaccccgaagttcctaactctgcggcctcctgcttccctcccttaccctcaggccgtcctgtctgacgctgagagcggcagcctgcgtccaacagcgtccgaccgcagcctgcgggggctctcggg

SEQ ID NO: 1055 - DNA, 1119 bp, Artificial sequence
  DNA replication origin
gctgtaggcaggtcagcccacgcccggcggcagagcccagagaggctcgctcatctcagccgccagaagtgtcatcccagggaaggtgagcgaagctgtccactaggactaaataggggtggaggtaacaggtagcagggactctggcaggaaccgcctttcagacgttttcaggaccgtctgagcggggcctccaagtatgggtaggagacaggcggcctagggattccggttagcacgtcgcgttctgccgcagcagggctgggagcatccccggggcaggcggaggtcggaggtggtgaggcctttcggcgaagctgaggcctggaacaacccggtgggaagccacggagggggtcccctagcggaggctgggcgcgggccggtgcgcgtgcgcggctggaggctcagcgcgcgagcgtgcgcgtgatttggccctgaacggacgccgtagccgagaggttgggcggatgttgtgaaccgggtcgcggcggccgaggctcggggtgagtgaggggcggcagggctctgagcctggcgggttccggctattcccttcgcggtccagtttagtccactgcgagggcacctgcagcgccgggatctgagtgcgaaactccgagcggaagctggtctggcaggtcctctggagcttggggccaggcgggggcgacttgggggagccatccttgggctcccagacggagtaggttcagttctgagcccggataccccggcgaggttggacgggatagccgtgacagggagtccccgggcggggacaaggtccgcctctcacctgggtcctcagcaactgacacccggagtgggtgtctggaaggtctgctcatcaaatgaatgactgcatttaatcagatcttcaactactgtggtagtgaaggggcaccgatcatggaggcccaccgagggcccgaggtcgggaaaatcaccttcccgaggagcaggcgtggtgcagacccacaggggtttgtggcgggagtagagggtctgtttggggcgagataagagactgaacggcagagtagggagtgctggctaaggcagtgctgcagagcgaaactctagacctgcgctgtctaatagaactttatatgatgg

SEQ ID NO: 1056 - DNA, 1316 bp, Artificial sequence
  DNA replication origin
ctgagatccctctggggctgggaccaaacccgcctttcccaggtgtacggtactccacgggatatgctctcaggtcacgcccagcccctctgacctccccggccaagccacgcccctccccaaggttcccaggtaccctcccaggcctggtccccgccgcctaccgcagcgggggaggtcacagaattctcgctcgatctgcggatccgtagtgtagcaccatggccgctcggagccgtcaggattccggcaatagttgtcgtccagaccttggtcgaggaacctgggggcggtaatggggcgtgaagaagaccctgggactctggcttatctggccccgcccagttgccctacacggagccctgcccctggagtcctggaccttccctagcccggcccccagggcgccgataccgcctacgcgtacttgcccggctcgaaggggtgctggtgcgggtgctgaagatcccagcgctggcactcgcgccctgactcggtgcggtctaccgcgccgcggtattcctcgccattgcaccagacacacgcggctggagacaaagagccagtgggttcgtggatgggcgtgggcttgtccctccactctcccagcttgacccggcgccgcttacccacccggcaggatttgatgccgcagctctggaagcgcacggcagggtctgttgtgtggcaccaaggacctccggggtcgccatcagggttacggcagaagttctcttccaggccattccggagcgtgggcatgtacctgagggcccagagcatcactatagtgtgtgctgggggaaggtcccaggccgggacggagggaaggtgtttgtcccactggtgatcgttcgggaacttgtggctccaagcctggcaggacaggccacccacggtcgtggccatggtgccccggtacccaaccccattgttcatgatgcaggtccgtatgtagtctgggagcaagagacagaagatcaacttgggctgaggtcccctgtctcccaccctgcccctctccacccccactcgcctttctcctggaagaggtcacagcgcccagaatgccgcagcctcgtgtggggtgagtgttgagtccatggcagcagttggcaaccatggctgctcacattgtagtggaacgccctggagagaagaaggcacaaggtaacgccacggcccaggctcccctgcccccagtcttatctatgcccagtggccactcaccggcagtccattaagggcccacagcgaccagcacactcttcagcatctgccacatcctcctgccaaggcccgggcaccaccgcttg

SEQ ID NO: 1057 - DNA, 1361 bp, Artificial sequence
  DNA replication origin
ggtaccggggcaccatggccacgaccgtgggtggcctgtcctgccaggcttggagccacaagttcccgaacgatcaccagtgggacaaacaccttccctccgtcccggcctgggaccttcccccagcacacactatagtgatgctctgggccctcaggtacatgcccacgctccggaatggcctggaagagaacttctgccgtaaccctgatggcgaccccggaggtccttggtgccacacaacagaccctgccgtgcgcttccagagctgcggcatcaaatcctgccgggtgggtaagcggcgccgggtcaagctgggagagtggagggacaagcccacgcccatccacgaacccactggctctttgtctccagccgcgtgtgtctggtgcaatggcgaggaataccgcggcgcggtagaccgcaccgagtcagggcgcgagtgccagcgctgggatcttcagcacccgcaccagcaccccttcgagccgggcaagtacgcgtaggcggtatcggcgccctgggggccgggctagggaaggtccaggactccaggggcagggctccgtgtagggcaactgggcggggccagataagccagagtcccagggtcttcttcacgccccattaccgcccccaggttcctcgaccaaggtctggacgacaactattgccggaatcctgacggctccgagcggccatggtgctacactacggatccgcagatcgagcgagaattctgtgacctcccccgctgcggtaggcggcggggaccaggcctgggagggtacctgggaaccttggggaggggcgtggcttggccggggaggtcagaggggctgggcgtgacctgagagcatatcccgtggagtaccgtacacctgggaaaggcgggtttggtcccagccccagagggatctcagctgtcgctcggggccggacctatctcggtccatctaagggtccgaggcacagccccgccaagaggccacaagtgtcagctgcttccgcgggaagggtgagggctaccggggcacagccaataccaccaccgcgggcgtaccttgccagcgttgggacgcgcaaatcccgcatcagcaccgatttacgccagaaaaatacgcgtgcaagtgaggtgggggggcgggcgttgggacgtgctgctgcgggtgagacgggaggagggtagtcacgggcttagggctggaggctggcgggctagggctgagtgcagcgcctgcttagagaccttcgggagaacttctgccggaaccccgacggctcagaggcgccctggtgcttcacactgcggcccggcatgcgcgtgggcttttgctaccagatccggcgttgtacagacg

SEQ ID NO: 1058 - DNA, 1485 bp, Artificial sequence
  DNA replication origin
gcgcaaatcccgcatcagcaccgatttacgccagaaaaatacgcgtgcaagtgaggtgggggggcgggcgttgggacgtgctgctgcgggtgagacgggaggagggtagtcacgggcttagggctggaggctggcgggctagggctgagtgcagcgcctgcttagagaccttcgggagaacttctgccggaaccccgacggctcagaggcgccctggtgcttcacactgcggcccggcatgcgcgtgggcttttgctaccagatccggcgttgtacagacgacgtgcggccccagggtgaggcccaagcttgggggctacagagccggggctggaagcctggaaccggagggccggggcggggtctcggcctgatggctgcccgcaccggccgcagactgctaccacggcgcgggggagcagtaccgcggcacggtcagcaagacccgcaagggtgtccagtgccagcgcgggtccgctgagacgccgcacaagccgcagtgaatccctggtgctcccggccccgccagggccctaaccctggggcggcatgctttgatgtctgggaccagagcctggaaatggttgagactaccctgccacgacttcgctcccgctcccgcctcggttcacgtttacctccgaaccgcatgcacaactggaggagaacttctgccagacccagatggggatagccatgggccctggtgctacacgatggacccaaggaccccattcgactactgtgccctgcgacgctgcggtgagcactagtgacgcttgccccatgaccctgcctcagccctcaccaccaaaggctggctcccttaaccgcagtgaactttgtctttcagctgatgaccagccgccatcaatcctggacccccccaggttaggagttgggccagttatgggtcaggccctttagcccacgacatccacacagtctgggtttcatccagcccaccccatcctacagaccaggtgcagtttgagaagtgtggcaagagggtggatcggctggatcagcgttgttccaagctgcgcgtggctgggggccatccgggcaactcaccctggacagtcagcttgcggaattggtgaggcacaactgcctgtctcccacagagaggagctgaggttgtgtcctctgtggttatgccactgggggctgggaatctatccctgcccccagaggtcctagccagaagatggcaggtctagcatctgtcccaggagtctgttccctgtcctaattccccactcctctaggcagggccagcatttctgcggggggtctctagtgaaggagcagtggatactgactgcccggcagtgcttctcctcctggtgagcctcccttgtgtttggggacccagtctcatcccaccttcccctttccccaggcaagctaacaagtgagccttggggcaacggactgagagtcacaaatgacctagcagagcttctctcccagccatatgcc

SEQ ID NO: 1059 - DNA, 1235 bp, Artificial sequence
  DNA replication origin
ctgccaccccctacagaggcctgagcctgccttcccaggaggcccaggactctcacccagggcccttccctgcagctggagcaggctctgtggctgcaatctggtgagctggagacgcaagagcccagggggctggtactccagagcgtggagttgcggaggcagctgcaggaggagcaggcctcctagtggcgcaagctgcaggcctacctggagggccagcagcggcaggcccagcttgtgcagcggctgcagggcaaggtcagggccacccattcctgctctttccctcccacgtgttcactttgccctgcccccacccctggggctcaccatcagctcccaatccccagattctccagtacaagaagaggttctcggagctggagcagctgttggagagatccggagagctggagcagcagcagctgagggtgggtgccagggtggggcagaggcaggccctgccctccacctgcccagcctgatgctttaacctctgtgccacccaggacgcagagcacagccaagacctggagagtgccctcatctggctggaggaggagcagcagggagggccagggctggcagcatggccccctgggcgagcgcctactgatcccctgtgccccattcaggagtgccagcctggcccaggtgaatgccatgctctgagaacagctggaccaggcaggtttggccaaccaggctctgagtgaggagatacgaaaggtgaccagtgactggactcgcagctgcaaggagctggagcagtgggaggcggcatggaggcgcgaggaggaggtgggcatgggggtgcagggaggccggcgatataagaggaagataatgcacaattatgctagtgagactctcttttccaataatgtttgcacttctcaatactacatttaaaaaggaaataggagcacttgaacggttaagtaagaagatgaacaaaattgaacagaggaaaaataactgtctgaagacatgttgaaaatacatttaaagacagtctgtctgagacaggagctgagctggccaatccatcttttaaataattgaacatcattcaggtgtcaagtatttgacctggagcctggaaggggaggagagagtccaaaaaaaagtcaaaatataaagaaaaaaaattaaagaacttgtcccacaaatcaggcaaccaaggtctaaacttataccctctgcctgggtaaattgttgttgcttctttc

SEQ ID NO: 1060 - DNA, 1593 bp, Artificial sequence
  DNA replication origin
agcacttcctgtcgcccctagacggcggcgcacccccgcgctacgaaagcctcacgctcgacctcttcatgctcggctacttccagctaccggagatgggcctgagccgcgaggatcgcaagttccgccacctactgtgctacgagatgttccaccggctggacagccacccgtgggagcgcatccgcctcttccaccgcgtggtgctggaggaggtggaggccggccggcgcggctggagcgacggcttcgaggacctcaggcacaggttcttcggaaacggcctggaggctgggccggcccccgaagaacaggcgaagaaaaaggaagagaaggggaaagaacaggagcggaccgaagaggccgctccggttcagaagggggacccgcccaaggggcagcgcgaggccctggcccctgtgccgcagccgccgccaccgcccgcccgcccgccggcccgccgcgcctccccgccgcgcctccccggatctcagactctccgggttccgaagcccccgccgaagaccctttggaactagtgtctgagatgggcgaattcagcaacgaggacatctgccgctacatcgaccgcagcttctccttctggaaggagaaggaggcagagctgtttgacatctgagcagcggaattcggaattcgcagttcaccctcgagcgtcttaacgtgggcctggacgcctgtctgacgccctccagaggcgtgaagcagcgggaagaacccaggactgtggccttgagcagcccggagggcccaggaccaggctgcctcagcctctgaggtcccatcgtgagcaggttgtgtggggcgttggtcggataggcagggcaggcacagaacaaaccaggtgtccccctctggccccgtggtcttgctgagctctgtgtggagccaggcagcagaagaagcccctctgagtgaggggctgcggctcctccctggggcagtgtggcctgctctctggttttccactggagttcacagctacctccttggctgaggtcaagggagccacgtgtgcagtgttctgtgtgaagtgtgcggtgtacagaccctttctcctctgtaatattcaggaaataaaactgtttgctgtaaactgcctatgttggacaccacacctgcccctgatgtcattgcagccccacgattgtagagcacgtatccactctgttgggaagagggcaaccatgggctgaaggtccttctcaggggagccaggggcagcctgaatctccctgagccaagaggctgggtgggggcccgcatctgcgtctgcccagagatcttggacctgtggccattggccacctgcccctgtggggaatcaggctcaggacctctgggtcccggctactttttctctgcttctgtcccactcagctctgatctctctggtgcctcctgtaggacacaagggtctgggttactaggagaaaggaggccagctctgagggggtgtgaccaggcacctccatccacttgtcccacagaaatgcatccaaagggtcacttcctgtgaccctgactccttcaggtccccaggttgagggtgccccctatctcccagcccct

SEQ ID NO: 1061 - DNA, 1737 bp, Artificial sequence
  DNA replication origin
ccacactgagtagccaagagagctttggtctcagtcttagggacctggtctccattgctgcgctgccgccttccagctgccgatactgagcctcatccagcctcagtttccttctctgtaaggtgagctgatcagcaccagctggcaggatgagttgctttccattcatccaaaaactattccccgaatgccatttatttttattattttttatttttttgagacagggtctcactctgtcactgaggctggagtacagtggtgcgatcttgactcactgcaacctccacctcctgggttcaagtgattctcccgcctcagcctcccgagtagctgggactacagatgcccgccaaccatgcccggctaatttttgtattcttagtagagatggggtttcaccatgttggccaggctggtcttgaactcctggcctcaagtgatctgcccgcctcggcctcccaaagtgctgggattacaggcgtgagccaccacgcctggcccccgagtgccatttatgtgccccacacgcttgtagcctctggggattcatggtgaacatatcaaggcctgctctaaggtggctgcggacatgtgtgcgagtcaccaagcacacaaaatggggcagtgtgagagagtgggtggcagtggagagaagtacctgggctgatgcaacacagccagctgcaatggggaacgcaggggactggggcagccctaaccggccaccttatacgtgggctggggggtgtgttagggaaggaggaggtgatgtctaaggtaacacttggaagacgagtgaggggtggccaggcagagagggggctgaagagccgcaggtgggacagggcagtctggaagtgagagtggatgtggccctgactgtcctggaggaagggggtcgctgagctggagagacctcagtgggggccaggttaccaagacctggccagaggcccagaagagaacggactttctcctggagcactggggagccgggtgcggggagtgttaagcagggaagaggctgcttcctatttgtatgtggggagtggatcccatagggccaagatgaatcagggacctctgtggaggcgatggcaggcccaggggggaaaactggacatcagaggtggagaaaagtgagcaaatgagaatattacggtgcccagctgtccagcacgacgaagggaggggaagggtgggcagctcagtggaagctgcagctgcagcctctttaagagaggagtggcctctcattctgcacataaaacattgaccacagggagcggaaggcttgggccacaggggagctggagaaggggtcatgagtctgggaggagaggcctcacaatagccgccctcggatgggttggggcgggccaccgcgcctctcagcttcaaggcctttggcaagttccttgggtggtgtaatgagcgaacaagccaggcatggagaccccgtctgctggcctgttcttgccgccgcagcagcgagcagcaaccggccgtgccccccgccagcgaccaaagtggacactgcccagagcctggagcggcggctcaggccgaagcctcaccccagcgtcaccccccgccggccagacgcggtccctccctgcagacgcagccccgcggagccattacaccacccaggacatgcaaaaggttcctggcgccacggcgggagctgggccagagggagacgcgcctccctcccctctcttgtcttccccg

SEQ ID NO: 1062 - DNA, 1069 bp, Artificial sequence
  DNA replication origin
catatattcctgcccagccactgactgcccagccccaaaacactacctggaatcagccaccggacctttgtcccaggtttcctggctcagcccggctgggtggagcctccctctggccctctccctacatcagcaaagcctcagtgacccttgagctgagtcaattggggcctccatggacatgcagagtccagaccccagagtgccagtaccacctgctcccctccctcgccaccacacccacagacagacgcacaagcagacacattggttgcaagccgggagcacatttatggcaaagcacggctcagctctaggggaaagcagagcccttactaaggccacaggaggcacccaggaagaagggcagcaggtaatatgcaaacacccagggcagagggtgcattttctggcttagccggaggaggcgaatggagatttggagagataggtctcttgagtcccgatgaaggggtcaggtctgggagggaggaataaaatgggccgacagctcttggattcccaggctggggatcccagagtgcagtcaccgggaggagaagagtaggagaaagggaaaatcggtgtggcttactcatttatttaggcaaaaccatcagccaggcgcagaatgcttgggtgcatatgtgggtatgagggtaggtatgaggtgcaaggccccacccatgcatcgaggttctctcgcctgccagcccctgcccctgccctttcctcaaggctgggcccctcctcccgtgcttttcctgcctcttccccccaccccgcgcctcagcctcagccaggagccgcgcacgcagctactcactcttcctgtgcctcaggactctcacttctagggaccaagaggagagaagtgacagcggagttaggagggaaagggggccaggatgagactgggatagcaggggacagggagcgggccagggagagcaggaggggggaagtggagaagagaggaggagcatttctgcccatctgaccctggctcaggctgctctggggccccatgagggtggtccatcgagttcctggtttggctggtgcccct

SEQ ID NO: 1063 - DNA, 1500 bp, Artificial sequence
  DNA replication origin
tgccagcccctgcccctgccctttcctcaaggctgggcccctcctcccgtgcttttcctgcctcttccccccaccccgcgcctcagcctcagccaggagccgcgcacgcagctactcactcttcctgtgcctcaggactctcacttctagggaccaagaggagagaagtgacagcggagttaggagggaaagggggccaggatgagactgggatagcaggggacagggagcgggccagggagagcaggaggggggaagtggagaagagaggaggagcatttctgcccatctgaccctggctcaggctgctctggggccccatgagggtggtccatcgagttcctggtttggctggtgcccctgagggctgggcagggcagggccaccagtggctctagcccccagcaagggcctccaccttggcactgggttggggtagggcacccagccctggctgtgctgggtgggggtgtctggggaagcccagagtatatttttctctgcccttagcttcagccctgctgcagactgtggagggaaggagaaggaggctcggcaggtgctggacatgcttccatgggctctggtctgcaggggctggggctccataggaaccatagggggacaagctctgctctgcactcctagtcagggagatgaagctttgaggggtgccactaagcatgatctctgccctgagtggctgggtgatgaaggcaccccagccaggctgggatgggagcaccacatctaggcaccctgtcctgggccttctaggtgtcctggcagggggacactgtcccaccctacagaaaagaagcccaggaatcctgcgccagtctagctcttaaaaaggatgcctagggaagtcaccggggagggagggggaaacatggtgggtcacagctttgcccccatagccaggctctggctggcccagggcccctggcaggaactggctaggaagagttcctggcatatctaagaaggcttcaggtctgtgctgcttggaaagacaagagaaagacgtggagagaggaagagaggctcaggatagacaggggcagggggaagggtggccagctgcggggcctctctgaagctggttcgacttcaagtgtccctccagtaccagctcatcagaaacaccagcaccagctcatgggaaacaccagcgccagagctggaaggccctttctagcccgtgggaggcaggcccagagaggggaggggacttgtccaggccacacagctagagggtgggaggcaggcccagactggggaagggacttgccccaggctgtgcagcccggtcctgctttggcaggacctcaagcaacccagagccctctcttagggtcaagtactcaatgcggtaggggtggccggaagaccatgtagaagaggaaggacccgggcagtgacagctggggagggggtggtgtctagatttccctcccctttcagggctagcgccgccccccacccctcaacctgccc

SEQ ID NO: 1064 - DNA, 951 bp, Artificial sequence
  DNA replication origin
ggtgactcaggtcacaaggccagtgggcaagggaggcatgggagggacaccaaacctgcaggccagctccagtagctgccctcttcacgccaccttagaccaagctcccacagtggctttcccctttcatctctgggaggcagagggggccgggcgggtagggctgcaggggccctggaatcgttgagctcccggcgcagactgtgggccccgcccaaatccacaggacaggtggcccagccagtgccccctctccaccgctgagcccaagtgccaggtctgtgaggtcacctcctggctgtgcgagccccctcccggctgtgtgcgtccctcccggctgtgtgcgtgctgggccgcagacgccagggcccgggccgggaagctctacaaagggctctttgtgtcgccgcggcgcctcccgcgcgggtgcctgaccgcaggtgggagcagggtcgtggcgtcggagcctccgggctgcagggggcgcggagccggcgggctggcccagaaaacgaatcctgcggtgtcgcgtttcctgcaacgtgagccaggtcgggcggggtgaagggtctgaggccaccgcagggacgcatgggctggagagtggggcaggggacagcccccacccggtcactcagtctttggcccggccgcctcactctccctcactgagctgggcctagttgggggcagctgcgacggggcgggaagccgcgctgtcacccgaccccgccttacggcccctgaaatccgaggcttgagcgcgggtgtcggtgtcgctttcgtggatggcgatggtttccagatgcaggagggaaacggtggggacgcgacccggagccggcagccaaatatgagaggccccctctgcccacggtcagccctctctcctctcgggcggggatgaaggtgggggctcagctcccagcttagggagaggcgcagggggcg

SEQ ID NO: 1065 - DNA, 1389 bp, Artificial sequence
  DNA replication origin
cccccacccccacctagctacccatctcccaagcctcctgtgggaccacaggcagctgacatctacatgcagaccaagaacaaactccgccacgtggagacagaggccctcaagaaggaggtagtgagccctcacccactgcctgcctcccagcaggggtactgggctgatgggggccagtcaggccaaaggcctggcctcactagtgggcacagggtgggggtccctgggtccatggcatattcaagagtcaaagctcctggcgagtcccacgaggggtcagggctggacactggactgggaggagagtaagagcaggtcactgccctccatgggagctggggggtgaaggacgcaggtccagacagctgttcctcaccaggaactgggcctgtgccacctcttgcacaggagtggccgggttgtcatggagttgacagagaatgcatggagactgcccctccccaagcatgcccccccacccccacagccccaggctcagtcggagagtgtcacccaagggaggtggctgccaggtggaaggtgccagtggcatggctgtagaggtaagggctggaaggagggagggaggaaggtgagcaggcactagcagggctgggcgcccaccggcagtaggggctgggaggaagtgaagctgtggctggttccagtttagggcttgagctcctgggggaaagggccaggcctgagctgggagccctggagggaagcgagcctgtgtggagaggatgagggcagggtgggtaggtgaagtgtgaggtgcctagggatgtctggggcctgcaggcgcctggctgaggctctggagcagggattggggcagaggtctggtctgagcaattgcgggtatcctcggcagggtgccctggggaacactggcgttctggccacaggaacagagcaaggatggtctaagaggtgaggggacagcctgaggtcacaggtggccagatgtggtgtggcagctccctggggtcctgctggagcctgggaccttgcagttctctcttaagcccaaggcaaagccaccccagggccaattcatacaaggtgactcaggtcacaaggccagtgggcaagggaggcatgggagggacaccaaacctgcaggccagctccagtagctgccctcttcacgccaccttagaccaagctcccacagtggctttcccctttcatctctgggaggcagagggggccgggcgggtagggctgcaggggccctggaatcgttgagctcccggcgcagactgtgggccccgcccaaatccacaggacaggtggcccagccagtgccccctctccaccgctgagcccaagtgccaggtctgtgaggtcacctcctggctgtgcgagccccctcccggc

SEQ ID NO: 1066 - DNA, 1367 bp, Artificial sequence
  DNA replication origin
cactcctgtgcaagaggtggcacaggcccagttcctggtgaggaacagctgtctggacctgcgtccttcaccccccagctcccatggagggcagtgacctgctcttactctcctcccagtccagtgtccagccctgacccctcgtgggactcgccaggagctttgactcttgaatatgccatggacccagggacccccaccctgtgcccactagtgaggccaggcctttggcctgactggcccccatcagcccagtacccctgctgggaggcaggcagtgggtgagggctcactacctccttcttgagggcctctgtctccacgtggcggagtttgttcttggtctgcatgtagatgtcagctgcctgtggtcccacaggaggcttgggagatgggtagctaggtgggggtgggggcagttgggtgcctgggggcgggggtggcggggggaagctgggtgggggtggtgggggtatgggcttcccaatcgtgccccaaggcaggcccagctctgggttcagcatgtccatgtagctctgtatgtctgcagctctagtgctggaaagccctggggaggcagaaggaagggccagatttggaagcatgcagacagcctttcccccaagaatgagactctccaccacctggaaacaacttgccgagggccaaggtgggctccgggcaccacttggtacacctgttgtggcccctggcgttgctgggcttcctctccctggccctgccctgccccagcccagcacttattgggggaagaccaggcactccggtttggaggggaagcactggaggctttggtgtgtctagagggcagggtcacctggaaggggagggtctactccttgggagtacagatggccacatccaatctttgcagggcaccctgccaggtctggaggccaccatctggtggcgtgaagcaggcattgcaagtggatggacgcccatgctcagggcacggtcagggtgtgtgtacacacaagcctgcagtctgccgaggcgattgtgaatttgtgtatgtttgagtgtgtacgcatttgtgcacatgcttctttgtattgatgaatgtgtgtgcattgctctgtggacatggtgtgtgtgtgtgtgcatatctgtagtatggaaatagagcattgtgtgcttgtgtgtaaggtgggtgtgtgcagatattagcatggctctgtatgtgtgttcatatctgtatgctgtgtgtacacatgtacaagtgtgtgcttttgtgtgtgagtagctaagaataatgaatggtgggtggcacacgtggattttgtgggtggggagagtacatgtggatgtacatgtatgtctgtgatgagcacacacaagtatga

SEQ ID NO: 1067 - DNA, 1788 bp, Artificial sequence
  DNA replication origin
aggggagacggggcggagccggcagggcggggagtggagggagcggggccatcaggagtggggcggaggaccgtgggcggggcctgcaggggcctggcccccatcccccggccctctctccccgcccctcccgcccaggtgagctgcaccgacgtgagcctgtcggagcaggacaaagacggcgccaccgccacgcacttcgcggcgagccgcggccacagcaaggtgctcagctggctgctgctgcacggcggggagatctcggctgacctgtggggcgggaccgcgctgtacgacgccgccgagaacggggagctagaggtcagcgcgggcccggggtgggggcgcgcgccctctgctggcaccgcgctctccgcacggccctgcccgggcgcgggggtcccagctcgtggccgcggccgggtcctcactgcgtgcccccacagtgctgccagatcctggtagtgaacggcgcggagctggaagtccgcgaccgcgacgggtacgcggccgctgacctgtcggacttcaacggccacagccactgcacccactgcctgcgcacggtggagaacctggtacgatccctgcgctgctcctgttgcattctctcttctcgcccctccaccccagtggtgggtgtcgtcaccccttttaccaaggaggaagctgaggttcagagacgtgaagcccgctaccccacacgacctgtcagcccagaaccactgcctgctggggactgagggagtagaggcacaaaggttaacggaaagaggacagggaagaacagggtcaccccaaggggtaaggctggagaaatcacaagacaggccccattgggaacaggcaggctcattcacctacccatagacattagcttgggtataactcacagccaccctctgcagaagagagtgtaagtgtcccgttccacatatgggtaaagggagtctgcggggcaccaggatcgcatcaccagtaagtggtagagtggagaacctaccttgatggcctgaccaggagccacctctctgcccctgcaccatatattagctgacttcatggctgggtcataactggaaacccatgctactctttttaaattatgtttttatggtgagacagccacgaagtgacctactgggacttgaactcagctgtggatgtctccaagtgagggctctgcaccatctggtacaatgcctgctttgaggcaataggcagggaagagagtgggcctcacagccaaccccaaaaggatgcggaccaactccatggggcagcctggccatggagtggctgtgaaatgaggcccggagggaagaaggcagatggtctgtgccctgagcaccgtctgtccatctgtcgtccctgccagcacagggggatggtcctggctctgggggctgcagaacacagcaaggcccagaggccagaggctgcaggtgggcctgagggtgaacttccccccgagaaagagtctctggaagagaatgaatggcccagcaggtagtcagcactctgtcactagggtatataagccgggatggacacagggaaggacatttctgcatcagtggtgggtccccatcagttaagagagcctgtgactctgtcgagggaccatggggggtggcaccagagcccagggcacctgagggcctgtctggatgcagctgctagtggtcataggacagcaaacactattcattggattctgacttaggcaggtaccctgccgagtgccttaaaggtgtaatctcagttactcttcacagtacattaaaa

SEQ ID NO: 1068 - DNA, 1002 bp, Artificial sequence
  DNA replication origin
agcctggccaagatggcaaaactgggtttctgctaaaaatacgaaaattagccaggcgtggtggcacatgcctgtagtcccagctgtttgggaggctcaggcaggagaatggcttgaacccaggaggcagagggtgcagtgagctgagattgcgccattgcattccagcctggatgacagagaaagactccgtctcaaaaataaaaataaaaaaagaagaacctgcttgccagtgccgtagcccagagctagcacagcagaagcattcagtacatagtggacatcccgagggctgccagattaacaaaaacagcaacaacaaaacccgggatgtttgactagctttgaatctcagataaaaaagttgtattttagtataagtatgtcccatgcaatatttgggatatagaatactaaagcattatccgttcatccgaaattccggttgaactgtgtgaactgcattttgtctggcaacccttaccaccctgcccgctgggaactcagtcttctgggggaggcaaaggtcaaaatcagttatggtcaaccaagcatgacaggtcatgctcatagtggccctgggcagtgtggggcggaggccagcaagggggaaataaatcagggtggccctcatggaggagggatgggtactgagtcttcaagagggaggaggatggaaggacattccagatggagggggcacacgatgaaagggatagaggtcagacacagcagttgtggggactcatggtgacagtgggcgagaggggaggaaaggccagctcaccacatctttgtagacctcggttaaaaagtgggactgaggctgggcgcggtggctctgtaatcccagcactttgggaggccgaggcgggcggatcacaaggtcagaagttcgagaccagcctggtcaacatggtgaaaccccgtctctactaaaaatacaaaagattagcggggcgtggtggcgcatgcctgtaatcccagctactcaggaggctg

SEQ ID NO: 1069 - DNA, 976 bp, Artificial sequence
  DNA replication origin
accttctctggctggctgggcacccctgggtcatggatctctgccaagtagggagtgctgagagagcagagctcactgcaggtctggccccccacccgctgtgtacaccgccgtgggcctctgcagaaagaacccagtgggcccccaccagcccctgatcccaaagaccccggcactcactgtgccttggttacggggtgaataatttaggccgctgagcgtcggtcatgaaatattcaacagcctgttctgatgcagcagtatgtgagtgtgtgtgggggtgacgctggcgctggggtgtggaggctggcagccacgagccagcatgtttctgaagatagatacgtagctgggtcttctgtctccctcatctgtgttgacgggaccccctctggatcaccaggcatggtgcctgctccccgcaccatcatgaagtgcccggctcagcatcagccccagcaaatggcagccctgtgtctagggagtggggagggaggagaaatcagtgagtgggggtccatgggggctgcagagtcaggggtctcagtcagagtcagccttggggtctcaggagtcagggaagtggacagagaaccagggctttagggacagggagatgccagctgggaggggctcaggatgtgtgtgagagggagggagagggcacacgtgacaggggtcagaagaggggctgagtcgtgttgggaacaagagggtgggtgggcaaaggggggtagcctggtgcacgttgatgggcaggcaacaagtggatgggcagttggatgggtgaacgagggatgaatgcagggtggagcatgtggttgatctacggggtgaaagactgggggaggtagatgggcaggatgtcaagtcctgtgaggaattggcctcctaggcacaaaaggtgaactggaacccaataggtcgtggcccccaacctggaacttctcctgggtctgggggtaggttgtggctc

SEQ ID NO: 1070 - DNA, 1413 bp, Artificial sequence
  DNA replication origin
tttgagctttgcttgcatggtttgggtttgtgggctcacctgcatgtgtccatgcatgccccatctgcgtgcccgtgcatggctgcatcaccccatgcacacgtgcactgcccctgggcttgcccacatgtgctgctccccagggcgccaggctatcagcctacaaggcattgtgggtctgggcccagcctgccaccccctacagaggcctgagcctgccttcccaggaggcccaggactctcacccagggcccttccctgcagctggagcaggctctgtggctgcaatctggtgagctggagacgcaagagcccagggggctggtactccagagcgtggagttgcggaggcagctgcaggaggagcaggcctcctagtggcgcaagctgcaggcctacctggagggccagcagcggcaggcccagcttgtgcagcggctgcagggcaaggtcagggccacccattcctgctctttccctcccacgtgttcactttgccctgcccccacccctggggctcaccatcagctcccaatccccagattctccagtacaagaagaggttctcggagctggagcagctgttggagagatccggagagctggagcagcagcagctgagggtgggtgccagggtggggcagaggcaggccctgccctccacctgcccagcctgatgctttaacctctctgccacccaggacgcagagcacagccaagacctggagagtgccctcatctggctggaggaggagcagcagggagggccagggctggcagcatggccccctgggcgagcgcctactgatcccctgtgccccattcaggagtgccagcctggcccaggtgaatgccatgctctgagaacagctggaccaggcaggtttggccaaccaggctctgagtgaggagatacgaaaggtgaccagtgactggactcgcagctgcaaggagctggagcagtgggaggcggcatggaggcgcgaggaggaggtgggcatgggggtgcagggaggccggcgatataagaggaagataatgcacaattatgctagtgagactctcttttccaataatgtttgcacttctcaatactacatttaaaaaggaaataggagcacttgaacggttaagtaagaagatgaacaaaattgaacagaggaaaaataactgtctgaagacatgttgaaaatacatttaaagacagtctgtctgagacaggagctgagctggccaatccatcttttaaatcattgaacatcattcaggtgtcaagtatttgacctggagcctggaaggggaggagagagtccaaaaaaaagtcaaaatataaagaaaaaaaattaaagaacttgtcccacaaatcaggcaaccaaggtctaaacttataccctctgcctgggtaaattgttg

SEQ ID NO: 1071 - DNA, 1536 bp, Artificial sequence
  DNA replication origin
gctaccggggcacagccaataccaccaccgcggcgtaccttgccagcgttgggacgcgcaaatcccacatcagcaccgatttacgccagaaaaatacgcgtgcaagtgaggtgggcgggggggcgggcgttgggacgtgctgctgcgggtgagacgggaggagggtagtcacgggcttagggctggaggctggcgggctagggctgagtggagcgcctgcttagagaccttcgggagaacttctgctggaacctcgacggctcagaggcgccctggtgcttcaccctgcggcccggcacgcgcgtgggcttttgctaccagatccggcgttgtacagacgacgtgcggccccagggtgaggcccaagcttgggggctacagagccggggctggaagcctggaaccggagggccggggcgaggtctcggcctgatggctgcccgcaccggccgcagactgctaccacggcgcgggggagcagtaccgcggcacggtcagcaagacccgcaagggtgtccagtgccagcgctggtccgctgagacgccgcacaagctgcagtgagtccctggtgctcccggccccgccagggccctaaccctggggcggcatgctttgatgtctgggaccagagcctggaaatggttgagactaccctgccacgattttgctcccgctcccgcctcggttcacatttacctccgaaccgcatgcacaactggaggagaacttctgccagacccagatggggatagccatgggccctggtgctacacgatggacccaaggaccccattcgactactgtgccctgcgacgctgcggtgagcactagtgacgcttgccccatgaccttacctcagccctcaccaccaaaggctggctcccttaaccccagtgaactttgtctttcagctgatgaccagccgccatcaatcctggacccccccaggttacgagttgggccagttatgggtcaggccctttagcccacgacatccacacagtctgggtttcatccagcccaccccatcctacagaccaggtgcagtttgagaagtgtggcaagagggtggatcggctggatcagcgtcgttccaagctgcgcgtggctgggggccatccgggcaactcaccctggacagtcagcttgcggaatcggtgaggcacaactgcctgtctcccacagagaggagctgaggttgtgtcctctgtggttatgccactgggggctgggaatctatccctgcccccagaggtcctagccagaagatggcaggtctagcatctgtcccaggagtctgttccctgtcctaattccccactcctctaggcagggccagcatttctgcgcggggtctctagtaaaggagcagtggatactgactgcccggcagtgcttctcctcctggtgagcctcccttgtgtttggggacccagtctcatcccactttcccctttccccaggcaagctaacaagtgagccttggggcaacggactgagagtcacaaatgacctagcagagcttctctcccagc

SEQ ID NO: 1072 - DNA, 1316 bp, Artificial sequence
  DNA replication origin
gggtggcctgtcctgccaggcttggagccacaagttcccgaacgatcacaagtgagacaaacaccttccctccgtcccggcctgggaccttcccccagcacacactatagtgatgctctgggccctcaggtacatgcccacgctccggaatggcctggaagagaacttctgccgtaaccctgatggcgaccccggaggtccttggtgccacacaacagaccctgccgtgcgcttccagagctgcagcatcaaatcctgccgggtgggtaagcggcgccgggtcaagctgggagagtggaggggcaagcccacgcccatccacgaacccactggctctttgtctccagccgcgtgtgtctggtgcaatggcgaggaataccgcggcgcggtagaccgcaccgagtcagggcgcgagtgccagcgctgggatcttcagcacccgcaccagcaccccttcgagccgggcaagtacgcgtaggcggtatcggcgccctgggggccgggctagggaaggtccaggactccaggggcagggctccgtgtagggcaactgggcggggccagataagccagagtaccagggtcttcttcacgccccattaccgcccccaggttcctcgaccaaggtctggacgacaactattgccggaatcctgacggctccgagcggccatggtgctacactacggatccgcagatcgagcgagagttctgtgacctcccccgctgcggtaggcggcggggaccaggcctgggagggtacctgggaaccttggggaggggcgtggcttggccggggaggtcagaggggctgggcgtgacctgagagcatatcccgtggagtaccgtacacctgggaaaggcgggtttggtcccagccccagagggatctcagctgtcgctcggggcccgacctatctcggtccatctaagggtccgaggcacagccccgccaagaggccacaagtgtcagctgcttccgcgggaagggtgagggctaccggggcacagccaataccaccaccgcggcgtaccttgccagcgttgggacgcgcaaatcccacatcagcaccgatttacgccagaaaaatacgcgtgcaagtgaggtgggcgggggggcgggcgttgggacgtgctgctgcgggtgagacgggaggagggtagtcacgggcttagggctggaggctggcgggctagggctgagtggagcgcctgcttagagaccttcgggagaacttctgctggaacctcgacggctcagaggcgccctggtgcttcaccctgcggcccggcacgcgcgtgggcttttgctacca

SEQ ID NO: 1073 - DNA, 1332 bp, Artificial sequence
  DNA replication origin
gggcatggggcagtgaccttggcctcttgagcacagctgggaagccctaggaacacacagacacggcccacttaggcctctattagcacgtctgctctagcactgaagcagtgttaggaccacacagatgcacgcacacagcaggaaatgacccctcctgagcctgatctacccctctaacctagcgtatgcctttgtgcaggtgagagcccagatttggagtctgaatgcctagccagggcccctggctgggtaatgtgatggctctgagccttagcattctcatttgagagatgagatggggcaagctccatcacccactgctctcacagagcgtatgtgttagatctgagcccagtgcctgggccactacacagaggcaccggtgataactaccaagtctgggcctgcttcccaggggaaatttttttgacaagtatctgtgcaggggggctagactggcccttgaaagtgcatacagggtccatcccagaagccttgtagctttgatcccctgaatgaacaaagtgtggacatgccaatacacattactgacatgtatgcccacctgacctgcacccactcatgcccactctgcagggcagcgctcgccatcgaatgacttccaggtgctccggggcacagagctacagcacctgctacatgcggtggtgcccgggccttggcaggaggatgtggcagatgctgaagagtgtgctggtcgctgtgggcccttaatggactgctggtgagtggccactgggcctagataagactgggggcaggggagcctgggccgtggcgttaccctgtgccttcttctctccagggcgttccactacaatgtgagcagccatggttgccaactgctgccatggactcaacactcgccccactcaaggctgtggcattctgggcgctgtgacctcttccaggagaaaggcgagtgggggtggagaggggcagggtgggagacaggggacctcagcccaagttgatcttctgtctcttgctcccagactacatacggacctgcatcatgaacaatggggttgggtaccggggcaccatggccacgaccgtgggtggcctgtcctgccaggcttggagccacaagttcccgaacgatcacaagtgagacaaacaccttccctccgtcccggcctgggaccttcccccagcacacactatagtgatgctctgggccctcaggtacatgcccacgctccggaatggcctggaagagaacttctgccgtaaccctgatggcgaccccggaggtccttggtgccacacaacagaccctgccgtgcgcttccagagctgcagcat

SEQ ID NO: 1074 - DNA, 990 bp, Artificial sequence
  DNA replication origin
gtccaggcaagggggatggcagtctaaatcagggcagcagcagagtcaggttttggaaatgttttgaaaatagagccagtaggatttgccaacattggcaaagattggatgtgaggtgccagaccaagtgttgtcctcagcaactgggaaaaaagagttaacgttctgcattaggctgttccagcattgccataaagaaataccagagactgggaagtctataaagaacagaggtttaattggctcacggttctgcaggctgtacaggaagcatggtgctggcatctgctttccttctggggaggcctcaggaagcttccaatcatggtggaaggcagagggagagtgggcatgtcacatggccagagcaggagcaagacagcaaggggggaggtgccacacacttttaaacaaccagatctcatgagaactctctctctatctgcaggatggcaccaagagagatggtgctaaaccattcatgagaaatctgcccccatgatacaatcgcctcccaccaggccccacctccaacattggggattacagtgaacatgaggtctgagtggggacacagatacaaaccatatcatgttccctgagataggatggctgggggttgggggtgaacagtatttgggagggaaaatcagggactctgttttggacacaatccattggagttgcaggtagacgttccagtggagaagacaagtggctggctggctctctgagcctggagttgagggggtgatgtgggctggagattggactttggcatcatcagtgttggtgaggcagctacaatcatgactctggatgagctcattgatgggggcagcaagtgtggacagagaagcaggaggtctgaagactgaggtctgaggtgtttggggagaagaggaggaacctgcaaaggagatagggagcaagcaaggaggcaggaggagagccgggcaggtgggctgcagccaagcaaggagaggggga

SEQ ID NO: 1075 - DNA, 1376 bp, Artificial sequence
  DNA replication origin
acacaatccattggagttgcaggtagacgttccagtggagaagacaagtggctggctggctctctgagcctggagttgagggggtgatgtgggctggagattggactttggcatcatcagtgttggtgaggcagctacaatcatgactctggatgagctcattgatgggggcagcaagtgtggacagagaagcaggaggtctgaagactgaggtctgaggtgtttggggagaagaggaggaacctgcaaaggagatagggagcaagcaaggaggcaggaggagagccgggcaggtgggctgcagccaagcaaggagagggggaggaggaaggggggaaggggaaaggcggggagtgggaagagggtaggagggggaggaggagagggggaagaggagagcagggggagtaggggtaggaggagaaggggaggaaggggaggaggagggggggaagggggtgagggagaggaaggggaggaaaggaggggtaaggggggaggaggagaggggaagaggggagaaggagtgaaatatacctgtcgtgggatttgacctatattagagaatcactgtgcagtgcaccaagtggcactggagaagtcatccccgaaataaattggattgtgtgacaagagatgggttcagcagatgcaacagacagggaggagggaaactggaccagccttggctgtggattggctgcgcgatcttggacaaatcacccatcatgttttccttccgtgttacgtggaaatgtctctgatatctactgcccttacctcacagagtaaagacccaaaggagatgtcatgaaagcattttgaaatgctgctgaacactcagcacagtggctggcacagagtgggtagaactcaatggttggaaaatgtacttggctgttattgtgcctttttcatgaaaatatgaaaagctaaataaacctgaaacatgttggggactgagtgaggggagatgagcacgttctgagagtcctaggaccatgcactctcagagtgcctttgctattgtttcgcctcccgtcctacagaggaagggcttaggtttgctgtgaatttcccccttgcctaccagcattgcgccaattaaggtttctacttcaccgcacgtttcagccaaggatgtcaagggaatccactgctgctccagtgagacaaataacatatccagcatcaacactgccatcatcattagcatcattgtggccattaggatggttggcaaggcaataggttggcactactgatgggcagcaccattagtcttcttagtgatttttcaaaatggacagtctggagctaaaagcgtgagccctggaggagctcatttcatcagacctgctgcaggcaaacactct

SEQ ID NO: 1076 - DNA, 2052 bp, Artificial sequence
  DNA replication origin
cagcagcggctcccgccccgcagccaccgcgccctctcacccccccgcggttctgcccgccgccgctgccgagtctgcgcacttcacctccctggctcccgctctcccctgagcttacaatggactcggggttcttccgaacccctcttgggagtactgaatggaaaagggggagcgtgcgcaagtgcttggtagagtgtagacgtcgtgggatttgactgtggtaccatcgcttcgacgtcctagtgctgatttttccacctgccttctgcttagggcaccggcagcagttttccatctgtgcctactccacctgctgtccttgttgggtcagcgaacatcgcctccgtctaccgctcaatcagcaaacgggaccgccctcgaggacctcacccgccgcttacccccctaacaaattcgcgggcatcgcctccggtcgcctcttcccaaggcctaacgagcgccttcgctggcaacggaggtgaggaggctccgctgactggctggtgcccgtgtccggggctgccacaaacgccacgacttggcttggcctctctcttagttattcgcagctcagcccgatgggcgtctccggggtggcgacgggaaagaaggtgggcttattgggtgcagctccacgggggctggcatctttgccgggctgtgtacaccggagcgagacgctcagtcgctctctaaagctgctcccgcggatgacggacactgagataaacaggaacggtgtgtcgtgagaggtggtccaccagcacttgccctccttcgcccggctttaaccccgctgcggagactgttctgcttctggcccttggagcaggccggctgacagcgtagtgaaggaagattcctgcgggagggcggccagtgtaaaacaattccctggccgggaatcgaacccgggccgcggcggtgaaagcgccgaatcctagccactagaccaccagggacacacaggagggagctttgtctcccttcttctgtcagaagcgacagcttccctgagctctgggaggacttgggccttgtgagggtcgctctttgctcctggagtctctcacaaggccattccctccctgctttcttcaaaaaaagagcctgcaagcgacacaccgagggctccgcgagggacaccgaggccacgagtccggaggcctggagcgagttgcagcgacccggccgcagctcaccactgaactagagatgcgcctttgcgaggtggcagcaagtgaccagccggtcgtgggtcgccaggtccggagccgcgcaccaggttgccaggaggaggcgggagcgcggaggcgcccagggtgagacgggggcaccctctgcatcataaaggacccagacgccagcaccctcaacatcataaggaatcagacggatgcggaaaccgagacgggctggatgggaaactctttccaggaaggctccggggccctcagctggtctccgaccttcccctgcaacctgtgacacctgccattttcccatcttaggcgatggcaaagccacccttccgtttgctccgggcaaaacttcgagagttccctctgactctggagttttttcctcagatccaagagccaactggtcatcaattcgtaatttcccatcggctaagtgcgtgggcattgagctacacgagagtctctccacctctgcggaatggctacttcggggtaggggaggggccctcccgtggattgtaaggtgtttagcagcagccgtcgcctctgctgactagatacatgccagggggttagcattctccctccccgcttcccccattcgtgacctagtgtcccagcgtggaggtgagaggcgtgtaagggcgaagttgccccctcttgagaaccactgatgcgcgttgtcctgctgtctgagcttgtgcagaggactctccagatgaaggctcaggggtccatccagcttgagaccccctcgctcccccgcacagtcagaccttaggattggaggcttttaacatctctacatcatgagattcgaaacctttaggtcttttcttccgttctg

SEQ ID NO: 1077 - DNA, 1182 bp, Artificial sequence
  DNA replication origin
cccggccggcggagggacggctgcgccctgcaggccccagtctcctgtcgtgcccccggcccgcgacaatccgggcaggatgggcggcaggacgcggcggggcatccgcggagcctgttgggaacgctctcctggcctccggtgccgggccgcggcagtcgcggaacacacagcgcccccagccccggtacgtggctccagcccgcccccaggcgcgcggcctcctccgccgggagcgcgtccgtcccgcccccgcgcacgcgcgcgcccccggccacctaccttcgcgcgccttcgccgcagccgctgctgccgaggccgagcgggccggaccgggcggggcgtccccgccacggggcggggaaaactgggggcggagcctgcgctgcgcggtagtggggcggaggctggggcggggccgggcgccgggagcagcgcttctgcagcgcttacaggggccgccctgggcggacacgctccgtgcgccctccctcttgccgcctggcaccgcccggcaagccaggcgcctcctacacgcacgaacgaggataccaggcgaacgaagcacgacccccaagtcctcgcagttgcaaggccgcagcgcaggatcgaaaccccgacccggctgcagagtccccctgcggtctggccgggccttaaaggcctgaaactcctgagcactgacccatcgcccagccagacagagggacgtttcatgccagccccgtcacagcccccagcgacgatcccgaggcttcggtgatttgacctgtcggagagaatgcttttttttttcctgactgacgtgcagccctggggaaggcactctggcctcagtttgttcgcgagactcaacccggtggcgcgcctgtctcgtgtcctttccactgtgacagtatgttcgttccaccctctcactggacttggacctccttctgttattgaaggcattggatgaaatcatgcttttttttttttttgagggagtcttgctctattgcccaggctggagtgcagtggcatgatcttggctaaacgcaacctctgccccagcctcctgagtagcttggactacaggcgcccgccgccacgctcggctaatttttgtattttcagtagagacggggtttcaccatattggccaggctggtctcaaactgctgacctcgcgatccacccgcc

SEQ ID NO: 1078 - DNA, 1498 bp, Artificial sequence
  DNA replication origin
accgcgcagcgcaggctccgcccccagttttccccgccccgtggcggggacgccccgcccggtccggcccgctcggcctcggcagcagcggctgcggcgaaggcgcgcgaaggtaggtggccgggggcgcgcgcgtgcgcgggggcgggacggacgcgctcccggcggaggaggccgcgcgcctgggggcgggctggagccacgtaccggggctgggggcgctgtgtgttccgcgactgccgcggcccggcaccggaggccaggagagcgttcccaacaggctccgcggatgccccgccgcgtcctgccgcccatcctgcccggattgtcgcgggccgggggcacgacaggagactggggcctgcagggcgcagccgtccctccgccggccggggtcccctcgctccgcgggcggccgtgggaggccctcgcgacggcctctgccccccgcagatgccctctgcagctcctgcgtgcgggccccgccctgcactgccctcctcgtgtgggatccggtttcgtcttcattgcagccctgccgagtcggaagcatctccattgtgcggatggggaaactgaggcccagagcgcatagttgggctggccacggaggcagggccgccggatgctgtgcggggatggggccctgcaccccttgcgcctctcaccatgcggcctcaggcctctgtgcccggcagcgtctctggagtgggcattttgaacgagctccctcctgattttcacacagacttaagcctgacgaccatgctggggcggatgtctgcccctctggtgaccaggtcacagctcccttgggaagacgattgactggggaatggggaccctggggaggaggacttcagggtgccatctgtctgtttacgccagaaaacagagatttctgttttctttcgctgggctcacagcaggtgcttaataaacagatcttgtggcgggagcagacgacagcgaggttcaggcaagactccaggagtcaacccctggatctcggaggctccccacccgcgcacatttccctgacttaaccctcccctccccaagtctttcagccctttccacccaagtggcccctgtgggggtcactgcctggttttcaccctgatcttctgggatgcggcagatgctggctggatatgtgttcgctggtgtccttccgtgatccccgtctgtggctgacaccatctgtggcccaacatgaccccagccagagccaaggggaatcatttctttttccatttaacatcctatgttattacttggctcttagcattcattaattcattcagcagctcttcatggagctttggccttagcccatgcactgtggaagtgacagtgagctaagccaacctggcactttgggaggctgaggtgggaggaccgcttgagcccaggagttggagactagcctgggcaacatctcatctctacaacaagtaaaaaattagccagacgtggtggcacgcacctgtggtcc

SEQ ID NO: 1079 - DNA, 1050 bp, Artificial sequence
  DNA replication origin
gccaacaggagggcagctgctctcacccacgctcatctcgggtcttgggtccaggccaggttagcggtagggaaggtgccctccaggcctgcattgaccccatatgctgagagatgttctatgagccacagacaaagcaaggacatctctacccaccccacccccgggacacgtgcatggcagccccaccaatagggaggagctaactgtgactacttgggggcttccccctgagtctggaggaacacagtccaaggctgtgcaggggaggtggaagtagggggtttctgcctggatggcggctgcaggcctgtcaagcgtctgtgccaagcccactgaggtcaatggtgagcggtgtccacatctgtgtgtggtggcggtggcctgaggcagccacacaggctgtgcactgatgttggtggctctcactaggtgcgagtggggtgtattttgtcatttgtctccacgcaggacactgtgtgtgtagtgtgtgggtgctgagttcacgtcgactgtttggtgcatctgagccttcccgtgaacggctaaggcggcatctgtggctgaaggtctatgttgtggcgcgggtgttgggcctggctgtgtgtatcagggtatatgtctgtgtgtcggtgaggcaagtgtacaaccgcatgtgggtgggtctggggggtgtgcctgggctccctggtatgtgtgatacacactttgtgcatctgggcatacctttgtgggccgattggtggctgtgttgaactgtatgcttttcctgtccgtgtgcacccatgaggtgggagatagcgtgctgtgtcatctgcatatggttgttataggtccccggtggtggggggactgttctgtgcctgtgtggggttgtgtggcatctggctgtgtgtgcggctaacactgtgcatattctgtgaattggagtgtttctgtgtggcctggttttagggtctcactatgttgtttgtggaatgttttgtgcatctgtgtgtctgtgtggggcccagtgtagcccatgtcgtgtacacactgcatatctgtgtg

SEQ ID NO: 1080 - DNA, 640 bp, Artificial sequence
  DNA replication origin
ccgagcacctcttcttgtactggagaatctggggatggggagctgatggtgagccccaggggttggggcggggcaaagtgaacaggtgggaggacaggagcaggagtgggtggtcctgaccttgccctgcagccgctgcacaagctgggcctgccgctgctggccctcctggtaggcctgcagcttgcgccggtaggaggcctgctcctcctgcagctgcctccgcaactccacgctctgccgtaccagccccctgggctcctgcgtctccagctccccaggctccagccgcagagcctgctccagctgcagggaagggccctgggtgagagtcctgggcctcctgggaaggcaggctcaggcttctgtagggcgtggcaggctgggcccagacccacaatgccttgtaggctgatagcctggcgccctggggagcagcacatgtgggcaagcccaggggcagtgcacgtgtgtatggggtgatgcagccatgcacgggcacgcagacggggcatgcatggacacatgcaggtgagcccacaaacccaaaccacgcaggcaaagctcaaaggtgcacctgggtcaacctcaggggcctcagtacaccatgtgcctctcctccagaacacttagccctgtc

SEQ ID NO: 1081 - DNA, 2204 bp, Artificial sequence
  DNA replication origin
gcagccctggagaaacaggccctgctgcaggcccagctggaggagcagctgcgggacaaggtgctccgcgagaaggacctggcgcagcagcagatgcaaagcgacctggacaaggctgacctcagtgccaggtgggtacctggtggatgccgcacgaggcaggcgtccctgcagaaggtaaaactggagagttggggagaagggagcatctgttcactaggggaagggccttcctctgtgagctcagccagtcttcccatgcactgaggttccgaaggcacttgcccagtgtttatcataaacagcttagcctcctatggcagaacttgtggccgggtgtggtggctcacacctgtaatcccagcactttgggagaccaaggtgggggattacctgaggtcaggagctcaagaccagcctgtccgacaggcaaaaccctgtctctactaaaaatacaaaaattagctgggcgtggtggcgcgtgcctgtaatcccagctacgagggaggctgagacaggagaatcgcttgaacccaggatgtggaggttgcagtgagccaagatcacatctctgtattccggcctggatgacagagcgaaactccgtctcaaaaaaaaaaaaacaaaaaaaaagaactcgtgccccttactcctgccacctggacaagtcctcaactgctttcccatgagataaagctggtgggaacctcattcccatttcacagatgagaaatgtgagatctggagaggagccgggacttgtctgaggtcacacagccagggaggtggatgttagggtccctgcctcgggtttggagaagcatggtggacacagagctagtggatttgagaagctggggtggtcccgtattcacctctgttgctcccccaactccagagtgacagagctgggcctggcagtgaagcgtcttgagaagcagaatctggagaaggatcaggtcaacaaggacctcactgagaagcttgaggccctggtgagctgcaggtgcccctgagatggggcagggtgagatggggtaccggccagatccatggacgcaggcttagggctgggctgcctgggtcacccccagcgtcccactcacactcaggttcagccctcacaggtgtgcaggctttgtgggaagcacactcacctccatcccatttcttcctcccagcagccctgtagcataatcctcataacacagatggggaaactgaggcccaagaggggtaatgcttgtccagtctcagagccactaagcgggagagtcgggacttgaactcccatccacgctctccaggtccagatgcggcctctggcaacctagctgccccccacccccaccagtgggacactcactcccccagggtacagcctggtttggtcacccctctgtgtggggcctggcctgggttctaggtccggctctcctgcaatcgactgtgtgacctggggcaggacatagctcttctctgggcctggtctgttcagtgagggcctcgggcctgctgtggggtctaccaggtggctggcctatggacatggcttcagaggccacctggtcagtggtgggccaggtagggagggaaaggggaggtttcagataagacagaaccccaaccaccctttgtctccctaaccgcactccaggaatccctgcggctacaggagcaggcggccctggagacagaggatggagaggggctacagcagaccctaagggacctggcacaggtgtgagcccagagaggcgggaagacagcgccctgccaggcagtcccaggctcccccgccacgtctttcggtgacctgggactgaactgcaaatgggtgggggcctgggacccaggctgtagctgctcagcacccctgctagctcacccagcctctgccttggggagcccccagtctcagaggggaggcacgaccctttgggagcccacctgtgagcaaggccaaatgatgtcttcccaataaatgggaggcctcagcggcgagccgaggactgagctagtggaggaggtgaaatcaggaaggcttcttgtaagaggcagcatttggaatgaggcagcccccagcctcacctgggcgtctttgcccagctaaccccgcggttcctaactcagcagcctccttctgcctccctcccccaccctcaggccgtcttgtcagactctgagagcggcgtccagctgag

SEQ ID NO: 1082 - DNA, 1132 bp, Artificial sequence
  DNA replication origin
gaggactgagctagtggaggaggtgaaatcaggaaggcttcttgtaagaggcagcatttggaatgaggcagcccccagcctcacctgggcgtctttgcccagctaaccccgcggttcctaactcagcagcctccttctgcctccctcccccaccctcaggccgtcttgtcagactctgagagcggcgtccagctgagcggctctgagcgcaccgcggatgcttccaacggcagcctgcgggggctctcgggccagcggaccccgtccccaccgcggcgctcctcgcccggccgaggccgttcaccccgccgaggcccctccccggcctgctcagactcctccacgctcgccctgatccactccgccctgcacaagcgccagctgcaggtccaggtaggaaggggcttgagcgttctgggcgcagccagaggcctgggggaggggctcgcgccctccgggtgggggcgggggcgggggcaggtccggggccagggtccgagggaggagtctgagcgccctggggtgcagccagagccctgagaaatagtttctgagggtgtcaggacccccaaggaggtggccgagagctctgcggtgaagccgagcccagaagtgggggtgcttgggcagctgggggtgggtgcttgggcagctggtggagggaggaggctgcggcagtgttagggtcctggtagagagggagacaggtccctggtcatacagagccaggaccctgggaaaaggtctagcaaggggaatcagagcttgggaactaggggcagagccagggtagggaggagtctgagagtggaaccaggatgcaagggggaggagcctaggagccctgggggtgggatcagaacccaggagacgagtgtgcctgggggtttgtctggcatccggggggctttgataggagttgtccgggaccccagggaggtgagggctcagagggtggcgagggcacataggaggggagcggaagcctggctctcaggcctaggcccctatcctgccccaggccaggtccaggccctggaccccgcctagcgtaggctagtgtgtatccctggaaccagaagagagtaggtggctctggaggcctctcaggcccccccagactctgtgaccc

SEQ ID NO: 1083 - DNA, 1538 bp, Artificial sequence
  DNA replication origin
ggatgcaagggggaggagcctaggagccctgggggtgggatcagaacccaggagacgagtgtgcctgggggtttgtctggcatccggggggctttgataggagttgtccgggaccccagggaggtgagggctcagagggtggcgagggcacataggaggggagcggaagcctggctctcaggcctaggcccctatcctgccccaggccaggtccaggccctggaccccgcctagcgtaggctagtgtgtatccctggaaccagaagagagtaggtggctctggaggcctctcaggcccccccagactctgtgaccccccacaccccaggacatgcgtgggcgctatgaggcaagccaggacctactgggcaccctgcggaagcagcttagcgacagcgagagcgagcggcgggccctagaggaacagctgcagcgcctgcgggacaagaccgacggcgccatgcaggcccacgaggacgcccagcgcgaggtgcagcggctgcggagcgccaacgagctcctgagcaggtgccggggaggtctgagctggggggtactgaagaataagtcaccgtctgggcataacaccagtcaagccttatgcgtatggctctgcactaatatggtcgccactagctgcatgtgcctattaacgtttatttatttatttatttttaaaatggagtctcgccctgtcgcccaggctggagtgcagtggcgcgatctcggctcactgcaagcgccgcctcctgggttcacgccattctcctgcctcagcctcccgagtatctgggactacaggcccctgccaccatgccgggctaattttttttttttttttgagacggagtttcactgtgtggcccaggctggagtgcagtggcgcgatcttggctcattgcatcctcctcctcccgggtttaagcaattctcacctcagcctctgaagtagctgggattataggtgcccaccaccacgcccggctaattttttttgtatttttagtagagacggggtttcaccatcttggccaggctgatcttgaactcctgacctcatgttctacccgcgtccatctcccaaagtgctgggattacaggcatgagccaccgcgcccggccaacatttattttttagtattcagttttgttttgttttgttttgttttgctttgttttgagtcacactcttgctctgtttcccaggctggggcacaattggtccatcacagctcactgtaacctggaactcccagactcaagcgatcctcccacctctacctcccaactgcccctagttgggggcctgggcctggcctggggaaggatatgggaccgaagcctgagagttaggtttccactcccttcctctgtgccctcaccaccctctgagccctcacctccctgggttcctgggcaactctgatctcagcctcgaggatagtagacaagccgccaacatttctaaattttttgtagagatgggggtctcactatgttgcccatgctggtcttgaactcctagcttcaatcactcc

SEQ ID NO: 1084 - DNA, 1213 bp, Artificial sequence
  DNA replication origin
gcaactgaggtatgggagattgggcagcttgtccaaggtccccagctagcagaagtggggctggatttaacccagaagcaggctccagtgcctgtgacttaacccaggactggatgcagggggctgggagcccggcctgccccacatgctctccacaccacccccacacacagctttgcccacctgcgctagctgctcctgcagctggctgcgctcatggcgcagcgtggggagctgctgctccaatgcctcctgggcctgctccgccactcgtagggagccctccaggccctgccgcgccacctcctgctccaaccgcagctcctctagccgttcctgctcttcccgcgccactgtggcctcctgctctgcctgccgttgccggccctgcagggcggacttttcttcctccagctggaggccaggtaggagtggggcctcgtgagcagggcgtccctcccaggaccaggacgcctcctccacccacccaccagcaacaatagcccaggggaggctcccagggaatgagggacagtgcccttgggtgtatgggacactggggagggggagatgaggagggcccatggaacttctgtgctttgacgcctagaggggatagacagacagacagagaaccagagacagacagagaaccagggacagaaagggaggcaggggccaagacaggtacagggctgggcccggggtgcctcactgagtggggaggatgggtgggcaaggcaggtgggcccgcaggtgcacagcgtacctgggcgacaaggcggttcagatccaacttgtcctgagcaaggctctcgttgagggcgctcagcttggacagggagtcctgcagggaggcctcctctgccctcagcttggtcatggagagctcgagctccacgcggccagcctcagcctgcagggtcaggccccgagaaatgaggaaaggcagaaaggtcgggaggaggtgaggaggcccaagaagagacccagagagatggaccctcagagacagggtaggggagacaaggaggggacacagtgtgagatggaaaaaaaaaaatcaccgcagaaagcctgctgcttatgagccatttaaaagccacacaccacagagctgtgcaaaaatagctcaagctgcagggcagggccagagttcagaggatcccctgagtagggtctagggatagcactgctcagagcccaggctgca

SEQ ID NO: 1085 - DNA, 940 bp, Artificial sequence
  DNA replication origin
gcggagcgtgaaggcaggaccctgtcagaggaggccacacgcctgcggtaaggccttgggctctgcccaacccgccctggggggtcctcctggggccacaccatgaccagccacacgcaggcacgggcccccaggggcagttactaaggagtctggcttgccgactcgtcctagctgtggctcaggcttccccagggagtgtgggcctggccaggcaggtagattggcacttggcccatgcctggccactccctgagatccacagtttcctggggccagggaggctgagtcccagggcctcagggactgtatgtgctgcagcttggagaaggaagccctggagggcagcctgtttgaggtgcaacggcagctggcccagcttgaggcccgccgggagcagctggaagccgaggggcaggccctgctgctggccaaggagaccctgactggtacgaggggctggggacttggggggaacaccaggttccagcccagactgcagcctcccaaggtctggggtctcacagaagttgggagcactggagtaggagtctggctggcctgggttccagtcctgtgccaccacttagatctcaccttcccttgagcaagcccctttcctctctgggctgcagattcctcagctgatgattggaggtggcaatgcccaccttctaagcctgttgccaggatgacgtgggaaaagcgtgtaaggccgtggcacggtgcctggctgagtcaacagtaactgccgttcatcggtcatcaggcctgttagtctgagttctctgtgcttttcagatgactctcttggccccagaatcccagccccacttccctgcaccgttcccatccagtctctgaactcagggcttctttctgctcacctaacattaactaagcacctacttgggtcatggaaattaattttcctgtccat

SEQ ID NO: 1086 - DNA, 968 bp, Artificial sequence
  DNA replication origin
tcctgcaggtaaggaaactgaggcccccaagagggcagtggcctgccccagggctcctagctgccaagtggcagagcagggcccggccccagaactggagcagctcagagagcagcagaggccatgccagggctcacgaacctgctgcttctcactctctgctaggaggaggccctcgtcgcgctcctgctgcagggcagcaatctcctcactcagctcttccttctcagcctccagccgggccagcagctcctcctgctcacgctgcagctgactctgcagctgggcccgctcggcctccagctcccgccatgctgcctcctagggggccaggaccggatgcctgtgacacaccaggagggggcccaggcagaccccccaaaacatcagggcagcaagagccatctggcccccataccctcagagatggagggtgaccaggtaaatacaagggagtgataagggctatgacggggacacgccagggccgtgaaagtgccaaggagcagcagtgggctggcctgggggtccgaacatggtcccctgcggagggacaagtaactgtcagccaggtaaggagagaaaagaccaccccaggccaagaacacagcccctggaaaggcctagaggatgcagggtgcagaggggaacgggacatggtgagtcacagggccagagccccaggcaggggtggggccaggacaggccgtgtgggccatggggattctaaggacagtgaggggagtgggagagaggactcgagccaaggtgacaaggagcaatctgatttttagcttaggggatgttccgacagctgtggaagagggattggggttgggatggaggggagttaggactggctgtgaggaatgaagggggtcaggggttgccagaggagctggagagaacacagatttggggacattaatgaggccaagccaggcaatgcaaagggcaagaagagcaag

SEQ ID NO: 1087 - DNA, 1019 bp, Artificial sequence
  DNA replication origin
caatgaatagcaacttagaaaggaggcagcaagcactacgaagcacctgttgtgtacaggtgggatttggcctcaaggaggggtgagtggggtctctgccctcttggtgttgtgctcaggacagtcctgattgatggtgacttcaggtcaaaacattactgattacagcacgccttgctcaaatgataactcacagcctgcggtctgagcactgcagagggatggggcaggctccctgggtccagggatctggggtacaagacccagcttgacgggggggtccctgaccgctgccctggggacacctgctgtgctcacaggcagaagagcttcggacccagctgcgtctgctggaggatgcccgtgacgggctgcggcgggagctgctggaggcccagcgcaagctgcgtgagagccaggagggccgggaggtgcagcgccaggaggcaggcgagctgcgacgcagcctgggcgagggtgccaaggagcgcgaggccctgcggcgttccaatgaggagcttcggtctgctgtgaagaaggcagagagcgagcgcatcaggtggggtgtcgcaggaggaccagtcctgagtcctcatgggatcccatccctgaaacctaacttcacccccaacgttctggggaaattgcccagatacggatcctctgtctcctaagcagagcctggcacctgggtgattttaggaaggtttcctccctgttgattggggaaaggggcagaggggcagtgggcagctttgggtccagactcagacccacccaccgtcatcaccctggaaaccaggtcccctcctggagtcactggtctacccctcccagccgagggcctgggccccagccctgcagggctcagggcttagctcttcagagaggccacatgggcaggcagtgcctgatccactccagaaattggaggagacggcttttgtgtagagccactgactactcccaggacccagggcagcccctgacctctgccctctccagcctgaagcttgcca

SEQ ID NO: 1088 - DNA, 1464 bp, Artificial sequence
  DNA replication origin
cactaaaggagaaagggttgtactgaccacacagtcagggatggtgggctccagtctgggccttaggggtggggcgtcgggttgggagaggtcttgccgacctccacctcctggcatcactccagctccaggtagcccagcggaagctgcaggaacaagaaggcgagttccggacccgcgagcgacgcctgctgggctccctggaggaggcgcgtggcactgaaaagcagcagctggaccacgcccgcggcctggagctgaagctggaggcggcgcgggccgaggctgcagagctgggcctgcggctgagcgcagccgagggccgggcacaaggcctggaggccgagctggcccgcgtggaggtgcagcggcgcgcggcggaggcccagctgggtggcctgcgctcggctctgcgccggggcctcggcctcggtcgcgcgcccagcccagccccgcggccagtgcccggttcccctgcccgggacgcacccgcagaaggtaagggcagtgccgcgcgcagggaaggggggaggtgggcgggccgcactgaggccccgcccccacatggcagggtgtttttgtttttgtttttgttttttttcaaggagcccaccacacctctccactgaggtccacttcttagccccgtcccctcaccgagacccctcccttcactgatctgtgcttctcaagggcgcttcttttttctttagaccaggcctcatctgtttcccgggctcaagtggtcctccctcctcagcctcctgagtagctgggactacaggtgtgccaccacgcccagctaatttttgtagtttttgtggagacggggtctcactatgttgcccaggctggtcttaaactcctggcctcaagcgatcctcctgtctcagcctctcagggttgggattagaggcatgagccacggcacccggtctaggccacttatttttttggggaagtggggtgattcttttttttcaacttttgagacaggatctcactctgtcacctcagttgaagtgcagtagtgtgatcttggctccctctgccttggcagcctgtgcctcctgggctcaagtgattctcccacctcaacctcctttgtagctgagactacaggtgtgcactacaatgtctgcttaatttttgtgtttttagtagagatggggttttgccatattgcccaggctagtcttgaactcctggactcaagcgatcctcccactgggattacaggcgtgagccaccgtgcctttcctggaccgggggctggagggctcttaatgcctttgactccttatctgattttctgagcttccatcctgccatatactcccacatactttcagtcatctctaggttacttaggataccaaatacagctaagtggaaatcttacacttgttacactgtattgtttttaattattctttttgtttttttttgagatggcgtcttgct

SEQ ID NO: 1089 - DNA, 2127 bp, Artificial sequence
  DNA replication origin
gcttctcgaatagctgggattacaggtgcatgccaccacgcccagctaatttttgtatttttagtagagatggggtttcactagttggcaggctggtctcgaactcctgacctcaggtgatccacctgccttggcctcccagagtgctgggattacaggcatgagacaccgcacctggccaatttttgtattttcagtagagacggggttttaccatgttggccaggcttgccttgaactcctgacctcaagtgatccgcctgcctcggaccccacagtgctgggattacaggtgtgagccaccacacccagtcaacagaacaagcaaatcacttaactgctttgtgccagccttgcctgggaagagggtaaattgttccttacctgtcaggaagttgttgtgaagatgaagtgcctagcacagtgggcactcagtatggagagacttgaggtgatgcagcaaccacccttgcactgggccctgggaacagtggtggatggaagagacgaggcccagccctcatggtgctcctggtcggggtgggggtggcagacatcagaccccgctgagggtgggatgagctcactgtaatccagcctgtggccagagaggcctctgagggagagggatggccctaaaggatgggccaggcaaagagaggccatggggagaaggggagcagcatgtacagaggccctggagctgggacaaagaatgttctagaacatgggagatgcagggtggccagtttgtaaagggtgagagggtttcagctgggatgggcaagaagacccctaagctatagcagagaagttgggcttgattctgagggctgttgggaaaggcagggatgacagtgagtgagatgtgtgggaggcccgtggcttctgcatcactgagcaagtcttctttctcttctaggaagcggggaagggctcaacagccccagcaccttagaatgcagccctgggtcccagccaccatctccaggacctgccacctccccagcctctccagacctggacccggaggcagtgcgcggggccctccgggaattcctgcaagagctgcggagtgcccagagagaacgggtaagcctgggtgtgcatggctggatggggaacctggagggccctggggaggttgcagggtgtcagagcaggggtctgtctttgttcccccatgtcggggctacaggacgaacttcggacccagaccagtgccctgaatcgccagctggccgagatggaggctgagagggacagcgcaacctcgagggccaggcagctgcagaaggcggtggctgagagtgaggaaggtgagtctgatcctcggggtccctgttctctctcctgtgttttgggcagttgaggcaggagccgggggattggcctctgaccttgccgtggcccccatgacctgactcggggctgtctccaagaggaccctccttggacagcctcacctgtgtgcaggcccgcatactacgaagggtgcagacagtctggccctgcactgggtggagtgcaggctggacattttgtgacctggtttgggtctcggggctgtgcttggccatgcctgacggggtgggtggtggctacagcccggcgcagtgtggatgggcggctgagcggggtccaggcggagctggcgctgcaggaggagagtgtgcggcgcagtgagcgggagcgccgggccacgctggaccaggtggccacactggagaggagcctgcaggccaccgagagcgagctccgggccagccaggtgggcaggagctgagggccagcggggcgacggggaatctgtgtacccgagtgagtgtctaactcttatgtgtgtctccctgtgtctgtctgcctgagtctctctgcaacccactgaggtgaccagcctgtgactctgtgaaaccatgttcagactccatcctctcatgtcacttgtggtcactaggctgtagaaaaaagagcttggtcaaggtgcagtagctcatgcctgtaatcctagcactttgggaggtcgaggcaggtggatcccttgagcacaggagtttgagaccagcctgggcaacatggtgaaaccccgtctctatgaaaaatacttagctgggcatggtggtgtgg

SEQ ID NO: 1090 - DNA, 834 bp, Artificial sequence
  DNA replication origin
acaggagccctgaggaggggctgtagaaatgcagattccaaggcccttctcctgccccactgactcgtgcaaactgagctgagccggacagttctgagggggccctgctgttctagggtttcaggtggtgattccccctcccctgcccagggtcagccagtgaaaaaggcctggggagtggggatgggacaggaaggcagactaggggtcctcccatccctggtactatcctagagacagggtggatcaacagggggtgttattagagcctccccagcccctatcctgagcctggcccctctgccaccctgcccagagccccagccctgccctgtctggggcccccactctggctcctgcccagctttgttcctggcctcctcctgcagcccctgcggctgggcccatggccagggttgaagccgcagacacaacaatccagctaagctcggccccaggccagaggccttgggggcgggggtggtggggggaagcagtaatagagggacaggctggggagggcagaggggagctttggctgcactgtcaccaccagggcctgagtttcctgcccgacagacgcacatacacactggcacacatagctgtcccccaaacacacataaaaaccccagaactacagagacataaaacagaggccccctgagtaccacctgtgataagagcctgtgtgtgtcaccctgtgacgtaatcactgctcctccttttacagattaggaaaatgaaaaccaggcagatgacagcccaaagcccaagctctctttcttttcttcttcttcttcttttttttttcttttcttttttacagggtct

SEQ ID NO: 1091 - DNA, 885 bp, Artificial sequence
  DNA replication origin
gtggtggatcccactgcacatccccagggtctgctacctctggtggggttaggttattccatcagggttcaggaacctgagccccctcagtaagctcctcctggcaccctgatctcctgtggctctcctgcctaggtggagcgggagaagcttcgtagccatgaggacacagtgcggctgagcgcagagaagggccgcctggaccgcaccctcacgggggctgagctggagctggcagaggcgcagaggcagatccagcagctggaggtctgaccccacccagtccgggaccccaacttcatccctagtatgagtgctcagcaattccagtggagctgatggcccagccagcccagggcccataaccccctcccccaggagccctgagccttccagtgacccagcgggccatggagggatgggttctccctaaggtgtacagaaaagacacgaaaggcctgtttgcacgtgagcctgtgggttcatgtacgttgtggccatgcagcagtgtgagaatccatgtgacgattcttgtgtatggagcatgaatcttgtgcatggtgtggcgtgtctaggtattatgaatatgtgtttgtgtacagatgttttcatgcatgggggagttgggcctttgcacatacacatgcacctgtgtgagtccagataggtatttacatgcttgcctttgtgcctgtgtgtatgatgtctgagtgtgtgtgtgtgtgtgtgtgtgtgtgtgtgtgtgtgtgtgtccatgcacctgcctgagtgggggtcattgggtgcactcatcctgggctcgcaggctcactgtcagggccagcaggatggaagacacacaaggatctctcctgccttccccctctgcactggccgtgtcccagg

SEQ ID NO: 1092 - DNA, 2005 bp, Artificial sequence
  DNA replication origin
ttgacagggtggggaggggtgaggcaggagctgagacgggtgggagcagggtctggggcctacctggggttggggctgggatgacttcctgttggacttgctgctgggactggaactggaactgttcctcggagggccgaggagtcacctctgcagccaggggaggataagggggtctgctccctctacccctcccagggggtctccccaccccagctgccggcccgtcctatcctacccctagcccgttaccttgataatcatagtagtctgggttgtctgcaaacaaagatgaaagtggaattggtgggagtaaggctaatcccccagcccctggggcaaacaagttccctcctgagccagggaccaacccccagagttcccatcagcgtgtccagtgcggtccctggctgagccaggcacatctgagcagccaggcctcggtgacccggcaaggcccttaccgatctggtcgctatagtgggtgtactggacgtggtcagggaacggcggcagcgggtccaggtcatactggccctgagccagcaagcctgctgtggggaggcaaagcatgtagggtaccccatcgggaggggcaacgggggcccgaggcgcttctggagagtggaggcgggggtcacaaggtcaggcccataagagcctaggaccccacaagcagattcctagaggatccagactcttcttcgatggtaaagacccttccccaccctggtcatgggtcacctccctgaccttaccctgccccttcctgttgctggcctcctggctgctcctaggactccacatgctcctgcctccctcagagcctttgcacctgacactccctgggcctgtgaggcctgctcagctccttcaggtcttccctggaatttcagctgtgccaagatgccgccccacctccagcccaccagccctcctgctgatttctgtccagcactcagcacatgctggagtttctcatgtctgcttgtttcctatttgtctcccttccctggactggcagcatgatgaggagcaacgatgtgtctgcctggttcatcgctgaatccccagggcctagcccagcacttggcacgtggtagggactcaacacatcgctgctgaatgaatgaatgttggccctgctaggacttttgtggtcctcattgattctcttcatttggccagtagggacccccacaaggtcaggactgtatagagcagaagggccctgaatggatctagaactcaagcatccggactccctgccttgggtgcccctgcacctgcacatcggctcccagagaggccttgtgccttgtgcccacggagtccttgtgcctgggacgtgccctccagaaccctgcctgcctgctgctgtggaaggctgggggaagggccaggagctgcctccagatgctgccagggttggctggtccagtctgtggtccaagcaggcagaaggccctgggagctggggagctgagttctggtcataagtcgtgacaaaggctcactatgaattccccctactaaccctactcctcagccccacataagaggagctaccccctgccccaggagccacttaccaggcaggaatagcaggaagaggtaggcagctctcatggcaacaaagaggcaggccggggtggtgtcagagaggacagctggggaaagaccggtgggagagctctacccagggccacacccaggacagcagagctcacctttgatcccctgatttcgccctggagaaggtggcacccagaatagaagccaggcatgggagggctggagtggagggacatcccagtccctgctggcccacccaggtgttcaggtcacaagggacaaggcctccaacccagctccagggctgatcctgacaagcaaaccccgtgtagtgggtgtacttgatgtggtcagggaagggcggaccctgccctgctcactaaggggacattcctaatgtgctcccagcccaggccattctgtcctcacc

SEQ ID NO: 1093 - DNA, 1120 bp, Artificial sequence
  DNA replication origin
ctcgatcctggggcagccgcggaggttcctgaaccccgcgccttcagagcggaggccaagggggcacctggaaagtttggggttgctctgcagagagaacgcgaattgggaagggcggggagcccgagtttggggggagccagaggtgaggtcgtcgggggatgggacatcttttgttctcccggggaggttggaatgtggcgggtggggtggggggggggggtccggtgggaatggccgagacagagacgcagagagacaaagagagatcagagacgggagcgcgagggcgcgcggagcaagtttccgcggctgattgttcccagctgtgcggcgctgcaacatctgggtttctcccgccgggacccctccccctgagcccggctctggagccggcagagccctccctccgtctgatgtctgagcgagcgtcggggccccctgtcccccacctcccaggacgcaggggagtcgggggtgggggaggccgcagctgtggaagaggccagaggtgggggtggggcagcctcccaggcaggtcctggcctcccgcacgccccaaaaccccttcgtctagaagagctcggagatgtggtcccgtgggaggagttcatgaactccacactgacttctctctttcctgcctccccgctagcccgtgggcctccttcccccaataagcctgggttcgggggccagtcctaggggaggaagactccccgcagggtaccgacaggcatcccccaacaccttgcaacccctcttgccccaattcagcgccttctgctgagcagcgggggctccgaccgacctgacggatggggagaagggcaaggaaggctctctgggtcttttcatccccctcccatgaggaggtcaagggttttcagaatggggtgtggggagccagctatccctcgcctctggggcagcttggtcctgagcttcgtctcccggctcccactccaccttagtgaggtgcctaatgcatgagaggagccagggggtcaggaggcctcaggattgagaggaaggagggaaagacctcctgctttctcccctttccctcccctctccctggactcccagtggggaaaatagaccaaagttggggtttcca

SEQ ID NO: 1094 - DNA, 951 bp, Artificial sequence
  DNA replication origin
ccccccagggggttccaggggcagacacgtgcaggggctgccagctgggcacccgggggtatgtgcatttcctcctgggcaggtgggagggtctatggtgccaggtacaagacaggcacagcagagccaggaaaatatcatgactttatttgctacactgacagcagcactgaggggagctgggggctgccacccctacgcgggatggtccaaggtaggggacagtagtcaacgcttccccagggtgggggtggtctcgggggaggagtgtagacagtcgccaacctcagggatgtgggaggtggtggcggtggtgttgctggagaggggtccagttggtggctcagaggcagggagttccagtgtctggggtgcccgtgggcctgcactacctcagggggccggcgggcagcggcggccagggctgctcggccagctctcgttccagctgcttgaagcgcttcttggaggcccgcttgggccggaggcggcgcaggcaggcggggaggcactggtctagcacgctctgcaaagggcagggagggtgtcaggggcagccggggctgagctggggtcaatgcacccccacctcccttctctcccgctgctgagacccagggcgggccccacctccagcatgaaggcccccacgaagttgagggtgaccagacccagcagcagcagcttgaagccggtgtcagtgatgttcctcagcgccagcggcccctgcaggaggccggggaccaggacaaggcccaccaggacggagctcaggagcgccagggccaccaggaagggcactgggagcaggagagtctctcaggcaggagccacgcccccccggcacccacagacacacgtgtgcacgccagtcttccactcggccggcacctctctcccatctgcctccccagcaccccagggctcctccctccctccgccagcatctcc

SEQ ID NO: 1095 - DNA, 1743 bp, Artificial sequence
  DNA replication origin
ccagtcttccactcggccggcacctctctcccatctgcctccccagcaccccagggctcctccctccctccgccagcatctcccgcccgcgcccgcagtggcaccattggtgtagagcggccggcggaagggcgcccccttggacacggctgcagccaggatgaggtactggaagctggacagagagaagaccacggtgttctcgtagttgggcaggttgtctggtgcggccactgtcctgttcagaggcacgaacctgggggtacagggatgggggtcagggaacgaacgtggggtggacagggaaggggcgggatgggggtggtcagtcagctccctactcaccatggctgggccagggtcaggaagtagccccctagctgcacgccggtcaccaggaccatctgcagcagcaggctgctgagcacgggcacgctgagcagcgcccccggtggccgcacccgtcccaggaccagcgctggccccgtgcggctcatgagcactgccactgtggtggtgatgaccaggtcgatggccaggaactgcaggtcacccaggttggtgttgatctgccacagggaagggaggacagaggggaaactaagacctggccctggcagcccctagtctgatagcagaggccccacccctgccccgaaggaatctgatgggtaaggcatcccccagtctaatgggggccgtactctcctgccagcccagcggaggaggtgccgctcttgatgtgagacaaacccctggtctgatggaaagggcacctgtgctgaccttgggggcctaaatctgaggggaggtttccctccctgtaacaaactcccggcccgaaggggaggcttcggctctgccttgcggagtccctatagctaccagggcatgcacagttcctgccctcagggagctcctcgctttcaggcagacacagggacagacccaagtataagatgtgcgccgccctgcagtgtcacctcattcgctgggggtgagcaggccatgcccagagcaggggaggggagagctcctccaagtagggtgtgggaggtacagccaaggtatggggcaaagcaagtgcatctggggaaatgggcagacctgtggggatggggcgggggcgagggttttggccctgcctccgttcagtcttccctgcagattggggagctcccagagttgcggtcaagatgttagcccatgacagctgctgccatttgtgaggacctagtgggtaccaggctccgtgcctggtgtttttctcatctcccccaagccttgccacctctccaaccacacagccggagagtggcagggtcaggatctgggcccacgtcatctattctgggacctgccagctccaaggcacagggctgtgtcccctccctagtcctgggacggctctgggtacggagctctgcagatactcaccgtgtagaggatcaggacggagatgaactgggtcaggctgtacagagccatgtacttgaagacgctgaacgaagtgtcaagggaacagcgcccctccctgggtggcagggcacggacattaggggacccaggttggctgaccagccctgctgagccctcacccaccggtccctgcctgccttacctgatgaccatgggcacgcactcaatactggccatgctcgaggtgaagggtgagaccactgaggcttctgcctgggacagcgagatgccgacatcagccgccttcagggccccacagtcatt

SEQ ID NO: 1096 - DNA, 960 bp, Artificial sequence
  DNA replication origin
gactccacactgctgatggctaatttcacaaacatcatgtcttgcaactccagaggcacgggtcgggagggctaggggtggggaaggcctgccctcaccctggcttccctgccttggggtccccgcctcctccccagggttctgcacggcaaaagggggcctggtgagctccatcttgcacccccggcccatcaacttcaagttctataaacacagcatgaagtttgtggctgccctctctgtcctgggtgagtggccccctgcaccctcctctgcccatagccccccccacctgggtcccaaatcccactcagtccttcgctgtccccacagctctcctcggcaccatctacagcatcttcatcctctaccgaaaccgggtaagccttgggggtggggtggggggtgctgccagcagggcccaggggccaaccagccaggtgctcacattcatggtgccccctgccaggtgcctctgaatgagattgtaatccgggctctcgacctggtgaccgtggtggtgccacctgccctgcctgctgccatgactgtgtgcacgctctacgcccagagccgactgcggagacagggcattttctgcatccacccactgcgcatcaacctggggggcaagctgcagctggtgtgtttcgacaaggtggggccgcaggtggggttggtgcaggggagcgggacagccacaggcgccccagtgaggcctccacacccgcgttattctctcagcagcacccacaggatgccaggtcctgtctagggatggaaacccccagaggatccaccccatcccactcctgccctcactgggctcacggtctggcagatgaaatgtctagaatcatgtattcatgtgttcaagaactggtggggggccgggcgcggtggctcacgtctgtaatcccagcactttgggaggctgaggcagatacatcacttgaggtc

SEQ ID NO: 1097 - DNA, 994 bp, Artificial sequence
  DNA replication origin
tgcggcagtgtcggagccgcgccgagcctggtggcccaggtgccccgcccgcgtcagccctgctccagccccgcgctagcccagcgcccctcgccccgggccgtccggaccgcgcccccgcccagggccttgcgcacgccggggcccaggccgagggccgcagcgccggggccggcgatgagcgcgaggagccggcatgagcgcaggtgagtgcggagtccgggtcggccccgagcccggcgcggtccccggcccgccagttgtcgtcaccccttggagggagaggggaggcgacgccccccaccgcggggtcgcgagcccaggaagcgggacctggttggggatcctggcccgtcccctcccttttgacggggactcggccccggtttcttcccagagacgccggggctggggatggcgccgccgctcgcagccggtccctcccctcccctgcacccctcagccgcgggattggaagccgggcgcttgtgcaagagggtcctggggccgtgcggggacggggaggccaccccacgcccacttaatcggatcccaccccgagtgacggatgtccaggtgggggagacggctgcatcctcgggcctctgggcaacccctctgggctgaatgaatgaatgaatggcgttgggggagtcgggactccatttcctgggtagatgtcctgggccacagcgccactcctgacctcctgcctcagaccccagagaaaacccgtcacacccagggccaagggccacaccctccatgcaacccatccctggccagatgtcctacgcccactcctccagggtctaatttaaatcccacctgccgggaatggggccagtcctcctcccctatccagaaaggtctcatctcagtgtctgtcactcagcccccagccccacagcctagagtgcaccccccggcgagggaggggaaggaatgaggaaagacagcccctagaatccagatccaaagatgggaagatggt

SEQ ID NO: 1098 - DNA, 1705 bp, Artificial sequence
  DNA replication origin
ccccggcgtctctgggaagaaaccggggccgagtccccgtcaaaagggaggggacgggccaggatccccaaccaggtcccgcttcctgggctcgcgaccccgcggtggggggcgtcgcctcccctctccctccaaggggtgacgacaactggcgggccggggaccgcgccgggctcggggccgacccggactccgcactcacctgcgctcatgccggctcctcgcgctcatcgccggccccggcgctgcggccctcggcctgggccccggcgtgcgcaaggccctgggcgggggcgcggtccggacggcccggggcgaggggcgctgggctagcgcggggctggagcagggctgacgcgggcggggcacctgggccaccaggctcggcgcggctccgacactgccgcagtccctccgtgcgcgccgcaagccccgcccggccctctgcggccctcgcagcgcccgcgccggggctgccgggacttgtagtccccgcctgctcctccgcacacaccgggggcggggcgaccggagacacacacctcacggaggtagcccccgccagcacgtcccagtggttagggactgtgcgtgctggtccagctctccatgtcttccaggccgcgcgaccgtgagcaagtcactgatcctctctggccctcttttcccaacctgtaggatagcaatgcctgcttcacagagaactgctgcgaggatcacacaagaaaatgcttgtcaactgggcgtggtggcgcatgcctgtaatcccagctactcggagactaagccaggagaatcgcttgaacccaggaggcggaggttgctgtgagccgggatcatgccattgcactccagcatgggcaaaaagagcgaaactctgtctcaaaaaaaaaaaaaaaagaaaatgcgtatcaagcacttgagacagtgcctggcgctgcttgatgaatgcaaagaaggaagacacacctgcccagagattcacagggtcagatgtgggcccacagagacccagggagagtctgccatgatgcactggaggccttgaaatgccagagaaagagaagcctcacagcgtgacctgcagacacacctgcactggggggattcatgaagacccctgaaaggcaccagagatgtcttacctgcgtgcagcatttatcctgctaccccatagtgaccggcacaggcatagtgttccctgtctccaggacctctggacagaggagctccaaaggggagagtggatctgtgagatcctagggcaaacaagggaaggttcacgttagggccaaggatagacgtgggcaggatcactggtcatttgtccagtatgaatttatggagtgccagcaccactgtgggagccaggaacgtgagagtgaacaaaacagagatgcccctgtccctgcggagactgctgtctactgggaagtagccctagtcaaggaaaggaaaactccaacgatccctattgtggaaggggctggaaggagacacagctgtgatggtggtgagggtgtgggtaggggatagaccccaggagggaaagcagcacctgattcatagcaagatcccagtgaacatttggtacaggaacacacgttggcaggacttgctggtggataggatgtgggggtgcaggaatgtgtggaattcaagatgctccccagggttttggcctgagcagctgggtgccagtgga

SEQ ID NO: 1099 - DNA, 1816 bp, Artificial sequence
  DNA replication origin
ggtctagagcgcactgcccctctctgtggtggtggagaaccttaagtgccggtgggggttagggtctttgtggtcgttgagacaggacaaggggaatcgtcacactgctgccccctgctagagggaggctgagtccatatctgccccactctgtgcccctaccccagctgggcctctctttgccaggatagagcgatagcagggcgcctgagcaggaaccctcctttgctccccacccccgactgggaggatcatgccagcttttcaggcggcaccaaccatgccccagcaaataaacaggtgggtatggtgacagctgaggcttagagacctgagcactctggctccgcgcccactccctagcggtgcccagttcagggctgggggtggggaaggcaggggagctcttgcaccccaccagagcctggaccaccctccactgctgtgttcttgttctcagagaccacccagtccacctctgaggtttacatgggggacaactgaagcccaggcccaggggaaggcagaggttgaggccagggacagaggcatggagtgggtccctagtcctggggcttgttggtatcagcgtggccagtgcctctgcagcggtggcaggagactggttgggcaggtgggagggctgccagggctgtgtggggagacacatgatgggttggtgggggcctgggagaggcagggtgctccaggtgtcaggatgatttgagagccataaaccacgatggtgcctccgtgtgagttcagcttgaggcagagaggataggggactcatccggtgtcagcacagggtcccacctcagagtcctgcatgctccctgcccccagcactgacccctccaaccctagcaatggggaggttttaaatgcttggaatagagggggcagatcaaaccccagcataaccccaccctttcattcacaccagccacacctttccaaggccccgtcccattactcagggagacagatcattggacttggctgctttctgggattgcggggggagtggtagggccctaccctaccttcagctgtctcggacatcccgcactctaccaagttcttggacagagagaaggggagggagcagaactctgaatcaggatccttttccaacaaagtaccccgctatacaccccaagtccccgtcgtcagctgggtagaatattgtccctctgtggtctcagaatgaagtcaggggaaggtatctggggacacggagctcagggccagtgcctggggacaagcaaccaccagcagcccccacagggcgaaatcggagcctgagtaacctccagggccggattcagcctcagggcagctcccttcgggtcctgccccagtccccggcaagtctccgcggaagctccgctgaactgggagtgggaagcaggagaggggctgggttgaggtgggtccgaggggaagtgaggtgcggaggggaagtgaaaggggagaggacggcagggaagctgaaggggtgtgaggtcccccgggaggagaactggagagggccagacggagggttacgggtgaaagggagggtctgtgagggagctggggctgaggctgtgttagggggtctgggagagtctcagggtttctggaaggtggacacaaggttcgggggttgtcaggtttctggatgagattcttaggatttctgggctcgggggctcgggatgagggacaactcgggctggacaaaggctgtccacgtccccgagtctgagcgcgtctcaggatttctgggctcgagatctcggcccgggcatcacggtgggccggctcacct

SEQ ID NO: 1100 - DNA, 1606 bp, Artificial sequence
  DNA replication origin
ctcaggatttctgggctcgagatctcggcccgggcatcacggtgggccggctcacctgtagacatcggtccagaggtaggtgcccagcacgtacaccgcctccacgcggctcccgtactgcagccgcacggtccgctcgcgcagcatcctccccgccgcagtgcccgcgctcgctggtccggggcggccgggagcacctgcagcaggtgcgccttctccagcagcctgcgccccacggccccgcgcgcagccttatccagcggccggtgggcggggcggcccgccccagtcctctcgcagtgggctgcgggcctgtccgtcaagcgtggtcccgcccctaactcgtcccgccccgctgaggtcgtggcgaagtcatcagggaccagttttgtgctttccatggttggattgtcattctttcattcgacaaaccttcggtgggcgcccaggtgttggagggccctagctcccctccggacgccccagcccagtggggctgaaaatgcaaatgtgggaacacaaagagggtgccctaacccagcctgggggccaggaagccttcccagagaagacgatcctggaaccttcttaaaggaggcgtttgcaaattaaaggcgaggagagggagctgcctgtgcaaagccgggtgcagcccggtacccccatcccccaacagtcagatgaacctcaccatagagaaaacgggaagcggtggggatggggaacccggcagctgagggagaccaggacgccaagccaaggcattggagggtgggagatgggagcctggagtggttgtctccgcgagccgtggtcgggtgtgctcgtgaaatgggtcattctgggctggggaggggcaaggaagcccctggctgtggccagagctggagaggtggggactgacccggccactgcttagggactgggattttggtggcacctggtgactgataggatgtgtgggtggagggagaggagaggggtaaggattagggccccggttctggcctgggccaccaagggaaggggggtgccacccagaggtcatcgtgtgtctcacagaggctgagatgtaggatgacaatcagtgtgggcctcggccagcccctcccatgtcccagcccttcccctgggacccagtgggagtgctgttcagacacatacatcagccctgtgtgaggaagtggtctttggtaggtgaggacagaaactgagggggggtgggcagaggccgtgggagggaaggagtggggcggaggggatgtgtgtttgggaaggagttagagctgatggaagatggagctccaggaacgggtgcccccagacaagaggggtgaggcccacaagtgcccagtgctgatatacccagcccttggactccaaccttctccctgaggcggcccaaattaggaggtggtgaagagcccagctgcttctgagtggcagggatttgggaggaatgtgagtggggaagagggaaggcccgagttttagccaggaggtcatttgtcccccaaaggcacagctcacagacccagggagaggccagtaactgttttttttttttttttttgagacagagttttcctcttgttacccaggctgg

SEQ ID NO: 1101 - DNA, 792 bp, Artificial sequence
  DNA replication origin
tcaggtgtatgggtgtgtgtgtgcacaggtgtgtgggtaggtagggatgtgtgtatgtgtgagagtgtgtgtacatgtggggggtacagaggtgtgtaagtgtgtgtgcacaggtgttgtgtgggtaggtaggggtgtgtgcatatgtgtgtgtgcatgcgggggtgcacaggtgtgtgggtaggtagggatgtgtgtgtgtgcatgtgggggtgcacaggtgtgtgggcgtgtgtgcacaggtgttgtgtaggtagcccccaaggggtgtgtgtgtgtgtgtgtgcatgcatacatgtgtgtctgggccgggtgagagtgtcggcacatctgtgcacgcagtcagctccatcaaggctgaggttgaggctctgacccctcacaggacctctgggaatccaggccttgctgccagtcctcagctgcaggccaggcatccaccgcaagccctggctggggagcaaggtgagaaaaaagagaaattttgtatctgaggaatgtgagcccctttaaacgatcaggcccagagaggcactgaaatgtgacagcagccatgtctctctcctgccttgagctaaataatgacttcttgaagccacttgctatgtggactgactgacaccaggcagccataaaatgccatctggacaccatacttcataccctatcattcaacaatgcacagccaatcacagctcaatgtcatctctgcaacccagtgagaatgcctgtcaaacaactgtatctgcttcaaaaacctgctcgtaatgaaggctggacggagcactcccc

SEQ ID NO: 1102 - DNA, 1075 bp, Artificial sequence
  DNA replication origin
atctcctcctgaccccttcccagaacagccctccccagcccagaaactcaaaaccccttttcctttgttgatatttaaaccccagtcccacccacccctttggttactgatcgctgggtgctctcatgtgtatacacaatgcacttattaatgaacttcggtttgtttttctcttgttcatctgtctttttcgagtctcccttatggggccccagccagaaagcctaaggtgggtggaggaaaaggatcatttcctcgctcatgccataggggaggcaagctctcctagaggggtgctagccaccccaaaatatgtctcttcggcacatagactattttgagctaaaggccattgagaaccagcacaaggtgctggagaaaggccacaaagagtatgtcagggaggccaccaggagctcatacttcctggagctcaacaggcttgaggcaggacatgctgtgtgtgggaattgtgtgggggtgggcggggggttgggaaggatggaggaagagattgtgtgtgcatggaggaggtgcatgggtgtgtgagtgtgtgcacaggtgttctgtgagtaggtgtagggggctgtgtgtgtgtatgtgcatgtgggtggggctgcacaggtgtgtggctgtgcaaagagatgttctatgagtaggtgtaggagtgtgtgtgtgcgtgtgcatctgtgtgtgcatgtgggtgcatggcgtgtgggtgagtgcacaggtgtgtgggtagataggagtgtgtgtgtgcgcgtgcgcatgcgggggtgctcaggtgtatgggtgtgtgtgtgcacaggtgtgtgggtaggtagggatgtgtgtatgtgtgagagtgtgtgtacatgtggggggtacagaggtgtgtaagtgtgtgtgcacaggtgttgtgtgggtaggtaggggtgtgtgcatatgtgtgtgtgcatgcgggggtgcacaggtgtgtgggtaggtagggatgtgtgtgtgtgcatgtgggggtgcacaggtgtgtgggcgtgtgtgcacaggtgttgtgtaggtagcccccaaggggtgtgtgtgtgtgtgtgtgcatgcatac

SEQ ID NO: 1103 - DNA, 1188 bp, Artificial sequence
  DNA replication origin
tgagtttctgctgaacacctgctgtgtgccttgcctggggagggatgggctccaggaaaactgtgagaagcagctcctgacatggagtttggtgtcaggcagacttgaagtcaaacccaaactgatgaccatggagaaattccttcaaccctctcagcctcagtttcctcaagtggccagacgaccaggaggctgctggagcatggagcgcagcctcgtatgctggagctttaagaaaaacacttaattctaggatacggtcttgaccctaagcatctctctcacattccaactggggagatggaattggagagaagaaaaccggtagttcataaatcccaccatggcatggatcccatgtgacatgcaactgggaagagcggagacagaagctcttctaggttagagtgattagggagggctttctggaggaggtggctcctgagccgagcccaggggaggaacaggctgtggacaggtggatgggagaacagagggtgtgtgggcagggggacaaggtgtgggagctgtggttgtgggataggactcatacactgaacctgggtacagtgttaatgggaggcagtggggtgacctgaagactctcaaggacaatttggggtgtaacaagaatggggtgagaggcagggcccacagtcgacagtcttctggtggaggtgcaggtgaaggtcgctgagttggcccggtttaagggaggtttatttcttcagctcccagcagagttgaaaataggtcttggcagttcaggggagagatgggggtggggggctacagcctcatatcgccttcaggataaagtccaagccctcagccctgtctgcaggaacctctgggattggggattgggcttcttctcacctctccagcctgagcatccccaccccaatcctctagccctgctgaggcccaccctgttccctgagcatgcctctgcgccactgctccatggatccttctgcctggaatgccttccctcatacccacctagcaaacccctactaaccccttaagacttgggttaacatgacctcctccatgacatttgccttgatctgcccagcatgatggtgcaggacactctcctctgtatcccatagcgcctgctatccacatccttcatagccaattcattttgctctcacgataactggctgtgtcacgttggtc

SEQ ID NO: 1104 - DNA, 913 bp, Artificial sequence
  DNA replication origin
acagagaattccagaaaatgcatctgagaggcctgcagagtcccttctccctatgcccctccaattctaccgctgtctgatcctgactcagtcttgcattgctgcttttgcagtggtggggaaggcttgggggaaagtgcaggagaatgtccctgtctcctacaaggccggccttctgcatcccaaagaataaaggttctttatggtctccagcctcaggctctggttctggcctctgggcagtcaaggagggccacacaggaccgcagatggattcctcacacttcccacccctgtctttattggcatgagccacctgaactccttaggcaaggacaaggatagccagggcagtctggccagatccagggaatcagggtggtgagctagcccactggggtgtgggggtcagtgtggtgagctagcccactggagtgtgggtcatcaggatggtgagctagccctctggtgtggggggtggacagggtggtgagctagcccactggagtcgggggtggacagggtggtgggctagcctactggggtggggggtggaaagggtggttagctagccctctggagtcaggggtggacagggtggtgggctagcccactggggtgggtggtggacagggtggtgagctagcccactggagtcgggggtggacagggtggtgggctagcctactggggtgtggggatgggacctgcagcacatgctgagtcgaggattcctaagggtttcctaggctgggacaccctggggcacacaattaccccaaacacaagtgtttctccaaataaccagttcacacagcccctgggggaatgaatcacttcctgtgatgtcatccctacacacccatctcctggagggctcagactcccagcagctcaggtgactggcaacacc

SEQ ID NO: 1105 - DNA, 2013 bp, Artificial sequence
  DNA replication origin
gggggtaagggggagtgacacagcaaaggcattagaggaaaggccacggagtcagaggagagcaagcagagcccgtgtcccagctgccaagtgggaaagtgtttcaaagacaggtgatcatctgggccaagtgcctctgacaggtcaatgaggggaagaagagaaaagacccactgggtttggcaacagtggagtttccttggtgtggtgggaggaaaggctgattagaggcaggttgcagacgcaaagagaagaaataattggaggtgtcaagggagcagaagaaatgaggaggtcaaaggagaatgagtttggggatgggtgatattcacgtctgtgtgctgggtgcaagggaggggagaaggggcaaggccagtgatgcccttgagtaggggatgtgccccaggagggctggtcttgggcaagagcccagacagcacacccctcttcccaggagggcaggcatggtcgtggactcaaaggcaggagggctgggagatgaggtggtgggaggagggaggttgaaggctctgagtgacaagggggaagagtggggaggcttctggagataggagaagataggacatagtcctctaggacactgaaagagaaaagagcctggagcaatgctgtaggagcacgagcatgtcacgcatccattgaggtcagcagtcatgagtccaagtgaaccatggtcagccgcgtggtgcaggtgcagagggggtggagagttggatctgattgtatagctggagctctgccaggcagctcaagggagggaaggatgagcaaaagattagggagtggagcaagggggtggccgcagcgggggactatgggatctatgggactatcctggggaagggaagagggaacatgagggatgagggacagcagtggggggcgagtagagaggactcagccttcaaaggtcaagcgtcccagtgggctgaaggtttggttgcactggtgtgttaggagtgagctggaatattgggaagcggtgtccgagtgggttgctaacaggggagcttgtagtgggtgcagttttttgataataacattctatagcacctgccccgtgaaggaggggatgaggccaggtggaggacaggagcattggatgagaggtcaagggactgagggaccagggtgcagcacaccatctacatcgccattgaagtataaactggtgacggcagccggctgaggaacatggcaggagctggcaccctcgagatgaggacagagcgatggtgtgcaaaggtgtccctgtagatgggtggtgtagtctggaaatgtcaatgcaaagctgggggtttacggagtgaagaaagatgatgatctggaagggacattgaggagcatgaaggacccttgcccacctccaggcccaggggctggagggagtaagggggaagcagtcaccagggagatggctgaaggggaggccatgcctgctattgggggcaggcttcttttacagtacaagatcaaggaaactgtccagggtgggactgaggatatcgtgcagatgatggtggctgggattgaaagggagttggggaggatgaggaagggggtcagatgagaggatgatagtccaggagacttggggtttccatggcaactgatgtaaacgatgaggaagagcaggtaaggtgcgaggacccccaaaagtgctgtggaatgtggtgattgtaaggccaggagtgggggatgggggaggtgggtcttgccagcagcctgcaggggctcctggggcccctgcacactcctgcctcttctgtaaaatggggattataatctttgctttggggggttgtgatgagcattagggagcgccaagtaggactcgtgattgttggaattaggactgttgtcaccgcagtcaatggagacagttttttgatggggccaagtgatcatggcagaggttgtggagggggtctggtttctccagagggctgaatatttgggtggttttttaggggtccaggaaaggatgaaggc

SEQ ID NO: 1106 - DNA, 1120 bp, Artificial sequence
  DNA replication origin
aggcagatgggaggcttctcaacacccatttcttgatcccagagctctgatgtatcaggtgaatgcggtgtattgggtgatggaaagaagttgcacggggtgctggcattagtcaagttctagatctccactcaagtgcagatgggcttgaatccccctgcagagtggcagaaagtgagaatgcatccattcattcacacgtgtttattgggcacctacacctaccatgtgccagacactgttataggtgctggggatgcagctgtgaacaaaacagataaaattcctgcccttgtggagctgaccttctagcaagagagatggacagttgactggcattgaggtgggagaatcgcttgaacctgggaggcggaggttgcagtgagcagagactgcaccactgcactccaacctgggtgagagagtgagactctgtctcaagaaaaaaaaaaaaaaagaatcagagcaggggaagggagatgggggatcagtcggggggaaaggtgggcaaggtgcagcattaaatggagtgattgggtgggggcaggagcttgctgagaaggtgacatttaggcagagccttgaagagggtgagggaaggagacttgtggacatcttggggaggagcagtccatgcagcaggagcgggcagtgccaggacagccttgccatcttcatggcacaacaggaaggccagcgtggctggagctaagtgagcgagggaaagcgtagtagggaggaggcagtcagcaaggtggcaggggcgcatcagaagggcctcttatgctactcaagaggattctgccttttactgagtttgatggaaaccactgctttccagcaaaggaacaacacgctctgctgtgtgcaaaacagactggaggggcctgggtgggaccacggacccatgagaaagctgctcggtgatccaggcgaggggtgatggtggcttgggccgcagtgatgtcagtggaggtggtgagaggtggtgggttagtggatctctgttgagctggagagtttggaagtgtcagatctggaaaggacttgggtgtgggctgggggtgtccaagggtttaccatctatgccctggcttccagatgctcctggccagtggca

SEQ ID NO: 1107 - DNA, 1344 bp, Artificial sequence
  DNA replication origin
atcacatatcatcccacgtgcgttgtcctagaaggcttcctaggggcagccaacgatattgacgcttctttgcgaggccaaggtgggtggatcacctgaggccaggagtttgggaccagcctggccaacatggtgaaacctcgtctctgctaaaaatactaaaattagctgggcctgatggtgcacgcccatggtcccagctacttgggaggctgaggtaggagaattgcttgaatccaggaggcagaggttgcgctgagctaagatcaagccactgcactccagcctaggtgacagagcaatactccgtctaaacaaacaaataaatgaaggaaagaaggaagggagggagggagggaggaagggaaggaaggaaggaaggaaagaaggaaggaagggagggagggaggaagggaaggaaggaagggagggagggagggagagtgggagggaggaagggaaggaaggaaggaaggaaggaaggaaggagggaaggaaggaaggaggcaaagtagtgtggagtggaccatgttgcaggcagagggaagcgctcaggcagaagcctggaagccagagaaggtacagctcaaaggaaaagtcgaaaaaactcggtatgggtggcatgtagatgggcagggatggaccggtaggacctcaggcaggagggggctctgcgggtccagctggggacagagttcagggagaaaccattctgttcagatgcctcatggggcagttctctcctccaggatccttgggacctgggctcaggagcagagagctcagaggatgcaggctcaggggcggagagccggaggatgtaggctcaggggcagagagctcggaggatgcaggctcaggggcagagagctcagaggatgcagactcaggaaggggaggggctccttggtgttctccaaggactttgctcccttctctgtcccaggctcctgccccagtctctatatcacactgcaacacatggacatccttacctgtctgctcccacaagcctcacgagccagtgagccaagccaggaaccttctctcaagggtgcaggggtctgctctgggaactcccaggcacagagcaaggaccccacatgggaaagtgaggggtctcctgtgtggacgtgtccccattccattggctgttggactgaaaaccaggaatgaggcctttggtggatagataggacctgaggtttgaaaagggttggctacgtattaggaccacatagcaagttagcagtacggtcagaacccaggtctccttctacctgggctccaaactcaaatttagcacctcaggctgctgtccagtgaccctgccttggtttctga

SEQ ID NO: 1108 - DNA, 1130 bp, Artificial sequence
  DNA replication origin
gtgcctattgatggccaggcactgttccaggcaccgtggatacgctgtgaacaaagtggacaaaaatcctgccttcatagagcctttttgtttgtttgtttttgttgggagagagacagccagtaagcaataaatgcagtaagtggattctatcgtatgttagtggggtagaaaaaggaaaaaggacagggtaaaggctaccaggaacacagggagaaggttccaagtcaagagaacagccagtgcaatcggtacaaaggccctgaggcagggacatgcctggcgggttcaagaaagagcaaagaggccagtgtggctgaaatgcagtgagggagggggagagcagcccagggcggggtgcgatcatatagggcctttcgggcatcctaagagctttggcctctgctccaagtaacgtggggagcctggagtcattttgagcagagaaggaccgcgaaccaacttgcttgaacgtgatcactctggctgtgatgtgagaacagactgtaggggacccgggaggaggccagaagacctgtgaggtggccgctgcacacaggctggtgacagacggtggggctcaggctagcgtggtggcagtggaggaggggaggatgggtcaggttctggacattttgtgatgcaatacagccaataggagttgcagagggactggatgaggggtgttaagaaagacagagggatggaggaggacaccgcagtttggagcctgaggccctggagggatggggctgcccgcagctgggcagggaaggctgagggaagggcggggggtgggcatggtggagatcaggagtttggtcctggctttgccaagtgtcatttggtgtgatgatgccctgtaggacgtttgaacacatgattccggagcttaagagacaggaccaggctgaaaaggataaaacagtgagatgtcaacatctccagctcccctagggaatgagtgaggatagggaagagagaaggccgagggatgagccctggggtcctccaccagagacccaggggagtgatgagggagaggagatgcaaaagagaatgcatgctatttgcaattacacagggagcaatgcaaaactaggtttgtaacacacacacacacacacaca

SEQ ID NO: 1109 - DNA, 973 bp, Artificial sequence
  DNA replication origin
ctgttggcgccagagctcgcggcctcctccccaaaggagggcagataagacccagcctgggccactggagcagcaggaggagcacggggaggtttcagaaatgaatctgctgaaaattccgcctccgcaggcttgtattctagcaggcaggtgtgatgttggacataatcactactataagttactattaggatgaaccagatgaaagttccactcttgcaaatcaaaaatggcacatatcagcaatttcacacaggtcaacttggtatcaaaaaaatggaatggcggccaggtgcagtaactcatgcctgtaagcccagcactttgggaggctgaggtgggtggatcacctgaggtcaggagttcgagaccagcctgaccaacacggagaaaccccatctctactaaaaatacaaaattagccaggcgtggtggcacatgcctgtaattacagctactcaggaggctgaggcaggagaatcatttgaacccgggaggcagaggttgtgatgagccgagatcgagccattgcactccagcctgggcaacaagagtgaaaaaaaaaagaaaagaaaagatggaatggcaagaaaggaagaaaggatgttgtgtgggggtgaaaagaaagagggatgaattcctgctgggggtgatgggggaaatttatggacgaggagcatttgtgctgggattcaccggtatggattggagatgggggatgggaatggggagatgggtccaagagacagcaccgcaggggtgcggcatggaaggacagggtcccgaggcaaagcaaggcagtggtggggagggtcagggtgctaggctggatgaggcccagtctcagtccttggggcactcctggcatgatgggggagtggcacggaaacagagactggtaatcatgtgtttccaggcacagtggcaggctggccccagggaagggaaccaggcaggctgagagggcctggaa

SEQ ID NO: 1110 - DNA, 1472 bp, Artificial sequence
  DNA replication origin
accctgaagggtgaggctgcagtgagccatgatcacaccactgcattctggcatgggcaataggagtaagacctggtctcaaaaaaaaaaaaaaaaaaaaaaagattgcgttcttaaataggatggtcagggtgggcttcacggagaagctgaccttgcagcagatgcttgagggaggtgagcgagttggccatgtgagtgggtgtctgggtgaagagtgttgtaggcagtgaaacagccagtgcaaaggccctggggcaggagcatgccttgagtgttccagaacagcaagagggcctggaggggtagagcagagcaaccaggaggagaggcagtcagagaggagataggaggtggtagaaaaggcagtcagggagctgatgggaggcagtaggagaggcggtcagggaggtgatgggaggtgggaggagaggcggccagggaggtgatgggaggagaggcagtcagggaggtgatgggaggagaggcggccagggaggtgatgggaggagaggcagtcagggaggtgatgggaggtgggaagagaggcagtcagggaggtgatgggaggtggtaggagagactgtggtcagagaggtgatgggaggcagtaggagaggcaatcagggaggtgatgagaggtggtaggagaggcggtcagggaggagatgggaggtggtaagaggggtggtcagggaagagatgggaggtggtagcagaggtggtcaaggaggtgatgggaggagatggggggcagtagaagaggctgtggtcagaggtgatggggaagggacgggatgaccggatggggttgggcttgttggctactgttaaggctgcttgtttagaaactgagaatcatcacagggtcttaaacagaggaggattatgatctggtttgttagaaaagggaacaagccctgctatgtgttgttgagtaaagagaacagaggcaaggggcaagggagtgggcaggtgagggatgctgggagtgcaggcagggtgtggccagaggaggtgagaagccatgagattccggctatgtctggaaggcagagccagcagggcattctgacccccgctatgagagaggcaagccaaagctgacagcaaggctgtgacctctgtgggtggcaggcaccatcccctgggaggggaggactgtgggaggaggaacagattgatggagaatgagggggtgggaagaggggacccaaagttctgtttagggcaagtgggagacaattggtcaacatccaaatgggaagtcaagtgagcgtggatacacatgtgatgtttgggagggaagggatgcccagagatgcgaacatgagggttgtcggctcgggaacggaattccatgagacttggcaggacgactgaaggggcaagtgaggttggaggtgaaccaggatcccccggtgtcctgaaagccaagtgcagaaagtgtgcggagaacacaggtgtgaccg

SEQ ID NO: 1111 - DNA, 984 bp, Artificial sequence
  DNA replication origin
catctcaatttcaaaaattaagattgctgggcatggtggctcacgcctgtaatcccagcagtttggaaggctgagtcgagtggatcacttgagctcaggagttaaagaccagcctggccaatatggtgaaaccctctctactaaatatacaaaaattagctgggtgtgatggcacacgcctgtaatcccagttactcgtgaggctgaggcaggagaatcaattgaacctgggaggcagaggttgcagtgaaccgagattgtgccactgctctccagcctgggcaacagtgaaactgtctcaaaaaaaaaaaaaaaaaaaaaaaaagaaaagtaagaaattggccctgccccatcctctaatagggtgtgaaggggggtttgtgaggaagatgctgtggttttctttcccattgagtgctcgctgcgtgccaggcatttgtgagggtctaggctggagggagcctacagctttagccctgggtggcttctcatggagtgggagggctggggggctcaggaagagagctgtggtgggctgagcagggctgagcagagctggggcaggggagccctgggggaaggagatttctcagtggatgttgccctggagggcttccccaaggaggcgaactggtgcttgacttgagctttcaggaagaagtaggaggtgggaaggacattctaggggaagcgaatatatgggtgggtgtcaggggagtcatgaagtggctgtcacactggacgggtgagaagggagcaggaggtggggtgatactgtgtgagcagtgcccctcctcaaggggcctgatggagctgctgggaacatgaagacaggacactcgggtcacccctcagaaagagccttctggcccagggtgaaggccggagatggagggcaggagagcctgggaaaggaggggcaggcggcagggagtgaggaggaggggtaggttactgtcagggtgagcggggtttcctgggtca

SEQ ID NO: 1112 - DNA, 1499 bp, Artificial sequence
  DNA replication origin
cgctccctcccggcggccgggccggcgcaggccgcgggctgaatcattgcctccgcctccgcgcaacaaaagggctcggtacggggcgcgcggcccgcggcctacccgaccccgggcaccgcgcgggcggttggcggttggggcgcgcgcccgggcccgcggcgggggaggggcggccgaagcccgcacgagggggtcatggccccgcccccacagctccctctgcgcccctccccccccgccccgggaaaggggacctcggtaagttcgcccggcctggaagagggggcggccagcgggccccacacgtccgtggccgccgctgcgcccgggcgccgcggggagggggcggccggcgctctgcggggagcggccgtttgcgccggggctttgaggttcccgccgcctcggctccggcgcccggggggggcggggcctgacggccgccgcgcatgctccgcagagccctcccccgaggtcggggaagccccccggctgagcggtgctcgggctttgtttgccgccggtggtccgaagctgcaggatgctcgcgagggctctgttgtagcccccccaagtgaagaagcatctcctagggtcctgggcgggcttctgttttctcaaatcttaattaaggtcgtggctgactcaagttaacgttcccgaaaaagcctgcagagccggagatctgaacccggcatctgccgccacagcatctccccacccccacagaactttctttaagtttggtgtggtgtgggatatgtttttcagaagagggtctaagttttcaccagattctcagataacccccagagagcaagaacttccacctggggtgtagagcctgacacccggagaggtttttttccttccataagtgcccatctcctaagggtgtttaagggttaacagcagagtgctttcctccagagaagcgcaggcagtgtctaataacacattttctacgtccgttttatagatagggaaactggggcacagaattcgagggccttgtccaaagtcatggatggaactggatctccaaatgctgtaactcctgatgtccctgcaaattgcacatgggaatatgctttgtaaaagtgccttctgggtgaaagggttaacatgttaggcagtggaggagagcccgtcaaaagctgtcaaaaggtcttgcccggggtcttggatcaggctagactagacaatggccaaagtattgagaaactggaacacaggaactgttttcctttgacgtctagtctgctgtgccagactccagacatttgccctccgaacacagtatgttaggatgaaactaaaaagaaaggccaggtgagcttccgcgtctcctgtatcctattttgagtgagtttccaaaagcaagattgtgtttagacatccaagactgcagttatcagctgtacagctccagactgttggaacgctgaattttgccatcagagcaaaagatccttaccccatgctgagattgaccc

SEQ ID NO: 1113 - DNA, 1434 bp, Artificial sequence
  DNA replication origin
aggcccaaagcgcgctcgcgggcccgcgaaaggcgcaggagcagcggagccgaggcgggcggcgaggcgcgcggcgcgcggcgcaggctcgggtgggcagggcagggccaggccgggcggggcgggggcgccggcaacgggtccgccggccggcagggggcgcgcgcgccccgcgccccgcgcctcccgccccgccgcgcgctcgcttgccgcgcggccgcacatgtgtttctgttttgtgttgtagcatttgttctggaagctcgtatttacattttaagtgtatctggtgagtgggctggagccctcgtctgggccggaaaaaaaaaagccctccgatccgtcttttagttgcttctcttccttttttctctccggtttctcatcactccaaccaggtagggtctgaaaatcgacagtgatcagtttgtggggtctgggaaagtttttttttttttcctttttttaaagagaaaaggttaaaaaaaaacctgggggaggggggctgggtgattgaaggaataaaaagaggaaggaaggcggatccacgtggtttaatcggagacagacagagatcccattgttcaaaatcaattaaaaaaaaaaaaaaaagcagacaggggagagcgcagggacgccggggagctggcggcggccctggacactttgcagtcgaatcggagaccggccgggccgcacggccggcaagggggctgggagagagttgggcaccattaaagtttttatttttcgtgtctgtgcgagcaggtgtttggggctggggtccagctttcttcgggctcttcccccgtcgccgggggcagtccgccgtagggattcggctaactagagcccgaggtcggcacccctgagctggggccgaacgggggtccagggctgatgcggggtgggggagagcgttgcattaaatgccatgagtgggtttggggggagactgcggagacaaaagcagcaggtggggtagccggggagcaggggctcccttaccacccaggtgccaagggggaatcctggaagtgtcccgaagccttctttaatgaaaatctaggggactggaggctggttttactttccctttacttttggggggcgaggttgcaactgtgatgctttgtgggcaaacctaacttacggataggccgggggtctcaattctccctccaggggattgcctctggggctcccggctgccctgcgggattccccgaaggagccgcgccggggccagggaggggcgcgatttcctctcccaactcgccccctctccgcccaccctgcggccgccactttggggagggcagaggaggaagtggaggccgggtggctcgtctccgctcccctccccccgcgcagtttataacccgtccattgtgcgccgctgccccgtgtctccctccagccgcgaccatgccc

SEQ ID NO: 1114 - DNA, 1043 bp, Artificial sequence
  DNA replication origin
cctcggctgcccgggcccgcgcctttgtcgtccgcgccgctcacaaaggcgcctggcggccggcgccgcgcctccagctccgcaggccgccgcgggcgcccatggccgggacggcgcccccaccgccgcagccgccgccacccgagccaatggccgcgccgcccgcccgcccgcgaggtccgggcccgccgggactgcgcccgcgcccgccgcgctccgaggcctggtcccgccgccgccgccgtgcgcgacgcggcgccgcccccgcccgcccggtcccggggcgccgcggctgaggtcaccgcttaacccctggtggccggggcagcggccgccgcgccccctccctgctcccagcgcgccgcgagggagacgtggcctcccccgacccgctgcgagcccccagcggtcccggcagcccaccggccccccacagtacaggggggaaactgaggcccgcggggatggggcccggccccggccacacggcgacctcctcgctccttcacctaccccggggtccccacttcccgcctcccggttctccttccccggttctccgcggggagaccccgcaggcgcgcagggtgctggcttctcctcccccacttcaacattttgccctgaggttcccccaaaagggtgagaatcctggaccggccccaggggaaaccctagacttatgacctgcccctcaaccagtcttggcggccccgtattgccccccacccccgccatggcaacatggggaaccttgcagccatgcagccaaacctccaagaacaaccctggcgggttcaggcattgacggctttgagaccggcaacaccccagtgatgtagccccattttccctaggagaaaactgaggctcagaactgagagtaacttggcaaagctcactgagcagcaaagtgctgagactgagatcctagcattcccctgcctttgcagctccaaagctgccaaacactaggtactccctcctgaaattccaaagagggcctctggatatgatgcaattaattacagttatcaggtcat

SEQ ID NO: 1115 - DNA, 829 bp, Artificial sequence
  DNA replication origin
ggaggccacgtctccctcgcggcgcgctgggagcagggagggggcgcggcggccgctgccccggccaccaggggttaagcggtgacctcagccgcggcgccccgggaccgggcgggcgggggcggcgccgcgtcgcgcacggcggcggcggcgggaccaggcctcggagcgcggcgggcgcgggcgcagtcccggcgggcccggacctcgcgggcgggcgggcggcgcggccattggctcgggtggcggcggctgcggcggtgggggcgccgtcccggccatgggcgcccgcggcggcctgcggagctggaggcgcggcgccggccgccaggcgcctttgtgagcggcgcggacgacaaaggcgcgggcccgggcagccgaggtgggtgagtgagcgcgggggccctgcctccgcgggatcctcgcgtgtgccggagtctgcgagtgcgcgggaggcgctccaggcgccagggtcctccgggtgtcctgggcgtgtcgccgtgggcgggcgggggccgtgtccgccgctgtgtccctgtgtctgggtgtgagagccccgagcccgcgtctcccctctgtgtgggtctctccttgtgtcactggagttctggtgttactagggcgagtggcctttgtgcttcagcttgtgtgtgtgtgtggcctccagccggctggagtcaggacagtttgggaacccccacccccaccctgtgcctcactttcccctgtggtccacttcttcctgcgctgaccttgggggtccctgggatcgggtgaagtcagggagtgcccctgtcgcctctgtggtgagtcagcctctcccaccctg

SEQ ID NO: 1116 - DNA, 1586 bp, Artificial sequence
  DNA replication origin
ggcgggcgggggccgtgtccgccgctgtgtccctgtgtctgggtgtgagagccccgagcccgcgtctcccctctgtgtgggtctctccttgtgtcactggagttctggtgttactagggcgagtggcctttgtgcttcagcttgtgtgtgtgtgtggcctccagccggctggagtcaggacagtttgggaacccccacccccaccctgtgcctcactttcccctgtggtccacttcttcctgcgctgaccttgggggtccctgggatcgggtgaagtcagggagtgcccctgtcgcctctgtggtgagtcagcctctcccaccctggacccccgcccagaggcggaacgggacggcctcctgcaggaggagactgtgggaggagaggatgccgggtcagccggaggccgtggctgcggagccgccagtcccggatcctccctggaacagggatatatgtcagggagggccctagatgaagaccagcccccctggagtcgctgggatggcctccgagagggagagcaggcctgactgtagggggcatggggacaattcttcctccctctgccaaagcggggccctggggcgggggtctcgaatcttcctttggccctgaaagccaggaggccctgcgttgcatcagtgccaagtagagaggtggtggctggtgggctgcactttcccactggctttggagctcagtttctgccccagagtccttggcctcccttaaggatgctactgggaagccacgccccacctgccgggagccccatctgctcctcctcgggttctggggagagagggcaggttgtgcgggctcattagaatgcatagctcttcccagcatccgcccagcactgtgccccccacggtgttcaggccctggacacacagactagaaagcaggtcagcctccggaaatctccaagctccctgtgactgtgggctggggactgcccttccccttcatcgggccctcaggctgaagctcagaaccctcctgtaaggaaggcttcctggggtgcccgaatctgatgctcgctctgtccccaggcgcttgccttcctgaggccccctgtcccttccccttccaccaaagagcctctgtgggctgttctctctatccaggaagtgggtcccatccttcacctctttcatttctcactcgggagctacttcctctccagtgagccagggtagccacagtgctctgagggttcctgccccagttgtgggggcggggggcttttttcagtcttccagtggaacaggggccatgtctgtccttgatcacagctcagaacagtgcctggtgcatagtgggtgctctacacatagttgctgaataaatgaatgtccaataactaatggttcccaaattctgtttcaagttttaactctggagtagtctggggaggggcgaaagctggtgtactgctctggggcccaggtaccaggttagtataagaggaggttgggtgtggtggctcacccttgtaatcccagcactttgggaggccaagttgggtggatcacttgaggtcaggagttcgggatcagcttggccaacatggtgaaacc

SEQ ID NO: 1117 - DNA, 1184 bp, Artificial sequence
  DNA replication origin
gtcaggctcctgtaattggaaccaccctgcctttgtggggcaggaagactggctgagatgtcttgggcagcagcagctgccctacaaaggctcttcccagggacgctggctcacctgggagcatatttggaggcaaagaggatggcgagggagaagcagagactcccaattaggttagggcagcctgggagcacggggttgagcctgggagcacgggggtgggcctgggaacacagggatgagcctgggagcatggggggggcctggaaacacaggggggcctgggagcatatggggggcctgggagcattgggggaggctgggagcccggagaggggcctgggagcacagggggaggctgggagcacggaggtgagcctgggagcatagaggtgggcctgggagcatggcggcggggggggggcctgggagcacagggcgggcctgggagcacgggggtgggcctgggagcatgggggtaagcttggctctgtcattcacccttttatgaccttgggcaaggcacagtcctctctgggcctcagtttcctcatctgtgaaatgaaggcctgggcttagtgatttgttgattgccttcagggctgacgttctgtgaactgagtaatggaggaataggtacatttcgtaccttttggccacaccctggtttgctgggtttcttggggtccaccaaggcttgccccatcaggaacttttctctctcagaaggcgcagtgtgtgcgaaggtgctggagactggcaggtggcctaagcaccctgggaactgagagctagtaattctcatatgttaatgtgagccagggtcacccagacaagcctgctaagaaggcagattcttgggcctcatcccaagagactctagtattataggttggtatcaggagcttagcatctgcatttaaaagaagcctcccgttcactcaggtgactctgaagtcagtagttcaaggaccactttttgaaaaaggccgttagactctttgagccttaggaaaggctgggcacagcggcacttgcctatagtcccagctaatcaggaggctaacgcaggaggatcacttgagtccaggagtaagaggtgcaatatgctgtgattgtgcttgtgaatagctactgccctccagttcggacaacatagcaagactccatctcttaaaaaaaaa

SEQ ID NO: 1118 - DNA, 1733 bp, Artificial sequence
  DNA replication origin
tgcctggtgacggtggcagccgcggaggctcgcggatcctgtcccctttgccggccacatgcttctgactcatcagaggaagaatgtggtctttttgggagagagtttttaaaaatagtccaagtcctcctctggccctgtcccactcctccccttctgaccatttcctggcatcagccccagacctctttccactctggttttggggaactgcccctttgcaacttggctgtgaatctgtttgtgaaccttactggggaggagctgtcctgggtgcaggctggtttcagaagggaggggcccagctgtggccgcctcctccccaggggcccgacttgggacgagggatttctgcattcctttggcaactgtgccttgggtcgcctgtgtgtcaggcctgtgccatgggtgcagataagagcggtgaacagtggtcacagtcctgccttcatggagtccacattctcataggaggaaactgataaataactaaaatttgtagttgccagaggtgttaaatcctgtgaggatggggacactgggtcagggcatgtgtgtgggctgtcaggagaaggcctctgatacagcgaccttggagcagagccctgaaggtgagggcagcagtgtgtgggtatctgggggaacagcatttcaggcagtgggaacagcaagtgcaaaggccctgaggcagaaacatgcttggggcattcagggagctggaaggtggtggtgactagagtgagctgtgtggagagaggtaggacatgaagtcgggggggttgtgggggctctgacacgtggggcctcagagatcaagatgagggcttgggtcttccttaaatgaggtgagaaaacattccaggctctgagcggaggatgaacttggccgctgtgctgagaacaacatgtcagggcaggggtagaggtgagagcagagggactggtcaggaggcgttttgaatagcccaggtgagagatgatggtggtttgggccatggtggtactgtggagggggtgagatgcgctcggattctgggcgtatgttgaaggtagagccagcaggtttgctgaagggtgggccctgggtgtgagacagaggtgtcaaggatgactccaaggttttggccttagcagctggtgggatggtgctagcaagcgggatgggaagactgggaggagcagggttctttgttctggcagcatggtgatcaggaggtgggtatgggcacgttaaggctgagatgcccgatcaatcactgagtgaagacacagagcaggcagaggggcagagcctggagttcaagggcaggacaggctggaggcatcactatggccatggcttaggacccacgaagtgagccaggtgacccaggtggcccagggaggagccgcggtgtagcctgaacctgggaactgccaacctggagggaggaaggaggagcggaggaaggggagctggagcgagacgtgaaagaagggagcagctggcaggtcaggcagaatggggaccgagatgctcctctctccccatcctggtccatcagaaccggtgtagtggaggccgcaggtgacctcgtgagctggctggcaaagcggtgggcacacacttggttgggaataggtagctcagcacagaataggagacagggacaggagacggagcatgggcactcctcggggaagtcttgtaaaggggagcagagaaatggggtagtgggtggagagggtatggg

SEQ ID NO: 1119 - DNA, 920 bp, Artificial sequence
  DNA replication origin
gttttgctttggagacagttgctgcccagagcttgtgtctctgaagtcctccctgcagcttctcctaaagaatccacaccagccagaagagcagcctcccagaggttccctctcctgtctgccttggggagctggcaaccctggggggcaggagggccctgataagctggtgttaaatggcagcttctgggctcttagagtctgttatctgagagagagaatctggggactggaccagctggaacttcctgcaggcttggggacagcgggctcctggagcagctgggggtggagggcaggcccagagcaggcagggtggctgccacgggttctggctggagttgggaagtgggccacggggtgggtgggggtggtgcaggccaggtaggggagctgatgactgagccagggctgggggagggaggcggggctcagcaggcacccagactggccaggccctgtctgcggcgcccctggggaggctgggaaaggggcggggaaggcctgagtgcctggggccagcctctggcctgacaggctctctgtctgctcttcttttgcagacccagacccagcagctgctccacccggcacagggtaagtgaaccttgctcctttgctttggcggttggaaacagggagacaccgggcagtgggtggggatggggtggagctgaggcccagaggacccgactggtctttggctaaggaggaaagcatttcactgaggccctgtgccctgggggaagaggtcagttccagaaactcatggtactttttcctttattttgcccacaaacctctgaaaccgcaggaggcaggcctggctccaaaccctacctctgtggccttggaggagtcacagaaactctccaagtgtcagtctgtttgcggctgaaggggaaacaatgagagcaccc

SEQ ID NO: 1120 - DNA, 1479 bp, Artificial sequence
  DNA replication origin
tgctccacccggcacagggtaagtgaaccttgctcctttgctttggcggttggaaacagggagacaccgggcagtgggtggggatggggtggagctgaggcccagaggacccgactggtctttggctaaggaggaaagcatttcactgaggccctgtgccctgggggaagaggtcagttccagaaactcatggtactttttcctttattttgcccacaaacctctgaaaccgcaggaggcaggcctggctccaaaccctacctctgtggccttggaggagtcacagaaactctccaagtgtcagtctgtttgcggctgaaggggaaacaatgagagcaccccctctgttgggtttgtcttggagaagcaaacagctggagggtccccagtgtgtgtgtgtgtgtgtgtgtgtgtgtgtgtgtgtgtgtgtgtgtgtgtagtgggggaggttgggggggtttgagggtggggggggtgcagcccattgtaattatttttgcagttgccatttgtcttgttaatatcattcccattcctatgacagttgctattagggaccctgccctctgtgcctgggagcctgtcagaggcagtgtagcctagtggttaggagcctggatgttggggtgagggcctgcgtcttggctgtggcccccacactggccacaggtcctcatgtcagtcaagtccccctttggttttctcatctgtaaaatgggctatcgggtaagatgcccagcctcgtggtaggtgcctaatcaaggcatttgctttttatcacagttcttctttgtcttctgcaagtcaggtctgggttggaagggtaattgggtaactggaggtggtgggagctgaggcctctcaggaccaggtgtttagagcctccttgcctaagcagtggaggggtctaggctccaaatgaatggcccaagcatctggaaccctgagtttaaatcctcactaccctggtgaggggaggcatgtctgagccctgctttgtcttcctggggtgccccaaactgagcaagaggggctaattctcagggtggtgtcacccaacgggaggtttcagagatgcaggttgcaggcccaggcccccagaggagaagtccttcatgtgctcatttgctgtccagagtgggtggacttggggagggtttctcctgagcttgctactatgtaattaaggtgagaattagaggccagcctctccttcctgattagggacctgaaatgaatcagcagccattcgtcctgcacctgggctgggaagggccgtgatggctgcagtcttccaagggtttatatctccagggtgggccaggggtgaagttgtggagaaactcagtctggtgggagatgcagatgcgtcagagtgggacagagacggacgcccagggagctgggacactgactggaggggagcaaggatggggtcgtcagggaagacttctgggccaggtcctggctcagcgagtg

SEQ ID NO: 1121 - DNA, 891 bp, Artificial sequence
  DNA replication origin
agagttcccgtcgcagtaagtctcccctccggcccaccgcccaccccaggtagcaagctccaggatattctagtctttctaacccaagagagctgatgtgggctcctgtgagcccagggttcatcctcaccgggggcttctgtggccctggaggaccaaccaccgcccccaagagccaaggtccaggatcagttgacacacccagtttttcatctgctcctcaaatacttacgaagttcccacaacaggccagggcggcccagtggtgggagtgccctggggaccagaatgaggtccctctgttaacagaaccagacaccttgccatgggaaggtgcctgcccagatgagccctccagaaagagagggaggcagcaggggtgggggaaagagggtcccagacagaggggccaacttgtacaagggcctgagggcaggaggacccctgactcccgggaagcagcaagggcctcatctgtggggtgtgggggagcgttatggggtgaggtgtggctgcgggccctgcagctcctcagggccccagaggcagtgcttaaggttctcaaggcaataggaagccacagaaggaaggccagtgatgtggctgcctttgcctttcagtcctgttgcactggggtgggggcagtgtaggagaccaggtggggaagggtggagcctgctgggaggctatcgtggtcttgtaggacaggaagtctgagggtgggaactaggggtctagagagaggtgggcaggcctgggagctggtgtggggaggaagagggggctctgacagggctctaggggcccaggacctagggaagcatcacaggccagtgggtctcgtgacttcttcctggaaggcctgtgggtcaaggaccggctcccatcagg

SEQ ID NO: 1122 - DNA, 1299 bp, Artificial sequence
  DNA replication origin
gatagacagatggcaggtggatggatagatggaatgaggttgggggataaatggataagtgggtaaatccacagaaagatgaatggaagggtagaagaagagtttggcagatggatgggcaacagacaggcaggtggatgggtagacgaacaggctcatagagggatggatggatgaataaataaatggatgaatgaatagatgcacagataaatagatggatgagcaaatggataaatttggttaggtgactatatagctgggcaaatggacagatggatggatgaagagacagtcagatgaaggaataagaggatggatggacggtaggagaatggattcaggcagtgctgtgctggcaaatatttaacaaccagttctgcaggaaaaagggccctgctttgaagcatttccatggtgtgaatacttccaccaattccaagctaccaaagtgacatcactgaatgggaatttgtaaagagatgctcataactggctcctgagttcttgtgagctgacactagctgcctctggcacactgctggagaatgaatggagggaggatgggtgaagggtaaaagggagggagggggatgggcaactggatggaagaatggatgctcagcttacagactatctggaggatggatggatggatggatggatggatggacaaaccgatgggagaacaggtagatggacagaagaacagatagatattcaaatgcacgaaccatatgagcaacagtgatatttggtaaagtacacaaaagaccaagacaggtgctacttctagagaagtagacagaaggatcaagagtgtgagttctggaggcatgtaggctcctgctcaaatcatggatctctgcttactagctagagaagtctctttacctgagctgcagcttcctcactggtaaagtggccataatagtagctactgcatagggttgttgagaaaattaaatgtacatgcaaagcccagagcttattaagtattcaaaaaatggaagccattattatcttttaaattgcaagtgctcaatatttgttggatgggtgaatggatgagtggatggatggatggatggatggatggatggatggatggatggatatacagacagatgaggcacctgtgatattgcattctacatcatttaagtctctctgagcttcacacaggttttctgatcaacaaaatgagaatcttaaggacaataatactgaccacttagggtactgggaaaattaaatgacactgctttgtaaagtgtaccattctaggcaaatgttcaa

SEQ ID NO: 1123 - DNA, 1474 bp, Artificial sequence
  DNA replication origin
actctatgatcacatgacaaaattgcctaatgatgcctttctcagaacggcattattcctgtcgttaagcaacacgtggctgtatcatataagttcttgactgtggcttgagtcttttgggcaatgtccagttgggagctgggggtctgatcaagcctggaaaccccaactctcccactccccctccccagccctacctgttctgggttggtcccagctttgtgttggtcgcatcaattctgacctttcttgcccaacaccgcccagcagtcttggatgtggatttacatgtggaaacagaaccacccttccctgcagttctcacagcctatgtgggaagcagggcaaccgccttggctgagccatcccaccctgtggcctccccacctccccgcactgtcaccaaggggaacttagagtctcagcctcaagatgttggtgatgccccctctggctaagcacgggcaaatgggtgctgagcagatactgtgcacgtatgggtgcaggtgtgggtgtaggtgtgggtgcaggtgtgggtacaggtgtgtgtgcaggtgtgtgtgtataggtgtgtgggtacaggtttgtgtgcatgtgtgggtgcaggtatgggtgcaggtgtgcgtgcagatgtgtgtgcaggtgtggatgcagggatgtgtgcaggtgtgggtacaggtttgtgtgcaagtgtggggataggtttgtgtgcaggtgttggtgcaggcatgggtgcaggtgtgggtgcacatgtggtacaggtgtgttcaagtgtaggtgcaggcctgtgtgcaggtgtgggtgcaggtgtgttcaggtgtaggtacaggcatgagtgcaggtatgggtgcaggtgtgttcaggtgtaggtacaggcatgggtgcaggtgtgggtacaggtgtgtgttcaggtgtgggtgcaggtgtgggtacaggtgtgggtgcaggtgtaggtgcaggcatgggtaaaggtttgtgtgcaagtgtgggtacaggtttgtgtgcagtcatgggtacaggtgtgtgtacaggtgtgtgtgcaagtgtgggtgcaggtgtgtgcaggtgtgggtgcaggtgtggatgcaggtatgtgtgcaggtatggatgcaggtgtaggtgcaggcatgggtgcaggtgtaggtgcaggcatgggtgcgggtgtaggtgcaggtgtacgtgcaggcatgggtgcaggcgtgggtgcaggtgtaggtgcaggtgtaggtgcaggcgtgggtgcaggtgtgggtacaggtgtaggtgcaggcataggtgcaggtgtgggtacaggtgtatgttcatgtgtgggtgcaggcgtgggtgcaggtgtgggtgcaggtgtagttgcaggtgtgggtgaggtgtagatgcaggtgtgggtacaggtgtatgttcacgtgtgggtgcaggcgtgggtgcaggtgtgggtgcaggtgtgggtgaggtgtagatgcaggtgtgggtacaggtg

SEQ ID NO: 1124 - DNA, 690 bp, Artificial sequence
  DNA replication origin
ggctgctaaattaagaataatccatggagagggggacagcagtgtgggagccaggagtccccttgttgagagctgttgcagtcagccaggtttgcaaggtggggggcagcaatagagagcggtcagcttccgggtggattctgatgtcccagagcccactgggtttgcagatagatgggctgggaaggaaagagaggagtcaagcatgcctctgaggtctggcctggcgactggaaggtcagagctgccagcttccctggcagggtggctgtgaggggcagcttttccacaggaagagcgggaatggggtttggatcggctacatttaagttgcttttgagcatccgagcagagacgtagggaggacagttgactgtgtgaatttggagtcagcagagaggtccatgccaggggtgcctgagcctggatgcagcctccaagggagcagagtagacggaggaggtgtgaggacagagtccagggaaggccagtgtcgggaggtccaggagctgatcaggaagcacgggggaggctgagatgcccggatgaaggtggaagaccggaagggcagggtgagggttggaaggggagggggtgatctgtgctgaatgctgctgaggttaaggaggagcctgaggcctaccttggatttagccacacggaggccttctgtgcccttacgagaggtat

SEQ ID NO: 1125 - DNA, 1038 bp, Artificial sequence
  DNA replication origin
ggtgagcatatatgtgatgtggggttttagagaatcagtcagggctccgtgtgtgtaagcaatagaaattgcctctggccaactgcagcagaaaaggaatcatcagaaggaaactcttgtatctgaagttgggccaaaagactggctgggaaaaggtgggaacccagctaactctggttgggaatagggtggcgggcaggtgggggtgggtgggtggtgtttctagcaagatctgctcaaggccctctggggaccccaccaggatgggtggctccagccagcttgagaattttgcaagactggaaatccatgtacccagagagaggggacctaactggtggggatttgaccttgtggcgaggcctggcctggcagtgtgcagggctcatgttcaacagtcctgccaagactgcagtttggggagaggatcactcctggaaaggaattttggggtgctggtgtcagaagaagagaggctgggcacttggctgctacaagtacctcctgtaccctagaagagccacacatgtgagctgtgttttggtcttttaagatgctaaggatggaggatatcatcaaatggaatgttaaagtacaggaccgagttcctctgagccagtgaacgggctgggctcagagtgcagaggggttcccaggtctggggaagttttggacacagtgatccggctgggcctctagggctgggttgcctggaataggaggggcgtttggggaatggagctctgagtcaggctcactgcaggggcgaaggcctggaggctgggtttggtggaggtgaggggcagagttgctgactcactgctagggagtggggagtgaggctggagctgcaggctgaagatgtctttggacaccaggctgaggagtgtagtcttgggagggtaattgtgtcaggaagcagagcgggaggagtggtccactgcttcatgacatccctcctatgtgcctgacactatactaatagtgctttgttgtagcctgtttaacctactgatgctgctatttcccttttataca

SEQ ID NO: 1126 - DNA, 947 bp, Artificial sequence
  DNA replication origin
ggtgggcatacaggtgggtagactgaggccagatggtgcaggggttggcctgagttcaccttagcaaattagatgcccacctgtggacattgctgtcatggcctagaggtagcgccaccttctgtctcacacttgaggactgcagagtcggaactaaagcctggggtcctctgaggccaaaatctgggctcgtttagctccagcaggggcttggggggtactttctgtgaccgaggactcggcagcctgacgaataatcgcttcctgcctttccctcattttgctaatgaggaaagctcttccaccagctgaacagctaggcgcccttgcccacgctggggggtgggggcggggtgtaggctgctgagtcccagggccagacccagcaccaggcacatagtaggtgctccgtaaatatcagccccacgtggagcttacagtatgtcagaatggaatggggacaggatactgggggactgggggtagggggtgtttagggagccttgaaaattcaactcctcaggggccagggaaggcccactgagaaggtgccatctgagtagagaaatccaaggttatgaaggagcagggtgtgccactgtcagggggaagggtgttcaggcagcaggaagagcaggtgcaaaggtcctggggtaggcatgtgcctggagtgtttgaagagcagaagggagccagggaggctggagtgcagcgcgcaagggggccttgtggacaaggccacagccaactctgggaccacagcagcttgtcgggccaggctctgagctgcggtagaggtgttgacagaggcacctgacccctggagccgctggaagagggctgagggccgcctcttttgaaggtttgactctagcatctttgtctacgtctcccaggagatgatgctcctctctcagctgggtggatgtacctgccatgccaggctc

SEQ ID NO: 1127 - DNA, 1065 bp, Artificial sequence
  DNA replication origin
gagtggataggtgaataggcaggtaggtggatggatggatagatgaatggatggatgaatggaaggttggataggtggataggtggatgagtgaacatgaagtctggatagatgaatgaatggaagagaaaaggtagaaggatgaaaagggagatgggtgtatgggtagacgggtagacaatgaatggtggcagggaggggagggtacagggaagggtgaagggagaattggtaggtagatgaataggtggaaaagtggaaagtgaagggtggatggggtgagatgaatgaaagggtggaaaggtgatggatagataaggagaaaaatgaaaatgtgagcagcggcacatggatgcatggatgggtgttaacatgatcatctggaaggatgaatgagtagacatatggatagtagtagactgaaaatgtgggaaggcagacaatgacaggtggatataggtgggagggtgggtgggtagatggatgagtgggtgggtgggttaggatggaagggtgtctgggtagatagatggtaacatgattggatggatgaacacatgtgtgggcctgagagaaggaagagacagaggcagagaagaaatgaagggaagaaaagagggtagggcttatcccagccaccatcaccactgaggtacatcctaaggctgctagggaaagagagtcaccctcacaccacatccaagaaccaaccaaagccaggcttcctggggaacccaaggaactaagaggtaagctttctccaggggctcaatgcctcctctgagtccctggtcaaggactaggctctgtcccaggccttcctccacctgctcctccctcttcccacctccctgctcctccctctgccactccttccacacagcagcgttctcttggcaagagtcttgttggagttgagcagtgggaccagccagtttgaccttctctgttcttggacataattactgttatcccagataatcactttgaaataactctatgtcagtacgcacctttgtgctgttttgcccatttatctgtcagcagccctgtcctggggagtgg

SEQ ID NO: 1128 - DNA, 1160 bp, Artificial sequence
  DNA replication origin
cccttcaattatttcacaaagtaggtatcattagccccttttccataaaaggaaattgagacttggagaggctgagcaaccttcccaaggtcatgcagccaatgaatagctgagccagaatgataacactcatttctggctgcagagtcacctattttctagtgttctctgcttgctcgaaatagagtttttaaataaaaccttgaagagtgagtatgatttcaacaatcagagttcaggtggagaacatgagagacatggtagagagcatcaacaaactaacggaaataggaaatgatggggcttatgaagagcactgagtaggcttaaggttcacacaggaggtgaaagaattagtgtagatggagggatatatggacaaaccaggagtggtaaaaaggacgggtgggtgggtggatgaatggatgggggaatagatggatgggtaaataggtgggtgggtagataggtggatagctgaatgagtggatagatggataggtagatgggtgaagaggtggatgggtgggtaggtggatgggtggataggtggatgagtggatagatggataggtgggtggatggatggatgggtggagaggtggatgggtggagagctggagaggtggatgggtgaatgggtagagaagtggatgggtggcttgatgaagaggtggatgggtgggtgaatggacaggtgaattggtgggtgggtcggtgggtgagtggataggtgaataggcaggtaggtggatggatggatagatgaatggatggatgaatggaaggttggataggtggataggtggatgagtgaacatgaagtctggatagatgaatgaatggaagagaaaaggtagaaggatgaaaagggagatgggtgtatgggtagacgggtagacaatgaatggtggcagggaggggagggtacagggaagggtgaagggagaattggtaggtagatgaataggtggaaaagtggaaagtgaagggtggatggggtgagatgaatgaaagggtggaaaggtgatggatagataaggagaaaaatgaaaatgtgagcagcggcacatggatgcatggatgggtgttaacatgatcatctggaaggatgaatgagtagacatatggatagtagtagactgaaaatgtgggaaggc

SEQ ID NO: 1129 - DNA, 1844 bp, Artificial sequence
  DNA replication origin
agataggaagcactaagaactgggcagatcacggaggacttcctggaggagccaccgcttccacaggcaatgtggggctggcagccatgtcttgccgtgcagcctttccccttctcagggacagcatgttgcccatcagcagcaggcacgaagtgggggcaccagaaggtctagagcaccactctttgcacctaggagcccacaggtctgggcagatctgaccctgtgggtggggacaccgtgtggagcaggttgagagagggagaggctggcggatggctccttggggactgtgggccggggcctgagtttggcttttagtgtaagtggtagaaggtttgtgcggagttctaggcagaaacatgacttgatttgatttacgctttaaaaagatcactctggtgattggttggagaatgtggggtaaggagccaggagtgcagctgacaggccagttagaaggtttgccgcattatccaggcaggaggggagaggggttggattcgggcatgggagctggagaccaatatacgtattggagatttactttagacactgaattcccaagccacgccgccagtttggaggtggaggctgcaggaagaaggatcaggtgtggctcccagggaggaatgggggctgggggagaggaggagagggagaggaagataagatcctgtttggggcttgcggagcctgagacgttcgtgaggcatggatggggtttgctgatgaggaagcttggggtttaggggtggggcagactcactttctcacgccgggtgtttattctcctccctgacaatgctttgactctcatggagagacctaaaggtggaattcaggcagcaggcgtgggaggttgagggactagttcgggtgggcactttcttcaggggccctcagatcctctcagtgagcgttcctctatgctgtcatgtgggatggtggatcctgtctctgaaatgaaggattttatgtagtcgggatgggaagagaaagagaagagggaacccagaaaatgagacaaacaaatgagaccgaaatggagggggatggaattaggaagatggagctggaaagaatgagatggaaagacagagggggtggagatggggtcgagaagcaggtgccggtggggcagggagaccgagacggggatgcggggggcattggtcagggtctctggggagacactgggcacgtggtcaggtgtaactgaagagagtttaatgaaggggtcttttatagagatgtgggcagggtgaggggaagccagcgagagaaagtgcccagggagccgtgaccgtgaggagccatggccccttccccagcaagtccaaagcccaaggtgagggagctgcttctagaacccagcaggtgatggcaggaccactggataggagctgcagctgcaggattggccagtgcccgaggggccccaagggaagtagaggggagtcaggtctcgggttactttctcctctggcctccaacccaccagtacttcctggtcaactgaagccagggtcagggagccctggagatgcacctgagaggcagcctcttggggcacagagccaggcacagaagcacagggcaggggtctggaagggcaaacagagaaagcccagcacagagaagaggagaaagaaagagcagcagactcatagaaagatgggttggggcggacgtggtggctcacacctgtaatcccagcactttgggaggccaaggtgggtggatcaccgaggtcaggagttcgacaccagcctggccaacatggtgaagccccgtctctactaaaaatacaaaaattagctgggcatggtggcgcgtgcctg

SEQ ID NO: 1130 - DNA, 1625 bp, Artificial sequence
  DNA replication origin
gcccgggagctggcggcggtggcggggcggcgggggtggaggcggtggcggcgggtcccctcgccatgggctcagacgcgctcctgcctccggccactggccgaggcggtggcgggcagcgcggagagccgcgggggcgcccccatgccgccgcggccaggcagcccgggcgcccggctcgactcggctccggctctgcgaggcgcagcgaccctcgcgctctgggcgtcctcggggctcgccgcggttctcggctccctagctgcgcgcggtgcccaccgcggcccagagtccgatcggctgcagcgccggagtttggagccgaatcgcgctctctgcctcgcgctcgcctctcccggcggcgcgagcacccccctcctctcgccctccctccgtccctccccctctccccgcccccccgccctccttgccctcccctcgccgcgctctccgcgtattatacagacttttctttaatcctttctgggctgttcggctctcgtccgctaagccgatttattgcagggagaaggagagctcaccccctcctaacctcccctctcccctcactcaggtcccccctcactcaaaactggcttgctgcctccagcttcttaacccttacccaggtgacccaacaccccgccctggaagctatgctccatcggatccgcctttacctagcccctcctatccccgggattaccatcgccctccccgctactcagcctgatgaaaggaggcagcctccctcccgagagggaaagatgccatcctgggagcagggcaggcagggtgtggctctggagttctgaccttgccaacgatgaatgccctcattgggcaagattaaggggtttccatgttctgaaacttccccaattacggctgctccttcccccagggacccacggaaatggggtgtgttctgtctttttcccatgtgctaggatccagccaggaagggtgaggaactgattgtttcctcctggcagagaccaagtttccacctttttgccagacctgacagcttttcttcccaggtccgagaagaacaggtttgggacttgtatgttaccattactctcccaccaacacacacgcgagcacacacacacacacacacacacacacacacacaccattgagcctcagccctggcggtggactttgaggcctcctgcgaggatgaaggggaggggtactctagcccttggagtggactggggatgtggttagatgaggaagttcaggagatagaatttcaccattggtagggacccagaagattggcaaagcccagaaaaaccagcacgaccaggggcaaaacctgctcagaactcaggtgggtccctttacccaggccttctatggagaatctccagcttccctagctctggcaggttgctgagtcaggctgttgcatcgtttacctacatgggcaatgggtctatagccagttccatctccagcagccctctgagaggagtgtagggagtggggtgggcaatgggtggttgctgggctgcctctgggtgagctttgtgcagagatgtccatgaaagtgaactgctccctcctcctgccctctggaacctcaccccatcgcctcccaaggcagctct

SEQ ID NO: 1131 - DNA, 1260 bp, Artificial sequence
  DNA replication origin
ccaaactccggcgctgcagccgatcggactctgggccgcggtgggcaccgcgcgcagctagggagccgagaaccgcggcgagccccgaggacgcccagagcgcgagggtcgctgcgcctcgcagagccggagccgagtcgagccgggcgcccgggctgcctggccgcggcggcatgggggcgcccccgcggctctccgcgctgcccgccaccgcctcggccagtggccggaggcaggagcgcgtctgagcccatggcgaggggacccgccgccaccgcctccacccccgccgccccgccaccgccgccagctcccgggcaccatgcgaaccgccccgagcctccgccgctgcgtctgcctgctgctcgccgcgatcctggacctggcgcgcggtgagtgcgcgggcgcctggcgggagccgagcggtgaacgtgcgcggggacggggtgccgggggagggcgctggccggggtcgctccgagaggctcgggctacgagcaccggtcctgcccggggtctgtggagctggttggctcgatgagggagggaggacgcctcttggagagcgctcatggatttgtgccagggtgtgtgtgtgtgtgtaaattgtgtgtctttgttgtgtgtctgggtgagggtgtccgggaaggagctgtgtgggcagaaggtgcgggagtgtatttagagatgcaagtgtgtgtgtgcgtgtgtgtgtgatggtgtggggtctgcgtgtgagtgagcgagggtctggatgggtgttagagtgtctgtgtcagttacatggagaaggtgtgtgtgtgagagtgtgagcgaatgttggggggagggtgtgaacatgtgccaccttccctgtgagggtgtgaagtgtgtgagcttgtgtcactgtgggtgtgaggtgttagggggtgggtatgtgaggtttggcgtttcacgtgtgtcccgagtgtgcaggtctctaggggtgtacgacagcggattactatttctgtgtgcacaggagatgggactgtgacactggacaagagtctgcttatgtgggatgggtgggggtgcaggtgcctgggagtcgtgggcttcatggggctgggagtgtgtgtatgcgtgccatggagcgtgtggttatcgtgtgcagggaggtatggacgcttccggggctggggagttgtgagcagctcagtgtgtgtgtgtgtgtgtgtgtgtgtgtgtcccgccgtgtggacttgctcccgggttaggctaagacagctagaaggaggt

SEQ ID NO: 1132 - DNA, 1881 bp, Artificial sequence
  DNA replication origin
tgaatggtgctgatgagtgtgatgagtgtgtttactcacccacccccaccacacacaccccagagagcattgcactgccacaggcatttcagaaaacacagcctcaaagtccacaaaaatgaggcactgatggtgggagcactggacatcattgtctacaggtgataacagaagagtgggagggagattggtgagccaggggtcttcgttgatgattctttgccacctggatctcctgtgaatacagtgggacacaggcaggtggcctcaccttacactgctcattctgttacctgactttgtatttgggattattctggcccaggaagtcatgtagagttgatatctgtgttcacagctgatctcccacctttgattgaacacttcctggggcatgggatctatcccaggcataggacacataaaaagctgctggcttttgaccttggccagagactgtaacagtgatgggaatggcgatgagaatggagatggtattggggttggggatgggatggaaatagaaatgagaattgagttggagatgaggatagagatgtgatagagattaagtgtggggacaggaatagaagtggtgataggaatggaggtgggatagagatgggggaggagatggagttgaagttggtcgtgagatggagacagaaatgaggagagaataggggatggagattgaggatggggagggatggaaatggagctgaatgtgaggatagagacagagatgagaatggagatggagtggagatggggatagaaataggaatggagatgaggatggggaaggggatgtggatgaggatgggatggagatagagatagaggtggagatgggcatggggtaaagataagaatagagaaggagattgagatcgagatggggaggagattgagatggggatggggataaagatgggggaagagatggagatggagatgggagtggggttggggatgggggtagatatgggtttggagatgaagatggggttggggatggtgataaaaacagggaaggagatggagatgaagatggagtggggatgagggtggaaatggggataaagataaggaaggagatgaagatggagatggggatggggatatggatgaattggggaaagggatggggatgaggatgagggtagggatgaggatggggatgggaacggagatgagggatgaggtgggcatggggatgggaatggagatgggggatgaggtggggatggggatgggaatgaagtggaggagcaggtggagagggggagtggggtgggaataggaatataaaaagggaagcctaagtgaaggaaggcttttattgggctatgaaactggcttttattgggctatgcaggcaggaatgccgtacttggtcaagagaagggaaaaagaaaaatagaaaagaagagggcgatgctaatagtgactagaagagtgaagcatctgtcaggagccagggactcctggatggagacggctccctgactgccggcactcagagccctccaccaggagacaggaggtgagatgcagagtgacattttcctaggactcactgatgggagtatattgatggggagggtgtgggaagcctgagctgtccgtgctgatgttaacagctctgctatgtcatcgtccatacaactgaaatctgttattgtcttatgagcttgattaactgtacatattgctaatataacgagggatggaaacacagctccagtcagggtctgtgtgggtggtgcgtgtgacttaggtgcagatctccagagagagagagagagtgtgtgtgtgtgtgtgtgaatgtttaggggggtgaagggtgtaagcgccatgctgtgcaaagaatcctag

SEQ ID NO: 1133 - DNA, 978 bp, Artificial sequence
  DNA replication origin
gcaaggaagtttagggggctggacaatatttgtttttcagcttttttagtagcacgaggacccttttggtctaaatgatatacagggaagcctcatatatatgacatttaaaagtgaagagaggccaagtcactctcattgcacctgaagcacctctgtagaacccgtaggcttccatgaaacccatttggagaaagtttgggctacgtaccctttcaattttgacattttataatactttgggtcttgatcctgtgagtttcgcacagtactaggatttagcaaggtgtggagctagagcaatgggtacataggattacagttcaagacgggagccaaatggttcccctcattccagacccaattgtctcccaggcatggtccaattgtgcggccttgggaatctaggccagccctgccttgcgacctggggcagggtggtaaatgggtctgtagaggtccaggacagggcagtaagcaggtgcacagagacacaggtggggcagctggcagggtcacagggatgcagagatacaggtgaggcagtgggcagggatgcagagacacaggtgggacagcgggcaagggcacagagacataggtgaggcagtgggcaggggagtagagacacaggtggggcagtgggcaggggcacagaggcacaggtggggcagtggacagaggtgcagaggcacagatggagcaatgggcaggggcacagaagcacaggtggggcagtgggcagaggtgccgagacacaggtggggtgatgggcaggggagtagagacacaggtgaggcggtgggtagaggtgcagaggcacaggtgggattgtgggcagaggagtagagacacaggtggggcactgggcaggggcacagagacacaggtggggtggtgggcaggggaacagagacaagcctcagtccctaggaagtggacccaaaaaggtagcttcaaagccagttgctgaaagca

SEQ ID NO: 1134 - DNA, 1066 bp, Artificial sequence
  DNA replication origin
agcttcatcttgggccatggttaccttgtctgcagggagacgcagggcagtgaactgtggctcccatccaagaggcactggctgccctcacaagacagtgatgcagggttttcagatttactgtcctgacctcagaaaagctgtaggttttattaaaggcacaagtgtacacagagctgagaaaacaaaaacaagaccccctgggctctactcttgcccacgggagccagcagccccagaaagacccccaaacgtggacttgcacatttctggggcagaggcagggatgagggtgggccagggtcaggggctgactcccttcagaagcactgcagtgcctatgaaaatgaaagcaagaggcagggagaaggaaaatcagagggagaggaggggaaggaggagcctggaaagagagggaaagggagtgggaggggagctgagaaaggggaggtggggagaggccagggagcagagggagagaggagaagagggggcagccagcagcgggaggctcagagatccagggagatggaaggctcctccaaggatgaggagatgggatggaaggggcagagaaggggactcacttgggggaggggttctgaaagagagcaaaaagaggcaaaaatcagcaatgaatgaggcaaagagaaaattggagaagtaggaagtgaacaaaaacgaggcagagatagagagacagagacagagggggacagagtacagaggacataaagagatagagggggacagagacagagacacacacagagagagacacacagagacaaagagggacagagagagacacagagacatagacacaaaaagacagagggggacagagtacagaggacataaagagatagggacagagacagagacacacacagagaggtacacagagacaggcacccagagacagagtgacagagagagacagaggacatacagagagagagagacagagtacagagacacagagacagagagggacagcgtacagaggacatacagagacagagggacagagaaagagaaacacacaaagagagacatagagaca

SEQ ID NO: 1135 - DNA, 1539 bp, Artificial sequence
  DNA replication origin
tttaaagggaggaaggccttggagaagttgaaagatggggtcatttgacttcatctagagctgagactttcctacccctgagaataagggacagtgagccagtggcactggagctggggcaggaagggggattcgcacgtgcaaaggccctgtggcaagaggatgcctggctgaagggggtaccatgtgtcgacggcaagagcgagaggtgagcccagggacgtggatgcagagccgatcggcagagcctcagagccacactacggggtcagggagctgctgaagtggggagaagcagccccacgaactagattttgttttcatagtgcccctctgactgccctgtggagagggactggagggagagctggaggggaagcagagggcacagctggggcctgtgcagttctgagccatagatgatggtggctcgggctatgtgggggtggcagcgattcagtggatggttccaggatgcttttggagacagggttggcagggccagcggaggggtcaggcagcctgcagagggtgtgggtttctggacagagtgctggggtgggagaagctagaggtggggagtctgaggggtggccaagaagatcccaggacaagatcagaagttccggttacagccagtttgaggtgcccctgggacatccaggtggggtcaggaaacagattaaagacaccaagcttgtgattttgtcagtgcctcatgcacaggtgaaatttcggagtcatcagtgagcaggtggcatttcaggccatgcacatggaggaaatcactccgggagaaaatggtttaggcccagtcctgaaggccactccttaggagttgtgtggaggggcagggacagctggggagaccgagaaggagagaccagggaggggaggtgcagatgccgggaaagcacgttgcaagaagaggggaacctccaccggccaaatgctgctgggagctcccgatgggtaggctgacaggcgcctgttggatttggcaacgtgaggttggtgggtgggggcctttggggttggggctaagcagctgatgggaggagacagagaggcaggtgtgggagccatgagggctcaagggaaggtgtcctgacaaaagagagagggcagaacatttctgaaagctaatgggaagggtccgggaaggggacagactgaagacgtgggaggtaagtgaaatatggcatggagggggttcctagtgggacccagggtccaggtggagagactggctttcagtgagttgggggggactttctccctataagaggagggggcaactgcagtggggcaggaggaagacatgatggtgggtttgcatctgatggcttctctattctctaagtcttaaggggtaaggcctgcagcagagagccggcggtgagggagggttgcgtagaagacagaggagagaaaataggcacaaggtccttggggaggcgagggcactctgtagatgaaataaggtgcacgctttttgggtagttgatttcctgaggcttaaccactgtcatcctgacc

SEQ ID NO: 1136 - DNA, 1578 bp, Artificial sequence
  DNA replication origin
ctccattttttcattaaatccaggagttgatagggagggattgacctggctacttcaattaattttttttttacctttcaaatcataaggttccatttcctttggaggaggcggtgtgttgcagggtgctgcagagtttaaaacgtagggctgtatttgaatgtttggtcttgataggcgatagggaccagcatggaaaatcatctttatcaccccaatatggaaggtaaagcgtgcggcctgggctggcataccaagcggcctgtgagcccttatcgtaatcccaggagccgcccccctctccatcacctctgctattccaggcaagtgtcagaccgtcttccctgctgtacagagccagatagcaccgagctgggccggcgcagcgggcataataagaagtggaaattgctcccaaggaaagtttctgaggaattaacttctgatgggtgaagggggcagtgtgggggtgggcaggtggggaggggtaagggagccgaaggaggaaggtgaggacctgggccaagacaaggacgccagcagtctccgaggaaggaggcagagaccttagagagactttcagaaaggctgtattgctcccattgggaaaggcaggtgggcccacaactgctgtggccggcagagagagctctgggacccaggagggccctagagacccccagctccctgaggggatgaaggatctgaatgcttcctttgggggtcagttgtgccagatgggctggactgcacgtcaggcccaagacattgagggactgtgggtgcaacagagccgtggccaatgcctttgctgattctttctctgagcggcctccatacccgtcccggcctcaatcccttgccttgctcaggctgcttaagtggaaggttcttattcttaccccatgaggaagactcctcagccccgtagcctacaaaacatttccttccaagcattatttataaacgtctgttgagcacctactctgtgcccggtcctgccccaggcactagaaacccggcagtgaaggggaaaggtgaggcctgggcagacactcccctgtgcacagatgcaagaaaagagatggagggagcatgatacgctctaaggaaaatgaaatcaggccgggcatggtggctcaggcggggaatggtggctcaggtggggaatggtggctcggtggggagtggtggctcaggcggggaatggtggctcaggccgggcgtggtggctcaggcggggaatggtggctcaggcggggaatggtggcgcaggcggggaatggtggctcaggccgggcgtggtggctcaggcggggaatggtggctcaggcggggaatggtggcgcaggcggggaatggtggctcaggccaggagtggtggctcaggccgggcgtggtggctcagacggggaatggtggctcaggtggggaatggtggcgcaggcggggaatggtggctcaggctgggcgtggtggctcaggcggggaatggtggctcacgcctgcaatcccagtacttcgggaggccagggcgggaaggtcatttgactagcctgggcaacatagcaaaactcc

SEQ ID NO: 1137 - DNA, 1022 bp, Artificial sequence
  DNA replication origin
ggacaggagccttggaagcgggggcgagggaggggacgaggatagtccatttatcacgaaacaatctgcattgatttaaaccaacaagttccctcctctgtaaatgtgtgtttagagaaaggtaattgacactccaccaaatcaaaggattaccccgggttggcaatctaatcaaacagagtccaggcgggatttgaagctgttcagagtgggatcagcttcgcataatgggggctcggaggaagatgggagggtgtcaggcaattcccggctttaggcagcgctcggcggtggatatccagtgcgaccagagggagagagggagggggcgctggaggggcgcgccgggccgggggctgggggggatggggcgagcggagaggggcgtgcggagctgggaacgtcccggcggagggggctcccggcggagggggctcccggcgaggggccgagcccacactgggctgacaaggctccccttttcttccctccatccccccaaccgaagaagagagagggggaggcgggagcagagactaacgagaaacaacaatgaggagataactattacaaaggcaaacactggcgctcgcgcgctcgcagccccagaacccgcggtaaataaacaaagtctgcaaactgtttgctagataaactcgtgcctaaattgagtgtgacgagcaaggagagaagagacagaaggagataaggttggagggggatgaatgagcataatctaatagaagacatttagaaaacaaactttaaacaagggagaacaggcgagcggagggcaattatccgccccagagagcgggggaagccgtcggaggtctgggaaggggtggaagggaggggactgggagctgcggaagagctgagtgttggggggtgcctttgggactccgtggggagccaagaggggctccccagggcgcgcaagaaaagaggctcggttcccggattgagtgaggttcccgtgctcagccggtcttggaacgcaggcacgtctgaaccgggtg

SEQ ID NO: 1138 - DNA, 1287 bp, Artificial sequence
  DNA replication origin
ctaaggatataaacatgtaatgtacaaggtcctggccgtggccctggaagctcatagtctaagactagacagaactcacacccctgaaaagacaatgcctggttgagggaagggttcctgcacagaggagagacccccaaagaaaggttctctagaggctctggggccttgaaggccatgactaaggggggaggacacattccagaaattccagaaaaatagctcttctctccctcccattgcagactaaaggggtaattagcaaacaggatgagggttagaggcgctgggaagattaggatgcccccctcagtttttgctgtccggggccttccctcttcttttccccttcccccaactctggctgaaagaggaaaaggtggaaatggggtcagcgctttctgacctgctctggagcgattggccccggctggggtggagcagggggagggagggagggaactcgccttcccaaatcgaatcaaggcagaacggtgacctaagggggaaacttcgccattagtagatagatgtctccaaaacttcaaacgaagtggggtgggggagaggtgaggcggggaaggagtccagtgagagcgcagggggaactaccagcatgggaaggggaggggcctggaggaggaagagacggggtcgagggcaaaggggaggcgggggccaaaggaaagggtgtggggaggggatgcgaagggagggggtcggctgcacttggaacttcaacctcctgggagaggaaaagcgtctgcgggtcgctacagcctcgggaggggtgaagggaagttgtgtgcgccccaagtccagctcaaaagaggccccgagggcattctagggcgccttgggcacgcgtgccaggcccccggtttggcagccgagctgagcgagggtggattgcgaggggcactggggccgccgcggagctctgcgtgtcggctgccagtgaattggccgatttccccagtctgagggtcagcgaacggacctttccatggcttggtcgccctggtcctggaggtgcgctgggcccgagctccggtggagaccaagggaggggtggggagaggcagcggagacagagagccacagaggaggagagagctagaaaattcagagtgagaaagtctgagcgcagcagaagagaatcttgcgcacagtttgaggacgctggaaaatgcggaggcgccgagggaggcgccgagcagcaggaagaaagacaaagagatgcagaatcaccgagagactggccctgggacaggcggatcaggagag

SEQ ID NO: 1139 - DNA, 1584 bp, Artificial sequence
  DNA replication origin
ggcgaatgcctggtggcgctttactatggtgtgggccgaggccccggcctaatcccgctttcatttccaccgacggccgcgggggaagcgctcccggcctcccggcccctcaggaggctgattaggccacaaagagcccccattatcccgagaagaaaaccggggggcggcgcggggcggcgcggcgcggggggagcggcccgcccgcgcccgggctattgacttagtggatgaagtcaagagcgggcacgctgggagcccgggggtggggtgggggggagggctggggccttgggcggggatcccggaggtggggtgggggaagggctggagggggaggggcgacccgcgcgggaaggggcgggggacggaacaaaacagaacgcacaaaacccacaacaaaaccgagctccgggcgaggggagccgggccctggtgcagggcctcgtctgctgagcttggctgggtcagctgcccgcgccggccagcggaggggaggggggcaaaggacctgggctccgccgccactgccgcctgggctgggttgcttacttgggacggggtggtggaggaaaggagaaagttgcagccgttggacagtctgtcgctaagtgctacatggcttgggcacgcggctctgtggctcaggctctctagtcctcctctgtgaccccagggagctgggtacagaggtctccaaaagtcatccccgctgtggtggcctgcgaatctgtggtcacagctatagtggatgctgtagaggagatgcctgaattgggcggggtggggggggagaggagaaggaggcaggagattgaaggagaaagaggaggaccctggattctgaaagatctgggtaattttgagtgaagcattctgagatcctagatgtcctcttctgcaaaatgggtccatggacacaacctcaaagtaggctaggaagcgtaaatgctataattacgtaaagtacagggcaaactgggaggctggagaaatatcactcccccatcctctcctgcctcctcatttcctccaaggcttctttcagtcactcccctatgacttgagaaataataggggccttggaagaaacgggctgtgaatccataagtgatcaccaaatgtgggcgcaggtggggtgggggcagatgctcagccaagtgcaaataaatagtatccctcctgatctacagttctagacagaagaaatagacctgctctgtgggcagctcctcattcagcagaaggtcaagagaagaaggtagaaacgcacagagccagttcctggagcccagtagacactgttctgtgtgtggagggacttccctcccctgatggcttctgtccccacaggcagaggctgggcagccttgactgacagggtagggaggtgtgggtgagtgctctggtttgaggagatggtgaaaacatcctccaggtataaaggaggtaggtgagggtatgtgacacaggctcctacctgactggcccccagtcacctcccctccccaaccacagctgttttccccacccccagccatctcccagaaaaggggccctgactccagtgatttggaagttctt

SEQ ID NO: 1140 - DNA, 859 bp, Artificial sequence
  DNA replication origin
ggtgagcaagggggtggtggcacagggggcgaagggaaatggggcgcgaagggagaaaagaggaagtggggaaaggaaagaaataggaagcagagagtgtgtgaaaaaaacaaaaaacaaaaaacaacaaacagacgtggatttcccatcaactgagcccaagagaaagttctgggctgtggcaggggacagggaggcacgaatggctggaggagaaagtgaaaggcaggcctggctgggctgaggggtgggggaggctgtccaccctctcaagaaagtgcaggcccttatcactcagaaggcgacagagccacagagtgggggagtgacaaggccgaggtgcgcaggaattagggcgcacccaggcccatccttccaaaggcctccaacaatgtcctgggggacccgacccaggtctctgatgttctccaaagctccaagggaggagcctcccctgcccttagcagaactcccctggtggccaaggacacccgtccccactgaaaaaggtgttggagaagcgtgttcacagccggggaaagggccaggagagagaagggccggtggggaaggttagggagccctggggctgaggtgggagcagggcaggaacctagagtgggggacaagaaggagcggggggaacaggatggaaaaggctgatggaaagaagatgggaaatgagtgtggaagagacagctgcaaaggtgttgagggaacatgaattctgcaacaggaggtctgcatcccggccctgcgctaactcactgtgaccttggcccctggtggcacctgctggagcctcagaccccatctgcaaacagctacctcatattatgctagctgttcttcttcatgc

SEQ ID NO: 1141 - DNA, 1069 bp, Artificial sequence
  DNA replication origin
ctcccgagggagcctctctctccagcaggcagcaagggtcttgcttaccggctgcccgtcccttcgccgcctgccccgtcccgagacggccgaggccccgcgaccaagactggacgagcgagcggcggctccgcagtccggggggcggccaggcgcgcggctgctcgggatcccaggcccgggcagcgggaattaagcaggccgccgagcccgagggcgtccttatctcggggagacagttgttgggaatcactttgactgagtggttttgtctccccgcattttccactgtcaggcggcctcgggccatggatcaaaggcgcggcggcgacggcggcggcggcggagcgcggggaggggcggccgcgcggatccccccagacccgatccccgctccggccgccgccccaacccccgccctggacttgggtccgcccggcctcgggagcccgcgcccggtccctgcctcggagcccaccagcagcggaggaattcggaaaggggacacgggggtgggggagagggcaagggcaaggggggcgcgcaggggctgaagatggagggggaagaggtgtttgttgggtgcggaatgagagaggagaggagaatgagagagattagggggaagagaatgggtagaggcgaggccagctatgggaggaggcaggcaaagagggaaatgagggtttgagagaatggagtgggtggagagaggacccaggctggaggtattctcagggttatgacgcgatcagggagacggtgagcaagggggtggtggcacagggggcgaagggaaatggggcgcgaagggagaaaagaggaagtggggaaaggaaagaaataggaagcagagagtgtgtgaaaaaaacaaaaaacaaaaaacaacaaacagacgtggatttcccatcaactgagcccaagagaaagttctgggctgtggcaggggacagggaggcacgaatggctggaggagaaagtgaaaggcaggcctggctgggctgaggggtgggggaggctgtccaccctctcaagaaagtgcaggcccttatcactcagaaggcgacag

SEQ ID NO: 1142 - DNA, 1572 bp, Artificial sequence
  DNA replication origin
acacctcttccccctccatcttcagcccctgcgcgccccccttgcccttgccctctcccccacccccgtgtcccctttccgaattcctccgctgctggtgggctccgaggcagggaccgggcgcgggctcccgaggccgggcggacccaagtccagggcgggggttggggcggcggccggagcggggatcgggtctggggggatccgcgcggccgcccctccccgcgctccgccgccgccgccgtcgccgccgcgcctttgatccatggcccgaggccgcctgacagtggaaaatgcggggagacaaaaccactcagtcaaagtgattcccaacaactgtctccccgagataaggacgccctcgggctcggcggcctgcttaattcccgctgcccgggcctgggatcccgagcagccgcgcgcctggccgccccccggactgcggagccgccgctcgctcgtccagtcttggtcgcggggcctcggccgtctcgggacggggcaggcggcgaagggacgggcagccggtaagcaagacccttgctgcctgctggagagagaggctccctcgggagcgccccgttccccacccgttcattagttcattagggccttctccaccaatgcacttgcccttccctccacctagaaccttcttgcccctcctctcctcgcttagccagctctgctcatctctctggtctcagctcagaggttgtttgctccagaagtttgccctgacctggctgtggtggccaggccccctcccatgccccttgtattcccctgggtagcagctttgcctctggtttctaactttttggataccgctctctccctctaatgcaaggaccctaggctcttggcgtgtgtccccagcacaaagcctggcacgaagtaggtgcccaataaacagctgcaaacatgccctgggctctcctgagggtctattttgtgccccattctgtgcacagaggatgccaggtgggctaaacctggcctctgccctcaagaaccttccagttagtccacccacagacaagcaagtgacaaaccatgagccagaagcctccagagaggagggaggcctagggagggtctgcagccccctcttagggggagaaataccgtcttgacggccagctggcctgactcgctggatagaccacctagagccccgactctgctgtctgaccaccctccttaacaagctatggttcaacaatgtgtagattccagagggacaggagatgagattatataaagtgaggccaaaagggagccctcatgatcccacctgaacctccatgggggtgtcagggacaggagagccagcatgtttgggatgatggcaggaggcacacgtcctgtggaggcagaattcagctgaactgagttcactcagagctggccagggatggaaggggtaactttggaaagcagggagtgcgccatctctgctcagagcggggtgccagcagaatccaggccatacctgccaaaaggattggagggtgagtctttgcagggtggggcgattgagctagagtcagtggttcccaaacctgagcc

SEQ ID NO: 1143 - DNA, 919 bp, Artificial sequence
  DNA replication origin
agagtcatgatgaggcttaaagggaaatacttcacaaactgtaaagtgctgtgcttgtgcaagagaatgccatcagccaggcttagaaaagcgttcatggagggcttcgagggtgacaaatgagagggaaccaggagtcagggggctgggtcgggagagggaagggaaccttcttgcccacacggcaggtgcagggcttcggtgtgggatgctggtagtggagggggttgggtgtggaggccataagcagagatggaaactgaagtgggggacagggagacctgcaggaaatcttgtttggaagctccaagtcagcacccgaagcctattaccgctgtccacagggggaaaggagggggagggtccagatcctcttagtggagtattgagaggaagagggggtgagggtgggcagctgcccgggtgggtaatttctggcttgcactaatcccagtgtggggctgggaacaggcagccgccagtaggggcatgcgtgtgtctgggtgtcccctgggggctggaggagggtgaagggcgcacaggtttgcgtgagtgagctgacgaaggcggagttgtggggtggcagtgtgtgggtgcgtgagggtctgtgtacctctttgtgtgcacatcggggaggccggtggatctgtggccagcgggatgggtgcctgcgggttttcatggatgtcgttctctgtctgttcgtgttggcgtgtctgtaatgtgtgtgtcttcctgcacgggtgtctgggtgtgtgttggtgcgtctgtaatgtgtgtgtcttcctgcatcggtgtctgggtgttttttgtgtgcatcccatatcttcgcctgtatgagtatggatgtgtcatggtattacgcgtgtgtagcaattcacagtgatgtcttgagactagtggccgtcaaacttggctg

SEQ ID NO: 1144 - DNA, 881 bp, Artificial sequence
  DNA replication origin
aaagatcagctagcaaaagacttggcacacagtaggtagtcacaaatattgtgattgttactgtttaatgttagtacttttacatgaagcatctagctgaggactgaattcattctttcattcatgtaacagatatttattgagcacctactatgtgccaggtactgttgtaggtgctgggatacagctggcaacaacttagaaatcatcgccctcatggagtttctcttctagtggagagagacagaaaataaatgtaaacaataataggtgatgcaggatgttagaggtgagaagtgcaatgaataaaataaaaatgtgggcagggtgggggtgtctggcatgtcagtggaaaggaggagttggtagaaggagattgcaattttcaacagggtggtcaggtgggtgtcactgacaattgggcgaagacttgagggaggtgaaggagtgagggagccatgagggacctagcagaagaacattccaagaagaggggttagcaagtgccaaggccaggaggtgcctggtatgtttgcggaactagatgagcagaactggaaccagagggagaggagaaggagatgaaatcagacaggcgagagttgtgcagataaatgacggagcccttaggggccattcaaggactggcttttcctgggtgacgttaggagctgttgaggagttctgagaagaggagtaaagtgacctgacatgtgtgtgagcagggtcactgggctgccatgttaagcatagactataggggaaaggtggatgggtaatgttgcagtgcaggccggggatgatggtggctggacaggagggagtggggagctggtaggcactggatggatacattttaaaggtagagccaagaggatttg

SEQ ID NO: 1145 - DNA, 959 bp, Artificial sequence
  DNA replication origin
cctcttcccccacctcctccctgagccccttggggtggcagcatcacttggagattgtgggggctgtgtgcatctgcatgcaagcacgaaggacatggagccagcctgggactaaaaaagagtgacctcttgcagagagggtgaaggtattgcgggagacaaggagaaaggaagaacagtgcaaaagatgattaagggttgagtatgagaaatgcatcatttatgacactggggaagattatatgctggcttgagaatggtgaaggtgatggcaccaggcatgatgctgggttttctaatgcttgtgatcatggtggggtgtataatgatggtgatagttgtgatgaaagtaatggtggtgatgctgataatgttgataacagtaatactggtgatgatgacaatgataaaaagtatgatggtgatgatgatgatgatagtggtaatggtggtgatgatggtgatggtagtgatgatgatggcagtggtggtaatagtgttggcagtgatggtgctggtagtgataatggtgatggttgcgttgatgatggtgatggttttaacgatagtgttggtgatgatggtgatggtagtgatgatggtgttggtggtgatgatagtgatgctgaagatggtgctgatggtggtgatggtgttggtgatgatggcgatggtagtgatgctggtgatggtgttagtgatggtgttggtgatggtggtgatcgtagtgatgctgatgatggtgctgatggtgttagtgatgacgttggtgatggtagtgatgatggtgatgggggtggtgatgatggtgatgctgataatgatggtgctgatgatggtgatggtggtgagggtgttactgatggcgttggtgatggtagtgatgatgatgttggtggtggtgatggtggaaatggtggtggtgatggtggtgatgatggctgtgataatggtcgtgc

SEQ ID NO: 1146 - DNA, 2133 bp, Artificial sequence
  DNA replication origin
aaccccgagccccagacaggggcactggatgctgatgccggagtgtgtactagggacatggatggggacgtcctcatgcatctgtgcacagacaaacacggtgcatggccaggcgcccacgtgcctggctgctgcacatgcctgacccaggacatgtgctgagagagcccgtgtgtacttgccccgccgcgcccggtgagcactcagtgactctagcagtaagaacagacctgcctaggtgatggcaggaccggttggtgcaggcttctggggaaagggagccttggccagagcgtggggcagattgggctgtgccgtggcctccttggcagggacttttggagatagggccagacgccttggaggagtggggtcgggtaggggatgtcctggttggcacagagtctggtggttccaggtgagggacaaccatgctgtagggtagggtggggtgggggttgggggctggtggcgccatcctcatgcatcactgaaacacctcccgggcagggcaacgtggtcctatggaagcccagtgacactgccatgctggccagctatgctgtctaccgcatccttcgggaggctggcctgccccccaacatcatccagtttgtgccagctgatgggcccctatttggggacactgtcaccagctcagagcacctctgtggcatcaacttcacaggcagtgtgccgtaagtccctggggatggtgtaggctgtggtggctaggggacgttcacctgctcacctgctgtctgcctggggatggggctgtgaacccaggggtcatgcacggactctactcccttacttgctgtgtggctatgagtgagccacttcacctctctgagcttccatttcttcacctgtacagggagtgattatccttaatttgcagagtcattgcaaggattaaacatgttaatgaacaggaaagagcttcgcagactggaagtgcaccctacagctgtgggtaatattgatttcagtgctacctctgctactggaaagggcacaggggagcacagaatgaactggaggagtcaggaagccttcctggaggaggtgacatctaagcagaggagttggccaggcagaggggaagaggcaggagaagaatatatatgttgggagagggaatagcacatacaatgttgccaagccaaaaacttgtgctctggggcatggcaggatcctgtgtggctggagtgtggagtttgggggcgacagggcaagagagtgagggcagggcatggtttgagttgaggtaggggaggcaggccactacctgatctcgaccatccatgcactcactggctgagcaggaaatttggagctcacactaaggctcagtggtgagcacacaccagggacaaggtcccggctctcaggctggaggtggcggcagggagtggttcagtgaccataagatacttaggagtctgcaaaggtgtctggcctttatcctgaaggtgatgggagccatggaaggcttcaagcagggagagtggctgagtcagagttctgtgtcaggcagagattgcaaataatggcccccaaattggatctggcaagaggctctactttctttgactcctaacagtgatggcccaactttgtataattgggacaatttcatagataaatccaaatattggcctgtcttggtcccctggacctggatgctctgatcttgcatttcctggtggtaccactggctggaagtgggtgggtgccctctggctccctgcatacctgatccacgctgtttcctttccctgctggctcctctgggcccctgtgttggcaccctcattctcagtgatctctctgtgacctgatgcaggagactggccagggactgttgacctccagggaggggtggtaggggcttgaaccaggggagagatgggggatgtggagaagggggcaggttcaggtgagaaggatgcagggaggcacagtggccattgcctgtcctggagttggggttggggtgcgtgtggggatgaggggggttgtcagcgagaatgttcaagatgggcacctgggagggcgagcgggctcgggggaagatgaatctcctgttggtcacttcgggtgttatctgggtggagatgcctggag

SEQ ID NO: 1147 - DNA, 793 bp, Artificial sequence
  DNA replication origin
tcacgccctctctcccgggtcataccataaagagaggaggggaaaacgcatgcatttcaggacttcgctttcgggttcccttgtcctgtgttgtgtaatgcccccgttatggcactagaaatattttttattagccgaagctaaatatagtgggactttggctgatcccgagctcggaggacagccggggtgatccgtttccccccgaggatcgaggtggtgcgctctggacggggttgtgcattctcgccgcgcccgggcggacgatccagcgaacagccccgcttctaacccgagatgctgctgccggcgcccgcgctccgccgcgccctgctgtcccgcccctggaccggggccgggtgagtgagcacggggcccggggcggcccgagcgcgcgcctggggcccgggagcctgagagtcactgggcgtcccccgcgccgcactccctccctgccggacccccaagctgcctcggtcaacgccgggttcctcaggggctcccctccgacccccacccaggcctttctcccactgagatcccttagcctcctccctcaggtagtcaccttcctttagcgaggggacccctcttcccgaatcctgcgaccgagtagggtgcctcggtggccctgccggttcccacgctcggaaagtagcctctgtagtcactcacctcactcctaatactggatcttcgcaatttgctggcttcccctgaggggcccttctatttttagcacaccacacatctcacttccccaccctcgtctcacgttcagtgtccccatccc

SEQ ID NO: 1148 - DNA, 1301 bp, Artificial sequence
  DNA replication origin
ggctgctggagaagcagctggagcagcagcagagcgagcgcgagcggcggctgcgctacaagaccttctcccgcgagcaggccgtgcagaccgggcccgagttgctgcggcccccggcgcccggcggcgggcacggcctcagcagtggcgcggcggccggcgccaacgccaatgccgtggccctgggcggcctgccccccggcggcggctcgcacccgcagcactacggccgcctgcccgggaccatctggagctacacgcaggtgcggcgcacgggcggcggcggcgtggagaccgtgcagggccccggcgtgtcgtgggtgcaccccgacggcgtgggcgtgcagatcgacaccatcacgccggagatccgcgcgctctacaacgtgctggccaaggtgaagcgcgagcgcgacgagtataagcggaggtgagtggccgcccctcccccgccgccctgggacggggcgcccaggtccaggctgccgcggaatgcgtatgcgggacgggggccgggcgggcagctggtactggcaggtgggctggaagctgtgtttgcagagcgtcttacgtacgccaggaaggcccagttatctagatcccaggatgggggcgggcgctggctaccgtgggggccacctcgatgctgtcactggtgaggcacattgttttctaggtgacataataactgtctgtgttttatgcgatctcatttaattctcagcacaatacagcgtattgtgtaaggcagtcttatcctcatctcgcagatgaggaaaccgaggtgcagaaatgctaagtgatttgcctaaggtggcttggcgagtaagtggtgaaaccgggatttcaaccagagattttaaccactcctggctagtctgtctcctagcataagtatttttaccaaggaagtaggaaatatgctcccctccctcaacatatgaaaagaaaaactctaaccaacccactgcctttttatttcttgaattaaatgagatcacgtttttgaaaatggatggatctgcccctaccccctggggccagtgtctgccgtcttgctccagctctgtaaggtccagcttgctgggttggataaccacaactacaacagactgctcacaagcttttataaaatgcctcctttcatccctcttctccccactccctgagtctcatggtttattgagccctaacaaactcagccttaaaagcccccaggagaagataatgttgggctggagactggacattgaatggactgagaccacaatctctggctagaactggggtccagactctgc

SEQ ID NO: 1149 - DNA, 882 bp, Artificial sequence
  DNA replication origin
tctactagcccaacattctgctcctgtttgtggatgttcaactctgaaagtcctcaaacaagcccctatgtggtcacaaagtacccccctggtcactcaggtctggaggactccaagcactctttgctgggggccaggctcaggggcctgatgtttcgaatcgcctttctgagggcctgtcctggctcccaggtgactgtgggagatcctgagctatgcccttggagcacccttcgccaactccaggcacagccagtgtccccaccctggtggcctctcccccttgaacaggcacactgtggccctgaggatgatgtgtgatgatgacttgttcctgatttgcctcccatcagtttgtaagcctctggcacatagaaggtgctcgggaaaagtctggagacagaagggaaggagggagggagggaggagagagggagggaggagagaaggagggagggagggaggagagaagaagcaagggagaaaaagtgggaggctggagcaggggagagaggaaggaaggaaagtgggaaagaaaggagaaggagggaaggaggggtgagtctagcacagtgctcaacccataggggtgttgttgaatagaaataaatgattctgggctcacatctgtaatcccagcactttgggaggccgggaagagtggatcacgtgaggtcaggagttcgagaccagcctagccaacatggtgaaaccgtgtctctaccaaaaaatacaaaaattagctgggcatggtggcatgagcctgtaatcccagctactgggaaggctgagatgggagaatcacttgaaccaggaggcagaggttgcagtgagcccagatcgcaccgttgcactccagcctgagtgacagaaaaagacctg

SEQ ID NO: 1150 - DNA, 1272 bp, Artificial sequence
  DNA replication origin
ggttcattccacaacaaggtaagagcccagaagccctgcctctgagcctgactccctgccctgttctggcccggagatccccagcctctttcctgctcctagcatcccccaaaggtgctgagccacctgtcctgcccagctcagcagtgaggctgtacaggtaggactttgtcttggaggggggctgcccaggatggacaagtccctgctaccagagacaggagcaagtggctctccttcagccaacaacccacccaaaggctagggcatggcgcctgctacccaggaatctgtgttggagtagaaggtggggggcatggtggcccagggatctgtgatgtactgggaggtggggggcatggtggtcctgggatctgtgatggagttgggggtggagatggtgatccaggaatctgtggtggagtggggggtgggggggatggtggtccagggatctgtggtggagtggggggtgggggaatggtggtcctgggatctgtggtggagtagggtgtgggggggatggtggtcctgggatctgtggtggagcggcgggtggggaatatggtggtccagggatctgtggtggaatgggggtggggggcatagtggtcctgggatccgtggtggagtgggggttggggatatggtggtcctgggatctgtggtggagtagggggtggcggggatggtggtcccagggatctgtggtggagagggaggtgggggaatggtggtccagggatctgtggtggagtgggggtggggaatatggtgatccagggatctgtggtggaatgggggtgggggatatggtggtcctgggatccgtggtggagtgggggttggggacatggtggtctagggactatggtggagttggggtgggggcatggtggtcctgggatctgtggtggagtgggggtgggggcatggttgtcccagtcctgagccagctgagtttgtctggagcctgggtgagttctgggcttagtgttgaaggccacccgtgcagccaaaggctttgacaaatgtcagtgacacagaaatgtgaccacattagtcagatgtcactctcccctgaataagctcgcctggatcttgtgaggaatgagaaagcaggagcccatcctcggtgcccccagcctgatagaggagcccccaatgtgatggaggagatgggaccctgatgttaaaactttcccaaaccccaaaccatagcgatctgctcaatatatacacacaggtcactgaggtgcgctgtggcaggtg

SEQ ID NO: 1151 - DNA, 872 bp, Artificial sequence
  DNA replication origin
gcgggtccagacgatccggctcgaaatcccctccccccacaacagcgtcgcccgccagagccgccgcccggtacctctcgatgactgaggccaccagctgcggcaactccttcatctcgaaggcggagtaggacgcggacagcaggggccgcacagccacctcccagcccggggtcgtgtccgcccccgttgccggggtccccggcgccggagccgctgccgccgcctcttcgccgccgctcgtcgccatcttccgtcgtactactgcggctccctccgggggcttgccaccggcccagcgccgcctcccaggagggggcggaagtgacgcaatctgtcgcgtcagactgcgcgccgccgtcatgggtcaaaaacgcgacgcgcggagcggcctttgctctcaccggggtcgagccgcggcgagggaacggatcggagacgctgcgcctgctcagaaggtagcgcagcggggaaaggcgggagagcgttaacttctgagcctgcgcggtgggagttgctcaagcaggtggtagcgacttggcttccgggcagcgggtaaaggtgagtctggggcatgggttcagtgggcaagtctagggcagcagagttgactacgcctcggcgtatagaatggccctggcctgggacagctaaggacgacaagaggaggccgaagcctaaaacgctttcacctgcttcttcccctgcctagatccccccaatagtaatactaaagagcgccatagtttacaaagatttctccctctcacaacaccttttaatcactgatccgtattcccttagcactcaaatctcttctgtttggattgccctcattaacaatctgaccagctcgtacaatgcatccctct

SEQ ID NO: 1152 - DNA, 937 bp, Artificial sequence
  DNA replication origin
ggaatcagcagcgtagcccaaagccagaaacgagaagcccactcagccgccatgatgcgagcgcatgcaccacccaccgccgtcccggcatgcaccgcgccgcgggctccgcctccgcgggaccacagagctgggatagcgcgcgaggccctcggtcggacgggacgctcgggattcagggactgcctcggcacacgggaagttgccctacaggcgcgggagaaagcgcaggcggcggcttggcagggagaggcaggctgcagtgcacattgggtcaggcacacgcgaggggcagcccccgagggccgtcccagagtcccccgcgccgccggggtcctaacggggtgcaccgtcttccgccgcacgtggattcagcgcgatgcccaaatccaagcgcgacaagaaaggtgggcgaagggggagtcgggaccctggggggagctccgtgggctggctacccagcctgcggtgagggcttcggggcggcgggggcgcagattggaacgccaggacatcctcgaggtgttccgctgcctcgctgcgagctggaatgggggcttcggggctgtaaaaccgccagaggtggctgacgcccggtcgggtctggggagcggagactcgttttgcctagtttcaggtgctcttgcaaggccaactgggtcgggaggcagctcctgaacaccgcccccggctatgcctgctgccgtttcggcccacttttcccaacttcggccctttctcatcttcctgcgctcccgccaccctggctgcctttcccttctttcagcacaggtttgttcccgtgtctggcgttgtgtgtctgcggttgtttctgcctggcatgcttacatcttcgtatggtttgcgccttcttagttgtcagttaataggatccctctgagacagggtctcgctctgttgcccaggctggagtgca

SEQ ID NO: 1153 - DNA, 1431 bp, Artificial sequence
  DNA replication origin
cgcgtgggcggcgttgggcacctttggccgcgccctccgctccaccaccggtgggcgcggcccgagccagtccctaaagccacgaggccgcccgctccgagcctggtgcttccgaccgctgcgcgcggctcctgggctgtcacagtctcccgttgccgccgtcatgtcccggcagctgtcgcgggcccggccagccacggtgctgggcgccatggagatggggcgccgcatggacgcgcccaccagcgccgcagtcacgcgcgccttcctggagcgcggccacaccgagatagacacggccttcctgtacagcgacggccagtccgagaccatccttggcggcctggggctccgaatgggcagcagcgactgcagaggtaacagtggcccctgatcctccctctgcacggtgcagagctgagcctgtcaccagccgtgcgctgccccgctctccctggccccgggcagcacccacggcttcgtcccccaccccatccctgtccacaccgcaactctgggaaccgccagttcctcaggcacatctagctctggacaactggatggtgctttgtccggactccttttctgtcgtcttctcttccgggaggtagcccagcaccctcactgacgcctggatgacttggtcttgcctggaatgacttggctagcccctctctggagcacgaaaaacattggaatctagcattgtgcagctcctgtccccacctgtgcccttcaggtgcccttgacgggcctgatctgcagaaattctgttcttatcgcctggcacagtccaaaatcagagtttggacccagcacactatctgcttcctcctacgctcatgccagactgctcgggtccctggactttgctctggtaactcaccagggtgacaatgcctgggagccttggcagctccctcagtgagatggggaattgggtgtggtacagggtctcgctgccctctctgtgggatgctctgtctgaggctattggagagaaatggacactaacccactccaggaatctccaattctagcgatggctggggagccgagtgagcccttcttgggagggaccccgtgaagaaagataggataggagtttgccaggaagagtacaaggggcaagggcgtcagggcagtgggcatgggtgtggaaaggcaaatgcgacttggcaatgccgccggtgctgggggaagcaggtgtagcccgaggggaagatgtgtgtaaaggggcaggaggagccgccctcagtctgatgccatttgcagtgcttaggccgatgcctggcaggcacatagtgagggctgggaaatgttagctgtttctttgttcttaatattagcaccatttgcctccttccactctgagtgtctgagtggagtcttgtccatttctcctctgattcaccacatggtacatcccaa

SEQ ID NO: 1154 - DNA, 1072 bp, Artificial sequence
  DNA replication origin
caggggtgggggcggtgggggggacaaaactttgggtgctgccccggggccagggagagcggggcggtacacggctgtggacaggctcagctctgcaccgtgcagggggaggatcaggggccactgttacctctgcagtcgctgccgcccagccggagccccaggccgccaaggatggtctcggactggccctcgctgtacacgaaggccgtgtctatctcggtgtggccgcgctccaggaaggcgcgcgtgactgcggcgctggtgggcgcgtccatgcggcgccccatctccatggcgcccagcaccgtggctggccgggcccgcgacagctgccgggacatgacggcggcaacgggagactgtgacagcccaggagccgcgcgcagcggtcggaagcaccaggctcggagcgggcggcctcgtggctttagagacgggctcgggccccgcccaccggcgggtgcagctgagggcgcggccgaaggtgcccgacgccgcccacgagctcgactccacgctcggctactaggaccttctgcacttgcaccgagcaagcagcgaaatggctgtggcttcgtaccggtgactcgcgtcttggagattttaacactcctcaacgtccccaagggtgagggggtccaagggtggcgactatcccaaaaggcggggactcttcgggcctccctgccccgtcgtccctccttcctcggccttgccccggagctgtcctgggtttctgtctcctcccggagggagcgcttacggggtggggtggacctagggctgtcgcgcctgccgtgtggtcctggagaatgaggcttaccaaaggctcaagacagcgtccccatggagtgacatggttaaagtgttgaaagaaaagaactgttggcattgaattctgtacctaagtgaaaaaaaactgactggctctggtgacttaacgcctgtaatgccaacactttgagagatcaaggcaggaggatcacttgagcccaggagtttgaacccagcctgggcaacatagggaggccctgtctcaaaagaaaaaaaaaaagatagaaaaatggac

SEQ ID NO: 1155 - DNA, 1442 bp, Artificial sequence
  DNA replication origin
cccgcgggaaccgcaggccccgcccccacgccgcgcgctgggctgaccgggcctggaggcgccgctggggccgcgcctgttgtccccgcccccaactgcctccgcgctcctccccggcatgggcggggcccccggctcccaacgcgcaggcgccgctgctatgctgagtgccgcgtctcgcgtagtctcccgcgccgccgtccactgcgcgcttcgctctccgccgcccgaggcccgcgcgctcgccatgtcccggccaccgccaccgcgggtcgcctcggtgctgggcaccatggagatggggcgccgcatggacgcgcccgccagcgccgcggccgtgcgcgcctttctggagcgcggccacaccgaactggacacggccttcatgtacagcgacggccagtccgagaccatcctgggcggcctggggctcgggctgggcggtggcgactgcagaggtaacagtagctgcagatcctccccatgcatcgtgtagagctgagcctgtccccagccgtgcaccaccccgctcgggcccggccgcgggcagcaccgacggattcgtccctcgctccccaccccaggtccaccccgcagctctgggaaccccgggacaactagacagtgctttgccctgactcctttcccccactctccttcccttgggagttgcagcgcgagagtctccccccagcctggtctgacccatcgcttcccacctccattgatgcccccgcctccaaacctgccaggtgcccacaaccggtccccacccaggctctcccccttttctctaccccttcgttaccatcatcacgcatgcacaccctgggcacccttttctcatcctggccttttcttaaccactagaatttgacctgtgcagctggcagtacctctgcctctctcagggagaactgtggcgatgccgtaaggctggctgggagagtaggagtgttagggagtgcggacgggtcagggtgtagggactttctatccactctatgccaggctttgacttggggccataggagggaaagtgattccagccctccacagggagttcagagtctaatgaggaagattgaagtaatgattgctggagagcccagaagagagagtactttagggagctgcaggccggggagaggcactagggaaggctcagcaaatgctggatggagctcagccttaaaggctcaatggtaggttggaggagaacaagagaaaggaacattagagtctgtgcaaagacttggtttggaaatgcaatgtgcgtgatgtgtgaaaggaaggccactgggcaggtggggcttgagtggaggatggaggggactgtccctcgtgagcctggtgcccttgatagcccttgggagggtgcctggcactcagtgagggcccagggaacgtgggctgttacccttaccatgcttcacccactg

SEQ ID NO: 1156 - DNA, 1578 bp, Artificial sequence
  DNA replication origin
ggcctgcggttcccgcgggggcggtggcgcgcggtcagctgacccggcgggccttgacccagaagctgggccctggcggcggatctggacgtggtgagccggaccgggggcaggtggcaaacttcacggctgggggtcggggctcctgggcttccctgccacatccttccagccctctcctccggccgctggactgtcccggctcctgcgccctccttgtggcgcgatatcgtgggacgaggctccgggccgggactgggtggccctcgggaatccgcagccagtggccccccacctcaaaggcgaccagcgcggcctctcgagctggcctggccaggagttgccctgccccggccgaccggccccttggcatctgatggcttcgtttttcccgggccggccgggcgaggggccctcgcggcgctggccccagcagctgtcctatcattatccctccaaacaggcggcccgcgccgggctgagtcaccaggagggagctgtggccgaggacgccgaggcctggagtgggtggtagccccgagctgggacgctcctccctccacaatctccccaggtctgcagggaccgagggcctacactgcctcctcccacgccgtgcttagggtaggtttccaaacgtgtaaatggagagtctgagtctggaagtgtgaggggtcccgggcctgggtcacaggtcatgtctaatcaacgcttactgaaggcgcctgtgtgcccggacgctggaggggctacaatgagaacaaataatagtcattttgggctgttggtgttgagtgccagtgccaggcacccttgtaatcgcttggcctggattgtctcatttaactctgcagtcagcctaggtggtgggtattgcattattcccctacttttcagatgagaactacgaagctcaatcacttgagttccagactggtaggcatcgggcaggtctgttccagagtgcttttctcctcaaccctgggctgttcgagctcacagctttctccccttcctttctcctttccttcctcttctctctcttccaccctttctcctttctcacccgtttcctctcttcttcactctgtccttctctctacctctctctttctctcactgtctctcaacatttgctgaacctctaggtgtgtttacacctggagaataagaaatgcacaacccagggtggggagagtacgtttcaaagacagtggtcgcagaggacggtggtagcgttcttcaggtgtgtggacaaggggagaggaggaggtggaaggtcctgtccagccagctctcatggggcatctttgaaagggcaatttagaagtgagtcttcttatctcatgaccaggcccttgaaggggagcaggacacttctaggggaagagatggcacgtgcagaagcctggagacctgaaatgactgaagacgtgggtcaggaggcaggagataaggttgggagggcagttcttggagtaacttgaggcctagcctcaggtaatttggacttcatcctgtagacaaaggtggacacatgattggctgtgatcatgtgcccgaagcaccctgactcag

SEQ ID NO: 1157 - DNA, 885 bp, Artificial sequence
  DNA replication origin
ggcgggcgctcctgtccgtggagtcgggcagcaaggtgaggcgtgggcgtggcggtcgaagggatggaggctggctcatccccagggctctcccctgcacagcctcatgggtgctaaatggggtgggggatcacctctggctcctacgagacaccaagtgcccccttctgccccacagcccttcacccggcaggaagtcattggcttcgtcatcggctccatctccagcgtgttgtacctgctttcccggctgcctcagatccgcaccaacgtgagcctccagcaggggctgggtggggccgagtagaggagagctggcctggccacccgggccctctgggctaaggagtagcacagcataggagccttggttcagaaagtctggtctactcccgctgttggcttgggcaagttaatccaatctccgagcctccatttctgcttctggaaaatgggcgtggcgtggcctgccagccaggctacaagaggcccatgtgtgtcttgggggagtgggaggtcaggggaaggtgaggggctgagcttggaggcctgaggggagaggagaagctggggagtcggggaggggaggcttgctgggcagctagagcctgtgtggggtggaatgcagggtggtgtggggccacaggcctggcacagccacggtctcccgtggacctgggcaggggcctgggggggcttgtctgtgggtgggaggaggctcttctgtgtgtcgggcccatatccctgggcacccagggaaagattggctcagagcaggtgcactgtggtggggcaggtggacatgtggacagttacaatccagagtgacaagaggcctgttcgaggtctctgacctgacctcctcctgccccagttcctccggaa

SEQ ID NO: 1158 - DNA, 1144 bp, Artificial sequence
  DNA replication origin
cggcctgtttattcagttgtctggagttgacaggacagtcctgagtccagcaggctgtggctgtggcccctggggtgagtaggcagaatgaggtaggtggtaggaggggcagcctcactgtctcctgagaggccctggggtctccgctccagccccggccttgaggcttcggggtctacctgaaggtgtgttcctggggggacggttcggtccacggaggatccagaggccacccgcaggctgatgcagggccgccgtaccatcactgtccacacctcctcctgcctggtgtggcatccggtggtgcctgtcctcctgcgctcagcctggttctggtcagctggggaggaggggctcaagctccgaggcggcggtgctgcgcctgtacaccaggaactggatggagatctgggggtgccgccgttaaggccaagctgagcagagactgggttggacctgcccctgggggccttcgactcctgggagctgcctccctctcccctccctcccacccccacgctgcaggtgggaagggccagccataacctcccagccgctaccttagctgtgccctccactcagaacttctgcccggctcctcaagccctagccaagctccatctgtctccaagcctagcactgacttctccttcccgtgggcagcctcccttgaccctggcccaggatcttcgcttgctctcagctgtggcgtcctggaggcttccaggtggctgggccgttttggggcacaagagcctaaactttcacccctccctgcgcccggcagggacttaacaaatattaaaacaaaggccatgtttacttgctccgaaatgagacccaggtaacgctctttacagccattcagcaaacactttctgagccctcactgaaaacggggtcctgtggggagtgtttccagatacctcatcttacacaacatcctgacgagacagtggctgttaactgaggtgaagacacggcagcacagagaggttgactgtgtgccctgcgtcacacagctaggaagcaggggaggagccaggatttgaacccaggtttgtctgaccaagtcatgtgtctctccacactccagctctcgtctgcacagcctagaacattcctctcctgccttcgcctgact

SEQ ID NO: 1159 - DNA, 1253 bp, Artificial sequence
  DNA replication origin
ggtctcctaaagtgctgggatcgtaggcgtaagccaccacacctggcctcatcctccacccccacccccaggtgatgtctggtcaccctggcctgtcttcagcaagaatcctgttaggtgtgtttggccggaagacccctgacccctgaggtttcctctgagtcattttccacccactgcccccctctgctccttggctctaatccccacctgcccgtgctgctgcactcagagttgagcccaatctctctccccatccacaagaccccactgcagtggcccctgtacctaccttgatgatcctggataaaactttaccatgaaagaaaatgaaaagcaaaacatttgtttttccagccccttctgtgtgccaggcaccttgccaacatgaccccgggaggctgcagcacccgtgtgcccatggggaacagctcgctgggcccttctgtgtgccaggcaccttgccaacatgaccccgggaggctgcaacacccgtgtgcccatggggaacggctcgctgggtgcatcccctcatggctcacggctggagtgtgcctgcgttctccacgtggcactaggaactcagggggcaggggcttctctgctgtctgtatgccatggcacttgcactccataaagatactgcatcggccgggtgcggtggctcacgcctgtaatcccagcacattgggaggcgggagggtcacctgagatcgggagctcgagaccagcctgaccaacaaggagaaaccccgtctctactaaaaatacgttagctgggcatggtggcacatgcctgtaatgccagctactgaggaggctgaggcaggagaatcgcttgaacctgggaggcggaggttacagtgagccaagatcatgccattgcactccagcctgggcaacaagagtgaaactccgtctcaaaaaaaaagatgttgcatcagacccagggacctcaaacacatgggctggccaggttgtggagcccgctgattggccacggacagatggggggatggtctcggcagggactttgagatctgcttcagatcttccctggggcagtttggagggtagaaggcagactctgtggctctgtgcagccttggctgagttactgcaactgaacctcggctgcctcacatttgtactaggcacagtgggaaggcggcgggaggtgcgtgctgcggcgccagaacagtgtttgctggtgcttctgccctccaacggcagagggcggaaagggacaggga

SEQ ID NO: 1160 - DNA, 862 bp, Artificial sequence
  DNA replication origin
cgtggcctcagcctgaatctcctcttctctctgtgaacttaaatctggacctcctcttctccgcccatggcccccgtctggacctcactgccccctccccaccatgatccccttccctggacttttcgccactcctagcgtaacctgcgtcagccccgctcggtccccgccctgagcctctcatcagggtcctgccccctgcctggtgcacgacccagggtccccttccctgtacctggggcgcgccttctttgcagcctttggggagcgaggggagctctccatcagggatggggtggtcccggtgctgtgccttctcagttgccgcttctagggaggccgcctaggagccagcgagggaagggcgggcatcggtgtgcccagaaggcagcgcgctgctctgcgggcccttctcgaggctgccgccgtgggtgctgtgcgtgcgaagcattctgcagggcaggccggggtccacggcgcccgggcctgagtgggagccgaggggcgaggatgggtggcccacaggacaaggatgaacgcacaatcgcccttgtgaggccgtggccttggggggccaccaggccctggatccagcatatggcctggacacgatgcacccaagcaggcgcagcctccccttccctctgaactgtcagcttgcaagggttggaactgctgattatggaagtccctcggatcaggtgagcagaacgcctagggagagtgctggctccgctcgtggtgtttgttttggtaaagaaggcagatgctatccagacttttgaggaacctggggtttcacataggcccccacagatagacctgccctcctgccacttgacccttctgcaggacaggccca

SEQ ID NO: 1161 - DNA, 1057 bp, Artificial sequence
  DNA replication origin
gggacttccataatcagcagttccaacccttgcaagctgacagttcagagggaaggggaggctgcgcctgcttgggtgcatcgtgtccaggccatatgctggatccagggcctggtggccccccaaggccacggcctcacaagggcgattgtgcgttcatccttgtcctgtgggccacccatcctcgcccctcggctcccactcaggcccgggcgccgtggaccccggcctgccctgcagaatgcttcgcacgcacagcacccacggcggcagcctcgagaagggcccgcagagcagcgcgctgccttctgggcacaccgatgcccgcccttccctcgctggctcctaggcggcctccctagaagcggcaactgagaaggcacagcaccgggaccaccccatccctgatggagagctcccctcgctccccaaaggctgcaaagaaggcgcgccccaggtacagggaaggggaccctgggtcgtgcaccaggcagggggcaggaccctgatgagaggctcagggcggggaccgagcggggctgacgcaggttacgctaggagtggcgaaaagtccagggaaggggatcatggtggggagggggcagtgaggtccagacgggggccatgggcggagaagaggaggtccagatttaagttcacagagagaagaggagattcaggctgaggccacggagaagaggggaagcaaacctaggccgctgcagaaggggctgaccggggtccagcctgaggccatggagaaggcaaagggggagggacagagggaggcagcggcctagcctgggccatggcagggagaaacgacggcctagcctgggccggagagacgggggaaagcagacctagccctagaccgggggaggaagggggcccacgccagggtcaccgagggggtgcctggctggggacacggttcgggagggagggtctagcctgggctatgggagagaccagcctgaacacagaggtagtgagtgggactccagcttgcgccaagggcgggggctgggagcgggggcagggtcactgccaccca

SEQ ID NO: 1162 - DNA, 1235 bp, Artificial sequence
  DNA replication origin
gccccccacgccgccagctcgcggccaatgagcgcgcggggctgcggcgatcgccaagtatggagagcggcgcgagaggcgggcgccgacggggtgcgggggcggggcctgcgaggcggggcggggcgcggcgctgcgcggcgcggctgccgggagtccccggcacgggttgcgggccggggcggaaaggtctcctggctgtctgaggtccagtccccgactctgggcctgcagcagcgagtggcggcgagggaaccgcaccccacagtccccgcgggcggggatgcggaaggcaccgcggctgggaggggaccggccctccgcgccccaccccgtgcacgcgctcactcctgcggcgcacccggaactgccgccgagcgcggaccggcccggcccagcccaacccagcccaacccagcactgggggagcgcgccgggagcggggcaggagcccagcgctgccgctcgctacggcaggatctggagcgccgcgctgcacctgagcccgggcacgaattgaggagcctcgggctgacgccatttattcagcacctactatgtgccaggccttgtttaggcaccggaagataacagataagacataaagatccctgccggtatagctgcagacagaatatctgtgaggatgacacaggtagagattagaaaattaagttcaacaggtcggccgcggtggctcacgcctgtaatcccagcactttggaaggccgaggcgggccaaggtcaagagatcgagaccatcctggccaacatggtgaaaccccgtttctactaaaaatacaaaaattagctgggcgtggtggttcgctcctatagtcccagctactcgggaggctgaggcaggagaatcgtttgaacccgggggcagaggttgcagtgagccaagatcgcgccactgcaccccagcctggcgacagagcaagactctgtctcaaaagaaaaaaaattaagttcaacaaatgctagctgttatgagtactgttgaatgtgctacagagaaccattccattagcccagaagggcttcctcgctccacaaagtgactcaagtttctctctcccaatctctctctctctctctcaatcaaatatttgttaagcttagtctaggtagcaggagagatctggattgctaacaatatctgcctccgtggcctgtttgctttggttaaatcaaattaggcgatctgtgaggggatggtaaactgcacagat

SEQ ID NO: 1163 - DNA, 1761 bp, Artificial sequence
  DNA replication origin
aagtgatcctcctgccttggcctcccaaagtgctgggattacaagcatgagccactgcgcctggcacttttaaaacagagacaatacttacctcataggtttattgtgagagtggcaacagcttgcaatgggatgaggcacatggtaaggtgctcaatatgtgtgaactattataacggtcatagttaccattaagggaagacctatctgtgctacattaatgggggataataattactttattcgctgggcgtggtggttcatgcctataatcccaacactttgggaggctgaggcgggaggatcacttgaggccaggagttggagaccagcctgggcaacatggcaaaaccccatctctactaaaaatacaaaaactagctgggcgtggtggtgggcgtctgtaatcccagctactcgggaggctgagaattgctggaacctgggaggcagaggttgcagtgagccgagatcacgccattgcatttcagccagggcaacaagagcaaaattctgtctctaataataataataataacaacaacaacaacaacaacaacaacttcattcaaccaaatacattgtacatctcacctggcctgcccataagcaatggagacactgaaataaacacgattcctgccctcaaggtctaatggaggaaagagatgtacacagctattctagagggaaattgacatgaacagaagttctcatcctgtgctccaggatcacactggaggagggagatgctcccagagggtcttgggaaggctttccaatctggagctggaagaatgtttgcccaagagatgtacacagttattctagagggaaattgacatgaacagaagttctcatcctgtgctccaggatcacactggaggagggagatgctcccaaagggtcttgggaaggctttccaatctggagctggaagaatgtttgccagagatgaaaggaggggaagggaattccgggcagagggaagggcgcaggcaacagctaggaggcgcagatgcaggctgggtgtggagggtgcgagtaggctggagtacaccagggagttcccagcaggccactaggagccacccaggatgcccggcaacctcatgagtcagacaagcagggctgtgtctatctggaagtttccagccaagctaggtaaaacacatggacacaggtaactatgctgtaaagcaaaatccccaagtcctacaatcgtgtcccagtggtgtccctgggccaccactttccagaagcaaagttattttctcaccccgttgttaagcacacagaatagagaaggtacggccgcaatccacccaagtgcccactgattagataggaacccccgaggtgaggctggaagctggggccaggagctccactcttcccaggagtcagagaagtgagttcatttgctggctttttagttcctaataagtccctggggcttttcgggatgcttaagccaagggcgtggggccgagagcgacactaggataacactaggcaaggctgagcaacccaggctaccaacagcacggacttgaaccgggtcgcatgccggagcggacgggatgaggtgcaccgcagaactggggactcctggtgccgggacgcggcgggctggggcgccccactctcggggcaagtctgcaatgcccggtgcccacaaaaaggacacatccatctttgtcaccccgaggcctggcacggcctgacggcccaggctcggtaaaagtcgggcggagagag

SEQ ID NO: 1164 - DNA, 867 bp, Artificial sequence
  DNA replication origin
cagcctcgccttttctttggccccaactcaaggcaaaccacgcccaagcagccccagcatctgggggagtctagggaggccccattccgcagtaacaaagggtgaggggctccttgttgacaaattgcttccccgccagcgcccggtctttggcctccagccctgacctctgttttcctggggtgcccctagttacaggctggtggcgtccagcttggggagcgagggcctccgaaagcctggaagtgtggctttctcccttgatgcccgccaacctccggccacgccaaggcaggcggctgccccctttgccgccgcttgtaaacgatcagaatcgccccgccctgggagcgggccgggcaggtggcccgcagcagggcctgtcgtccagccggcctcgcgggggtggaattcttaagaaaactgagcccccggaaaggctggctctccctgccccagactcaattccagggagatgacccgggccaggcctcggggccggcgggaggcagggggagggtttgccgcacccggtctaggaaactattcgtgaaccccgctgggggaaggcgagcctccgacactgggggattgtctggatcggagggcgggggatcagggagaggcgcagacacagggcgagacccccacagagggcagcgcagagacagagagagggagagaaaagccagaggcagagacacaaacgcgggcagccgaacacggaggcaggcggggaacggaaagagacgggcagaccaggggaaagtgagcggcggaaacggagcgacggagagacagacacacggacgtggggaccgaagcagagggggccgcgggaggcggaaacgtccagagccgagaggc

SEQ ID NO: 1165 - DNA, 1609 bp, Artificial sequence
  DNA replication origin
ctctggcttttctctccctctctctgtctctgcgctgccctctgtgggggtctcgccctgtgtctgcgcctctccctgatcccccgccctccgatccagacaatcccccagtgtcggaggctcgccttcccccagcggggttcacgaatagtttcctagaccgggtgcggcaaaccctccccctgcctcccgccggccccgaggcctggcccgggtcatctccctggaattgagtctggggcagggagagccagcctttccgggggctcagttttcttaagaattccacccccgcgaggccggctggacgacaggccctgctgcgggccacctgcccggcccgctcccagggcggggcgattctgatcgtttacaagcggcggcaaagggggcagccgcctgccttggcgtggccggaggttggcgggcatcaagggagaaagccacacttccaggctttcggaggccctcgctccccaagctggacgccaccagcctgtaactaggggcaccccaggaaaacagaggtcagggctggaggccaaagaccgggcgctggcggggaagcaatttgtcaacaaggagcccctcaccctttgttactgcggaatggggcctccctagactcccccagatgctggggctgcttgggcgtggtttgccttgagttggggccaaagaaaaggcgaggctgcagcgtttcctcggtgacccctacccctctccacccacccctgcaagctggacctctctcccgggcctgtgttttggaggggtggacaggggagtaggtgttctgcatcggccagggatatcgcctcattattttaaagtgaaatttcaggctgagtttagctgcttccccccacccacaacctcaagggtcggaggctgccggagcgggcagggttgttggtgaggtctgcagtggaacttctgctgagcagatgtgcagcctggccctgcagcagctcattagcatggatttgttttggagactgtttttcgtttgcgggcaggagggtctgcggtaaggagggccgtggcctgggtttgggggctggcacagaggtggtcagggctggaagatgcaggcaggcctgggtggcacggggtcggccctgtgtgtccgccctctggacagttgactcatgctctccccagtgctgaaggaaggaaggaaaagccaccctgccgtgagactggggtcgtggaatcacagcggccttaagcagtatgctggagccaggctcctccctgggggatctgctgaaatggacgttcccaggccaggctgcccattttacagatgcaaacgtgaagctgaggggggaagcaaatggtcagtggctcgagctataaccattagactctcctgactccaggcacacagaaagccaatgtatgagctttggccagaactcatcctcaaaccccagagtgagcccaggaaacccggttgggctgaccagagccggggcctgacctgggtgagcagggagccccaagcctgacactgccttgccccttcacagagcaacaatttcagttgcaccattcaaggaagtccctgtgctcatttcaagacctggagcgatcgccccgccct

SEQ ID NO: 1166 - DNA, 864 bp, Artificial sequence
  DNA replication origin
agaccagcctggtcaacaaagggagaccttgtctcttcaaaaaatacaaaaaaattagctgggcatggtggtgtatgcctgtaccaccagctattctggaggctgaggtgggaggatcacttgagccccagagtttgaggctgatgtgagctatgattgtgccaccgcgctccagcctgggtaacagagtgagatcctgttacaaataaaaacataaagataaaaagagaaagattagaatggctgagctaagatttgaaccccagtctgtcataattgtggagaatggaggaggagagccagaccctgcccttagtgagtgtggggggagaggaaaggtgggagaggcaggggagggggagcatctggtttgaaagccaccagccacaaacgctgcgtgctcgttgtgcatgcggactgtggtgtcacctgaatgctgagcccacaggtagaatcgtccgtctccatcagctggggccaagtgtggggaggttccccgaggaggttctggaagcaggaggtgaagatggggagggagagccctgccctttccaccgaggatttgtcagccctgccctccacggctctgcaccgagtggttgctggaaccggtaacaggaaaggcctggtgtgtgtgtgtgtgcgtgtgtgtgtgtgtgtgcgtgtgcgcgcgtgtgtgtgcgtgcttgtgcggatgtacattttcttgtgcatatataggcatgcttatatatgcgtctgtgtgttctgcgttcatagggggcacaggtggtttggggtatgcctgcttttgtgtgtgtgtgggtctggggtgagtggatacactctaccttgaaaatcctggtatatctggccttgagtgac

SEQ ID NO: 1167 - DNA, 643 bp, Artificial sequence
  DNA replication origin
ttcacacctgcagtcttccacctgcatccgggtgattttgacagatctgtttcccccactagactctgatttccttgaaggaaatgtgtctttgtgtccccagagctggcacagggtaggcgctctgtggaagggaggaaggaagagaggaagggagggagaaggaaaaaaggtacttagatgggtgatgataggggcagagtaggaggtagatggggttcctgcagggtgagcctcagctgggctgggctttggggtggggctcttttgaggaagtgaagtctgagctcagacccaaaggcgcagtttagggcatgtggtagtcggcggggataggggggtgggtggggggaaccttccaggcaaagggaacagcatgtgcggagtccctgaggcagagcccaagcacaggattggtaagagtggtgcagggtcaggggtaggggggccagccagctggtggcacctgaaggtcctgggtggccttagtgaggggtcagggtttgtctccaagtgcagggggatcgcggcggtgggggcgattttagcaggggcaggccacactggtggctgctggtggggaatgggtgggaaggtggcaggactggatgtgaggagacagctctggtggcttgtgcagggg

SEQ ID NO: 1168 - DNA, 1204 bp, Artificial sequence
  DNA replication origin
cctgggaaaggcaggtctcagctggcgcggaggcaccgggatccggcgcacacggcctgtgcggcgcgggggttcgccggggccgccaggccccgcgggaagaggagggcagcggccgcgcggcgccccctccccacccggcagcagggtcgcctccgtctcccgcccgcactggtacctggggcgctctggctgctccgccgcctgcgactgcggcaagcgccgcggggctgcgagaggaagaggcggccgcgggccgggcgggcggcgggaccgggtctcccgagcccgggaggcgccgcgaggggcccgcacgcgcggaggagaggccgggtgcagcctggagcgcgcggtccccgcgccgcggagcgtgcgccccgcctcgcggtgggcggggagagccgagccctggccctgcaggagggcggggtcccggcaccccgggcctgtgggccgaagatcagagcgccccagctgcgaggggtcacctcccgggctgtggcagcccccacaccctcagatgcccctcccaacccacacgtggcggcggcgcaggcggaactgggagcagggggctgtgacctgcccttatccaggggctgctctctaatgggtgcctgcccactcacaacggggtcaccgggctttcaggggagccaggagttgggaaatattggacaaatcgcctgacacccctctgggcctcagttgccatatctgtaaaatgggttagtaattctgggcattcttcaccgttagtttgagcaagaagctaaccttccccagggcctttcccgcagaaaccatcccgatccccaaaggggccaggtactaaggatgaagtccctgagctgttggcgctcctagtctaacagagcgtgaacagatttgagaatccccaggccaggtgtgttaagagtcgctgcaggcagaggcgtggggtgtggtttcccctgggtgtgacctccctctgtacgtctcccctctggctgagaagagtctctgcctaacactgctgtgcaggttaatactgttattcattcattcattgaacagatacttcaatgcatcttttaaggcgcatccactagatgtcaggcactgttctgacccatcaggacactacagtggccaaaacaaagatccgcacctccatggagcttacattctagtggaagaaacagacaataaacaataagcataa

SEQ ID NO: 1169 - DNA, 1006 bp, Artificial sequence
  DNA replication origin
ggggcaggaaggaggcgagagcggcgaggctccaggcgcccaggactagggccagggcacgcaggggcgtcatgcgcagcttgtagcgcagcggcgagaggatgagcaggtagcggtccaggctgatgaggcagaggttgaggatggaggcgctgcagcacatcacgtcgaaggcggtccagagcaggcagaggccgcgcgccagcacccagcgcccgtacagcgcgttcagcatggccggcggcatcaccaccagccccaccatcaggtcagacgtgaagagcgacaccaggaagaagttggacgtgttgcgcagcgcgggctgagtgcagatgagcgcgatcagcagcgagttggccgccgccgtcagcgcgatgaccacgcacagcgcggccgccacccagccgctgccccccggggccgacggcggccctgccccccaggccggggtgctattggcggttgggcccggctctgggaccatgaggaccgagggtggacggcaagggagtgatagggtggcgggaaagcagatgagggccccggcgaagcgcaggctggacggggaccgtccgtgagaacagaccgcgactcaccacgccccccgggggaggtgagtggggggacatgggcgggggcgctgggtcgcgctaggtcagggggcagcgactacaggaggacacagtgtggctatttgggcgccctcggggatggggcaggaactcctggagcaaacgggttggaagtttggggaggggcacccgatgagccgaggcccctgaaggaagcggcgggaagtcaagcagaggtcggatgggctccctggggtgggagcagagccccctggagggggcgggcggcaagataggggaggggcgtccggccgggtcagagtgcggggaagtgggaacgcggggaggtgggtgaggggggtgaatgggcgctctcgggccggagcaggctccccgcggccggtgggcgtgtggggtaccagggcgggggccta

SEQ ID NO: 1170 - DNA, 858 bp, Artificial sequence
  DNA replication origin
tggagacctgaagaaagggcactccaagcagaaggaaccgcaagtgaggcagaatgggcttggtgtgttcaaggaacagcaaggaggccagtatggctgaaagagaagaaacaagcaggattatagaaggagaggaggccagatagggtcagagggccaggtgatgtgagacacaaggctgccagagcagaggaatgatgcagcaggaactgcattgtaaaggggatcattggggccactgcggaaggttgaaagggaggaagagcggaatcaggaagtcagggccaggcgcagtggctcacgcctgtaatcccagcactttgggaggccgaggctagcagatcacgtaaggtcaggagttcgagaccagcctggccaacatggtgaaaccctgtctctactaaaaatacaaaaattagctgggcgtggcagcacgtgcctgtaagcagcccaggtaggaagtcatcagcgtgtgggtggtattttcagttacgagacaagatgaggtcactaacggggcaaatgtggaaaaaggacgagatgctccgaggactgaggactagggatgccatggctcaggcggatcaggaggacccaacagagaagaccagaaggcacagagaagaaaaggggcaaggtgtggggtccccgagcaaagcatttcaagagcatcactgcccacaggcagcacaccagcacagggcgatggcaccagccagatccgagcttaaacctcacttaccaactgtgcaatcttgggcaagtcacctctcgctctgagcctcagtttccccacctgtctaacaggggtgctggtagtacttgactcattgggtgtttggggaattaataagttta

SEQ ID NO: 1171 - DNA, 1005 bp, Artificial sequence
  DNA replication origin
ctgtgcacacattctcaaaaaagcctttctattttgtggggctcaagagtaattgcccaggcaagactattgctcccaaatgtgaagacaatccacatacaaagcaattgccaagctctggacagtaacaggtcctctttttcaagtactgttcaattgcaattgattttgtgtgtgtctgtgtgtgtgacagagtctcgctctgtcacccaggcttggagtgcagtgatgtgagcttggcacactgcaacctccacctcctgggttcaagcaattctcctgcctcagtctcctgagtagctgggattacaggtgcctgccaccacgcctggctaatttttgtatttttagtagaggcaaggtttcaccctgttggccaggctggtctcaaactcctgacctcaagtgatctgcctgcctcggcctcccaaagtgctgggattacaggcgtgagccactgtgcccagtcaattgcaattgatttctgtagcgctaaaggctttggaaggtgctgggctcattgtaatgtgtgtgttggcctgtgtcacgtattgtctttgcagggatggttgttcttctgaaccatctgatttgtgtttcaggtattgctctgtctcactgcacttcctagagctccttatgaaattctgggtcagggtcagggctcagtgtgggaccaggatcagagctcagtctaggtccacagttgaggcttggtttgagaacttggttatgtagggctttatggtaggtgtcagggttcagtggggggccaaggtcagggcttggtttattgctgatgtcagggcttggcctggagtcagggtcagggctcagtctaggactctagttgggactcagtcaaggaacagggcccagtttaatcctggcactagggctcagtctagaattaggattgaagctcagtctgtggctaggatcagggtcagacgggggccctttctcaacggactcatgtggccttcctttccgcaggtgcccagg

SEQ ID NO: 1172 - DNA, 1251 bp, Artificial sequence
  DNA replication origin
aaattcaaacttcttgccacagctcacatgcccctgtgtggtctggctccacccacattcctgccttctgcctccctgctgcagccatcctgtgctcttttggttctttcaaaccgctgggcctttgcacctgctgtccctttgcttggaatacactttctgctcctggtttatcgggctaactcccagctagcccttagcctaatgtcacttccttcagaaccttccccagaaacaccctgtgcttcccctattgtgccatccataaagctcccatttagttactcggtctgtcttctatcttgggctgtatgttctgtgggagtagaggccatggctgtgctgctcaccactgaattcctaagacctggttcagtatatgacacatggtaagtacagcactttataaataccgctacatggacagagaggtggatgggtggatggatgaacagatgggtgggcagatgggtgggtgaatggacagacaggtgggtgggtggatgggtggataggtagaagggtggatggatgaatggatgggtgggtgcatggatagataggtagaagtgtggatggatgcatgggttcatgggtgggtagacaggtgagtgggtggacaggtagacaggtagaagagtagatggatggatggatagatagaagggtggttaagtgggtgggtagatggatgaacaggtgggtggatggatgggtaaacaggtaaaagggtgggtgggtgggtaggtggatgggtggatggacaggtgggtaggtggatagatggatggcgagatgatgggcaggtggacagatgtgagatgaagttgcctcacctctctgagcctcagtttcttcctctgcgaaatggggctccctatacctgctccctagtgcaggtaaaaacctagcccagggtctggcccaggccaccactgcccacccccctccacttctggtcctcctggtcctcacggtatttgccagaagcgagccaccccgtgacggcgatggtgatgtgcagctgcctgccctccgtcagaggcagaaacgtgaactcttcaatggctcccactcgcttcttcatcttgtatcctaaagacccagatccgagaaagagaatggaggtgactggggccccggggaacatcagggtggctgtatgttctcacacatgcacacagtgagcaccatctgtgtgccctgcccctggaaaaacacattttgtgtttgaactcattaaggtaggtg

SEQ ID NO: 1173 - DNA, 1090 bp, Artificial sequence
  DNA replication origin
gtcgcgatgggtggtggaggtggggcagaggtgggacgagccaggtcgggacccgcagctggcgagtcagagcctggaaggccccgcgcccccgcgccgcgctccctaagtgctccgcccggccggtggcgaccaggcgcgctcggggcaggcggcgggacgggccgggaccggggccgggacgcggcggggaggggaggggccgggccgggccgggcgggaggagccgctcgccggttttgccgcctccgcctttgccttcgcagccgcctccaggtaagggggccccggaggagccgccaggccacggtggcgcgcacctcgctgggccactccccgccggccccacgcggggcactcggagcccggcccagccccggggccctttgccctgcgccccgccctccaccccggggacactggacccaccaggaagcggccgcgcgctccctggcgctgcctgccctaagcccaggccgcctgctggtggttggtttgttttcagagccggaagtgcttttagaaatcttggggaggcagagggggaaactgaggctgggcggagcactcgggcgactccggcctcggcctccgagttcttagaggtcacccagccgctcccttgacaaatgaggacgctggtcaaggtcagagaggaagggggcttgcccaaggtcacaagaggtccctgtgcttccccttgccccacgtggcccctccacgcccccgtcaggaaggcctctaggactcccccgcctcctgtctccctgtccccccgcagactctcaaacagagaattccaggagggcttggggagcctctggagaaaaaccaggctcctcatgttacaaggaggccatgtcttctggtgcccatgcctgaagttacaggagggaagaattactgctgctgacttttgagtggattttacagctgggtaaactgaggctcagagaggtgaggtaacttccccaagaccacacagctaggaagcaagagataaaaacctgggctacctgcctggagagcctgacccagtgcttcgcacagagttggcctccacaatgcctttgccctgaccaggctgcct

SEQ ID NO: 1174 - DNA, 1035 bp, Artificial sequence
  DNA replication origin
cgcggccgcttcctggtgggtccagtgtccccggggtggagggcggggcgcagggcaaagggccccggggctgggccgggctccgagtgccccgcgtggggccggcggggagtggcccagcgaggtgcgcgccaccgtggcctggcggctcctccggggcccccttacctggaggcggctgcgaaggcaaaggcggaggcggcaaaaccggcgagcggctcctcccgcccggcccggcccggcccctcccctccccgccgcgtcccggccccggtcccggcccgtcccgccgcctgccccgagcgcgcctggtcgccaccggccgggcggagcacttagggagcgcggcgcgggggcgcggggccttccaggctctgactcgccagctgcgggtcccgacctggctcgtcccacctctgccccacctccaccacccatcgcgacaggggtgccggcctctgcaggtgaccggcaagcccgcggcgccacatctgtgtgtgggtccatttaccctccaggaagcagcgagacagcgcggcgcgggagaagggccctgcagggttggactttgcagaaactgcccgcgaaggactcggccccgagagtggcatgccccaaagccacattttgaagacaaagtcttcaaaaatgtataatgtaaacaaagaaccagccgcagaaaccgccttcccgcacgtgtatgcagcactttgtagtttgcaaagtgttcagatatctaagttcttcctgattctactttcattttccctaacgctaagtttggtcctgtctcagggcctctgcctggaggctcccgtgcctgggactctctgccttcagacctccctttcccccaatccatttcctgctttccattctggtctcttgggatgggatctgagagtcttccctgagcacccagcacattcagtcattgaacaaatttaccgagcacctactacgcgccaggtacagttctttttttttttttttttttttttttgagataagagtctcgctctgtcacccaggctg

SEQ ID NO: 1175 - DNA, 1291 bp, Artificial sequence
  DNA replication origin
ccgcgctgttttaccttcccaacgcttgaggcggacgctggggggtcctgcgcctttccctcctgccgctggggactgcaggctaaggccatgtcccgaaagcaggcggcgaagagccggccgggcagcggcagccggaaagccgaggccgagcgcaagcgggacgagcgggcggcgcgccgggccctggccaaggagcggcggaatcggccggagtctggcggcggcggcggctgcgaggaggagttcgtcagcttcgccaaccagctgcaggccctggggctgaagctgcgggaggtgccgggggacgggtgaggcgggccgggagcgagggaggcggcgccgggggacgcgccgggctcggcctggcgaccgttgcccgctcgcgtccatccatccattcattcgggcggcccgggcgcctcccgcgagccagccacgctccgagtgcagggcgtccagctgcgagtgaggcggacaagcccctcgccccgagacgctcgcggggatcccaaagggtcctaatcatggcagacgccgcgagcgaaatagaaagtgggtgctgagaccgtatatgggagcagggccactggattgtggccaggaagggctctctcaaaggtgacatttaagctgagttctgaaggaatgagatggagccaggcattggaaaaacagttatcatgacgataagaccagttgaaggagtttgagtaagccccacttggtagaacgctttgcctcctttgagtccttggtttttgggtggtgcccccatttacatttgtgaaattaggtcgcctgtttactgagctgaaggcagcttctctaattcttccttccatgggcctcagtttctctgtaagcaaaggtgcttccccaagctttcttgggacttagactggatccaggtccagctttctttagggaacgcggagggggagagtggggaggaggaagaaaattagcttcaagaaaggggatatggctccaggaacatggatggaagaaggaaaagggtcaggaagaggggagaacagttaggatccccattgcaggggcaggtaaaaaggggtctggttgtcagctgtgtcactttggaagagagagtgttaataacagcctggcttttgtttttttcctccccgtatttgagtgctcagatcctgcagagggaagactaaaatgaaattaaagaccataaggaattgccttagttcattattattgttattttgtagagacggtgattttgctgtgttgcccaggctggtctcgaactcctggcttc

SEQ ID NO: 1176 - DNA, 1169 bp, Artificial sequence
  DNA replication origin
taggcatgtgtggcttagggattttgaagttcttgtgtgctggaggtatggctgggttttttctcacagcagaggcaagtaattgtaactcagaaatgcattactgtctagctgcctcctctctattattgtacaccttgaaggcaaggatgattaattcctgttgtggggggggtttgaggtctggattctaatttttgaagttgtatttaatgtctggagcagattaggtaataaaatgcatgttgagaataagacagccttctggtccctctgggtccaaggctgtaaagcgtctaagggttgttgccaaacaagccatggactgggttgggtttttatatttgatgaaaaagagcctaaatgctaactgatttgggagaggttggataaagaaaaaggagcattaaccttgactatgcctttagctccagccacctctttaagaggaaattgttgggcaggtgggggagggctagtcacggaatgaaactgtaagccagactgggtgtgaggaggggaggtgatagaaggattataggatggaggagcggaggctgaggaagaattggagcctgattcagcctggcagggtgcgatctgaggtggagcagtctagggaggaggggagaggtcagatgggtcggtagaaaaggaagatagaaaagacttagcagcgtttggggttgggactgaggggacagaggggagggaaaggaggatttgggatgggtcacattgggaacagagactagggtgggactgatgtgtaaaagaatgcctggatatcaggcatctcagaccatgtgcccattttacgacaagaattatctagatcttgtaggatggagaaattgaaagtgccattttctggttatttggaaccattgttgagtttgtattggggtcaagcagtattgcagaagaaaataaggcatttaggttttaggtcaggtgtgagttgaagaggttttaagtgcttgagaacacaggataagggagaaacaggaggaatggagggtggaaagttgcccatagtgaaggaggcaagccagagaaaagagagggtagagacacggagagaagtggttggtggtggtacttgcccccctggggaggtggtgcttgctaccaaggtgaaagatcaaggcaagcatccctgcggtgat

SEQ ID NO: 1177 - DNA, 1073 bp, Artificial sequence
  DNA replication origin
agcctcagagcaggctcctgggcactgacagagccacacacccaggtacaccccccaggctaatatggggacacacaaaaatatggccttcaacacctacaagtcttctctgtgtcccccatcgacccatgcacatcaccccaaccctgctctgccacaccacgtgggtctgaggagcactcctaccccccggctccgggtccctgacagacactgccctcctggcctgcacctggaatggcagccagaacactggagggggacccacaccctctctccctgggctgtggatgggtgttgcaagtcccatccctcctggcctgcacctggaacagcagccagaacaccggagggggacccacaccctctctccctgggctgtgggcaggcgtcacaagtcccattggtggggaagaggctgagggctgagacccacctcagtgaagagggaaacgtaagcagggagagcatcaaggcgggaggcagcctggaaacttctagaagagggtcaaggtaggaggctacatggaagcttctagaaggcagtaaggaacagggtggtgaaggagaggggagaagatgggagcatggagagacgaggtgagtgacagccaccagcagggacgggcctccaggcaacacagaggagctgggggccagggccttacggggctgggttcctgtgtggggcgtggagctggggctgaagtggaggggacggccctgcggcccccagcactgttgtttctccaggtgcaccttaccttcctccttacctgcccgagcctcaactcagggtcagcagcctccacggagccagccccacctgcccgaaaaccactgaagccaccctccgcccggactcaacagccgccagcaagctcgcctggcagtgcccctggagcaccattgtcgctggggagggagagccgggaagggtggagaaggaggcagaagggacatgtatgaaaaaaggacaggaaacctgaccagaggcggtttccagagccccagccttggagacaaggacactgccacccagcgccacagtcagtctgggaggggcccacgcc

SEQ ID NO: 1178 - DNA, 1223 bp, Artificial sequence
  DNA replication origin
aagtttgcaggtctgatggcagaaggctgaggaagtttccatatgatggcttctattttctctctgaagagggcagtaaaggtatcttctaagagggaggagggagggaggtgggagagggagaggtgggaggtttcgcaagcaaaacaacgttttgaaatagccattgagaagaaaggagaggctgggcgaggtggctcatgtctgtaatctcagcactttgggaggctgaggcgggaggatcacttgagcccaagacttcaagaccaccctcagcaacatggcagaaccccattctacaaaaaataataaaaattagccaagcatggtggtgcacgcctgtagtcccagctacaagggaggctgagctggggaggtccaggctgcagtgagctgtgattgcaccactgcactccagcctgggtgaaggggcgagaccctgtctccccttaaaaaaggaagaaaaagaagaaaggagggagagagaacccagtggtcggttggggatggaagtgcagggctgagagtctaactgaggttagagacctcgtgtttctgttacaccaaggtgtgtggctggccaagacttcttcaatacccgtgtgtaggtggactggtttggcttcaggtttcatcagatggaaggagagtaggactcgggcagggaggatccttttgagaatgccgaggtaatgggccaggatagggaagaagcagattgatatcgagggggaaagcggagacagcaatggacaggaaacccaaagatggtgaaaaacagatacagcggaagtgactcaagtggctggaagtggaagagattgtggctggggacatcaaaggaggtgcagatgctgttgataaggttcccagtgtggccccggagtgggaggctgatgtgaaaagaggtcagggaactggcgctgaaagggctgtactgaggatgggggccctgctccccgcaactcagataccctagaagcatccactcagagtttagggttccgagaatccatcagtcccacagcctcattttaaaaccagggacactgagagggtcagggcctgacccaaggtgagaaacggattttgagactagtggtgctgctccccgctcctccatgccccggccagggctctccctctcccagacactctcccccagagagaaacagaggcggtgacgctaggaagaggaggagagaaggaggccgcgggtccct

SEQ ID NO: 1179 - DNA, 817 bp, Artificial sequence
  DNA replication origin
gggtccctgtcgcctccaggccaggcaatccactccaggctcgcaatccaccgacctggagttcacggcctccgccctcctggcccagcggcccccacccgaccccacccgaccccacccgacccaggccggttccggtcacgccggaagcacgtggccccccaccctgcggcgttgcccgggagaccagggttgtttaccagcaggacagagcccgggcgcaggcggcggatggagcggaacggctaggtgagagcggctgcccgatcccgcggcctgcccttggcctccgccaggcctggaaggggccgggggaggccagtccccgagaccccagcacatcacccgggagggcctccccagacccagcccgggggacgcaaaccccgggagacaggcgaggagcctggagaaaagtctgctcccgaggcaaagcaagcctggccagagctcacctttaccaaaatagggtgactcccgggctctgcagaaaccgagggacctatgcaaccgctgggccatgccctccaggctgggatgtagcgacggggacacagacccagggagagaaaaggatgtcccagtctccggcagggcagagacgagaaccagagggcccctcccccagtcctgtgctctttctctgaagtcaattctcgctttctaaacgctctttctcgcccctcccccagatccctcctctgcctcttaagcctgttgccttctagggcgctggaacttggacttaattgagttatccccaccacctccctgcccttctgacgctggaatcatccccagttctctatccaaacat

SEQ ID NO: 1180 - DNA, 1288 bp, Artificial sequence
  DNA replication origin
atgaaattgctttctaggtttcatcatcacacagtgtgtgaaggttatgttggaatcagtaggacacaaggccctggtgacaggaaccagaccacggactgagggaaagaggagaatgggaagggagagaggtggggatctgagggcagcattcgcttaccggtgccaggaagagctatagaagtggtttaaaaaaatactttaaagaatacaaatggagcacctgtcgtgtgctaggcaccatgctgagcacgggttagagagcagtgaagaacatggctctttgaaagacagacaacaaactaatgattgtagataaataagagcatgcgcagtgctgcagagcataaatcgtgagcactggaggcctgacctatacggacgcagcagacttccccgaggagtgtagcgcaagctgagaagtgaaggtcaagtaagagatggctgggcacggggcggggttggtggggggaggcggggggtgcagagtggagtccccgccagcaggagtagcacaggggcctgcacagggaagggaggcagggaagcggggagcaggtattgtgctaggaactcggcaaagtctcacatgctggaggatttcatgagttggggctggagagatgcccagtcatttgtagccctttaagcctcttgaaggattttgggctgtaaaggaatgggaagccattaaaaggttttcaggaggggattcttaggatcagatttgtgttcttgaaatatcccagcagctgtgtggagaacagattagggggagtccagatgggaggtgagggatcatggagatttttgtagttgtccaagtgaaagtggcctgaactagggtgctgatggtggggatggggagaggcaggcagatctgagagagtgttagaggacagaatgaccaagaactggtggttaattggatgttgggagtgaggaagaggaagtagttaagagtgattgctaaagatctgggttgagcaactgggttatggtgggaccatttgcggagagtcgcagtggtggggagagagtacaactggggctgcagatggggcagttatgagttcaagtcttggctgtatttagtttgaggcatcaggtggtgatgtcatggagggcagtggtgtgggtgcatctgggacctagaggagctggagaggtgggcatccttgccaaacaggtgaactgtaaatctggagctccataagatacccctgcgggagagggtagcctgagaagaagctcaaatgcaggccagagccctgaagaatcccagcgt

SEQ ID NO: 1181 - DNA, 1079 bp, Artificial sequence
  DNA replication origin
ggatggatggatggatggatggataaatgggtggatgaatgggtgggtggatggatggatggatggatggatggatggatggatagatcaatgggtgggtgggtgtatggaagggtggatggatggatgaataaatggatagatgaatgggtgggtgaatggatgggtggatgggtgtgtgggtggatggatggatggatggatggatggatggatggatgaatggatggatagatcaatgggtggttgggtgtatggatgggtgtatggatggatggatggatggatggatggatggataaatggatagatgaatgggtgtgtgggtgggtgaatgcattggtggatgggtgtgtgggtggatggatggataaatggatagattaatggatggatgcatggatgggtgaatggatggatggatgggtggattggatggataggtggatgggtgcatgggtggatgggtgaatggatggatggatgggtgggtggatgagtgaagtacaatgactgaagtaagaattgcctcctttccatagggaaatccaaaagcatgggaagaccctgggccgagggagcagaggctgaaactctgggaaaagctgtgaggaccacaaaagtggttgggcccctaatggcctcaagacccggggcaagtcatttcttgtacccatacaaggcgtacttcatagaggcgggttggtgggctcgggtctcagtgcagccttttgcattgtagatgagggcttgggcctccatttcctctccatggcaggggcataattatgacaactcccttgtgagattcttgtaaagtctttattgagataatgctagctaagcagttcacagagtctgatgtttatgcatactcatgatatagtcagaatatattcatgttatttataacacacaaacatttataacacataaactattaatataattgtccaaggcagaggaatctctagagagggcagctacagagagagggagaagtttgcctttatttagtcacattgttttctgatttcttccctccccaggtacaacaaaccccacaggaggcccaatga

SEQ ID NO: 1182 - DNA, 979 bp, Artificial sequence
  DNA replication origin
ggggcctggaaggggaagaggtgggcgggtcatagggagagtaggcggggaattgggcggggctgtgaggagggggtggggtaggacccgggaagcaggtgggcggaccacgcggggctgagaggatcaccgggggcgggtggggaagggggagcggctgtggagcggggctgtcctccggaggccgtccgcgggaggggcgcagttccgtggcgctcaccctgctcgatctcgccctcgcgctccgccagctgctcgaagtcgcggatgatggcgcgggccgccaggtggtggaaggtctcgctccataggtcggcatcctgcgcgccgccccgctccggtccaggggtccccagctcgaagctcacctcccactgcaggcgttggctgtcgtgcaggcctttgaccagggccttgcccagcaccggggccggggtggcgggcctgctgggactggctcgctcctgggactcggctggggggtcccagtccgaggacgtctctgtctcgaaggcagagggatggtgggacggctctgcgggcagagggacaagtgggccaagcgctgacctgggggacagacggccaactcccaggggacatcattcctccccagggagcagacacttctaagcaagtacaacccactccatctccccagggaacaggcaactccaactgctttcctaggacagctgcgggggcatgggcttgtccccaagggaggacagatccgcctcccaggaagccagtgcctgagggggccagatagtatggggtgggacaggggcacagagaatggagctgcagcctcagaggccacccaagaaccagggtgactgggaagcgtgggattggtgaggtcctcagagaggggtgagccgcagcagaccacaaggggacagacccaggcatctgccctctgggcctgtcatctgaagttgaacaacagccagtgattcctccctgtccccagttg

SEQ ID NO: 1183 - DNA, 2317 bp, Artificial sequence
  DNA replication origin
ggcaggtaccggctcttgctcacgtccacaggcacgaaggctgtgtatttgctaatgatgttgcaggccttgctggtgtgcaaggcgctcacttggtagcggcggttggaccctgtggagggagaaactggggtcactgtttggactcagaaagtcttccctgacacacaagctttggaagctaaaaagggggctctacctaagtggtccccatctttgggattaaagaagcctttaaaatcaagggcttgccaacttgctaactaaagacattttttaaaacaacaccatcatttcacgtcatcatttcacaaaataaaggatattttaatgtaaaaatgtaagacattgtctcagaataaaagacagctacttcctttaaataactgtagttttatttttaaaaacacccaacccactatgttgtctgtattttgtactttaattttgcagatgtctaatgggaacgttgccgtaaaacttcacaggtgccctggctggtgggtggggaccacttatctgacccatttaactgctgaggacattgcaaatcagaggagagtggtgagctgagggtcacacagcaagttaggaacggatctgagatcacgactcaggatggtctgaccccagagcccaatccctttcctttgaacaggtgagcagtctccgtggcttgcagcctgcagaaggctgtatgaggagccaaggagagagagggtagaaaagtgcttcgtgaactgtaaggtgaggagctcatgggaagaaaaaaagtaacacgtacaatacaaaaatacaagtaaaatataaacaaaataatattattacagaaataaagcaaaacccacgacaaagaaatgatataaccgttctctatttatatttatattctccaagtgtgttccatcaagatcccaccagtcactttctcagtaaagtctgccccaattcctggactaaattagctcccccaccgtccctgttatacaatctcttggatccctgtcttttttcttaatagcacttaggacaaatgcactcaattaattatttgtgtaatgatttgattaatgctggcttccctgctagtttgtcaagcactcatgggtaaggaagggatggagattgctttttcactgggctgttcagctggtttaccgggcccagtgggagcctggcccccagcagatccacagtaaataatggcgtgatgaatgagtgcgtggagcccttggactgggggacttggaggaaggtgtgggctgtcaccattgttctgtctctggagagacaggggccgctgcaggggagaagcactgggaaatggggcgcccataagagagagaaatgaggcaggagagaagaggacgggtcactgaatgggggtggaagagcccagggctgggggagaggaccacttactcggaggcagggggaagagggtggatcttggcgggaatggaatggagccctgggctatgcgtgtgttggtgggtggacgggtgtgaggggaagggcgattgggaatgaggggaggcacctgaaggctgtggtgtgaggtggagtgggggagcagtgagccgtggcggggctgtggggagatgaagggggctgaagccagagatgaagggctgatcctggagtgggggtagggaatgagcccaggcactgagcagaatggggagggggcggagcctggaggccggagaggcgagtgggcgggcagtgggcggggctgtgcggagggggcgggtcctggaggccgacgggagagggggggcgggtcctgggggaagtggacaggcacagggtgggggctgggtcagggaaggaggtgggctgaccatggaggtggggacgggctatggcggggagtggcggggtgggcgggccatggaggggtggggtgtgcggggcactaggcacagttgtaatgaggggatggggcgagagtggggcctggaaggggaagaggtgggcgggtcatagggagagtaggcggggaattgggcggggctgtgaggagggggtggggtaggacccgggaagcaggtgggcggaccacgcggggctgagaggatcaccgggggcgggtggggaagggggagcggctgtggagcggggctgtcctccggaggccgtccgcgggaggggcgcagttccgtggcgctcaccctgctcgatctcgccctcgcgctccgccagctgctcgaagtcgcggatgatggcgcgggccgccaggtggtggaaggtctcgctccataggtcggcatcctgcgcgccgccccgctccggtccaggggtccccagctcgaag

SEQ ID NO: 1184 - DNA, 1602 bp, Artificial sequence
  DNA replication origin
ggtcgcggcgcggcgtccgcggggcgtgcgcggtcggggcgcggagggtgctgggagcgcacttgggatgctgggacgcggggaactcggagtgggggtcgcggagcggcagcgcgagaggcagaacctggggtgcatttgctgacttggcgtggggcgggagaccccgagcgcgaggggcggtgctgggagcccaggcggggtcttggcgacaagttggggaccttgggaccaagggaagatgcggggagcccaggcgggatcttcgccaaagttggggacctcgggacctaaggctggtgcgggaagcgtgggcagggtcttggcagaaggtggaggaccaggaatgcgaggcccgtcgggagtggggaccgacgggcggcgcttgggtctagtgcgggctcgtgttgccgccggctgactgaccgacggccgcggggcccgaggagggggccgtcgcctctcccaaccccacccgcgtaggcggcggcctcgcctcgcctggatcttccgacgtcagcagccgcagccagagccggagggagcggtttaattggcaggattgtgggttaaggacagctgcggctttgcggggtttggaggagcgcgcgcgcaggggttggggagggtgctcgttggaggaaggaggggtgaggggagggggaaaacagactgagagaccctggaggagcgtggagagatgggacaaagccaggggtgggcgacctattgggacagagaagcagatgaagagggacataaaatatagcccagcaaagccagaagccagctgtaggctggaaagacccagaagggagcgggatcctgccacgctggcttctgcctcctgcctggtggaggccctcacccctcacccctgttgccgggaccacccatgccccatgcattagcactgccccactctaggcagccgttgtgattaggagagcggctaacttgagaacactgattcgtttaattttattactggtactgtgggtactgtctgccaactcctaggccttgctggtgtcatcctgaaagttctctgggctgggaatcacagcttaataaaatccagggaactgtgccctgcccctcccatcccacacaataaagtcggattcaaagccagctgtgcagggacctcctgggaccctctgctgagccacactgggccaagcacatttctttgtgtgaacgtaagtgaggtagtatggggattttccggatgggcaaacgaaggcactgagaggtaaagtcacttgcccagctagtgagaggcagatgatggctggccagggaggtcagcccagaagctcatgcatgtttcgctacccgaggccaaacctctgattgatggtggttgtaatttcttcctgtccctaagcctggagggatgttgtcctggtggctgtggggccttctgacactgaatccgggtgttctgcctggttggtggttactggaggctcaaggtggctgtttgggttccttgagcccgtttctccatccctggaccaggtgcacccatgctggactgtgccacctgaaagctgggctttttggcctgaagaagagtccgtgcctccaggaaagcag

SEQ ID NO: 1185 - DNA, 1243 bp, Artificial sequence
  DNA replication origin
caaagttttgagcagagaggtgaacactttctttctttctttctctttctttctttctttctttctttctttctttctttctttctttttctctctctctttctctctttcttttttctttctttctctctttctttctctttcttttctttctttctttttttttttttaattagagtcgtgctctgtctcccaggctggagtgcagtggtgggatctcagctcactgcaacctccgcctcccgggttcaagcgattctcctgccttggccggatgcggtggctcccgcctgttatcccaggactttgagaggctgaggcagtcagatcacgaggtcaggagatcgagatcatcctggctaacatggtgaaaccttgtctctactaaaaacacagaaaattagccaggcgtggtggcacgtgcctgtagtcccagccactccggtgacttgtacttttatagcctccactctgtccacagtgatggtgagggttaaggggggcaggagcccagggaggaggagctgtggctgcagtcccagtgagagagtggggaggcttgggctaagcggcagcgcggagcaggtggcagtgggaggaatctggaaacatgttcgaggtggacatggcaggactctctgaggggctacatatgaggtgtcagagagaggtctcaagaatggcacgaaggtttttggcctccacaagtagaaagctagagctgtttcctgaactggggcacagcatgggtgaaacaggttctagaggggagggcaggcgttcagtgtccggccagttgaggtccaacgtccaagggagctgtcagcctgtgggtcagaggagaccgatctggctggaggtctgcaggtgggagcccctgacaggcggatgactgggaagcacctaggcgggctgtgctcttcgagtgaatgaatgaggctaggagccacgagattcaaggtctgagccctgcgcctccagcggtgggactggggagatgtagggagaccagcaaaggagactgggaaggggcagtcagagaggcagaggaggagagcccggccaaggaaaagaagcctggccaggagcagggaggaatctcccagagccttaggggaccaaattctgcctcttccacttccctgctgcatcctcacaccctccatctctctctctcttccccctcccctctccctatttctttctgtggctttctctgtctccctggggctccttccccggg

SEQ ID NO: 1186 - DNA, 971 bp, Artificial sequence
  DNA replication origin
cggtgacttggcccctctttatggctttacaggtgagaaaacctaggggaagggtgccagagctgagtgttggactcaagtctcccgtctctggggggacctgtccccacctcactcggacatgcacacttacttcctggccctgcactcctgccttagtgccaactttggggaattgttgagaattcgaagctgagaaatgttctcttgtatttgcacattgcaaagagacatctgagcatgttcccccatgaatcgtgagtatccattcccagggagctctaactgctcgggagaaggggtgtgaaatttaatttgcactaattatcctgaagtgagaggagcgggaaatgagctggctctgcacattcggcctcttccagcggctccctgttccccaggttgcagtttgtttgtgtgaaaggggtgggggtggggtgggggtgctgtttctatggcaactgcagctgctgggattttggggtggctgggcagggagggagaagggaaaggctggggcagagccgggtggtgtgtgtccttgtggttgtggggcggggggcatctggaagcccctactgactctgatgggtgagaggaggtggagaggagacggatggagttcttcccagccccttttcagctgggagagggctttgaccaggagatggaccttccgaatcagcaattccctggagcagggatgtccctctcaggcccccagggctaggccagctggagggcagaaacccagggtggcaactgtcagagggagcaccagagaggagaagggactccagggcccaggacaaagtgccccacttgcctcctcttgctcctctccccctccctttctcagctccacctttctcttcccatctcttatcctctctccccttcctcacctcctccctcccgcaacctattccctttccccttccttgccctccccacagactcttcctgccacc

SEQ ID NO: 1187 - DNA, 1030 bp, Artificial sequence
  DNA replication origin
acgtaccctaacctccttcctttgattttgaatctgcaaaaaagttggttctccttccgtgagatccctctggagagacctcatccctcatacgcaaattcattcatgcatgtactcagcaaacctgtgttaagtcttaccacgtgctgagccctgcatgtgaaacagggtattgtgggtgactggtgctgagctttggaagagtctctgacgagtggtctcaggcactctcctgcccttcccgagggtctgctcccatgatgcaataggctgaggctcagcaatggggttgaaagtggtccttgataataaaaggcataaacttacaattgggcacacccaccttgatgcttctgtgtctaaaaagtgtcagaatgtcacaactctctcaggctgttggaaatgggggaatcaggagagttgttgggactggagatagatctgagattctaaatttgtaggcaatgggtcaaatgatgggggtgggtgttattgcctgggctgagggtggggaatggggaatatatagggagaagtgagaggaagagaagcagagaggatgggattggggggagaaaccctgggaacaagcagttaaagatggggaggccagaggaggtgcgttctgagagatgggaggagcactgggtgggaggagagagcttcagaaaaggcagggatcagcagagtccgaggagacccagggctgggggctgactgggcattggcgacctcaacatggcctcctctgtgaccaggaggcagaaaccagaatgtagggattagaaggaagtgggggccttggccattctttggaggaggtgggaagtgagaaggaggcggtgctcttggggctggggacagctatggggaggatgcagtttgaggcagcaggaaagggtctctttgatgctgcccatatactaggtatgtacacagtatgtgttgattggtcatctttttctatctccagtgacttctttgtcaccagatcctgccagctaatcatactagtcagccctgggcacct

SEQ ID NO: 1188 - DNA, 1003 bp, Artificial sequence
  DNA replication origin
agagacagagccgaggacgcgcgtttggggaggacgcagaagccgccgaaacaataagggcgaccgacaccttagacagggagagacagagacctcgatcggctgccggccgtcgcgccgagggacgatggagggactgagaaaggcgaggctaagtcgagacggtaagagaggccgaggttacggcatgtgtccctggcaggcagcgaagggaggctctgacctctgcggcagcggggagcgcggggcggccgagtcagtcggccagcggctgggagagggcgcgcaggagggggcgcccgcccaggccaggccctaacccccacccgctgcgcgtcgtgggaaccggttttggcgtcccctcctggttccgctcatctccgcacctagccttgcccaccggagctgcgctcgggacttacctggggtcccgagacccaaagactttggctccctctcctatcccagctccagacatttctgtctaaattagtgcgcctggtgcggggaggacgcgggccagtgcgcgccctggctgcagcaggagcggctgggttggcgccctctgtttccttttctcagaatggagctgggacgcaggctggaggatagagggtggtgggtggttcagaggaaagcagggaagggacccctggcagggacggaggatggagctgtttcaccgcgcagtgagccctgctccctcgccctctcctctcccgacctcccactctgggcataacgggaaatgtcagagacctctggctaggccccagcgcgctcacctctcttttcccccctttttttgcagttgttattgaagatgataggattgatgacgtgctgaaaaatatgaccgacaaggcacctcctggtgtctaactcccccaaagacaatgagttaagggagagaataagaacggcggtaacagttattggcaaaaagcatgaaaagagaaagcactttgaaatttattactagcttgctacccacgatgaaatc

SEQ ID NO: 1189 - DNA, 1116 bp, Artificial sequence
  DNA replication origin
gcccccggacgcgaccatgtcggaggtgctgccctacggcgacgagaagctgagcccctacggcgacggcggcgacgtgggccagatcttctcctgccgcctgcaggacaccaacaacttcttcggcgccgggcagaacaagcggccgcccaagctgggccagatcggccggagcaagcggggtgagttcgcggcccccttgtctgacaccccctttttcccgcgccgcggcctgaacaagggttgcggaggtctcccacccgctggagcccgttcagacctgacggaatcccttcttgcagaattgggggatcccgcactgcgggtccggctgaagcgggtcgcaggaacgcgtccccctaagccggatccccggctgggtcaccctgggggcgtggcggcttctagcagcagctgggggtctccacccgcgcggcaaagtttgctttttgatttgcgccccccacccccgccttttgcgcagtgtagtcacagctgcactcgctccataaccctgtggggagggggtcccagggacccccaggggacggcgtggggacctgcgtggggaggatcccattcctgcggggaaggctagggtgttcgggtcgcacgggcttttcattgttacttggcttgggagggggtttgccaggcctgggcgatccgcgcgagagctggaaaagccccagagaggcggagacgcagagaggctccgagaggagctccagagacgcggggacaatgagggggaccgacggctgcagagagagactgagacgcagggatggaggggagggggtacgcgggagaccgagggtggcagagaccgagacaaagctcccgagaggggagctgaagcgggagagacagagccgaggacgcgcgtttggggaggacgcagaagccgccgaaacaataagggcgaccgacaccttagacagggagagacagagacctcgatcggctgccggccgtcgcgccgagggacgatggagggactgagaaaggcgaggctaagtcgagacggtaagagaggccgaggttacggcatgtgtccctggcaggcagcgaagggaggctctgacctctgcggcagcggggagcgcggggcgg

SEQ ID NO: 1190 - DNA, 856 bp, Artificial sequence
  DNA replication origin
gtagggcagcacctccgacatggtcgcgtccgggggctccgccgcggcgcctcctccgcccgcgtccccgcccgcggcggacagggtcagcggcgctggggccgggggcggccggccggggacggcccgcgggctgctgcggcggtggcgccggcgagaggccgggggacgccgctagggcaagagcgcggcactcgcgcgagcggcccggagagcgcccgcggctgcgctgcgctgcgctccggctccgcgcgcgagtggctgctgctccgccagaggcgagcaggactcacatcctcggcgcgctggggctctgggcgggggccgggccgggcggggccgcgagccgggagggaggagacgtccctgcgagcccggagggcgcgggaccgaggagggcgcaccccgggagccgggcgggccggtcctgcggcgagtgcgggcggcggcgccggttcggggaggcagactgggagctgcgagcggcggggctgcgaggggcggagggggaggggagggagagaggagggagggcaccggggaggaaacccggagggagggtgggggagagaaaccgagagggagacggggctgaaaaacagggactgaaagacagggaggcaggggagacggtggaaggagacagaggagagggggagaggaaggagaggaggagaaagaagaaaaggtggggtgggggacgagctagaacggagagacaggggaaagatgagaggaggagggaaaggatcgggagggagaggaagagggtcggagagggaaggaagggagaaaaacagaggggggagagggaggcagggatagaggaggcagcgagctgcgaggagaaatgccg

SEQ ID NO: 1191 - DNA, 815 bp, Artificial sequence
  DNA replication origin
gaaaaacagggactgaaagacagggaggcaggggagacggtggaaggagacagaggagagggggagaggaaggagaggaggagaaagaagaaaaggtggggtgggggacgagctagaacggagagacaggggaaagatgagaggaggagggaaaggatcgggagggagaggaagagggtcggagagggaaggaagggagaaaaacagaggggggagagggaggcagggatagaggaggcagcgagctgcgaggagaaatgccggccgcggcgccgaggcgaggcgcggggaggagggcgggaggaggcggggaggaggggacccgcgggcctcggggagagatccctgcgagcggagcgacgtcacggggccgcgccggccggcccgggctgccgctagcttcctgcccccgcccccagcccccgccgtcccgctcacgggtgtttacggggcccggagctggtgcgcgcccgccccgcagccggctttgcctcccgaggggacctcggggggagtgggggttccgggagctggagagggagcggacagacgacgcacacgcggggaagggcggaagcatgctgacccccctggggggcagatgctgcggggcaaagatcggagggctccagggcgacccgcggacatagcctcccccgccatctgcaaaccggggagcccttcctccccaccacacttgctccccaattcagaccctgagggcccagccactggggcctcacactctcctcccgccccggctcagtccgacctggaaggcctcactcccccacgcccccgcccaactgcgctgg

SEQ ID NO: 1192 - DNA, 1260 bp, Artificial sequence
  DNA replication origin
agggagcgcctcattacgccgggctcgcccgggatgcctggctcccggcgtccgctgcctccgctggggacgtcccgggtctgccgccctctgccctcgggggtctcccttccagcaacagccgtgcgccctgtggagagactatggcctctgagaggaggagcgggctcctcgatgccgggagggagactggggcagccccagaggcctgggaggcgcatctgccaagcagatggtaactccgagggggcaaggtgcatgaggagcgctcattatcctcgccggagccaacagcacctgccctccgctggagaccgtctttgcttagtagagccggcctgaccacagggaggggcaaccaccccaaggtcatgccagctgctggaggcagggctaggaaacacatccaggtggcccaggtgagtctcacctggctcatcctgctgccctgcaaggggtcccatcaacagtgaaaggagctctcccctcctatctagaactctggcgggtgggagctggaggcagaaggggaaggttttttcctggtataacatctggtggaggggggagtcagtccagccccctctccaaacggtgtaaaaggattggctggcctcgggaagccagaatccatggggggaggaggaagggagcagagaaaagggagactgaagcaatgtggcaggtggaataagcatgtcccttggatttaggtctgggtttgaatcccaaccccgtggtttgctgactgtgtgaccctgggtgggtcatctctcctctctgagcttccatggtctcagctgtcaaatgggtatatggctagccagtacctgtgtaccctgcaggacagttatgaaaacaaaaataaaatcaggctctgatgcctggctgagagtggatgtgcaatagacatttgagagatgacttaatgagtgagaaagaacggtagcacttcatttgtttccatttcaggaccacatgagctgggagaatccttagagatgagctgggcctatccctcatttccatatggggaaacagaagtccagagggccaggggctagccccaaatcccacagtttgtcgatggcagaagcctcaggtccccagactgaccttgttcctctccacaagccacctggctcattcattaggactttcccaagtgcctgctttgaggttagtgccaaagccaagtgctaagagagaaaacaagagcgtaacaagcaggatgataaagttccaagaagcgctgacatt

SEQ ID NO: 1193 - DNA, 2561 bp, Artificial sequence
  DNA replication origin
gatgctgctgaggcgcggcgccccgcggctgcgctcgctcggcggcggccggtaggcgcacttggcattgagcaggcggcgcagtggggcgcggggcaccgaggcggcggcgcccccagcgcggagatgctgctggcgcacgtggcgcgcgtcgctctggcgctgcaggcgcttgaagtcgctgaaggccgccagcgcggtctggcggagcaggcgggccagggcgcgcgccttgtgcgcccgcgccagcagcacagcgtggcagcgcagcaccacggccttgtggcgcgcctggtggcggtagacccaggcgaagacgcgcgggtggcgcccgtccgccgtgcagtaggtgatgcgcggcagcaggtaggcgtgcgccggcctgcggccccccgaacccccggcggcgctgcgctcgcacggctgcatgcggatgccgtgcggccccagcgtcagcttcatcttagtgcccccgccaggcccgcagcgagcccagatcttgcccacggcgtcgtcggtgcagccgtcgcccttggcgtgcagggtgacggcgttgcccaggtaccacacggtgtaggtcgggtcctccttgttgagctccactttctggcgccggctgcggaacacacggcccaagcgctccagcggccagtcgggcagcaggtccgggcaggagcgcaggaagctggagagcagcgacgtgtaggcgagccccggactcaggctcttcgccttgcacttggcctcgtcctccaccagcacgaatttgttacgtctccagggcagcatcgcggcggcggcgaaaggggctgggggcgcagggagctcaccggcgtcctgtcgggagaccgggggagggaaggcgcgcagaagtccaccgccctggagtcgcgagaagctgggcagggccggggacagtcgttgcctggagatgcccagtgccaggcagggctagcttcgcagatgcccggtgcccagccgggccagcagccgaggtgcggacggcggccgagtggctgaggaccgcttttcccgggagtgtctccagccgtctgggaagcgaggaggggccggggctgggggtgaggtgggctggacgtccaccaagcccaaacggtgggatttccgcggtccctgccgccgcaatttgggtcgccggagccgctggcggctgcttagtggggcagaccgagagcgcggctgcggtggggactccttcaggcgtcgcggctccacctccccgggctgcctacatcaccgggcgggaccgctagctctcttgtcccctccccttgccctcttctcccctccccccacgcaggctcgcgctgcccgggaccctgcacaggcgcggtggaacgggtttaatcattattagtggaggggtgggggtagagagggctgttaagtactaggaatcccctgaaatatacaggagggcttcgtccatgctaatttatttggcctcgctactggtctccaagctccccttggcgcattcgggaacccccgcgccccacgattcctgctgcccctcacccacagcatgtcattacccccatctctgagagtgggagttagggggtgttcctgaaggggctggcctggcgcactttgcctcgtctgcacagcacaaagccagccgaggtggccgagcagtgcagtggaaaagtactgtcgcttggtgaagctttctcccaggttcttccaaggtcgtgggccagaccgctgggcctgagctgagagacctggccgctgctgcagtggctggcagtgcccctcgcctggtctgaagcagggagggtactcttggagggtgggggaaactttcagaacagggtctgtggtaattgcagttgaaaagctccttctggcgaaagggcagcctctgggcgcatgattaaataaactcctatttgtgaactcctgtgagttcccaggggtttagcattcattttcttatttaattcttggaacaagcccaggctcagttaaatgactggcccaaggtcttcaggctggtaggaggtaaaactagggctccactcaggccctggtgacccaggggctgcccccaaccctccatgctccccgggacctcctaatgagaagtgatgaggacctgctagggaggaagttctgatatactgagagacagttgtccctgggtgtggggacacagctccctctttcaagattggttaagccacaagctccctagaactccaggactgctctgatatgaccaggagtcttgttgccttgggctctcacagagtcaacactcaagctctttccttggcttctgaacaggtcatctggggtggtgtccaggtcaggagtgaacccaggtctgggctggagctgaattgagagcttgggctgggccaagccaaaccacatgacctccgagagtgggagcagtgggaagatttgggaagacagtgtgtgctatctcggccagcaacatcctgccagtgggtaggagtgagtgtctgggtcagaatccctgggggaatataagtaaaataacaaaccacaacaagaaaataatatgcaaa

SEQ ID NO: 1194 - DNA, 1646 bp, Artificial sequence
  DNA replication origin
actggcaatggcggaggccactcttttgagttctgagtaactctgggatcagtgcccagctcagcacaggaataaagaagatatccagctgaagactcacactgccacagggtctggacaggtttttccagagcctctgaaagaaaactgggctgctcaccacattctcttacaacctgctcgcactcatccctgagagcacacacacagtctataccatatgctctgaaatacacatgaaccttctcagagatatgaatacatgcttatgagaagcccccagcccagtgctccctccctgccaaatgtcccagacacctgcatctgagtgcccaggcgtacagacatcctgggaggctgagacagacagccgacgtccctccagggagcctggcacatgtgattttcagacaaggcataagttactgcctccttctctgacattaaggaacagcttcctggcagcagtccccagatcccgtcctaatcctggggttggctctggctgctcaaaagaactactttcaggtttctgatggtaaccagggggagctatacaggctcacctgtggcttatctgatcttcaatccattttttcacccccagcaggcctggcattaaacacaacacaggagtagtgacagggctgtaaaagcaggtccactttatttacaatgatcagtgacacatagatctttgggctttttgtggtcttgcggagacacctgggtggggggcccactcccttggttggttaacacaccctccttcctcatcctgctgggagaatccactgctgtcaggacccacctgctctgaggagcctcgacttgggagcaactctgctgcgtctactttctaggtagtcagtgtcctaagcacctgccaaaggttctccttacctcctttgggagccccatcttggtcctggttgtggggcacctaggagggggccacacacatccgtctgcagagagatgggatgggcaaggaatcccctgggggtgccagggcagaggcgtgggcagcggcctggtgcagggctgttacctggcctaacctgttgtttgaacgtcggtaggactctcccagtgttctccagaggcagagcagtgaagtcacaggagtcctccaaggcgtagagaggcggggcttgggcgtgagaattcctccctgtgtgtatagcagcggactctgcccaccgccggcccggccccaattctccccggccgctagattcttctcctacaagaatgcctctccagggtcatttttttttgcacagggaagaaggctagagggaccaagggcaaggtcactgcctccaccctgcccagggtccaaacccacccctcctgatttcttgaaacttctcctcccttctcttgagaggatgttttgggagggaatgaggaggtctgtgggcaaagagactaggtgtaaagcatagggggcgggtccacaatggcaggcccgggaaactccgggtgtggggagagaggaacaccccccaataaccaagggcgtatcaggcatcaccctgagccaaaatgaggcggcggggcggacaacacggagaccacgggggagacacgggccgggggccggggcagccgaagcgggcagggccggggttggaggctgt

SEQ ID NO: 1195 - DNA, 1662 bp, Artificial sequence
  DNA replication origin
tgcaaacctggcttcagacgagtggatttaaactttaaatccactcatctgtgccccaactaagtttccatgagtgagcctgtggttactggaatgtgagatttctccaactttctttcccttatcattcttcaaattacaacttcagtggagcatttaaaattataattaaaaattccctgaggttgatccaaaaaattaaatatctgatattcatgtgcctctatacaaatgggaaattcatctatgcctctcccaaataaatatgattggatatcacaagaaccataaaattcctcccttaaggaagattatgagagagaccagcacacacacacacagtgcaagctaaagcaaccccgtcttggatgctaatccaccaagttgatgtgttttgttggttttttggttttgttttgagacagagtctcactctgtcgcccaggatagagtgcagtggtgtgatctttgctcactacaacttccacctcctgggttcaagcgattctcctgccttagccacctgagtagctgggattacaggcgtgtgccaccacgcccagctagtttttgtatttttagtagagatggtgttttgttggccaggctggtcatgaacttccggactcaagtgatccacctgcctcagtctcccaaaatgctgggattacaggctgtgagctaccacacccggccaaccaagttgacttctgattaaccagcttttagggaaggcctctaagatttccagtttatctattgttccttgtgtaaaagtatgtacttaccataaatcctgcccttaggcagattcacacagcattcttgcctttccctgggggactgacttcaaatgtccgtcacattcctttcctatagcatataggccctgggtcttgggggtaatggcatggggatccaccatcttgtctccctgccgctgaagccagagactatggcttctgttcataaatccctttctccttaaatatgaagtcaaaggtcatgtagataggagctgctgctgaagaagggattttttgtctgaagagttctgtcccctgggcttacttggctatggggtggacccctggccaggagacagcaaactgtttcagtaatgtgcgtgtcgtgcgtgtgtgtgttctgtggtgagcaggcctatgccattaaacaaacggtgtggctttgggcaagctgctatcttgggacctcagcacactcattcataaattgtgtcttttgggtgagatttgtcttggggtcttcaaaacccctgagactgtggacacatacagcagcctaacggcattgaggagggcaagcattcaacagttaggacaatgtgaactgtagctcagctctgctaggtaccttcacaagacctcgaatgctgccccttactatgcctcggttttcttatctataaaaacggcatttttatcttgttggtggagctgttaaataaattaaaagacgtaaagggtctggcaccatggttggcaaaaaatatcagtttcccttctcgacttctcgattttgcccaggaccagtgatgttcacattcaggacctgcctgaaccggcaagccctccacgtgggtccaaagtgcaaagggaaagtcactgctagaggcgccagtaccagcatagcgcccccacg

SEQ ID NO: 1196 - DNA, 1057 bp, Artificial sequence
  DNA replication origin
ggtggtggcggcagcggcggctgcgggggcaccgggccgcggcgccaccatggcggtgcgacaggcgctgggccgcggcctgcagctgggtcgagcgctgctgctgcgcttcacgggcaagcccggccgggcctacggcttggggcggccgggcccggcggcgggctgtgtccgcggggagcgtccaggctgggccgcaggaccgggcgcggagcctcgcagggtcgggctcgggctccctaaccgtctccgcttcttccgccagtcggtggccgggctggcggcgcggttgcagcggcagttcgtggtgcgggcctggggctgcgcgggcccttgcggccgggcagtctttctggccttcgggctagggctgggcctcatcgaggaaaaacaggcggagagccggcgggcggtctcggcctgtcaggagatccaggtgagcggggccgggtcctaagccgagcggaggacggagctaagcgcgggggcgggtcctcagctgggtgggggcggggctaggtgtggaggcggggctctgagcagatcgagggccgaggcgagggtccttaaagctcatctatttcaccattactgatcggctgctataaataaagccagcacctcccatttgttttaatgtttcccttcctcaaatgaagacatgttgccgattacagctcctgtcgcagcacagcaaaaggctttgtgtaaattttctaaaatgtacggacaactaaatcataacattcctatccctttgaggtagttgccgtccctaatttatggagaaggaaagtcctcaggtgaagggacttgctcgaagtcacacagctaataaaatgcagtgcccttaaccactgagccaggctgcctccgccgtttaaccaaaggattagtagtgacagagctgaaaccgcagtaaaaactatgaacggcgagaaaaacagtcctaacattttagttacctgtgtagagttatccctgctgactggatacacaagggttcttagggttttttaatgcttaaaatagcacaagacttctctttttgcccaac

SEQ ID NO: 1197 - DNA, 1052 bp, Artificial sequence
  DNA replication origin
ctccccctggtggtcaccagggagtagcgacgccgttcctggcgggtccctggagtgccacggatgggggtgccttctgccctggggatggggtcgcctgcctccttctcgtggggcggcctagtggacactgcgtcagagtggtgctggctgacgccaccgccaccaggattccaagaaaccctgaggtttcttctgtgagccatgcttggaggaagcgttgaagatgtctgtgcccctcccccaccccgctatccctgcgtccctcctgcctgccatttgttctttttctcaactctcatatttattgagcacctgctatgctcctgggaccgtgtttccctttgtattccagaaccattcagggaaagggaggagccccctctgtgtagggaagaggacacgggccaggagccgggttccggtccccagtctgaaccaggggtttggaccagaagattcctagggtccgtccagccttctgcaagtccatccttatgggctctgtgaccttgggcaggttgtttgagctctctgagcctctgtctcatctgcagaacaggcatcatagcggatttcctgctgcttcttagggatgtaagaggatgaaatgaagggccatcatctccttggcgggctgtgtatcatgtaccaagcaagagctgggggtcagctccgccattcagtccttaacaggcatattgtgagcgcgtgctgggtgctggacactctagccggagggggatgtggggccaaggaagggtttttcatgctttaaatgttggaagtaagagagcatgtgttgtagactgtcgggaattatccagcacagaaggagaagtcgaggttataggaaggagggggcggattgcaagcacaaggtcctggagctgggtggcgtgggttcagaggaggtggagcttccgggtagatctccaggtgggtgggaaggtgagggagtcctgtacctccctgttctctgtgacttaccaggcaggggatgtggggggagaggagggttgggaagacagagctaaagggtaggactgggg

SEQ ID NO: 1198 - DNA, 1148 bp, Artificial sequence
  DNA replication origin
catcctaacagggaaatttctcctcttccaagactgctcaattactgcctcctccgggaagctttccctcactgaccttatcccacccacagatagacctggctgaccatgcactcctctctgccctgtacagctgtctgccctagagtgtgtctcgttgcatgtgatggtccattggagtgtccttcttcctcaggagattaggtaccccacgaggcacagcctgcatctgattcatctctgtgtatccagtacccagcacgtgtccacacagaggagcagctcagggaaccttcagtggatagatgggtaggtgagtggaaaaatagataaaagaatggatgataggatggagtgaatgaatgggtgggtatatggatggtagggtggatggggtgggtgattagaatgggtgaatggatgggtagataaaatgaatggaagatgggtaggtgggtagatagaaggaaggatggagatggatggatgaatggatggacggatggatgggagatggaaggatggaaggaaaaaaggaagaaaggatctctggatgaatagatgagtggatgaaaggaagatcgatgaatagatggatgcatggacaaatggatggaagaaaggatcagtggatgaatggatgcatggatggatgacagatgaatggatggaagaaaggaaggaagggtcagtatggatgggtgggtgggtggctgtgtagatggatggatggaaggaagaaatggattgatggaatggagggagagatgggtagatgggaggatggatagatggatagatggatggatgcatggatggatggatggatggatggatggatagatgtataggtgggtgagtgggtggatggatggatgagtgtgcagatggataagtaatggggtgggtgggaaggtgggtaggtggaagaaaaggtgggtggatgaatgggtaagtgggaggatggacagatgggtggatgagcgggtaggtgaatgggtgtgtgtagaatgaatagatggagaggaaggtgggtgcgagggggatgaatggacagacagacccaagtattttgtgttcccttccccaagagcttctgagataagaaaatcttaagagtccttcacagctactcagaaggctgaggc

SEQ ID NO: 1199 - DNA, 821 bp, Artificial sequence
  DNA replication origin
gtgtgtagaatgaatagatggagaggaaggtgggtgcgagggggatgaatggacagacagacccaagtattttgtgttcccttccccaagagcttctgagataagaaaatcttaagagtccttcacagctactcagaaggctgaggcaggagaatggcgtgaacccgggaggcagaggttgcaatgagccgagatcatgccactgccctccagcctgggcgacagagcgagactccgtctcaaaaaaaaaaaaagagtccttcagttccaaagccccttcaggccaatgctccaagtgtggatttccacctgccaggtgacaggcaaatgccagggcgcaaaagctgcagtaacaaggtgcctgcgaggagcaggtgtggccgtggggagtgagttgccagctgctgagcagcgaacacgcattgcgacaatgccacagacagcagcagacgggggtgtggtggggggtgtggtgggggtgggggggataatggatgagcagatgagaggcggggagtgggcaacagcctgcgtcagatgggacaggccagacggactgccctcctcccaggacactgacaagcagataccatctgggccgtctccaaccagggccctgcgctcacatggggctgaggggtgggaggatgctgctcccactgtcttttaggtgggaagttggaggcgagaagacagagggaaggaagctttctcctggggacctggccctcccgccactaccccaacgtggtcccacctgacaggctgctggggctcatctgctgtgtcaggatggccttgagcttcttgatctcctcctg

SEQ ID NO: 1200 - DNA, 1500 bp, Artificial sequence
  DNA replication origin
cgtgtgcccttgggctggccttactgaggcaaattgataagatgataagaaaaacaccttgggccaggcggggtggctcatgcctgtaatcccagcactttggaaggctgaggtgggcagattacctgaggtcaggagttcaaaaccagccttggcaacacggtgaaaccctgtctctactaaaaatacgaaaaattagccgggtgtggtggtgagctcctgcagtcccagctactcgggaggctgaggcaggagaatttattgaacccaggagattgcagtgagccgaggtcgtgccactgcaccccagcctgggcgacagcgcgagactccgtctcaaaaaaaaaaaaaaaaaaaatcaatatcttaaagggtaagagcagcacctgcggggctctcacagggtgcatacagggcttctttcgtgcatgggcacaggaagcactgccatacacaggtgatggcccaatgtctgcctgcaatgcagggagctggacacgtacaggtgattctcgtggcgggctatggggcggggcacacagcgacaagagtccaggcagccagccggcagggacagggagtacaaagaagcgaaaacaggatggcacaggaagaacgaagcacagctttccaggcggcaaagacagggagaactgggggagctgggagtggggctcgtactttgccaggtgacaggaagaggaaggcattccaggctgaggggtcagcttgagtaaagccacacagatgaggtgtggagagcaggagggactaggggaggggtggaagatgaggcctggaaggaagagaggaggcaaacccggtgctgttcccaaagtcattcccaaagtcattcttcattcatcgctgtttctattcattcgacagggactatgctcagcctacggacaaagtggtgaacgaggcagacacagttcctgcccttgcagagctcatgagcttgcaaattctagaccttagtgtgggcttggggtggatcctgtatgggtagattggcccagagaattgttctgagaccccaagggcccacatggcatctatgcccggttccactgcaaagacccatgctgtaaccaaaacagggctaggtgtgccccatcttgccagtgagggaagataaaaagtcaccattcggccggacgcggtgcctcatgcctgtgatcccagcacttggcgggcggatcacttgaggtcaggagttcgagaccagcctggccaacatggtgaaaccccatctgtactaaaaacacaaaaattagacgggcgtggtggcaggcacctgtaatcccagctacttgggaggctgaggcaggagaatcgcttgaacccgggaggcggagacgctggggatagtgcagacccggaggcgacattagaggcaggctctggttgtgtcccgcctggacaaaagcctccggacctacctgttcccgtccgcctgcgcccctcgagggcctttcctcctggctggggggcagc

SEQ ID NO: 1201 - DNA, 2290 bp, Artificial sequence
  DNA replication origin
ctctccccgtctgggagtgggacagaactgttcagtgccttgaaagtcacagatttctgactcctggaaggaactgggcagtcccaccagagcagaaagaaaggaggcaaacttggggagtgagaagccagcctcccagaggcccaggcctcgtgttccccacctccaaccctcccgtgaggagaggggcttggcctgggaccttgtaacttccttgcaagttaagtgagctatcctgtcacaaaagatagaaggaactgccctttgggacttcttttcactggaaacccagcactggttttatgttgagtgagtgggaagctgggactctgttttacagccatctgtactggagcctggacaaaccactggtctctatgggaggccccagcctcacatttccctggcaaggagagagaggtttagccatgtcctgggtctaggattacagcccagagatgggcacttaagaagacctggtcattggtccagacttgggccaaggctctcctctgtgagggatgggttttactggtgaattacctgtgtggagaagctatcagggccatgtttagcacactgaagggaccagtctccaccaagcactttaacatccctccagccagcatagattgatctcgtgttacagagagggcaaggtttttggcccctgtttgcagactccatgtcttaatcagagaccacagttttctctttgttccaatctgcgccacctcggtagccccactttccttgctgtgtggacttgaaacaaaataaaatgtgttgcttcagattgtctgctacagacttttctttccttcgaaaggtgaggtttttgtcgtttccctatttcgtttttgccaaacgtatcttcagctggtgctgaatggtgaaccagaggtcctgtcctcaagggctcagaaggaattgcgcagggagactcaatcaatttacgttcctcttctgctgcaactttcagtggatatatctataggaaaaagactcaagtccttctgcactggcaacctgggcttgctttctgcttctgcaatgtgccacaggacctccgcacagcccagaccggcgtcctcctcctcctcccttcccttcaccttgttaaccactcagccatcatatttcagctccagtcaatctcaggatgcctgccctacaccctgggctgagtgaggttccttttttagatgttccataggctgggtgcagtgattcgtgctagtaatcccagcacttttggaggccgaggtgagaggatcgtttgagtccagaaattggagaccagcctgggcaacaaaatgagatcccatctctacaaaaaattagccactcgggaggctgagttaggaggatcgcttgagacctcctgaggttgaggcagcagtgagctatgattgcactccagcctcagtgacagggcaagaccctgtctcaaaaaaagatatgttgcatggaactgattattcagcttgtaattacattttcgttttcgggattttgtttgtgggattttgtttcctgtgtctgtctctccagctagatcatgcaggagggctgtctccctaacatctgtcacggtgcctgacatgtagccgacactcagtgtttcagtgcaaggaagagcccagcgcccagaggtgtgacggaggtgctcttttggctggggaacttgcactgagccaggagggataggccaggcagccttccatccaaaagacttgtttttgtttgtttgtttgttttagatggaattttgctcttgttgcccaggctggagtgcaatgatgcaatctcagctcactgcaacctctgcctcccgggttcaagtgattctcccgccttagcctcctgagtagctgggattacaggtgcccaccaccagagacgcgggtttcaccatgttagccaggctggtctcgaactcctgatgtcaggtgatccacccgccttggcctcccaaagtgctgggattacagacgtgagccaccgcgcccggcccaaaagacttgctcccaaagtgtttgttttacaatctcgggtcttagaaataacacgggtggcatgagaggaagctgtccaggggctgtgggtggtgggcagcctttccctgagccagtacggggacgtggataaggggcaacaggtccttgccgcttttcctaggtccctggcccgtgcctgaggcctgggatctctgtagccccgaggtggagtcaagcctggggccccgggccccagtcttagccgcagcctcgggcaagctgcgtaacat

SEQ ID NO: 1202 - DNA, 2132 bp, Artificial sequence
  DNA replication origin
cggagcggctccgcgggcgccgattggtgagtgaggcgggtcgccgccgccaggtgatccgggggtcggttcccgcggccacgtgtgggggcgcggggaccggggtcgggggcggcgggaagcgggcacccaggcgcggggctgcggcggcgggagacgcgggggtcgcgggccggagcggccgggaccggactcgagaggcggtgagcgagcgccgggagccgggcaggggcggggggcttggtacgctgacacgggcgcgggagggtctcgggagtgaggggcgcccgtcacccgctccgtcgtcatctgccctccctgccactgtagcctcctccgtcccctgcagcggagcccagcacgctcctgggtccggggactctgccggggcccctggccgttccccgcagcgccccgagcgaggtagcgcagcgggaccggcagcccactctggagcgcttcgcacccccgcgcccgcccctcaggggcctcggcccacccgcccctggaacagcgcttcccgctcccgtgtcgcctgtttcgagaggccgtgaagcagcacccccagcacacgcacgcacctcgccttctcctcaccccgctgttctcttctcatcactttaccccccatgccgcctccaccaccccagctgggtgcccccagagggcgggcaccttcgtccaccggcggcggggcctgacacacagtcagcctcggaaacattccaagaaggaccagagctacgagcaccccaggaggtagtgctgggggatccccaccctacagctgaggacctggaggctgagagcttaagtgacttgcccaaggtcacgccagccaaccatgttagaccccacaatctaagttcttgacccctggctgggtggccttgggttttcccgaccctgtggcccagggcaggtggacgcgtgttggggcagtgggagtagactgggcgctctggcagccccagaccctccggccaggaggcagcacctgagttcgccagccagcggcttccttgcctcacctcctcgtggactggcagggacccccaccaaactccaagagtggacaccctacttatctgtgggaggggagtccgagcagaaaggcaccgccatggcctgaggaaacagctccagagacatggatttgcttccctgctctcccactgaagctgtgtgactatgggcaagtgacttcactcctctgagccaccctttgctgacccagggtctgcgggctggtggtctccccctgacacaactcagctatggtgcagtgccccagagggcttctgcgcctgacccacgaggcaggtcagcccatccagtctcctgtctctgagcagggccacctggaaaacctcagaggacagctccagcctcattccaagtgtgtccccttcggaaggtgctggcccagccagactccagtgtaaagcctcagaaaagcaggtctgccccaaagagacaagtgggtgttttgtgcctggaattgggtaatgtctgtttccaggattagagtgagctccatgccctccctggtcccccgggagccccccaccccaactccaggcctgggctgaatgcactgtgctcctcaggcttaggaaggagggaggaacttccagtttccaaggaggctaaggaccagggagatggggaaaggatcaggtgatggtaggtgggctggggcccctaagagggccagtggttggcctctgcacccccaccgctgggacactggggacgctgaaagctgcagctttgggtgtggagggagggactgcagcagccctggacacagctgtgtgcgcgtgtgagtgtgagatgcccgcacggctcctccccatctcacacttggtgcctgaggggctgcgtcccccccccccccgagcaggatgggaaacgtgcccttcccctctcctccccacagctctcctttctctcttttgctttgtctttctcgcccttctctgttcctgcctctgtccccggccacccctccatcgtccgtaccttccctctccttttctccgtgttttgtggtctttgcctcctccctccccactgcccgccatcctggccgatcctggccccaggatgtgactgtgaagttgaaaggc

SEQ ID NO: 1203 - DNA, 1533 bp, Artificial sequence
  DNA replication origin
ggctacagtggcagggagggcagatgacgacggagcgggtgacgggcgcccctcactcccgagaccctcccgcgcccgtgtcagcgtaccaagccccccgcccctgcccggctcccggcgctcgctcaccgcctctcgagtccggtcccggccgctccggcccgcgacccccgcgtctcccgccgccgcagccccgcgcctgggtgcccgcttcccgccgcccccgaccccggtccccgcgcccccacacgtggccgcgggaaccgacccccggatcacctggcggcggcgacccgcctcactcaccaatcggcgcccgcggagccgctccgctcggccgcaccacccaatcagcggccgcgaggggccctggcactgcccacgcccggcgctccgcctggaagggcgggaggggctcgcccggagctcagaaggcacctcctcccgggctgggggcgctgaatcccccgcgcctcactcacgggtccctcctcctggagggcctctgcccctcccctctctggctggctcctccgcgtcatccgagccgcggctaccgcaccgcctcctccgggaagccttccacgaccaccactcacgcttcattctctgcagagcccttgtgactccgttgctcgcctgtcatccctctcctcttactcgaggacaagtgacactggaccggagtgtctccgttcccagtgtgaaggatcgagcctggctcggaggaggcgctcagggtggttcgggcccggcccttgtgagtggagggtcgttgcgcatcctcctcctcactttcttcctgccgggacgttctcagccgggaactgacagatcctgcttagcccggggcccagcactgagaaatctgggaaggaacgttgctcaccgcacatgggccgtggccccatccttcgggccctttaggtggggaatcgggctagcagctccagccacggcactgggacggggagcgctatcgtcccaggagaccgggcgatgagccaaggctgctgtgtatccaacctgacatctgcaggaaacccccccggaacctgcccatgcaccacaccacagagaaaccaggacacaggggctcagggccagtgggggcgcaaaggctgcagaccgggagcggggcaccctgacaggtgggcacagcgcagagggcctgagggcccctggagttccaggggaggcgggtttgcgccaagaggccatgctggccactcctcctcaggggatctggaaacccagaggcagcagtgaggcgtggccccaaatctgggctcttcttcttacaaacgtggggctttgggcaaacgccttcatcactttcattctttgagcgcctcgtgtggaaaggagagttactaacgcctgactcacagccacgtgaggattccaacgagcaaagtgcgtagcgcagtacctgacccacaggaagtgaggcacccaataaatattagctgacattagaccttacttttagtcttgattttcttttgtatgtgacagtacagcaagggtttg

SEQ ID NO: 1204 - DNA, 1317 bp, Artificial sequence
  DNA replication origin
cggctggccgggcggggggctgatccccccacctcccttccggacggggcggctggccgggcggggggctgacccccctcctccctcccggacggggcggctggccgggcagagggatcctcacttcccagtaggggcggccgggcagaggcgcccctcacctcccggacggggcggctggccaggcggggggctgatccccccacctccctcccggacggggcggctggccgggcagggggctgaccccccctcccccctcccggacggggcggctggccgggcggggggctgaccccccacctccctcccggactgggcggctggccgggtggggggctgacccccccacctccctcctggacggggcaactggccgggcagaggggctcctcacttcccagtaggggcggccgggcagaggatcccctcacctcccggacggggcggctggccgggcggggggctgacccccccccacctccctcccggacggggtggctgccgggcggagaggctcctcacttcccagacggggtggctgccggacggaggggctccccacttctcagacggggcggttgccaggcagagggtttcctcacttctcagacggggcggccgggcagagacgctcctcacctcccagacagggttgcggcccagcagaggcgctcctcacatcctagacagggcggcggggcagaggcgctccccactcagacgatgggcgggtcaggcagagatgctcctcacttcctagatgggatggcagccgggcagagacgctcctaacttcctagatgggatggcggctgggcagagacgctcctcactttccagactgggcagccaggcagaggggctcctcacctcccagacgatgggcggccaggcagagacgctcctcacttcccagacggggtggcggccgggcagaggctgcaatctcggctctttgggaggccaaggcaggcggctgggaggtgtaggttgtagtgagctgagatcacgccactgcactccagcctgggcaccattgagcactgagtgaacgagactccgtctgcaatcccggcacctcgggaggccgaggctggcggatcactcgcggttaggagctggagaccagcccggccaacacagcaaaacccagtctccaccaaaaaaaaacgaaaaccagtcaggcgtggcagcgcgcgcctgcaatcgcaggcactcggcaggctgaggcaggagaatcaggcagggaggttgcagtgagccgagatggcagcagtaccgtccagctttggctcggcatcagagggagaccgt

SEQ ID NO: 1205 - DNA, 1000 bp, Artificial sequence
  DNA replication origin
gaggagcgcctctgcccggccagccgccccgtccgggagggaggtgggggggtcagccccccgcctggccagccaccccatccgggagggaggtggggaggtcagccccctgcccggccagccgccccgtccgggagggaggcggggggggggggggtcggccagccgccccgtccgggagggaggtgggggggtcagccccccgcccggccggccgccccgtccgggaggtgggggcgcctctgcccggccgcccctactgggaagtgaggacccctctgcccggccagtcgccccgtccgggagggaggtgggggggtcagccccccgcccggccagccgccctatccaggaggtgaggggcgcctctgcccggccgcccctactgggaagtgaggacccctctgtctggccagccgccctgtccgggagggtggtgggggggtcagccccccgcccggccagccgccctatccaggaggtgaggggcgcttctgcccggccgcccctactgggaagtgaggagcccctccgcccggccaccaccccgtctgggaggtgtgcccagcggctcattggggatgggccatgatgacaatggcggttttgtggaatagaaaggcgggaagggtggggaaaaaattgagaaatcggatggttgccgggtctgtgtagaaagaagtagacatgggagacttttcattttgttctgtactaagaaaaattcttctgccttgggatcctgttgatctgtgaccttaaccccaaccctgtgctctctgaaacacgtgctgtgtccactcagggttaaatggattaagggcggtgcaagatgtgctttgttaaacagatgcttgaaggcagcatgctcgttaagagtcatcaccactccctaatcttaagtacccagggacacaaacactgcggaaggccgcagggtcctctgcctaggaaaaccagagacctttgttcacttgtttatctgctgaccttccctcca

SEQ ID NO: 1206 - DNA, 1152 bp, Artificial sequence
  DNA replication origin
ggccaacacagcgaaaccctgtctccaccaaaaccagtcaggcatggcggcgcgtgcctgcaatcgcaggcactcggcaggctgaggcaggagaatcaggcagggaggttgcagtgagccgagatggcagcagtacagtccagctttggctccgcatgagagggagacgtggaaagagagggagaccgtggggagagggagagggagggggagggggggagggggaggggagggggagggagagggagagcccttacaccactttctatgtcatttttactgttgttaggtaaattgtaaatccctgtgcataggaatcgtgtctttttcaacttgatttccatgacttagaattgctactgcaaacaaaaaagaaaaactcacaaacttgttagattgctacatctgaagtcaagtatagtttgagagtttttttcattctaatgtgagtaaaagtttttgcgtgcctaatgtttttaactgagggtactactaattagcatcctcgaaggaaagaaaactgaaagtgattttgctttaaagcttgttattcatagtaaaagaacatttaccatgtaattcagggaagctttagaaagaaaacctaggggatctgttggccatatcaaaaaagtacaagctacatggacagtgaggtgatactgtaatacttccacctgtaggtcaactggagagacttggttttttccaaatagacctagcttaattgtgatgacgcatgccaacctaattaacctcctaatgttacttgtctttgtttttgtattgtcaggaacttggtgtgtgggttgggaatattagaacataatagaactatgtgatgtctaaattgagctttaacacaaactggttggtgttattgagggaaagtataacttattagtgggaatgggaaaagaagcctgatgttgtggtgaggtagaaatttccactgtgttactgtgaacaggaagtaaagggctaatggtcggtgactcagctgttttctgaacctgtctcatatgattcagtgtgcatgatgtctgtttattctcgacagagtaagtactacgggagtcacattacacaggcagacataatgtttatttaaccaactcagtgatgacctaaaaataacttgtggggtttttg

SEQ ID NO: 1207 - DNA, 1348 bp, Artificial sequence
  DNA replication origin
atccatttaaccctgagtggacacagcacatgtttcagagagcacagggttgggggtaaggtcacagatcaacaggatcccaagggagaagaatttttcttagtgcagaacaaaatgaaaagtctcccatgtctacttctttctacacagacacggcaaccatccgatttctcaatcttttccccacctttcccccctttctattccacaaagccgccattgtcatcctggcccattctcaatgagctgttgggcacacctcccagacggggtggctggctgggcagggggctgacccccccacctccctcacggtcggggcggctggccgggcagaggggctcttcacttcccagtaggggcggccgggcagaggcgcccctcacctcccggacggggcggctggccgggcggggggctgaacccccacctccctcccggatggggcggctggccgggcggggggctgacccccccccacctccctcccggacggggtgactgccgggcggagacgctcctcacttcccagatggggtggctgctgggcggagaggctcctcacttctcagacggggcagctgccgggcggagggtctcctcacttctcagacggggtggttgccaggcagagggtctcctcacttctcagactgggcggccgggcagagacgctcctcacctcccagatggggtcgtggccgggcagaggcgctcctcacatcccagatggggcggcggggcagaggcgctccccacatctcagacgatgggcggccgggcagagacgctcctcacttcgtagatgtgatggcggccgggaagaggcgctcctcacttcctagatgggatggcggccgggcggagacgctcctcactttccagactgggcagccaggcagaggggctcctcacatcccagacgatgggcggccaggcagagacactcctcacttcccagacggggtggcggctgggcagaggctgcaatctcggcactttgggaggccaaggcagacggctgggaggtgtaggttgtagcgagccgagatcacgccactgcactccagcctgggcaccattgagcactgagtgaacaagactccgtctgccatcccggcacctcgggaggccgaggctggcggatcactcgcggttaggggctggagactggcccggccaacacagcgaaaccctgtctccaccaaaaccagtcaggcatggcggcgcgtgcctgcaatcgcaggcactcggcaggctgaggcaggagaatcaggcagggaggttgcagtgagccgagatggcagcagtacagtccagctttggctccgcatgagagggagacgtg

SEQ ID NO: 1208 - DNA, 945 bp, Artificial sequence
  DNA replication origin
cgccccatctgggatgtgaggagcgcctctgcccggccacgaccccatctgggaggtgaggagcgtctctgcccggccgcccagtctgagaagtgaggagaccctctgcctggcaaccaccccgtctgagaagtgaggagaccctccgcccggcagctgccccgtctgagaagtgaggagcctctccgcccagcagccaccccatctgggaagtgaggagcgtctccgcccggcagtcaccccgtccgggagggaggtgggggggggtcagccccccgcccggccagccgccccatccgggagggaggtgggggttcagccccccgcccggccagccgccccgtccgggaggtgaggggcgcctctgcccggccgcccctactgggaagtgaagagcccctctgcccggccagccgccccgaccgtgagggaggtgggggggtcagccccctgcccagccagccaccccgtctgggaggtgtgcccaacagctcattgagaatgggccaggatgacaatggcggctttgtggaatagaaaggggggaaaggtggggaaaagattgagaaatcggatggttgccgtgtctgtgtagaaagaagtagacatgggagacttttcattttgttctgcactaagaaaaattcttctcccttgggatcctgttgatctgtgaccttacccccaaccctgtgctctctgaaacatgtgctgtgtccactcagggttaaatggattaagggcggtgcaagatgtgctttgttaaacagatgcctgaaggcagcatgctcgttaagagtcatcaccaatccctaatctcaagtaatcagggacacaaacactgcagaaggccgcagggtcctctgcctaggaaaaccagagacctttgttcacttgtttatctgctgaccttccctccactattgtcccatgaccctgccaaat

SEQ ID NO: 1209 - DNA, 1190 bp, Artificial sequence
  DNA replication origin
cacctccctcccggatggggcggctggccgggcagaggggctcctctcttcccagtaggggcagccgggcagaggtgcccctcacctcccggatggggcggctggccgggcgggggctgaccccccaacatccttcccggacggggcggctggctgggcagaggggctcctcacttcccagtaggggcggccgggcagaggcgcccctcacctcccggacggggcgggtggccgggcggggggctgaccccccaacctccctcccggacagggcggctggccgggcggggggctgacccccccacctccttcccggacggggcggctggccgggcagagggactcctcacttcccagtaggggcggccgggcagaggcgcccctcacctcccggacggggcggctggccggggggtgggctaacccccccacctcccttccagacggggcggctgtccgggcggggggctgacccccacctccctcccagacggggtggctgctgggcggagacgctcctcacttcccagacggagtggctgccgggcggaggggctcctcacttctcagacggggcggttgccaggcagagggtctcctcacttctcagacggggcggccgggcagagacgctcctcacatcccagacggggtggcagggcagaggtgctccccacatctcagacgatgggcggcctggcagagacgctcctcacttcctagatgggatggcggccgggcagagacgctcctcactttccagactgggcagccaggcagagaggctcctcacatcccagacgatgggcggccaggcagagacgctcctcacttcccagacggggtggcggccgggcagaggctgcaatctcggcactttgcggggccaaggcaggcagctgggaggtggaggttgtagcgagccgagatcacgccactgcactccagcctgggcaccattgagcactgagtgaacgagactccgtctgccatcccggcacctcgggaggccgaggctggcggatcactcgcggttaggagctggagaccagcccggccaacacagcgaaaccccgtctccaccaaaaaaatacgagaaccagtcaggcgtggcggcgcgcgcctgcaatcgcaggcactcggcaggctgaggcaggagaatcaggcagggaggttgcagtgagccgaga

SEQ ID NO: 1210 - DNA, 924 bp, Artificial sequence
  DNA replication origin
cccggccgcccctactgggaagtgaggagtccctctgcccggccagccgccccgtccgggaaggaggtgggggggtcagccccccgcccggccagccgccctgtccgggagggaggttggggggtcagccccccgcccggccacccgccccgtccgggaggtgaggggcgcctctgcccggccgcccctactgggaagtgaggagcccctctgcccagccagccgccccgtccgggaaggatgttggggggtcagcccccgcccggccagccgccccatccgggaggtgaggggcacctctgcccggctgcccctactgggaagagaggagcccctctgcccggccagccgccccatccgggagggaggtgggggggtcagccccccgcccggccagccgccccgtctgcgaggtgaggggcgcctctgcccggccgcccctactgggaagtgaggagcccctctgcccggccaccaccccgtctgggaggtgtactcaacagctcattgagaacgggccacgatgacaatggcggttttgtggaatagaaaggggggaaaggtggggaaaagattgagaaatcggatggttgccatgtctgtgtagaaagaggtagacatgggagactttttattttgttctgtactaagaaaaattcttctgccttgggatcctgttgatctgtgaccttacccccaaccctgtgctctctgaaacatgtgctgtgtccactcagggttgaatggattaagggtggtgcaagatgtgctttgttaaacagatgcttgaaggcagcatgcccgttaagagtcatcaccactccctaatctcaagtacccagggacacaaacactgcggaaggccgcagggtcctctgcctaggaaaaccagagacctttgttcacttgtttatctgctgacct

SEQ ID NO: 1211 - DNA, 983 bp, Artificial sequence
  DNA replication origin
ggcccatgaggatattgccgtgaaaggtccggtctctccgcctcctgcccccgccgggtccggccccccccctggggtcgcgttgtcacggagaccggcagccggtggtgctggcccgcggggcggctgctgctgccggcggcggcggcggcggaggcggcggcggcggcggcggcggcgtcgggcgtgtgtgaccggccccggccccctcctcctcctccccccaggctccccccagccccccgctcccgccgcctccccgggtctgcccccatcccgcccccccgctgcccccggcccctgcaccccggcgcgcccggtcccgctctgggggggttggtggcttcgctttgccatgagtttaccgcagaaaccggctctgaaatcaggcacagcgactgcagcaggaaccggacccggcaccggagcggcggcggcggcggcagcagcggtaccgcctcctcacccggcggcggcagcagcggcggcggcggcggcggcggcggcggcggcggcagcggtcccccctcctcacccgaacatcagggccctccagactcaggcgccccaacagtatccttttcaccttcctgtcggcccttcggttctcgtcgtcgcagtccagggggaccccgcagcccaggggaccctcctgccggccgccacagcccagccaggaaagggacagcggctcaagcccctgcatcgggcttgggcggagcttttggggtgccccggcagcagcactgcggggggacccccagaccctctgcaatactgtgaaagctagccccacttggccatgcttctgcagccccttccttttagagcttggggtcccttctcccctcctcccctaaggtaccctccccccctttattgggcagaatttgcttggtgcctgggaccaaccctgcagggaaggcttttctctggttgttgtgaggattacaccctcctgctcttcacctcccctcggctcc

SEQ ID NO: 1212 - DNA, 1635 bp, Artificial sequence
  DNA replication origin
cgcctgagtctggagggccctgatgttcgggtgaggaggggggaccgctgccgccgccgccgccgccgccgccgccgccgccgctgctgccgccgccgggtgaggaggcggtaccgctgctgccgccgccgccgccgctccggtgccgggtccggttcctgctgcagtcgctgtgcctgatttcagagccggtttctgcggtaaactcatggcaaagcgaagccaccaacccccccagagcgggaccgggcgcgccggggtgcaggggccgggggcagcgggggggcgggatgggggcagacccggggaggcggcgggagcggggggctggggggagcctggggggaggaggaggagggggccggggccggtcacacacgcccgacgccgccgccgccgccgccgccgcctccgccgccgccgccgccggcagcagcagccgccccgcgggccagcaccaccggctgccggtctccgtgacaacgcgaccccagggggggggccggacccggcgggggcaggaggcggagagaccggacctttcacggcaatatcctcatgggccggcggcgggggatctttatccccctccccggaggaagcggcgcccttctcggtagcggggctcaggcgatgccggtggattttcttcactcaacgagcagagcatccaacatggcgctgtggccgcctccagcagtccggcaggacggctgctcggaaaacttcggactttttcggaatggctcgggaaaccgagggtgggaagcctcttcggctctttccggagactgctaggggtcgggattcttcggagacgctcgggtgcgtcctcggccgccgttcgggagggctcaggggctaactcgcttcctcggcaaagatcggcgagggaggcttcgctggcttacagcggcgcgggtgcggggcggagggaaagaccaaaggcgaggtctggcttgcgagagtcctcccctgcggcccagcctcgaagaacaatggtaatggccccggagtcggctgttcgctgagccccgctcgcaggggcggagaggcagcggcgaggcgaaaaacccctggagaaggaaccgcttaaccggaatggaacccgttggatagggaccccccgcggggacttcgcgtaaccaatgccacccgccggcctgtaacccacgcatttcacacccattgtgtcgacacttcctcagacgctctgagaggtgaatgaggagccccatttccagaggacacagaggaaaagtgactagcccaaggtcaccctatcgggaaaggacagagcctaaatctaaatgccaccttcatctggatgaaccttgccgcctcccatattggctggggacatgacctgagccgccatatctaatcagcagccttaactgagctctgtggatggattcaaacctaggccttccccaggactggagcgccctttgaccagcagccagtgatcagctccccaatgtcctatgctgggtgacatttgttgataaggattttcttcccagctagacctgccaagatcactcccacccccaaccccgcacaccccactccttagcaggtgccttgtcctaagcacagtggcattgagtgggaaagaatggcaggcatcgg

SEQ ID NO: 1213 - DNA, 1371 bp, Artificial sequence
  DNA replication origin
ggagcggagggcgcctacctgcaggccgttggggtatgcgtcgccctcggagagcgagtccaccaggtcctcctcgtccagcgtggcccgcttgtacgtcgacatctgcaaggccaaatgcagcacggactccctcagcgcctccatggctctcgcgcccgaatggggaagcggccccgaccctggcgccgccgccgccgcgccccgccccggcctggacacccgagaccgagaccggcccacggagcggcccgcgcggggaggggtcccgcccgcctcccgcccccgccctccaggccgcgcccgcctcacccccagcgccgacagcagggcggacaccgggggcggccacacgccccgcatgctgtgccccagacgcctggtcccgctgcccgggtggccgggatgggatgggccgggccaggcgttgcaccaccttcgcgggcggggcctgatcggttcgccggcgcccggttcccaacctccggcctcccggggagaccccaagacccgagaggcccgggggagatggggacccctcccttccccggaggtcgggagtgggggcccccaaactgaagcccctagcaggcaggaaaggccctcacagtgacccctccttcgagaaaatcttaagtcccccttcaacaaccgggtccccagtggcagataacaaaagtatcaggaaggtgccctcgatgtggcccagagcaatcaagacaggttccccccggcatcagcccttaggtgtgtctagggggttaatgctagaaagaccagacaaaaaaggtggggtaaaaaggtaggtgtcccctttcagttcccctttctagctcagaggcctttaagccagagttcgtgaatgagtttcagaaaatttcagagaactccctgacacgggatgaaaggagctgtgtgtgtgcatttggatggctgcagggtggtccggtggtcacccccgtgctcaaaggtgtcgccctccctgcaacacaagagaaccattgctccagggggagtcagaagccaggaaggggacccttctttcccatcttccccctcaagactcggagcctcagccaggtgcccccctccccagcccctgagccctctcctataaccctaggcagggaaagggggctctctcggatatgaggtgttcagttagggactcaggcccagcactgtcccaaccaagaaccccagagaggtctaacccagcagatttccaaaggactctccgcttctagcaaggcgggaatccctgcatttatgcgtacttttcagctttgcaaagtgcatttctgctcattccaaatttgattctcacagtcacacatatgtgtgaataaacaggtttagaggggtgagggg

SEQ ID NO: 1214 - DNA, 902 bp, Artificial sequence
  DNA replication origin
actgatcctggcactttacaagaatctcgtcgcttatttaaacaactctctaagcttggcactatccttattcccattttacttatgcagaaatagaggctaagaattaagtactttgcctgaggctgctccagtaaatggcagagctgggattcaaacccaggcaggctgggccagagcttgaactcttgatctgtgttagtccagggggaggggggaggagggggggagagagataggagagagaggggagggaaggggaggggaggaaacaggaggagagcggaggagacaggaggagaggggaggagaggggagaggaggtgagggaggggaggggaggggaggggaggggaggggaggggaggggagggggagaaagatttcagtccaaggtgaccctgagagaagtcagtcaggcgaggagttagagggaagggggctgcgggaacacaggatgggggtggggtgggcggatggtgaagtaagtttctaagaacagctatggaaagagaaacaattgggacatgtgtcaacactgttacaatattagtgccatccaattcttggagtctagcaccagatatgcaccatgcatgctctgagtgctgctcctctcactgaatatttgcagtcttcctgggagggacttatcctcacttcacagatgggaaatccaaggctcagagaggaagacacgcctgctaaaagtccttggtgacaattcaatggcagatccagggttcaagctcaagttgatcccatggcccttggtcttaaccactaggtcacactgaacaaacaggtattggtggtgcgtggtagggatctgatgcagaaggtggggggagctgcccagtttttcacccgggacctgcacttagtgcctccgcctcccccac

SEQ ID NO: 1215 - DNA, 763 bp, Artificial sequence
  DNA replication origin
gtgaagtaagtttctaagaacagctatggaaagagaaacaattgggacatgtgtcaacactgttacaatattagtgccatccaattcttggagtctagcaccagatatgcaccatgcatgctctgagtgctgctcctctcactgaatatttgcagtcttcctgggagggacttatcctcacttcacagatgggaaatccaaggctcagagaggaagacacgcctgctaaaagtccttggtgacaattcaatggcagatccagggttcaagctcaagttgatcccatggcccttggtcttaaccactaggtcacactgaacaaacaggtattggtggtgcgtggtagggatctgatgcagaaggtggggggagctgcccagtttttcacccgggacctgcacttagtgcctccgcctcccccacccctatttgggctgaaggcagacagcacagctccagcccaccagagccgtggggggggcgggggggtgggtgggtagtagtgtggcctggctaaggagtctctcaaatatagtggggaaataaaataagtagcagagagatgggccaaccatggcccattctcatcttccctccctaaccgcgttcatcagaaaacagcatatgtgagggccagcacgcagccattctttccggtgcttcaggaggttaggatgacagagccacgggctgggcgcagtggctcacgcccataatcccaacttctttgggaggccgaggcaggcaaattacttgaggtcag

SEQ ID NO: 1216 - DNA, 1040 bp, Artificial sequence
  DNA replication origin
cttgcagaaggaccatttgggaaagctggtgggcccttcattcttggtacccgccctaagagcctcactgcgactctgtccaccctgggtgagagccctccagagtaggcccccagccgtgagagccccccacccactgaggcttggcatcaggtcgccctcggtctgaaccctgctattccctggctctgggactttgggcggctcaatccacctctcagggctgcagcgtcctcatcttcagggttgtgagcacccaaggaggccctgcctcattgtggggacagaagagaatggagcagtcacatgcctgcccctaaggagctgcactctaggggaggaagctggagaccaaacaggcaaagccacccaccagaaggatcgctccgagagaagaaaggagacaaaacagggcgatgtggtggagagtggctgtgaggggagggggccgctctagaggagcggccaggaaaggaggtgatgtctgagctgggacatgaaggttgaggagggggcagccgggcaaagacgggggcgggggagatgagagttcccggctgccggaacagcaagtttggcacatgtagggggtgaacgctggtgtggccgggcagaggcagtggagggtggagggaaggctagggagaggtgggcctggaggggcaagccatggacagccttgtctgtggggcaggggtcagcatttcgttctaatagtggtgggaagccactggaggaccccacgttgaggggcgactgggcttggtttctgtttggaaagaccttggctgctgtgtagagcatggactgtagggggcaggagggaggcaggagcgcgggcctcaggatattcgtctgtcctgaggctgaggaggcgtaggtttctgcaggatctgggattttggctgctacttcagggatgggagagaggtagccaggcatcccagatgcttcgagaccttgctggcagcagagcacagtgggcaaaagttacctgtggagccagacagacctgtctgaacctccacttcaactcagcc

SEQ ID NO: 1217 - DNA, 1452 bp, Artificial sequence
  DNA replication origin
ggagctgcgcgaagccggggcggagcacgcgagctatggtgagtgctgcgcgcggaggtctggtccggtccagcccagcctcgacggtcgcgggcagcggtgccgcgggtggcacccggggccgccctggctcgcggggggctgggcgccggctgcagcagcagcccccgcccggctctcggaaggcgtggagtcggggagcgcccgggcagagcgcggctctcccggcggcgctgcgcttggtcccgtcgggggcggccgcgccgagcttggttctggtcccagccggatgtggggggctcggggtccccggttcgctttggggacggttgctgcggtctgttttgggttgttctgaagtccctggactcagcttggcttggagacccagggcagccgggctgggtcgggctcgcgggtggcggcgatttcgaggtgcctggatgcagctggacctgagcgtcccgggacactgaggtcggtctggggctcgccttggggcactgtgggtggccacgcccggcgcattcggagggctaggttgcggccctctgggactgctgatccagctgtggcctaaggggtgtatgtggtggcgacgcagctaggtcggtgctgtcagagaccaggggacactcaggggccctgcacccagcgatccggtctccccagcatctcccggtgatgggtcctcagaggaggggcttgctgaggccgagtgctgactgcgataggcaggagtaccagggagaaagggaactggggaggggcgtttcatggggctctctaaagccccagaagagaaatccatttgatccaggctgggcttcctgggggggggctgttgggaggggcattgtccctggaccccaagagcaaaggccctttgtccacttgtccagggccgggtgccggcctctccatcacgggaagggagccatctacttctctttggtttctttccctatagacgagccactcggattccctctcctagttctgttctgtgccctgtgaagtgggtcaaagtcaccatgtagggctgaggagggcatgtgcctgggatggtggctgccagtacctgtgatccagcccctccacttctctgtgatgatgctgccaagcccgagggcgcctggatgggagcaggatgggaccccctgtaaagccgaagagtcccacagtggttcccagcccctgctgtgcccagagctggagtccccttacaacccgcccccccatctctcccttccaaggcctcttctcacccagctagggtcttctttgcttaggcaccgccagttgcctcactagagtcagaagtggtggaattatggcttagttctatacctgaaggtgcttagagaccacgtgagactcaacctacctcctccattaggaatctcccctgtaatgccccacccagaccgtttccgacacagggagtgcact

SEQ ID NO: 1218 - DNA, 1980 bp, Artificial sequence
  DNA replication origin
ccagctgctcggacggctcggctgcctggcccaggcggcgcgctcagctccagcgggcgagctcgcggcttcggcgccgagtgccggaggggcggggccgccgcggggccaatggcagggcgcgggggcctgggtggcgcagccaatcacggcctgaggctgcactccccgcgcccgcgcgggcccttaacccttggcgcgctgggagtcggctgcccgggctgcgcggggaacctggagggcaggagcaggcgggagttgttgcttcggggcgcagggtccagaccttgccgagaccggcgttgggagctagcagaaccgggaagaggctcgattgtgtccggtggggccgccgggagcctcggcgacctttgtctcctgcctggctcctgcactggagtgtgacccggggcgctgcagctgcttgtgtgtgtgtgtgtgtgtgtgtgtgtgtgtgtgtgcgcgcgcgcgcgcgcgcgcgcgtgtgtgtaagagggaggagaagaggagacagaaacggtgggaggggtggattccgcgtgcccgtgtgcttatgtgtgaaggaaagtcctgactatatttgggatttgttgctctgtgtgtatatgtgcgtgtgtgtgtttgctatatttggggttcgttgctgtgtgtgtgtccgctgtatttgaggtttgttgctgtgtgtgtgtgtccggtatatttggggtttgttgccgtgtgtgtgtgtgtgtgtgtgtgtgtgtgtgtgtgtgtgtaagagaggaagagagatgaggagacagaaagtgggggaggggtggattccgcgtgcccgtgtgtttatatgtgaaggaaagccctgactgatttatttgggattcgttgccgtccagggacttcaggacaacctgtgtccgctatatttgaggtttgttgccgtgtgtctgtgtgtcgctatatttggggttcgttgctgtgagtgtctactatatttggggtttgttctgtgtgtgtccactatatttggggttcattgctgtgtgtgtgtgtctgctatatttgaggtttgttgctgtgtgtgtgtctccgctatatttagggttcattgctgtgtgtttgtgtgtctgctatatttggggttcgttgctgtgtgtgtgtgtccgctgtatttggggtttgttgctgtgtgtgtgtgtgtccccgtgatagaggggtgagggagggaatggtagcaaagcagagagaaggagccgtggctctctaggcgtgtgaatttgcaggtccaggagagacactgtctccacgtgtaggttttgtgaggtcaagggaaggaggaaggaacagaagacagcctgcctgtgtgtgtgtgtgatgtgtgatctccacttttgggtcctgttgtacatgcatgttaatgtggtagaaagaaatgtggtgtccctgttgtaaacaagttgtgaaaaaatcctgggtttttgtggtgtagtttgcgtgtgttgtacgtgcccacacaaaagagggacatggctgtgatttggtacaactttgtgtgtaacccagtttgcaagagacatcgagataaaaacattgtgtgtgtggtgacactgtggtctttgtgtgtgactgttgtgtgacttttgtgatcatctatatttgggttgggctgagaaagagaaactactgtgtagggggcataatgagtgtatgttcaggagaaagacatcctggcggcattgggatttgggctttgaaggatgtctaagagttcattaggccagacagaatgctcgtgaggccagagggaaagatccggggaatcctgcctatcagccaacgggggtgaggaggctgtagtggtgggtgaccagggtgaatttggaaacagaacctactgccagcaaggaagaggaggagcaactgactgcaacccttgcccaggtgctgacccagagtggccctggatgcgtctgggcacacagagtcattctaaagcggaccatc

SEQ ID NO: 1219 - DNA, 1301 bp, Artificial sequence
  DNA replication origin
gcagccgggcagaggcgcccctcacctcccagacggggcggctggccgggcagagggctgacccccccacctccctcccggacagggcggctggccgggcggggggctgacccccccacctccctcccggatggggcggctggccaggcggggggctgacccccccacctccctcccggacggggtggctggccgggtgggggggctgacccccccatctccctcccggacggggtggctggccaggctgaggggctcctcacttcccagtaggggcggccgggcagaggcgcccctcacctcctggacggggcggccggccggacggggggctgacccccccacctccctcccggacggcacggctggccgggcgggggggctgaccccccacctccctcccggatggggcggctggccgggcggggggctgaccccccccacctccctcccggacggggtggctgccgggcggagacactcctcacttcccagatggggtggctgccgggcggagaggctcctcacttctcagacggggcagctgccgggcggaggggctcctcacttctcagacggggtggttgccaggcagagggtctcctcacttctcagacggggcagccgggcagagacgctcctcacctcccagacagggtctcggctgggcagaggcactcctcacatcccagatggggcggcggggcagaggcgctccccacatctcagacgatgggcggccgggcagagacgctcctcacttcctagatgtgatggcggctgggaagaggcgctcctcacttcctagatgggatggcggccgggcgcagacgctcctcactttccagactgggcagccaggcagaggggctcctcacatcccagacgatgggcggccaggcagagacactcctcacttcccagacggggtggcggccgggcagaggctgcaatctcagcaccctgggaggccaaggcaggcggctgggaggtgtaggttgtagcgagccgagatcacgccactgcactccagcctgggcaccattgagcactgagtgaacgagactccgtctgcaatcccggcacctcgggaggccaaggctggcggatcactcgcggttaggggctggagaccggcccggccaacacagcgaaaccccgtctccaccaagaccagtcaggcgtggcggcgtaggcactcggcaggctgaggcaggagaatcaggcagggaggttgcagtgagcggagatggcagcagcacagtccagcttcggctccgcatgagagggagaccgtgggg

SEQ ID NO: 1220 - DNA, 980 bp, Artificial sequence
  DNA replication origin
gggagggaggtgggggggtcagccccctgcccggccagccgccccgtccgggaggtgaggggcgcctctgcctggccacccctactgggaagtggggagcccctctgcccggccagccgccccgtccgggagggaggtgggggggtcagccccctgcccggccagccgccccgtccgggaggtgaggggcgcctctgcccggccacccctactgggaagtgaggagcccctctgcccggccagccgccccgtccggccagccgccccgtccgggaggtgaggggcgcctctgcccggccgcccctactgggaagtgaggagcccctctgcccggctagccgccccgtccgggagggaggtgggggggtcagccccctgcccggccagccgccccgtccgggaggtgaggggcgcctctgcccggccgcccctactgggaagtgaggagcccctctgcccggccaccaccccgtctgggaggtgtgcccaacagctcattgagagcgggccaggatgacaatggcggctttgtggaatagaaaggcgggaaaggtggggaaaagattgagaaatcggatggttgccgtgtctgtgtagaaagaagtagacatgggagacttttcattttgttctgcactaagaaaaattcttctgccttgggatcctgttgatctgtgaccttacccccaaccctgtgctctctgaaacatgtgctgtgtccactcagggttaaatggattaagggcggtgcaagatgtgctttgttaaacagatgcttgaaggcagcatgctcgttaagagtcatcaccaatccctaatctcaagtaatcagggacacaaacacttcggagggccgcagggtcctctgcctaggaaaaccggagacctttgttcacttgtttatctgctgaccttccctccactattgtcccatgaccctgccaaatccccctctgtgagaaacacccaagaattatcaa

SEQ ID NO: 1221 - DNA, 958 bp, Artificial sequence
  DNA replication origin
caggtccaggtcgtcgggcggcgcgccgccgccgggcgcgcccaggctcagtcctgggcccgcgtactggtacaagatgagcatgaagcacaccgggcccgccaccaccagcacgaacttgctggcgcgctcaaccatggtcctgccgctggcgcgccgccgccgcatgtgtcaccatcgccggggcccgggcgcggggcgcggggcctgggagggcaggaggcgcgggcgcagctgcctccgccgccgcccgcgctccggcccggcccggctactcggcgcccaggccgcccgcagcggcgcgggccccgaccctccgcggtgccatggctgctccccgcccggccccggctccccgggcccgacgcccgactccgctcccgctcggccccgctcccggccccggccagcactgcgctctccgcgcccccagcaccagcccgctccgctccactccactccgcgccgagaacgccccccctggcttattctttacttttcctacttttccaggctcagcagggagctgctggatgagaaagagcctgaagtcttgcaggactcactggatagattttattcaactccctgtgggtacctggaactgcctgacttatgccagccctacagaagtgagttttactcattgcaggaacaacaccttggcttggctcttgacttggacagtgagtaccttactatgaaggtgataagactccacctggtcctccagatatgggtgatattcctgttccaagtggtccttattgacccgagagatgtcattgccgcaggcaggacccgtgggcgcatagaggttgtaatgaaattgtagtttcagttagaagcccagacatgaaatgggtcagtgagcatggctctctattcctagtctccggccatgcctgtggcaacctgagcccactctcagcacattggacccaggcaggtgtaaaaa

SEQ ID NO: 1222 - DNA, 1099 bp, Artificial sequence
  DNA replication origin
ctggccaacaaccgccaggtgcgcatgctggccgacctgagcctggtgggctgctacaacctgtccttcatccccgagggcaagcgggcccagctgctgctcgagagcgccaagaagaacctgcggggcatggccttcttcggcctgaccgagttccagcgcaagacgcagtacctgttcgagcggacgttcaacctcaagttcatccggcccttcatgcagtacaacagcacgcgggcgggcggcgtggaggtggatgaggacaccatccggcgcatcgaggagctcaacgacctggacatgcagctgtatgactacgccaaggacctcttccagcagcactaccagtacaagcggcagctggagcgcagggagcagcgcctgaggagccgcgaggagcgtctgctgcaccgggccaaggaggcgctgccgcgggaggacgccgacgagccgggccgcgtgcccaccgaggactacatgagccacatcattgagaagtggtagtggcggtggtggccacggggaggcctcttggggtgtgtgggggataaaacaggacagacgacaggtccacccaagactgtcaagggatgagcatcccaaacctgctccacagaggtagctgcgtcctgaaaaaaaacacagcagggacatagtggggctgggcagggatggggcttgagaaatcaacaggtgcagcccagtgggtcagaggaaagcgtgctcgaaggatgccatggtcagggcagagcctccagagcaggtgttgtgcctggagctgctctcctggcctccttggatttatcgcaaaaactgaaggtttgcgtgagagacgaggacagcggaaagtggacctgccaggccgggagtgtgtccctcaccaactatgcacacagcactcgctcttagctcctctgtccgggctactaggagtgagaccagcttctggcaactgccccagctccaggccatcccatagctcctcctcttctggctgcccccaatgccccgaggcctggggagcccccagctcacccatctgtagctccctcaaagtcagggcccaccccatctgaggcagagaagactcgagtccagc

SEQ ID NO: 1223 - DNA, 1016 bp, Artificial sequence
  DNA replication origin
cctgacctccctttgaaagaaccacaccactaaatccccttggcactcgcttccttagtgtgatgcatccacccagggaggtggccctgcgcggcgctggcacgctgtccaccctgccctgttgaccatcctgtccttggaccccaaagtaaaatggggccagtgtaggagacctgagggtggggcccttatgccagacctccaggggtagcaacctcatctgaccccagcttcggcttcctgtgctgcagaaggcgcttgctcccaagccggtggtgacccacgtctccaccccatggtggggcaactgtggtggctgagtggaagctggggcaggagagaggacccccaccaaccccagccaggtggcctgcagagcccactgccctagctctgagtcagcctgcggcctgagcacaccaatctgctctctgggggatccagggtgcccgtgtgggccctcctagagacaccagcttggcctcctagggcataaggaatggggacagggcacagggcacgtgcttacaacggatatgcaacgtggcttttagtagggccattgcagccagtggggaaacctgcgcggctgctgggaacagagcatggccagccttttgccagggggtggggagcatggggaaatgcaaggagagccagggtggggagggctgagtgtctgttgtcagggaggccgcctacagctgttttgccaaggctagttgagaatctgaaagctcgagtcccagttcctggccatacagagccactgtggtccgagggtatggctcctgggcaggggctatggtcccatgctccagccgatggaagcctgatgaacttaatccgtacgctggtgggagcagtggtatttgagctcttgagtatgtgtttcggtgatggggctggggcagcctgctagcaaatcccagtgggtcagaaaggagaacagaggcaggggagccctcggtccccagcccttccagtctgagccaggcctgcctggatggtcacct

SEQ ID NO: 1224 - DNA, 1946 bp, Artificial sequence
  DNA replication origin
atgaccagggacctgtctccctctctaccaggaccctaacactgccgcagcctcctccttccaccagctgcccaagcacccacccccagctgcccaagcacccccacttctgggctcggcttcaccacagagctctcggccacctccttggggatcctgacactctcagacactatttctcagggctctggctgcaccccagggcgctcagactcctccgccggacctccccggacccgtccccgcccccacccggagggcgcgagcccctccccccgggcctctggctgcacccagaacgctcaagccccttcctacctggacctgcagctggtgcttgtgcaaggcggagtggatcagggcgagggcggaggagtctgagcaggccggggaggggcctcggcggggcgaacggcctctgcctggcgagtagcaccgcggtggggacggggtccgctggccccagagtccccgcaggctgcgctccgacgcatccacggtgcacttggagccgctcagctggacgccgctctcagcctcggacaggacggcctgagggtagaggagggaggcagaaggaggccgcagagctaggaaccgtggggttggctgggcaaagacgcctaggcgaggctgggggccgcctcatcccaaatgctgcctcctacaagaagccttcctgatttcacctcctccactaactcagccctcagctcgccgctgaggcctcccgtttattgcaaagacatcatttggcattgctcacaggtgggctccgaaagggccgtgcctcccctctgagactgggggctccccagggcaggggccaggtgagttagcaggggtgctgagcagctacagcctgggtcccaggcccccacccatttgcagttcagtcccaggccaccgaaaggcgtggcgagggagcccggggtttcctggcagggccctgtcttcccacctctctgggctcacacctgtgccaggtcccttaggctctgctgtagctcctctccgtcctctgtctccagggccgcctgctcctgtagccacagggattcctggagtgcggtgagggagacaaagggtagtcggggttctgtcttatctgaaacctccccttcccctccctccctggcccaccactgaccaggtggcctctgaagccatgtccataggccagccacctggtagaccccacagcaggcccgagaccctcactgaacagactaggcccagagaagagctgtgttctgccccaggtcacacagttgatgggaggagacccggacctagaacccaggtcaggccccagacaggggggtgaccaaaccaggctgtacccccgaagagtgagtgtcccactggtcgggggagggggtgaggggaagctgggttgccagaggcagcatctggacctggagacagtggatgggagttcaagtcccgactctcccgcttactggctctgagactggacaagcatttcccctcttgggcctcagtttccccatctgtgtcatgaggattgcgctacagggctgctgtgaggaagaaatgggatggaggaggtgagtgtgcttaccacaaagcctgcacacctgtgagggctgaacctgcgtgtgagtgggacgctgggggtggcccaggcagcccagccctaagcctgtgtccatggatctgtccggtaccccatcccacactgccacatctcaggggcagctgcagctcaccagggcctcaagcttcttggtgaggtccttgttgacctgatccttctccagattctgcttctgaagacgctccactgccaggcccagctctgtcactctggagttgggggaacagcagaggtgagtgggggaccacccctgcctctcaaatccactagttctgtgtccaccatgcttctccaaacccgaggcagggaccctaacatccacctc

SEQ ID NO: 1225 - DNA, 1307 bp, Artificial sequence
  DNA replication origin
gcctcagcggcgagctgagggctgagttagtggaggaggtgaaatcaggaaggcttcttgtaggaggcagcatttgggatgaggcggcccccagcctcgcctaggcgtctttgcccagccaaccccacggttcctagctctgcggcctccttctgcctccctcctctaccctcaggccgtcctgtccgaggctgagagcggcgtccagctgagcggctccaagtgcaccgtggatgcgtcggagcgcagcctgcggggactctggggccagcggaccccgtccccaccgcggtgctactcgccaggcagaggccgttcgccccgccgaggcccctccccggcctgctcagactcctccgccctcgccctgatccactccgccttgcacaagcaccagctgcaggtccaggtaggaaggggcttgagcgttctgggtgcagccagaggcccggggggaggggctcgcgccctccgggtgggggcggggacgggtccggggaggtccggcggaggagtctgagcgccctggggtgcagccagagccctgagaaatagtgtctgagagtgtcaggatccccaaggaggtggccgagagctctgtggtgaagccgagcccagaagtgggggtgcttgggcagctgggggtgggtgcttgggcagctggtggaaggaggaggctgcggcagtgttagggtcctggtagagagggagacaggtccctggtcatgcagagccaggaccctgggaaaaggtctagcaagggaaatcagagcttgggaactaggggcagagccagggtagggaggagtctgagagtggaaccaggatgcaagggggaggagcctgggagccctcggggtggtgtcagaacccaggagaggagtgtgcctgggggtttgtctggcatcggtgggtgggtgggggctttgattggagttgtccgggaccccagggaggtgagggctcagagggtggtgagagcacattggggagtggaatcctggctctcaaacgtaggcctagaggaacagatgtagcgcctgcgggacaagaccgagggcaccatgcaggtccacgaggacgcccagcgcgaggtgcagcggctgcggagagccaagaagctcctgagcaggtgctggggaggtctgagctgggggctactgaagaataagtcagcgtttgggcataacaccagtcgagccttatgcgtgtgactctgcactaatatggtcgccactagctacatgtgcctattaacatttatttatttttgggatgcagtctcgctctgtcccccaggctggagt

SEQ ID NO: 1226 - DNA, 972 bp, Artificial sequence
  DNA replication origin
gaggagccagtgggctgcaggcgcaggcgcaggcgcaggcacaggcgaggggttgggtggcggttgagacagcggcggtactgggatgggtaggtgaggatcccgagactgagtgagcttctgcgcgcggtgcttttgggaacgcgggactggcaacctgcggcgccaggagctgggccgaggcgcggcggcgcggctgcgggccgccgtctggatgggaagttacggcgaagtccacccagcgtttctcaggtgagggcgccgcgccaggctggacgggcggtgaatccgggaccggcgggcgcacacctgggtcgaggcgcggccgtcgcaagttttgttgcgcgagcgcgggggcgggtgggaggtggggggtgtggggggtcgtgcaccgccgggggctgagttccccgcgctggattcttcgcctgccgctgccgccctcagcccagctctcgtgggcgctggggaagaaactcgctggcgggtgttctgtggcatcccagggggtggagggacggagcagcttcgggggcacgtcctcctatatcctgtagaggacactgactccgcaccccaccctcgaggccggaaatcggttccctctgcgggcctgagaggcgagagcgctcgcgcccctgacttgcaaagttggggtctttactggcctccgggcttctgctcctggcggtgtctccaggctggtgatgggcaagccaggtgtgccaggtccaggatgcacatgaggagcgtttgtagccatcactgaatcacctcctgactagcggggcaagcctcaaatgaaccgcaggatttcggctaggttggattgtggggttgctgtttgcactccgaggagttgctgtggtttccctgtgcctgtctgtctgtctttctggcttcttagatcatcatctcatgtggcgtcctttcaccgaagagttaaccaagacgtttggcctagtttccttg

SEQ ID NO: 1227 - DNA, 918 bp, Artificial sequence
  DNA replication origin
tctctgcctggctgcccatcgtctgggatgtgaggagcccctctgcccggctgcccagtctgggaagtgaggagcgtctctgcccggccgccatcccatctaggaagtgaggagcgtctctgcccggccgcccatcgtctgagatgtggggagtgcctctgccccgccgcgaccccgtctgggaggtgaggagcgtctctgcccagccgccccgtctgagaagtgaggagcccctccgcccggcagccaccccgtctgggaagtgaggagcgtctccgcccggcagccaccccgtctgggagggaggtgggagtcagcccccgcccggccagccgccccgtccgggagggaggtggggggtcagcccccgcccggccagccgccccgtccgggagggagatggggggcgcctctgcctggccaccccttctgggaagtgaggagcccctctgcccggccaccaccctgtctgggaggtgtacccaacagctcattgagaatgggccatgatgacgatggtggttttgtggaatagaaaagggggaaaggtggggaaaagatagagaaatcagattgttgctgtgtctgtgtagaaagaagtagacatgggagacttcattttgttctgtactgggaggggttcttctgccttgggatgctgttgatctgtgaccttgcccccagccctgtgctctctggggcatgtgcggtgtccactcagggttaaatggattaagggcggtgcaagatgtgctttgttaaacagatgcttgaaggcagcatgctccttaagagtcatcaccactccctaatctcaagtacccagggacacaaacactgcggaaggccgcagggtcctctacctaggaaaaccagagacctttgttcacttgtttatctgctgatcttccctccact

SEQ ID NO: 1228 - DNA, 1188 bp, Artificial sequence
  DNA replication origin
atcttgcaccgcccttaatccatttaaccctgagtggacaccgcacatgccccagagagcacagggctgggggcaaggtcacagatcaacagcatcccaaggcagaagaacccctcccagtacagaacaaaatgaagtctcccatgtctacttctttctacacagacacagcaacaatctgatttctctatcttttccccacctttcccccttttctattccacaaaaccaccatcgtcatcatggcccattctcaatgagctgttgggtacacctcccagacagggtggtggccgggcagaggggctcctcacttcccagaaggggtggccaggcagaggcgccccccatctccctcccggacggggcggctggccgggcgggggctgaccccccacctccctcccggacggggcggctggccgggcgggggctgactcccacctccctcccagacggggtggctgccgggcggagacgctcctcacttcccagacggggtggctgccgggcggaggggctcctcacttctcagacggggcggctgggcagagacgctcctcacctcccagacggggtcgcggcggggcagaggcactccccacatctcagacgatgggcggccgggcagagacgctcctcacttcctagatgggatggcggccgggcagagacgctcctcacttcccagactgggcagccgggcagaggggctcctcacatcccagacgatgggcagccaggcagagacgctcctcacttcccagacggggtggcagtcgggctgaggctacaatctcggcactttgggaggccaaggcgggcggctgggaggtggaggttgtagctagcgagatcacgccactgcactccagcctgggcaccattgagcactgagtgaacaagactccgtctgccatcccggcacctcgggaggccgaggctggcggatcactcgcggttaggagctggagaccagcccggccaacacagcgaaaccccgtctccaccaaaaaaatacgagaaccagtcaggcgtggcggcgcgcgcctgcaatcgcaggcactcggcaggctgaggcgggagaatcaggcagggaggttgcagtgagccgagatggcggcagtacagtccagcttcggctcggcatcagagggagaccgtggaaagagagggagagggagaccg

SEQ ID NO: 1229 - DNA, 907 bp, Artificial sequence
  DNA replication origin
agggagaccgtgggggggggagggggagggggagggcgagggctttttttgtttgttttttttgaaatggggtctcactatgttgcccaggctggtctcaaactcctgggatcaaaagcaatactctcacatcatcagcctcctgagtagctggaattacatgcatgtgccactgcacctggcagggatagcttctttcctgcctccgttctggaaaataccatggactgctaaggctgggcctgcctgaatctgttttggcctctggaatccagcccccagcacattgccttgacccttcctcttggcttgctgccttctccagggctgagaataggaagcaacatgctctctctgagcttggtacttcttcacaagtccctttagagaggacactgtttgccagacaatggggttttctcacagggcaggctccgcaggcctttgttaggaggacttcctttaagggcagctggagctggaagacaacccgggccaggggctggccggctgttagggtactgagctcagagctgactgctaggagggacctggggcctggggatggagctgtgggtgtgaagggacacggtggattggaacaggagactgactgagatagagaagatgaggctggagcaaagactggagtcaagataggatgaggtcaggagctggggcagtattagaggaacaagcccgggactgggagaaggcttgagggtcagaactggtcctgggggggcatgtcacacactgctcaggagcccaggcatcagacacaggcagcccgggttccatccctccttcttccctggctatctgggtggtcttcatctcagcccctacttccctcatcttcaatcccctcaccttcgctccactgaacaccctatttaatgccaca

SEQ ID NO: 1230 - DNA, 803 bp, Artificial sequence
  DNA replication origin
agcctgcggacttctcactgcgaagttgcccagagaattcagtgctcagaggaaagggagtggttattccatcagagctggttccccaggagcgggagcagggcctgtagcacccagcctctgtccctggctcccgtctatccgggattttagcgtttcctctgtagttttcaagcactgtctcatatgactctcgcaccagcgagaggccaggggagatggtgtctgcctgttaaagaggggcaggctggtccacataggtcaagtgacttggccaaggtcaccagagcagagttttgaacttgagctgtctgactcaactgcctgggaagtgcctgcccctcctctggcatccagggagcatgtcctggggctctggctgggacatagccggacacctgcgggccctttacgtctctaaagagagaaagagggaagggcccctgtctagggggtggtttccctccagatgccacccctccgaggtccccttctgcttcttcttgcggtagccagggaggcagcccacgggcagggaagcgggggtgggggtgcagagtcagaggtgcacgtggacagagacagagagacagggacacgtgggcagagacggataaagacagagacccagagaaagccagatatgttgacagacacagagacagacgccagagaggaaggcagacaaagagacgggtggagacaaagactcccaccaagagacgcagaaggaagatgccgacggtaaagacaaaacaggagacgcgcgcaaggagcaggtcagagcccaggctcgctgagag

SEQ ID NO: 1231 - DNA, 1342 bp, Artificial sequence
  DNA replication origin
ctcccggcgcgcgctctgggcgggacaggagattggacgtggcgcccgcggagccggcgaactcaggggaccgcgctcgggaccgccctgcagtcccagggtctcctacctcccgagccgctgcctgggaccctgcgctctgtctgggcacctgcccttggtgccccgtgactgagcccctcctggtgcctccttagccgtagctctagagacctgggctgccaaccccaaggcctcgtggcctggcgccctcccaggcgtcccacctgacccggtggggtctaaagcagtttggtttgggaggaggagagggcaggaggcgcttggaatggggggcgtggcgggaggagacagaggacacccgcgtgggtgtcaaagtgtgggcacccactgtgggcaccgcagctgtggggcaaagctctggagcccgcgaagccgaaggagcctgccgccccctttaggctttgcgaggtgggcctcccagggctgcttccctgcccagtcttggtaagaaagggttaaacgcaggtctcagcagaaaggcaggaggccgaggaaagcctcccccactccccattgtgccttatgactctttttcaacacataatggggtcgaaggcggggcctttacaaaggcctctgggtggagggtgaaattccttgagatcaaaagagggggcgattcttgggccaggaagggctttgggccctgggaaaaagtcagaccgctcaggtgggcccagctgcccagggaggcaggggttgggtcccagcctcagtgtagatactgcaactgttttttgaaggcctaccgtgcgtagagggacctgctctgacatctcatgtacatcatttcattttacaaatggggaaactgaggcttagacaatttaagtaagtggtgggaccagggtttgaatccagactccaaactctgcagccctagcgtcctgctcccactgtgttgcctaagagatagggggctgagccttggttttgtcttccggctcctcctgggctcagcccgctcttcctccactctccagtcttgctctttccaactgtttagtcctccccacctgtgggtgtccccacgctgtcctgccccagccatcccactccctggccccatgcatcttgttcctgtgtcacctttttctttctttaactgaatacctgtgaattccctcagaagaggcccctggacacagcttctcaacatcccaactggtgaagactaggctgagtgatgatcccggtccatgtgcccatttgtaaaaaggggtgtattcccctttcgggactattgtgaggaataaaactgaactgaggccagaacaag

SEQ ID NO: 1232 - DNA, 933 bp, Artificial sequence
  DNA replication origin
tgcctttggcaccggggctgtccctctctggcctccgtcaggttgaatggctgcgtaaaatgcctaggctgtggtgctagctcagagtggtgcccggcgaaggttcctgtccttccctagctaacaaaggttaatccagcagcagtgttgtggggctggggagcagatcttcctcccctcctccctcaccgaggcctttgccttggtgtcccaaggaggcagaattgaccacgggcaccatgaaggaaaagccaagcaggccctgcatgaggcggtggagatggaccgggccatcgggcaggcaggcagcttgacctcctcggaagacactctgaccgtggtcactgcggaccattcccacgtcttcacatttggtggatacaccccccgtggcaactctatctttggtaggtgggccttctttggggtggacactcctggggtctcctgtctacccacctgggagcaggagtgggtgggagagccagcaagcccagagcatggtggggactcaatgacaactgggtggggaggaagagttactggggatggggagaaaatgcagggtgaggcaggggagtgagttgagtggtggtcgggtagacaggcaggtgggtggatggatggccacgttgaccatggctgggcgagaacgtggatagatgaatgagagaggatggctggctggatgatggatggatgatggatggatggatggatggatggatggatggatgatggatggatggatgggtggatggatggatgggtggatggatggatggatgggtggatggatgaatgggagggacatgggtacaatgaaaactggggaatggttagttggaaataataaggtttagaaggtggcttcttggaggcattgcagggcccttcaaagaagatcccaggggttaccaagccaccaaggag

SEQ ID NO: 1233 - DNA, 1773 bp, Artificial sequence
  DNA replication origin
aatagatcaagtgcaaccacctggggcagaaatgaggaccagaaataaggtgatgtggctggaacccagagaaacggggatcagtgagtgggacagaggctgcattatgggatgtggcatgaaaagagctggcatcttcttctggtcgcagagaggaagccactggagggttagaagcaggggagacagctgggcgtggtggctcacgcctgtaatcccagcactttgggaggccgaggcaggtgaatcatgaggtcaggagttcgagaccagcctgaccaatatgatgaaaccccgtctctactaaaaatacaaaaattagccgggtgtggtggtgcgtgcctgtaatcccagctactcaggaggctgaggcaggagaattgcctggagccgggagatggaggttgcagtgagctgagatcacgccattgcactccagcctgggcgacagagcgagagcgagactccgtctcaaaaaaaaaaaaaaaaaaaagaagcaggggagacaagtgactggcttgtgctttgattactcgagtggctggggagcagaggaggctggggagctccaggagctgagcccagagctcagtctggagctttccctgtctgggttggaggtggtggtggcttggaccaggctaagtgtggtggtggcgggaaggagttggatcccagacatgctgggagggagggccagcagagctccctggtggactgcacgtcgggaggggagggaacaggggaatcggggctgggcacctgggttgatggaggtgctgtttacgggtatggggaaccagaagtggggagaaaacagacagttgggtttggatcacattgggctggaggtgcccactggaccttggagtggagacgctggctgggtaggtaggaggaaaagagtctggagttcgagggaggaaatagaaagatgagggtcaggatggtatttatagttatgggctggagagagcaagtgacttgcccagggttacagacagccagtggtcaggatttgaactggggtctgctaggctctgaaacccacaggggctctttcccggacagctgggaacagagagggcttcatccaaggtacagggggtgccgcaggactcaggggtggggcaaggagaagcccctgaggaaaaaacaaaaccaaagaaagaagtaaagtgaatgtaatcctaatcaaaatcctattggtcaggccagatgtggtggttcatgcctgtaatcccagcaccttgggaggctaaggcaggaggatcacttgagcccagaagttcgagaccagcctcagcaacaaaatgaggccccaattctagtcccgggtgtggtggtgagatgggaagatagcttgagcccaggaattgaaggctacagtgagctatgatcgtgccactgtgctccggtcttggcgccagagtgggacactatctcaaaaacaaataataaatagaaagacaagtccctgagaatgaatgtgggaatgactgagatccttccagcctgggctgcccacctcccatccacagcctggtcagctggaagagcccatgtcaagcacgaggttgtgtcccctgcccattgtacagatggggaaactgaggtctgaaggaaggcagggctggggtctaggtcttctgtctgccaaccccgactcttctgccagcctctaaggtggactcctgtctgagccaactcaatggctgggttgaaaccttccaactgggacattcctgaagggggtgagtgtctctctggagg

SEQ ID NO: 1234 - DNA, 979 bp, Artificial sequence
  DNA replication origin
aaagagtatctgaggggctgggcctggacagacattgtgacattgtgctgggtggtggcgggaaggaggttggagaggtgggcagacactggcttatagcttagcaggctgtacaagagctttgactttttttttttttttgagacagagtcttgctctgtctcccaggctggagtgcagtggcacaatctcggctcactgcaagctccacctcccgggttcacgccattctcctgcctcagccccccaagtagctgggactacaggtgcccgccaccatgcccatctaatttttgtatttttagtagatacggggtttcaccgtgttagccaggatggtcttgatctcccgatctcgtgatccgcccgcctcagcctcccaaagtgctgggattacaggcgtgagccactgcgcccagcctaagagctttgacttttatcctaagtgtgacagggaaccttgggaggattttaattacgagggcgatgctttaagaagctgacttcggttgctgtacaaagaggctggagtggggtgggatggaagcagagaggccagtgaggaaactgtccctgcatttggtgtccgttggctgagctgcctctgtgttgggctctgtgggaatcaagaggactcagcccaggctaaagagccgggtaggtgaacagagaggcaggaaagggtggcagggaccagggagacgcagtatgcaggagccagagtggggagggtcattctcaccttgggaggaggaatcagggaaggactcctggagcgagagccctaggctgattttttaaaggcacatttgcttttcgggatttgagaggactgagactccaggcaggaggcatagaggccctgagcatgaaaaccttgtgggattaagagagtagactgtggagttgcctggacctcaacccctgccctcccacctgtgctgagtgaccctgggctgtgtgcctgtcccctctgtgc

SEQ ID NO: 1235 - DNA, 1428 bp, Artificial sequence
  DNA replication origin
gatgccccaggccccagaagcccgcccccagcttctctggaggcaggaaggggtaggaccccaggtcacttcgtggcggggaggaggagtcagggcagaggagagggatggcgctccatgcagaccggcgatattgggggacgtgcggctgggtgtagggcctttgggtaccggatcctggcagggactgggccagggtcccaggggccaaggcagggccagaagcccctggtgaggggcactggctctggcacaggtaccaggccccaaagcaggtgctgagtgccatcggagctgccgccactccatcccgcacgccctggggcctgtcccgggggcagaggggcaacgtccccaatatggcctccgtcctgagagcgagcagagaacagcgcgtgcaggcagcctccagagccggcggccccgcggacgacaacctcttccacggttcctatgcctatggcactgccccggcgtccgaatctactcgcacttttcccaggaataagcaatgactggcaagcagcagagggcgggggcagagagagagagacagagagagagtcagagagcaagagagatggtgggagggagacacagagaggaggagaggcagggaaaggaggaagacagacagaaaaaggaagagaacggtgcaggaggcaatgggagagatagggccggggaaaggaaggcgagaagcacaaggagagacagaggacaagggagacgggggagagatggacagacagttacccggagacagggacacgcgtgagccagcgagggcacaccagatgggcacagagggaaatccagagagacagggacgcaaggacacagacacaggcccagggagggtcagagacagagaaggaagccaggggaaggccgaaaggaaaaagcgagggtgagaagagcggagaagggaaggaggagagggagcaaaaaagacaggtgcaagaaggaaggagaaacagagagccaaagggcagagaggccacaggacggggaaagggaagggaggagggaacaaaaaaacaaggagagagagtagaatgaaaggaggaaacacagagagagggagagttgtgcaaaaacaaaacagaaatgggtccggttactgccatggtgggtgctgctggcctggtcctgtccctggggcccctctcggccacccacaggaggctgggtcactctggtggagaggaagggagtggttgataaaactgggttgggggaggttgggcctgctcctcgcatgacagtgtgcttggtgactgctggacagcagaggtcggggaattccctcctgccacgtgacatagcctcacagcactgagcgcagggcttggcatgcagtagacagtcaataaaggatggatggatggatggatggatcggtgggtgggtggatggatggatgga

SEQ ID NO: 1236 - DNA, 1026 bp, Artificial sequence
  DNA replication origin
ccctggggcccctctcggccacccacaggaggctgggtcactctggtggagaggaagggagtggttgataaaactgggttgggggaggttgggcctgctcctcgcatgacagtgtgcttggtgactgctggacagcagaggtcggggaattccctcctgccacgtgacatagcctcacagcactgagcgcagggcttggcatgcagtagacagtcaataaaggatggatggatggatggatggatcggtgggtgggtggatggatggatggagatagagggatggatagagatggatggatggatggatggatggatggatggatggatggatgggtggatgggtgggtggatggatggattgatgggtggatgggtgggtggatgggtgggtggatggatgagtgggtgggtgggtggatgggtagatgggtaggtgggtggatgggtgggtgggtggatagctagatgggtggatgggtgggtggatggatggatgggtgggtggatggatgggtggctggatggatgggtggggagcacagcagtgggtgcagtgtcctggggtggccactaggcagtggacagcagtgaggcccacagccataggccgtattcatccatgtgcccagcactcctgagtgtgagcagcagaatcccagaacctggacaacagtcagtgatcacacaggaggtgctccctctggagatgctcacacagaagccagattcccgacacacaataggcagccacaccacagaggccctggctgctgcggacacacagtaggaggtgctcacagagaaagtacccacacaacagctcacttcctgacacacagtaggtgttcactgacatctagggcttatcacacacgatgtgctcacatagcagtccattttctgacacacagtaggttctcacacagcagcccagggctgcgcacacagtaggcgctcacagagttgatgcccacacagcagcccaggacctgacacacagtgggtgctcacaggtactcagggc

SEQ ID NO: 1237 - DNA, 1512 bp, Artificial sequence
  DNA replication origin
tctcaccttccaacctataacttcagccctgtccctgggaagggaaaagccatgttcagaccttggccttagcggggacacctggggctggatggattgatggacgagtaggaggtcggggagaggaagccggagggatactgaggagttcccaggagatgctgggaggcggttaggctgacagggacaccttgggacctgtcaggtgggggggtggacctggggggtggggacatgaagccagatcttgaaggggctttgaggggcccttcatatgagggtccctgggggatgcttgagctgtggagtggcctgggggaaggcggtgcaggagccctccgccctccccactccccactcattcagagaaggtggcccgtgcctcagaaggtggccaggatttgaactgtgggccgaagggctgatccttggggtccctcctgacggcccgggcctggcccacaggagcggacgcgggccgccctcctggagacgctctatgaggaactacacatccacagccagtccatgatgggcttgggcggcgacgaggacaagatggagaatggcagtgggggcggcggcttctttgagtctttcaaggtgaagggccccaggtctaactggccggggagcagggacgtggctagggcggaatcccgggctgaggctgatagactgatggacacggcgtgggggtggagtctggcagaaggggcgtggctgagggggtggagtcccggactgggggattgacacagcatggggagtgcagctagaggccgttcgcattggagtctgagagggggcgtggctggggcgaagtcccggactggggctgattgacatggtgtggaggtgtggctagaggccgctcgcctgcgggtagagtctgggatgggacgtggctgggggtggagtcaggggccggggctaatggacatggcgtgggggtgtggctagaggaggctctagtctgggatgagggcggggctcgaagtggacttgggctttagaatgggcttacacttggggacatagtctgccttgggtagagtttgaaggagcagcatgtaaggtggggccctggcttggggaggagtaactgttggaggtggggcctaggtggggaattcacctgggaattctgctgaagggtggaggattctgggagacagcaagggctgctggtacaaaggctgctaggtcagcaggaagagaagagaggaagaggctctgtcttgactgagggaaagaaatagagttctcagaagaggtgtgtgaaccatgatcattggagagggacttggcctgtgtgacctaccctgcctgtccctggtttagcttagcattaagagcacggacacttcaaatttcagctctgttacttaccagcttgggcattctgtgagcatcagtttctttatctgttgagtagggtaatggcaacttgcctcatacagttattgttatctgtaaaagagttaggttagtgcaatacaagtttaaaag

SEQ ID NO: 1238 - DNA, 1051 bp, Artificial sequence
  DNA replication origin
ggataggggcacgggcttctgccttggatgagccaggggcacctcctggaagaggacagacaggtaaacccttgggtccctgactgaattctggagcagtgtgaggtggtgtggtccaggaaaggtatcctgaaggggcttcagaaatcagggcccccctcctgcttatgggagaggaaactgaggcctaaggtgaggaggagaacttgctcaatgcccacagcaaattggtgggacgtgtcctgttctgggaggatgatgtgggtttacagaggagccgaggagtgagttgggagttagagtggagtaggggtgggcttggcatggcaggactggggctcacagcaaaactcaggagcgatgaacttaagctttggaatccaacagacctggggtcaaatcccaagcctgcatgtgcttgcaagccattgaccctaggtgagtcacttaaggtctctgaacctgagtttcagaggggacagctggactgtctccctcccaggcttgttctgagaatcacatgacgtgacgtgtgtagagcgcctggctcagtgcttggcacgggggaagagcacgtcgaatggcagcttgcacacgcagcctcttcacccggcgtcctctcctgcaggcttcccggctcatcgtcacctttgacgagcatgtcatcagcaataacttcaagtttggcgtcatttatcagaagcttgggcaggtgtgctcacctcctccctgccgcccctccccacctggccccatatctggagcctcacaccttttccagggcagcacaccggccaagggactcaggagcccaggggctgccagaggtcctccctccggccctctctgggtccaagtagggacagagggcaggggcttctcaggaactccagctcaatgaccttggcccctcatccccagacctccgaggaagaactcttcagcaccaatgaggaaagtcccgctttcgtggagttccttgaatttcttggccagaaggtcaaactgcaggactttaaggggtgagtattagggtgggctgagcagagtg

SEQ ID NO: 1239 - DNA, 839 bp, Artificial sequence
  DNA replication origin
ctaccctgctagaagctgtgcctccccccctacccccgcacctggcacactgtaagactacttgctgaaaggggatggatttcctgcttgatgggcagtggtggcagcacttcccggaccccctccaccccctagagagggaggcagactgccaggcccacctactttgaggggcggcgggaaggagcagcgttgttcatccatcctgcttccctgtaagagaaggcagcactgttacaccctcccaggcctgccgccaggcgctgcctcccctccccaaggcgtgcaaggggaaagccctaggaggcggcccgcgaaggtaggggtactcccagggcagggtgctagctggctgggggccctgggcctgtctgaagggctggctgtcccggtagtgaccggggctggaggctggcagcctcagggagggctggggactctgcgggaacgcacgtgccgctgggagtgggggcaggggaggtgcacatgccggtgtgcgagctggcgggtggggggactgttatctacacagatatgtgttgagggagagagggggagggagaggcagagacgagacagaaagacagagaaataggaggcattggagagagagacagaaagagaaacaggaggcatcaaagatcagagggtattcaaggcactcccatcccagcacccccggcccacctcccatgcatacctatgtgaaacgcagacggggctgtggggtggagggtggaggggtaatacctcccactcctgcagcacagtctctggctgacaggcccccagcatctgtcccctcctccagttccattccacctgggccccccaccaca

SEQ ID NO: 1240 - DNA, 1266 bp, Artificial sequence
  DNA replication origin
gtcccggggccgcgggccgggccgcccggggggcgtggcttcagcgcccccgccccgccccgccccgcgccgtgccgcccgtacctggcgccccgccccctccgggccccgccgtggggcgagcccatcgcaggcagcgccgccgccgggagccgggagcgcggagctcagcgctgcggggcccggacccgggcgcgcgcgggccaggagccggctgggccagctgaagtgccgccccggcgggggccgggccgggccgcgctcaggatggcacagctgcggcccgcggtgccacccggccgtccgcggaggggctcgctgcccgcgggggccagctggcaggtgaggacccgggcggggcggcatggcggagggaccccggggctgggtcaccccgactgctggggagcccggccggctctgccccagccagggcgggcggacaaggctccgtcatggtgggcgtgtgagcttctgggctgacactggccacggggcgcacccctaccctggggtcccggaccctggggctcttgctgtggcctcccgggtggcactgtggctctgggctgcagcggcagggtgtgtgtgggtgcgtgctaccgtcgggaccactttaccctgcccctgccccgtttggggggctctgaatgctccagggccactttgtggtggtgctttcatgtggggcaccccccatctggaccccatctctcagagccctcgcgtgtgtcagggcgtctgctgctccctctgaggctgtagctgtgggtgttgcttgttgctgtgtgtacactctgggtgacaggaccatgtgtcagtgtttatgtgactgattcccaatgcaacaaggtgtattagagtgttcctggctacgtttggtcaccctgagtggggtgtcttaatgggggacattaatgcacccatcatcagtgtgactctttggggtcatgcccagctgaggttgtgtggctgacctgggcacagaagccaaagttgctgtcatacagtgtgttgtgttgacaggcatgtttgtctgcctggacttcaggtgtgtgtctgtggtttctgcagtaactgcctgcggaattgtctctttcaaatgcagaggtgttgggtgtgaccataggtgaccatgggtcaaggtgtcctatggactcctgtggtgggttttacaaggtgggccttgcctctatgggcaggcctcacagtgtgcacatttatatgggcttgtgacccttcccagagctctgtgtgtgtgtgcgg

SEQ ID NO: 1241 - DNA, 1261 bp, Artificial sequence
  DNA replication origin
gggctccccagcagtcggggtgacccagccccggggtccctccgccatgccgccccgcccgggtcctcacctgccagctggcccccgcgggcagcgagcccctccgcggacggccgggtggcaccgcgggccgcagctgtgccatcctgagcgcggcccggcccggcccccgccggggcggcacttcagctggcccagccggctcctggcccgcgcgcgcccgggtccgggccccgcagcgctgagctccgcgctcccggctcccggcggcggcgctgcctgcgatgggctcgccccacggcggggcccggagggggcggggcgccaggtacgggcggcacggcgcggggcggggcggggcgggggcgctgaagccacgccccccgggcggcccggcccgcggccccgggacaccgcgcctgcgcgttccggcccgagcgctagaagctttgggtgcgtcgggctccccgagggggccccccactcggttctccccagcgcgcccccacctcactttctccatcttcccaggctctgggtaccccgcctcggcatcaaggacagggttgggttaccttgcagacagagggcttttcttgagcacctacttaatgctgggcccttcgcatgtgtcgtaatctcgtcacagcccaggaggtacaaatgtcatctccattatacagatgagaagccggttccaagaggtgaaatagcttgcccgagaccacacagtcaggaagaagtcaaagtggaatccagagaaaggcctggtgctactctttggggtctgtcccttttcctcctcctctcctccatcctgcttcccatgcctcacagtggctggcctgctccgtcccttcccccgccctagctgccccagatcctgggggagatggccacagcacctagggaggggctgccaggcccgtggtatggaggaaaggacccaagtagattttgggacatgtggattctagctacaacttgctgagtggccttgagtgagtccctgcctcctctctggacctcagtttccccatctttaaaatataaggactctgtaggcccttccagctggctctgcagtgtgtccctggcctggtatagccactgtacagcagggacagggacagggccttgctaccacttcctccagacagatgttgggaacacagcaaatgcttcctgaactgtggccaagcagacacagctgctttggatgttgcgggggcagggctgcccaccagctcagagccatacc

SEQ ID NO: 1242 - DNA, 937 bp, Artificial sequence
  DNA replication origin
cagagttttgctcttgttgcccaggctggagtgcaatggcgcaatctcggctcactgcaacctccgcctcctgggttcaagcgattctcctgcctcagcctcccaagtagctaggattacaggcgcgtggcactactctcagctaatttttgtatttttagcagagatggggtttcgccatgtaggccaggttggtcacgaactcctggcctcaggcgatccacccgcctcagcctcccaaagtgctgggattacaggtgtgagccaccgtgcccagcctcatctggatttttaataagttgctgtggctctggaatgagacaatgccagtgtaagctccagggtgctgcacagatgtgaccacggtcatggcagggggaaggaggagaggggagagcgccccatgtcccggcatgctctgggctccccgcagctgctgccgcccaggaggaatgcaaagcattttaagctgagccaggccagggggttggatggtttttggagacgtggggaagggatagagaccagggggacatccatgatgtgaactgaatggagaagaccaggaggagaccagggtgggataggagagagaaggggagggacagagaggttcgggttcgtgaagtgggaggaaacgaccacattgtgggtggtctgcagaggccagaggaagaaggggattggaggggtgctgggaaaggtggggcagagatgggcgagctggtgaggaaggctgagcaggaaaggacgtgaagcagagaagggcagagggctggtgaggagggaagaggctttcattcattgcttcaaaagtatttattggggccaggtgcagtggcttatgcctgtaatcctagtgctttgggaggccaaggtgggaggcttatttgaggccaggagttccagaccagcctgggcaacacagcaagacacc

SEQ ID NO: 1243 - DNA, 892 bp, Artificial sequence
  DNA replication origin
caacctaggcagggcatggtggctcatgcctataatcccagcactctgggaggctgaggcaggcggatcacctgaggtcgggagtttgagaccagcctgaccaacgtggagaaaccccatctctactaaaaatacaaaaattagccgggtgtggtagcgcacgcctgtaatcccagctacccgggaggctgaggcaggagaatcacttgaacccgggagatggaggttgcagtgagccgagatcatgccattgcactccagcctgggcaacaagagcaaaattccatctcaaatagaaagaaagaaagagagagaaaggaagaagaagaagaaggaggaggaggaggaggagggaaaaggaaggaaggaaagaaggaaggaaggagggaaggaaggaagggagggagggagggagggagggagggaggaagggagggagggagggaggaagggaaagcaacctgagcaacctgccatgtaaggtaccgagctctgcatcaagcaaaggcagagtgagcttctcagaggtgcagccagggagatctgaaggtgtgggaacgggaggagcggtggggggtttgactggaggacctcaaggtgcctcccacatttgaaattcttttttttcttttttttttttttttttggtggtggttgggggcagggtctcactttgtcgcccagggtggagtgcagtggtgagatctcagctcattccaacttctgcctcctgggctccagcaagcctcccacctcagcctcccaagtagctgggaccacaggtgcatgccaccacatccggctaattttttttttttgtagagacagggtttcaccatgttgcccaagctggtctgaactcctggatccaagtgatccacctgcctcagcc

SEQ ID NO: 1244 - DNA, 691 bp, Artificial sequence
  DNA replication origin
gagaagctgcacatacagttgcctcgttccctcctcctccaaagagagggcagccccagacacaggaaatatgggaggaaggggttctgagggctgtcggggggagtaactagaggatttgggggtcagtaaaggctaagggagccccagcccagcgaggggccaccctgaggtgggaagaaatagagaagaaaaaaaaggaaggaagcatttaagcaaaaagggcctaaaatatgccagggccagtttttggttttgttctttttaccttacaccctatgaataggcattttaatccccatttcacagatgagaaaattgaggttcagagacattaaggaattgctgaagttcacacaggcagtggcagagtgaagatgtaaacctgctttgcctgcctccaaggctctctaaaaaagtactctggggacagtaagagggtctgcccacccccttgccctgagaggatggttggaagcttggtaaggtctggcctggcatcgcaggggtaggaatggattgggggtatctgcagggaccagccaaggaaacccaggccctcctgagagtccccagtactcaccacacactccggcgagaagtgaaggacttgtccaccctgaaacacaacaagaggggccataggtgaggggacatcccttctcaccagcttggcccagcatatcacacc

SEQ ID NO: 1245 - DNA, 865 bp, Artificial sequence
  DNA replication origin
tgtaaacctgctttgcctgcctccaaggctctctaaaaaagtactctggggacagtaagagggtctgcccacccccttgccctgagaggatggttggaagcttggtaaggtctggcctggcatcgcaggggtaggaatggattgggggtatctgcagggaccagccaaggaaacccaggccctcctgagagtccccagtactcaccacacactccggcgagaagtgaaggacttgtccaccctgaaacacaacaagaggggccataggtgaggggacatcccttctcaccagcttggcccagcatatcacacccacctgcactgcaccaccctcccagaggggctggagaaggtcctgtttctaaggatgcctgatgcagtcactatcacccttaggctgcagtcgcctgactgtcagattagggacatgggaaggcataggggttaaagagccaggaaaagaggcaggactgggggcagtggggcagggggcagggctgtggggtgttagcaggggtggggggacaggtggagtaggacagtgactacagcagcttggatcatggcaaggatgtaggggtgcggctggggctagcttagagcctttctaggcaggatggaagtttgctggatatctatggtttatggtgggcagaaagaacatcacccccaaggcccgtagcctgcctcaatcctgaagctgttcactcatatccacccaggaagcaaatgtctgcgaatctgggaggagatctaggaggagcttccccccaccctcaccccaacacacgtaccctgctccctaagacttcaggggtaccccagactttgtctcccccaaatccacccagatccagccccagga

SEQ ID NO: 1246 - DNA, 1545 bp, Artificial sequence
  DNA replication origin
gagggggcgggaggagggcgtccctccaacagagggtctgcggcctggacggggggcggcggccgggaagggggtgggggaggggctgccccgggccccgggccccgcaatccccgcccggctgggcccggctcggaaagtcccgcgaagcccccgcccggccggcccagggcggcgcgaacaagcggccctttctgcgccggcggcccccggcagctggaccgcggcccgctggggcgcggacgtatccgagctggggcgggggcgggggcggggcggccgcgttgccaaggtgacccgggcgcgggaaggcggctccggctcgcgcgggccgggccgggcggcggcggcggcaccatgagcggccggaagcgcagcttcaccttcggggcctacggcgggtagggcgtggcgcggcgcggggcggggcgcgtgcgcgcgtgtgcgtgtgcacgcgtgggggggagcccgtgcggggtgtgctcgcgtttgggcgggtgggcctgggctatgactgctgtgggggctgagcgtttgacctcagtgcgcgcatggctgtcgtgctgtggcgcctgtgtgtgtgtgtttctgtttctgtgtctgtgtgtgttcccattgcgtgtccatgtgcatgtgtggggaggtgagtgcagggtggacattgctgtgtttgtgtctaagcacatgatagtggcgcttatgcatgtgactggggctgcggggctactccgcctgtgtgtgcgcgcgtgtgtgtgcatgcgtgtgtgcgcaactgctcacatgtataggtatgtgggagtaggggcaggcaggtcagggggaggttctgctggacctcccactttgcctctgcagctgttgggcccctcagtgacgctctggataaagggactctagaagcccttagcaggtcctgcccaccctgggcaccaggctgccctccttcctgcatcctggctctcaggaacctcctcctccctgggccactggctgcctgggcttggaggcctggaggaggtcagagtggcagcaggttcatcttggggtcaaggggtgcagaggtgggatggggatttatgcctgttgcggagatttggcaaattggagggacgatgggttagacagagtgggctcagagcccctgcccagccagacaagcggctccatgaccttcaccaggccctacctcccagtggtcatagggacccatgggacccaccttggggtgtggagcgctggggcttgtgtgtgggcatggtcagtgttctctgagctatggggattgtgtccaagctgccttccccttgtggacgctcaacttctgaggtgaccccagcagagggtggggtggggtgggaggccagaggctacccttccatatggggtcttgctagctgtcaggtgatgagaggagcctgggctaggccctgagcttcctggccagccaacacgggcagctcacaggctgggtcctgttctatgaccttgggcaagtcctggcttctctgacctcactgtctgcagagtcggccttccccatcagct

SEQ ID NO: 1247 - DNA, 1417 bp, Artificial sequence
  DNA replication origin
aggagggagggaggaagggagggaggaaggttgttgctgctactacttaggaaggagggagggagggagggaggaaggaaggaaggaaggaaggaaggaaggaaggaaggaaggaaggaagttcctcccttctcaggcaaacttcagtgctctcaggacccacccctcaggagcctgccctggtgtgattcctccccccaggactctacagcactgcccagagcagaaggggcccagtccaggctccagagcaccttgcaaggggaagccacaccctcctctgaggactgaaaaccaagggacatagttctaggaatgaggaaataatgtttgccctgtccaggctctgaaccctgcaaggggctcttgagggctcctgcacccaccagaatgtgcagagaagaggtcccaggtgggagccgagagggggctgagggcagatccccaagagagaagtaattggtgtgagagaggatctcaatttcttcgtgtctaaaatggggaaactgcagcgccacttaccctgcctaggtgagacaaaccgtagaccctggtacccagactcgtcatttcccaggggatgctggagctcaccaagcccaggcccgggtcccaggtggaacagctccggaaaggcgtctgcagaatccctgctgccctgtccttgtgcccttggtcatccttcctccctcatccccggctgcatctgtgccctgcagtttgtttaaacagaaaatcccatagcaaaccttgagactgtgggggcctccttgggtgcagggcctgggggaaggatctctccctctatggggggaagactgggtgttgggctggagggcagtgtgctctggggtcagggctagtaacccggtgtctgctgacacagctccacttgggtgggggaaacagcttactctgaggaagagcgctggactgtgagctctgggcgagctgggtgcagaagagcgacttggagtgtttagtgagcgaatgagtacctgctgcagaactcagagcccagttccctctaaaggttgggacctggactgcatgacttttcaagaggggagtggaggggggcgtctccactcctcccctttgctcttcctcctcaccagggcaaaggggaaggggactcctgggagaaggggagacaggtgggcaaggaggggctattggaggctctgttcattcactcattcgttcgcgggaagggtagaacgctgtccccctgcggaactcttgtacccggcatttattaagcatctgctgtacgccagggcctgggccgagcgctttacgtgcgtgaactcatttcgtcatccccaggtcctaggaggccggcgggaggaatcccactttacagatgagaaagtcgagggacagggaggggcgggacatgcccgccgtgcagacc

SEQ ID NO: 1248 - DNA, 2109 bp, Artificial sequence
  DNA replication origin
agccagtccctgcccctctctggtcctcagtttccccacctgtaaaatgggggcaccgagaaccctcctccaggacctgcggcggggcggggcggcagggcgggggcctccccgccgctcccgcgcccgcggcttgggctccgcagtgagtggggagcggcgccggggaaggagcgctccgcggtcatgtgacgtccccctccccgaactgcggcggcggcgagcgccggccgcatctgagcagagctgcagcggcggccgcgggcaccagagtgccgagcccaggacgcccccggcccaggcccttgggtgagtgcgccccgccagggctgcggccctggaaaggggaaggggacagaggtgtccagactcccgtcggctcgcagcgaagaccccgcgcgggcgggcggggacggagggtgggggcgaacgcgtgggggacccgggtctccaggggcgaggggtgggcgcagctgggctcgcgcagcccggtcttgacagcagctggagaagtggggggaggcctggactgagccggctgaacccccagcctgttggacttggtccaggccgcggccagggggctttggtcccacccccctgggtgggtggggagtccagttttccgcccacctcgaggtgggggcgcctggggtttagaggagggactgtgggaagtgggcgcgtttcctccatccctggggaggggcccaagccctagcgccccccagagggtggcgctcctgtcctcagaggagggaagtgggggcctcagatcaaggaccctgagcggggagggcggtgatgtccttgcatccccagagacaggacgcattcccctgtccctgacccccgcggcagagcggggcacacgcgtcacgaagttgggcgccccctcgtcgcctcccctggctcggcaggatctgaggactcggtgggaattcacggggcggtttccgtgccctgcagggtttggtgccagctgcggggcgcctgggcttggggaagaaaccttgtgtacgcacacctgcacacacacacagtctccggaggtgagcggccccctccctaccataacagaccccagcctgtgcatgccctcggagtccttgttggggtcatagcacaggcccggtggtggggtcaggaagaacatccactgttctcagggctcattggcctctgtccccgggctccattcccctccctgccaagtcagaggtcaggcccctggggcggcaggcaggaaggacactgagggaaggggcactgaggcaggaggggcactgagggaagctggccaggtggaagtaggagagaaaggcaatgggggtgagatggtaccacttcctccccatatgaggctctcaggaggctcctggccccccctgcacaggtagtggtccctccttcctgagggtgtttgggggaaaacgctatggttggggcactggggaaggttgcctcgcagatgaaacagaacattggccaaaggtgtccctgaatgggcttctggactggcacagggccctgagggctgtggctgagtggggaggcagtgatcaggtccagctggccatgggggccccccattcccttctccatgacctcagcctcactctgagagcccccagcagctggaaggtctggtaaggggtgcgtgttccttgatggccttgggaagggttccagggtaatgattaatcctcaggtggcacgagcaatttcccccttcacagcaatatttcagggcaggcgctgaagcctccattgcacaggtgaggaaactgaggctcggagaggctaaatgaactgcctgaggtcacctagtcaccttcagcaaggtctagaatcgtggtactctgactcttgatgggagaagatctccacagcggtggagaggaggaagggtgaacgccgtggtggagtggtccatgtggacctgctcccctttgctgccaggaggtgagggtgcctgtggctggaagctgggtcaggttgaggagagggtccagagtcctaggcttgccttgccaccccttcccatggagggagggttgtcccgtggagcaccataatggtgctttcaccctgggaccttcccagctt

SEQ ID NO: 1249 - DNA, 1260 bp, Artificial sequence
  DNA replication origin
cccggcgccgctccccactcactgcggagcccaagccgcgggcgcgggagcggcggggaggcccccgccctgccgccccgccccgccgcaggtcctggaggagggttctcggtgcccccattttacaggtggggaaactgaggaccagagaggggcagggactggctcaaggttacacagctagacagtggcagaacctgggcgacagcccagctgtccaggcaacagctcatgctccaaggggactgggacaacttctggatcaagtggagacgtcgggataggtggggcccacggcccccatgggctccgcttgtctgcaggcgcgggaggaaggcgcacaggcttcgctgggcgagaaagctgctgtgccctggctgacgccctcctcacccgggcgctcggcgcgcttcctggcagaggccacgcggttgaccctcgccagcccattcgcggctcttggactttgtctctggactgggcagctcgcccccgccccagcctaacccgggcccagggcgggtgtggggaggggagccacaggctacggagaagtggaagggaggcacccggaagagagtgggatcagaacaagagtgaaaacccaggcagggagggggcggcagagatcacctcggcctgacttccaaggcccagggagagttagagacttgcccaaggtccacagcaagtgagcggcctgcccactcgagtcccttctttgatggtcaacagagcctgaggctcctgtgccccactccccaccaagggggagccctcacccacacctctttctgttctccactgagctccctccccggggaacagcccacatgaagcaaagaaacacgcagtgggtcggcaaggccagaactggggacaacgggtgaggggtatggttggtggctccaaggtcatgaactcgtcacagaacactcgtgttccagggggatctctgaaatctctggatctcaccccaatgttctaagaactgggaaaacaggctgcaaaaggtacaaagacagacctctttctcaaccatttcgaattggtgggtcaagccgacagggccctccaaggtcaacaagtccaataggcccacttgacagataatatttagggaggggaaagtccaagacatgtactcaatatatttcttgagcatctactgtgtgcttaaaaccacaactgttacttccagctcccactattttcccggccacatgggctgcatttcacaaaaggaaagatccgaggtct

SEQ ID NO: 1250 - DNA, 843 bp, Artificial sequence
  DNA replication origin
gagccgcgcggcgcgaccccgaactctactctgtcccctgcccgctgtgtgatcccaagcgagttactcgccctctctgagcctcattttcctcatcggtaaaatggggatgattaatcaatctcagaatgattgtaaggattaaatgatttaatttaatttaattcaaatctacaatcccttattcgaaaccctaagatgcggggccgagcgcagtggctcacgcctgtaatcccagcactttggaggccaaggcaggtggatcacctgaggtcaggagttcgagaccagcctggccaacatggtgaaaccccatctctactaaaatacaaaaaattagccgggcatggtggtgcgcacctgtaatcccaactaatcgagaggctgaggatgagaatcgcgtgaactctggaggcggaggttgcagtgagctgagatcaagccactgcactccagcctgggtaacacagcgagactccgtcaccaaaaaaaaaaaaggggagggggagagctgtgtgataaggagccccttttcttcctgcttttgaaagctgctgactgaggatgaggatgggatgtccagagctgcagcagccattttgcaaagatgaggtcagagcatttcagaggaacagtgacattgttgagccgttgagttaaccatctctggaatcacctatgaccactcttaactgaaatagcaaatatcctaccatttaagccccatttagtttgttatctgttacttacagcccaaaacatcctcactggtacagggttgttgtgaggattaaatgagaagatgtgcaagtactcaaagtagccctgatttctgtaagcaca

SEQ ID NO: 1251 - DNA, 1000 bp, Artificial sequence
  DNA replication origin
ggccagaagcagaagcctgaggtgaggattccggtccagcccacgacacagcaggatgtgtggcccccatggtgacagtgtgggggtgtgggcaggagagagctgccctcatgcatgcagatgagaacatggatgagtgtttcatggggaggagggtggaggatggcagctaacatgtactgacttcctcttctgtgccatgcacagccgtaaatactacacatcctggcccattgaggcctcacaatacccctatggggcaagtactgttattaattttattattttttaattattatattttttaaattattttttgttgttgttttaggcaggtctctctctgtcacccaggctggtcttgaattcctgagctcaagtgatcctcatgacttggcctcccaaagtgctgggattacaggcgaaagccacggcgcccagttgggcgagtattattaatttcagttccaagagggccctttcctggcttgagttggtttctgctgcctacaggcctggcgagtcctaagcacacccttctgcaaacatctgaagggctgacccagcgcagagcagccagcatgtggcatgagagcatgtgagctgtgtgtaagtgtgcaaggcggtactgtgtgcatatgaggtgtgtgatggtgagtgtgcagtgtgaggcgtgtgctgcagtgagaggcatgagtgtggagtgtgtgggggcgatgaggtgcgtgggttgtgcgtatgtgacatgggtgtggatgtcagagtgtgaggtgtgaacgtgtgggagttgtgtgtgaatgtgtgtggggaggaagttgtgtgtggatgtgtgtggatgtgtgtgcgcactggggctggtaggacagtctgacgcacacatccatggtagccagatttatatggttggctcttaggatccgggaggtcccttattgtgactctgccactagccaccaccttcttccctcccgttggacccagtccctgccatcttgtgctt

SEQ ID NO: 1252 - DNA, 1127 bp, Artificial sequence
  DNA replication origin
cctacccaccgatggagcccccagatagagctgggtggcctgtttctgcagcccttgggcagttctcactcctaggagagccaacctcggcttgtgggctggtgccccacagctacctgagacgggcatcgcaggagtctctgccacccactcaggattgggaattgtctttagtgccggctgtggagcaaaaggcagctcacccctgggcaggcggtccccatccccaccagctcgtttttcagcacccccacccacctccacccagcccctggcacctcctctggcagactccccctcctaccacgtcctcctggcctgcattcccaccccctcctgccagcacacagcctggggtccctccctcaggggctgtaagggaaggcccaccccaactcttaccaggagctgctacaggcagagcccagcactgatagggccccgcccaccgggccccgcccaccccaggccacatccccacccatctggaagtgaaggcccagggactcctccaacagacaacggacggacggatgccgctggtgctcaggaagagctagtgccttaggtgggggaaggcaggactcacgactgagagagagaggagggggatatgaccaccctgccccatctgcaggagcctgaagatccagctcaagtgccatcctgccagtggcccccagactgtggggttgggacgcctggcctctgtgtcctagaagggaccctcctgtggtctttgtcttgatttttcttaataaacggtgctatccccgccaggggcctcctgagtctttgatgagggcttcactcagtggagcctgtggatggggcagagcagggcaggtgagatctgggggtgaagcaagctggcttgggatcagcgaggcccccaggcccccaaccctgtgaggcaggaattgtcctattttctagaggggcagctgagtctcagagggttagggggcctgtccaacatcagacagagagccagggggttagaacccaaagagtctgaccccagagcctagtatcattcccatgtgcccgaagcccctctagggatggcctccctgatcctataaggctgggccactcaactgcagccccctggggagacctggctg

SEQ ID NO: 1253 - DNA, 1073 bp, Artificial sequence
  DNA replication origin
cctcacagggttgggggcctgggggcctcgctgatcccaagccagcttgcttcacccccagatctcacctgccctgctctgccccatccacaggctccactgagtgaagccctcatcaaagactcaggaggcccctggcggggatagcaccgtttattaagaaaaatcaagacaaagaccacaggagggtcccttctaggacacagaggccaggcgtcccaaccccacagtctgggggccactggcaggatggcacttgagctggatcttcaggctcctgcagatggggcagggtggtcatatccccctcctctctctctcagtcgtgagtcctgccttcccccacctaaggcactagctcttcctgagcaccagcggcatccgtccgtccgttgtctgttggaggagtccctgggccttcacttccagatgggtggggatgtggcctggggtgggcggggcccggtgggcggggccctatcagtgctgggctctgcctgtagcagctcctggtaagagttggggtgggccttcccttacagcccctgagggagggaccccaggctgtgtgctggcaggagggggtgggaatgcaggccaggaggacgtggtaggagggggagtctgccagaggaggtgccaggggctgggtggaggtgggtgggggtgctgaaaaacgagctggtggggatggggaccgcctgcccaggggtgagctgccttttgctccacagccggcactaaagacaattcccaatcctgagtgggtggcagagactcctgcgatgcccgtctcaggtagctgtggggcaccagcccacaagccgaggttggctctcctaggagtgagaactgcccaagggctgcagaaacaggccacccagctctatctgggggctccatcggtgggtagggggacagtgggggcagttctgggcccacccagccactgttcctgaccccaagtcctggtgactttctgaggtgcccactcccatccaacctgccttgctggccagccttgtggctttgcccagctgtgtgtgtgagggtggcatgcccacctccagtcc

SEQ ID NO: 1254 - DNA, 1959 bp, Artificial sequence
  DNA replication origin
cttgggatgtgggactttcagggctaaagccagacagaatttggcaagtagaatggcgggtcacccgacacggatcctgttgactacacaaaataaaataaaataaaatacattgatttaaggaaagcaattatgctgaagtaaagtaatcaaaacatgttttaagtttcctgacttgctatatatgtgcttctttattaacacatcaaataacaagatctggtgatctcagtagctaccacaatttcaaagcagcaatatgtgtaaatgatattttgaaatatttgcagctactgtcatgtgataagcaaatactagtaacaaagttgcaggtcctaccactgctactttggtttcttgcctacatctcattgaaagaactgctcaatttcagtgagaagtgagtgaaattgaggtgtaatgctttcccatccaaggtcataggctccctgaattctgttggcagcccccgtgggtccccagggactgcaggctcggagccccctagtcctgcatgttggcgtggaggtgggggtcaggggaactgacgggggattttgatgcctgatgcagcaggtatggcaccaccctcctctctcccacagatgcccctgggcagtacggagcctatttccacgatgatggcttcctcgccttccctggccatgtcttctccaggaggtgagactggcattggaagggcccatgggcctaatggggaggatgggaatctgggacttctgtcccctcacccgctcttcctccgcagcctgcccgaggtgcccgagaccatcgagctggaggttcggaccagcacagccagtggcctcctgctctggcagggtgtggtgagtgtgggtatccggctgggctcttggggctcctggggcaggaagctggcttcctggtggccggagtggtggggggaggggaaagcagagccccctggcctcggcagcctctgctctccaggctggggaccccagagaccctgtgcttccctggcaggaggtgggagaggccggccaaggcaaggacttcatcagcctcgggcttcaagacgggcaccttgtcttcaggtaggtcctggcacctggcccttcctctcccttccctggtcccagcaccccaccccccggtcctgccccagctcatacttcttgggcctggatgactgcaggtaccagctgggtagtggggaggcccgcctggtctctgaggaccccatcaatgacggcgagtggcaccgggtgacagcactgcggtaagggaccctgccgggcactcgggatggggcccagcgttctggagtggggcaggacgccccctaccatgggcagagaggcaggtattgagctctgtggagacagaacttgaagccaggggaggggagaacccaccagccagggctcgggcttccatctcggactgaactccgctgggggcaggcgagtgccccaggagtgggaggaaacctgggtgcagaaatgaggaagctgtgtttgtggggcccgatctctcgttcagcgggggaaagaaagagcttgggaaacagggacagacttctgagtctggagtctcgatatcagagggaggggactctgtcgtggggccggggaggaccaggaagtttgtggaaaggggcctgacccagttccactgcagggagggccgcagaggttccatccaagtcgacggtgaggagctggtcagcggccggtccccaggtcccaacgtggcagtcaacgccaagggcagcgtctacatcggtaagtctggggctccttctcagggcaggggcaggaacggcactcccttagggctagagctcgcccagccttcctcgcctcctgggctgctggagcccacaggccctgtcctctcacctcccggcaggcggagcccctgacgtggccacgctgaccgggggcagattctcctcaggcatcacaggctgtg

SEQ ID NO: 1255 - DNA, 726 bp, Artificial sequence
  DNA replication origin
gcagagcaaggcgggagccagaagaggccacagggaggactgcaggggaagcagtcgagggactctgtgtgtctgcaggttcttcagagactggacagtgttggagggggagcacctggtggcgggtaatggggtgggcacctgggtaataagatgggactgggggccgggcgtgggggctcatgcctgtaatcccagcactttgggaggccgaggtgggtggatcacctgaggtcaggagttcaagaccagccatggccaacgtagtgaaaccccgcctctactaaaaatgcaaaaaatttagccaggggtggtggcagacacttgtattcccagctactcaggaggctgaggcaggagaatcgcttgaacccgggaggtggaagttgcagtgagctgagatcgtgccactgcactccagcctgggcaacaagagcgaaacttcgtctcaaaaaaaaaaaaaaaaaaaaaagatgggctgggggtgggggagtgcctgggtggcggggtagtggtaagaatttggtcagcagggctggaggaggggaagcagcagtgatggggtgagggccttcgggtagcagagatgggggatgggtacatgggaggagtggagagtgctcaggtgagagtggggggtgtggaagtgccccagtggttgagatggtggtggatatggggaggcagcaaagggaagaggcaggccctggggcgacagcgactggc

SEQ ID NO: 1256 - DNA, 904 bp, Artificial sequence
  DNA replication origin
cacagaatggtttcctttggcagtgccagggctgtgccaaaggtggggagcagccgtgagagctagaggagctgagcacacatgatggagggcttcctggaggtggcaagcctgcctcgggccctggagagtaggggagatgagggcattccaggtggggttatggagggaggccttcccacccgagtctgcctagctgggtcatcaaagggccaggaggaaaggtgatccccttccacgcagagccggggctgcttaccttggacgagcagctgggcaaaggcctcggctgagcccaccttgttggtgacccggcagcggtagcggcctgagtcctcaggggctgcacgctcaaagtgcagcagctcgttcctggcggtcgccctcccaggaaggctgctgcccacgcggctccactggaaggtgagtgggggtgtcccgtgagccaggcactggagctgcaccgtctcccctgcctgcaccgaagcgtgctctgggaccgtggtggcatatggtgggcctgagtggggggacacagaggtcaggattggggagggcaaaggtcagaatggcagcaggtcgttggatccagtgtccagggaagctgaatggtgagcccagaggactggggataaggaaagcaaaggtcccaggccagggtgtgggtgtcgggcagggcaggctccaggaccctgcagcgcctggagacctctggatggggttcctggggttctgtgtggggtggagcctagtcggggggctcagatctccatttggtgcagacaaagaagggatgaggccttactctccacgtgcaggatgatggtggcctcagcgtgcccagcagggctagtggcattgcagatgtactggcccgagtcctgctgggctacccggggtatga

SEQ ID NO: 1257 - DNA, 1323 bp, Artificial sequence
  DNA replication origin
gggggtcagagtgaggcagggttgcaggttataggaacaggggtctcctgagggctccctctgactcacccccattctggccagacccacggctccctgctgagactctaccaagcgtcccccgccgactcgggcgagtacgtgtgccgagtgttgggcagctccgtgcctctagaggcctctgtcctggtcaccattgagcctgcgggctcagtgcctggtgagtagctctcagggagggcagggctggggacccagggtgggaggccccccactcttgcaacggcaggatcaggaggccaagccgcagactgcacctgccttgagaccaggagccccatctcatctcacctcctagccggctattgaccctttgccctctgtccccagcacttggggtcacccccacggtccggatcgagtcatcgtcttcgcaagtggccgaggggcagaccctggacctgaactgcctcgttgctggtcaggcccatgcccaggtcacgtggcacaagcgcgggggcagcctcccggcccggcaccaggtaggaggcaggagctcaggaagcctgaaggaccctgtagctgcagtacaagagcataggcttgaccgggcgcagtggctcacgcctgtaatcccggcactttgggaggccaaggcaggaagatcacgaggtcaggagtttgagaccagcctgaccaacataatgaaaccccatctctactgaaaatccacaaattagccgggcgtggtggtgcgcgcctgtaatcccagctactcgggaggctgaggcaggagaatcgcctgaacccaggaggcggaggttgcagtgagccgagatcgtgccgttgcactccagcctgggcgacagagcaagactccgtctcaaaaaaaaaaaaccacaggctttgaactcaggcatgttcgagttcagacactgttccgctacttgcatgctgtgtgactttaggccagtcacttgtcacttgattctctgaccctcagtgtcctatgattttatgtacctctaagaaaaagcttccatttgtaaggttattcattgtagatgcatcttgattttggagacactgaaatgtgtgtctagaattgatgggatgtggtgtgagtgtgtacccagctcactggggctcctctggtctaccaccccgctgctggacaagagtcccccttccccatgtgaaggacagggacagtgatccagagctgatggccaggccttgggggtcagagtgaggggccaaatgggctcatgctgcctacctcatctcccctgtagcatgtcaacaaacactggtccccacttt

SEQ ID NO: 1258 - DNA, 947 bp, Artificial sequence
  DNA replication origin
gtcctaggcagggagaccataagcatgggaataaatgaacaagcaagataactacacatggcgatgagtgccaggctaggaatgatgagaaagcaagaaacaaggtgggagaaggccaggagcggtggctcacacctgtaagcccagcactttgggaggctgaggcaggtggatcacttgaggtcaggagttccagaccagcctggccaacaggtgaaaccctgtctctactaaaaatacaaaaactagctgggtgtggtggcaggtgcctataatcccagctactcaggaggctgaggcaggagaatcgcttgaacccgggaggcttaggttgcagtgagccgagatcgcgccactgcactccagcctgggtgacagagcaagaatccatctcagaaaaataaataaaataaaacaaggtgggagaggcaagggctactctagatagggcagtcagggagggcctctctgaggaggtgacacctaagctgagacctgaaggaaaggtaggcattgagcaagttagagagttggcagagtgttcttggcagagggagcagcacatggcaaggccctgaggcaggagcacgttgctatgtttgaggaacagcagagaccacgtggctggggctgtgggagggaggacgggtgtgggcagacgggagagcatggagtatgtggtggatcagggtaggaattttggattttattctaaaagcaacagggagtcatggacaggtctcaaggtgggaggtcacaaggtcctgttgacatttcccaagctccctctggctcctgtgtgcacagatggccgtggagggctagcctggaagcagagaaagtaggcagcaggactgttgtgtgagtcagacgacactccccaccctgagtgcatgttccttttcctcccttgtcagcctcgggcaccttgtccgcccccgtggtct

SEQ ID NO: 1259 - DNA, 948 bp, Artificial sequence
  DNA replication origin
tacctgttaaaggggataatgatatgtaactcagggctgtcgggaggaatacatgcagggcccagatgcaggggtcattatagttatgatggtaatcaaggctgcggcgacgccggctgatttgcttgctgatgcctctgtgcctgtgcagaggtggtggagctggccacacactcacctggcaggacagaccgatgtagcctggcgggcagcggcactcctccacctcgagggcgcggggtctgtttgagggccccggctgggcgacctccaggctgactgcgctgatgctggccgccagcggcacggaggagaacgtggcccggatcaggagctcatccaggtcggccagtgccatcaggaggtgctcgcgtgtggccggctgcccatcgggccggcgccagaattcctgggttgggggtggcaacgtgggcgggggcagtgggctttgtgggctgctcctacagttaccaccccccaaatcctgccttacaggcactgactgagggctgccaggtgaaggttggggagcgagagacagggtgggtatcaaagccaggctctgagtcagggtggagggtggggtggggttagacacagcatggccaggtgccccttacctctcggaacatgatctcgtagctcctcctctcagggccctgcagcgctggctgggaggccactagcatgatgttgttgccctggaaagacaccagcaggattggaaggggagccgaggggtccctggggtgccagggtgtcctccaccagtcctagattctctgtaacccccagcctcccacctctctgctctcccaagctcatgcgcccaaaggagtcaggcacatgcccactgcccccttctcccagcagcaggatcctctgcttgggtagtgtccaaccaggcagggatgtgggggcatgggcctaactcccccagcctgtgcc

SEQ ID NO: 1260 - DNA, 1015 bp, Artificial sequence
  DNA replication origin
gcggctctgggcccaggtggtggggtgggaatgaggggcagctggtccagagccctaggccagatcctaccacttgtcttggggctcaccagggtgacagtgaccagcgagggtggccgtggcacactgatcatccgtgatgtgaaggagtcagaccagggtgcctacacctgtgaggccatgaacgcccggggcatggtgtttggcattcctgacggtgtccttgagctcgtcccacaacgaggtactgccggagggcaggtgtcaccgggtgtgggggcagagccgggctgcccaccacagccggctgcagcccccgcccatgccgcccagcaggcccctgccctgacggccacttctacctggagcacagcgccgcctgcctgccctgcttctgctttggcatcaccagcgtgtgccagagcacccgccgcttccgggaccagatcaggctgcgctttgaccaacccgatgacttcaagggtgcgttggcgggcgggtgagcgctgcgggaggtgggaggtgggtacctctgtacccagggggcacagaggatagatgcggacagagggggccaggtttcgggaaggaatgtgagtcgctgaagaaacactgagccctgtcaaaaaagcatttcggggggaaaaccaagatgtttaggaagagccaaatccccccttgctacctacctgcttcaggttacggcgaggacgggccctggagccagcttccagcttcagatcctgacgtggacgctgtccacctgtgtcctgggtcaagttacccactatctcgtgtctgtttcgtcatctgtaaagtcggggggtgtggaataataactacctcctaggggttggtaaggacttagtggagtcacgtatgtaagcctctcagaattgtgctcagcgcattttcagcacccaggaggtatttgctaacgtcacagtcattgtcctcattctgagagacagaggtgccagtgtacccagattataggagcccaggctttggcatc

SEQ ID NO: 1261 - DNA, 1103 bp, Artificial sequence
  DNA replication origin
cctctcctggggaagtcaaaggaaggacaggtccttgtggacagcacagaaacagagaacatgaaagctgaatggcctcgtgggctcctgagagtgtggggaacagaagcgcctgagctgcgcccacggctacctcctggtctcctctcgcacctgctctgtggatgcgcggcttccgctcctgcatggctgtgacttctctgtccctgtctgtgtctctctcaagctccatctccctgaggaagaacattggtcaccagccactagagaggcctagcagggcccagcccttgtcccgggccacttccagcctctggccactccatagagggcctgtcagtgggagcacagaccgtcgagcccctcaggggaccacactgtgccaggcattctggtagagaagggtgggcggggcattgctggcgcccagagatgccagccccactggtggtgcctttgacatgggtcttgtccatgtgagcaagatagcgcttctgtgcctctgagcgtggctgggtgatgctgtggttgtgacagtgatgtgccagccataactggcatggggaatgcaggtggagtgaggggtgggggccgggtaatgtgatgagtggttcgatgacagctggtggccgcatcatgctggctgtgagttggacagtgttgtgcagcaggggctaggcatggcgagggccgctgtgggttatgtgggcaagatgagagagtggccctggggatgcccagggaggatggacggggtgggctattgggaaccacctggctttgtccccagccaccaagcgtcctgaggaagtgtgcgggcccacacagttccgatgcgtctctaccaacatgtgcatcccagccagcttccactgtgacgaggagagcgactgtcctgaccggagcgacgagtttggctgcagtgagcagggagctggggtcgagatgcgggccctgggctgggttctaggggttctgtccacagcctcagcctccacccttctccctcctagcccctcggagccctccttccgctcctccttcctttgcccccgacccctcactcctgccctggtctcctcagtgcccccccaggtggtgac

SEQ ID NO: 1262 - DNA, 1084 bp, Artificial sequence
  DNA replication origin
tgtgctcccactgacaggccctctatggagtggccagaggctggaagtggcccgggacaagggctgggccctgctaggcctctctagtggctggtgaccaatgttcttcctcagggagatggagcttgagagagacacagacagggacagagaagtcacagccatgcaggagcggaagccgcgcatccacagagcaggtgcgagaggagaccaggaggtagccgtgggcgcagctcaggcgcttctgttccccacactctcaggagcccacgaggccattcagctttcatgttctctgtttctgtgctgtccacaaggacctgtccttcctttgacttccccaggagaggcccctgagaagggccttccaactaaagcccccaattactttatctctcccaaggggctggtgctatcaggcaagcttagagccacagaaaggcgttcgcaaactctgccagtctgtggcatggtgcagcctctcccccggggcttgctgtggagtgggcaggggaaggaaggcaaggagaagctggacaagctcacagcaggaacatggacacgcgcccagacacaccacccaggaccacagagaagagcctgaagattatccttaatcttgcactaacaagcatcaggcttcttgcgggacaggacatacaggataccacctgatgtggtcgctgcctctccagcctccccctcctatttaactgtcaggatgcccgtaatgtccatgactggaaaagatggataccacaagggtggggaagtgggaggctggaaggatggatgggagggaagaaggacgacagatggatgggtggatagatggatgaagggctgggtggatggataatgggtgtataggtgggtgcatgggtggctggggagttggacagatgggtgggtaaggctctgacttgcatacatacaccaaggacccatcaccaagggaccttggcacatagaaccctcctagccattcatccgacccacatacaaaacaaagagaagcttcatggtaacaaaaataaaggaaagaaatgacgagacacgaaccacaggcaggctaaccacacag

SEQ ID NO: 1263 - DNA, 719 bp, Artificial sequence
  DNA replication origin
gtggggtctgttttagagatgggggaggccactgccgcatgtcccatgccccacgtgtgctgtggatgtgtctagtgtgtgctgcttgccctcgttgtgcctgccagaaaccgagctgcctgacacagggccctggagcccactccagccacacagcacctacagcttcccgcacctgcctcctgccgcctctgactccagtctgcttcctttccacctgcagtgccccagttcccaagagcctgcacggaggccgagtttgcctgccacagctacaatgagtgtgtggccctggagtatcgctgtgaccggcggcccgactgcagggacatgtctgatgagctcaattgtggtgaggggatgtccggggccacgagtggtttgggtgccaggggagggccagggtcctacacctgggtcttggagcccatcaaggactatgagggtttggtgcaggcagaggatgggggcataggaagggtgatgacagagccaggcagggggtggcagggagtggtgttggggagtacagggtgggcctggggagggttggggacaaggagcaggtgaggagccatctgcttctgccaaatgccaagcggaatctatccacagaggagccagtcctgggtatcagccccacattctctctccttgtggagacgacatctttaccgccccggccagagacaaccatcatgcgacagccaccagtcacc

SEQ ID NO: 1264 - DNA, 1026 bp, Artificial sequence
  DNA replication origin
gcctgtgctggggtggacacaagtggcctctggaatgcagggcctggtccctgcagggctgctgcacccatctctgcccgtcaacaccccatggggaagaacgcccgccagggttccagcccactgtgtttagatctgtgggcccagggtgggcctggctgtgtcctgggcaggggcagtggctggcctagcccctggactctgcagggaggtgcctctgagcctcttgtgtgactcgcagcaaagtgcaggttggggaggaagagaacagggagaaaggagagaaaaggaagagtggggagagaggatggggagggaggcagagggagagcagcgctcccacctggccagggcctgggtcacttactgagaggggactcctcatcaggctccgagaccatcatgccagccacgggcgggcggcccaggggctgccctgagcctgcagagtagagacagagaaggaggcaagaagggacattgacagcgagggagacgagatggagagaagcagagagagaggcagagacattgcaagagagagggagacacaaagagacagaaagacagagacagagataaagaaagtggggcgggggagaatgagagagaaaaggtaagacaaaggtgaagaaaaaggcagagggaaaaagaaaaaaaaaaaagaacaggcagaggggagagagggaaagacagagggcgacagaagcagagatggtgagccagagagagggagaagaacaggatgaggcagagggaggaggcgcagagacagacactcaaggagtggggaagagggcccagggcagggaggacaggggacacacacagacatgccgacaagggtcagagcaggacacacgggcatgggggaagacagaaagagacaggtcagaacatggaaagaaactgggggaggagacgtgggaaggggtcctagggaggggaggctatcagggacgggtcttgacacacagggggctggagctgagccagggagccacagccatgcccagggggaggagg

SEQ ID NO: 1265 - DNA, 1040 bp, Artificial sequence
  DNA replication origin
gagattctcctgccttagcctcccaagtagctgggattacaggaacacgccaccacgtccagctaatttttgtatttttagtagagatggagttccaccatgttggccaggttggtcttgaactcctgacctcaagtgatccacccatcttggcctcccaaagcactgggattacaggcgtgagccactgcacccgccctgttctagatcttgaggttaccgcagagaataaaaatgtcagattccttcctctcatgtcacttgcgttatagctagtgcaggaagacagacaataaatgaaatacatcaggtggtgataagtgctcagaagaaaaaataaaacagggaagagggcagtgagtgatgaggcggggtaggtagggtggggtggtaggaaaagcctctgataagataaatttgaactgaaggagacctgaagtaagtgagcgggtgagcctcgcagatatcaatggaaagggcattccaggcagagggcacagctagtgcagaggcccagaggtgggagtgtccttggcatgtctgtggaaaagcaaggaggcccgtggggctggagcagcatcagtgagggggagcatggtggatgcagcaggcaggggggtggcagagggtgatcagcagagctttggccatgggaaggaccttggatttgcgtctgagtgaattgagaagtcactgaaggggcccggtgttccataggattgctttggctgctgtgtggagaggagcacggggagggtccagagcaaaggcaaggaggccgtgacccaggacagacgatgggagctcaagctaggaccacggaggtgggagatggttgaatccccagtacattttgaagatgggtcaccaggatttgctagtgggttggatgtggggcgggacagaaagagaagagtccgggatgcctccacagtctttggcttcagcatcccgaaggatggagctgccactacctgagatgggaaagttccaggaggagtgggcaggaggtggagtccagaattctcagaacagttaat

SEQ ID NO: 1266 - DNA, 1908 bp, Artificial sequence
  DNA replication origin
gagcccgcggcccgggggcggtccgtgggcggggcctggcgctccggggaggggcggttcgggggcggggccggcgctgcgggggcggggcgggcggggaggaaagggggcggtggggagagggccgcgctgtcccgagctggccggcgagcgggcggctgcgggcggcgcggagcgggcggcgcggagcgagcgagcgagagagcggcgcgggccgggccatggggtggcgggcggcgggcgcgctgctgctggcgctgctgctgcacgggcggctgctggcggtgagtgtgcggggcagaggggcggggggcgggggcggaggggctaggggcgccccggtcccgctcgccgcctcccgccaacttggctggggcgcccaaggctgcgcggcggggactctggcccgggacggcggcgcccgccggggaccccgggccggcgccaccctgcggcatggggctaatccaggggggccaccagtcaggacccttcgtggggctgggggcggggctggcccgtgtgggagcccgtgggtctctcggccacgttgccgagtgctggagtctcgctgggcatggtccggcctaccattcctggggaccaggaggggaaactttgagcagggtgggaacttggcaggacgagggaacccttctgcgccagcttggcagaacggccactcagtggtgatggggaccctatgagtctcgctgaaactttaccacaccgtctatcaccttggggagcttggacccaggtaggcacaagcaaaacttttgggacagaactgaagcttgtgtggaacacccacgggccttggagtcatacagccgaagagttgaatcaatccctgcctttcactgagtaactgtgtgacctggggcacgctagttaacctctctgaggccagccccacgtgggtcaagggaactcaaaatgcacggcctcaaaatgcatagctgcagggcgttgctggactgcgtggaatgagctgcaaagtgcgtggtgcggggatgcagtgcacccttgggggacccgagttccccagctttcctcttcccaggtctccaagaggcagggagaggcctgcccttgcagtctagtcccctactctgagcttaggtggaggaaaagggaattctacggtcaggaatcccgaggcttagaaggcacttggccagcagaggccctgaggacctgagtgaacttgaggaggactgggtggggtcggtgggcagggagctagtggcagatgtgggtgggggcacatctggggagccgagcctaccgtggggagccacagagccacccccactctctccgaggtgctcctaggcagtccccatacctgcctccctgttctctgagccaagagagggacttttctaaccaggctggtgtttacccaggaactgcctgcctggcctcaccttcctggcttcatcgcacctctaccctcctgagtcactcgtcaagcccccacccagacctggctcctcactgctcttgccccacccacccagcacttctcctcccccatccccactctgggcagcctcctctgtcgtcctcctgtttcagcctctcaccccaaaatattcagcagggccatccagtagctccctagtcttgacctgaacttgcactcctggcactgacttttacttttcccaacgcaccaacctagcacgtgggatgttttccgaggcccaacagtctttcctgaccttcccccagctctgcccccgatgaggggctcctccatgcccgggtgcggtaggatggcggtgggtggagttgtttgctgtgtgcatgaggaatttccacagacattcctggaccgtggcagatcatctcattcacttgttcattcaacagatcatcactgagcgacattccatggca

SEQ ID NO: 1267 - DNA, 883 bp, Artificial sequence
  DNA replication origin
gattttaccacccacccgagcatctgtgatggggctttggcagggtctgtctgtctgggcctgagtgtgtgagttggtgtggttctggctctggggctgtgatttatgtgactcaaagttggtgtgtgagtgatttacatggaaaatggtgcaggtggggtgggcagctcagttcagtacccagtgcccactatgaggcactgtgattagtgggtgagaacaggtaaaagatacaggctgaggctgggtgcggtggctcaatgcctgtaatcccatcactttgggagggcaaggcgggcagatcacaaggtcaggagttcgagaccagcctggccaacatggtaaaaaccccatctctattaaaaatacaaaaattagccaggcgtggtggcacgcctgtaatcccagctattcaggaggctgaggccggagaattgcttgaacccggaggcggaggttgcagtgagccaagatcccaccaccgcactccagcctggggacagagcgagactccttctcaaaaaaaaaaaaaaaaaaaaaaacaagctggtaagcatgtaggcaatgatgtgggcctgtgtgtgaaatgtgcgtgcctgcgaggaatctatgtgaaaaggcgtcctcccgctccgtgacttgttgggatgtatgcgtgagtgaggggctgagtgtggtgtgagggctgtctcctgtgtccctggtggaggtgagagtttggaagcgagttaagtgtgcatgtgagccggtgaggattgttggtacttcagagttgggtccagagtgtgaaagtgttcccgggtagcgcacaagtgtgttcgtgcagtaaagttatggtgtgaaggtgttcttgggtgtggaagttggcgtgcacgtgtggcgc

SEQ ID NO: 1268 - DNA, 1193 bp, Artificial sequence
  DNA replication origin
caccctccttacagggactttcccgggccccatcaagatgggagccctgctgcctcccagattggctgctctacctgcaaagccctcaggtagcttggcgggcgggaagctctccctggcagggactcctgccaagacactcctgcccagtgctcctgagctcagatctgccctggcttgtgcctgccacatgtggacttggggaagtgctgtttttggcagtgggtgagcaggggccccatatccttgagggtgttaggtgaggaggacgcgtgactcattgtgctctggtgggtataaggctgcagccgggggagggccaggtccaggcccaggagagattttccagtctggcaggcaagttggctcaaggccaggtataggctcaggacacagtgccaacagttgcctgaggctggacacagatgcccttcgggcagggtggagggctcttggctctagctgtcccctgaactgacctgggtgtcacaaacatgtggctgctgagctgggcttataagagccatgtggctgaagggataagggggcacttcccactctctcaggccccagggaaggagagaaactgctgagcggcaggtgaaggcttaatgggcagcacctgtgctaatgggtcagggtcctcaggtctctggagaagggagctgctccccctacccaggggagcacagagaatgagatgccttggaacttctgtgcttggggttggggaagggcccctagtgttcttggtgagcacaggatgggcagaggatgttggtgggactgtggcccttggtgggtgggaggggggataggtgagaatgaggagagccggttgggggtgggtgcagggggagggcaacggatgatgcagagctacttttcagccagtttatccttggcaatgaagccaaggatccaatgctggaggtggtggagaggggccaggtggggcagcgggtaccactgtggctggagatggcaggacagggcaccccaccacccaggaccttctgagactctgcatcttctctgcagcgctggaagcgggggcagctgggcttggctggggagtggagaatggggcgagtgggggatgggactgttgctgtccaacatcctgggtctccagactagacccctcccagtgctactcagttcacagggccacttcctgagtcctcaccgag

SEQ ID NO: 1269 - DNA, 1074 bp, Artificial sequence
  DNA replication origin
cgggcgcgggtccgcgttctgtgggggagccggggcgggggtcgcggccggggaggcagggggcgcccgtctgaggaggggcgcgcggccggggctcggggcgcgagcgggaccgggctgtcaccggcagcggcggaaggaagggggtcacacccatcctgggcgcccgggctcccctccccccagcccggcccggcgggctcctaagggcggccgggggcctcagagcgactcgcgggcgcttgggccgggccgggcgccggtcttccgtgctggcaggctgcgttccgtgccctgcgctccggcctggacttcctgcttcgccgggcgccgccgcggacattttgcggcgggggtgggggggcgggggaggggagtggcgttgcggccgcggcggggcggtggcaggagggcagctcgctggctgctcgcggcggtgcctgtccgagctcccctccgcgccggccgcgtcctctgggcggggtggccccgagccacggcctccaggctgctcttcctttcggaggtcgagttcctagcatttccatccgctcctccagcccgctccctgccggtttagctgaagcttccctttcggggagttacctaactacctcccgaagccgtcgttctgctgcttggttaattcctcttatcgggggggaattttctttgttcgtttgtttttcctcccctttaagtccaagataaatgtagtgtggaagattacgtcatcgcggtataaggagtgagacttaactcctacaagtcagggacttaaattcaaacagcattttgcagccttagtcggtcacccagtggcttatcctgcctgcttcccaacacgtcgtattcacagatgatgttttgaaagcttgttacttgtgttcatgaccgccttcagtgcacctaaaagctaggaaggtttaaaatcccaggattagtttgtgtcagggaataaagtgtaagacaacaccgtccacggccccttgcgtggcattaactttaaatagaggtccctttgactatactagaatgaggtgggtttatttgtgggaacacttttcggtccaa

SEQ ID NO: 1270 - DNA, 1877 bp, Artificial sequence
  DNA replication origin
tcttctcagccgccgcgagcaactggctgtaagtctggccggggccgagcggggcggggcggggcggggcaggccccgggggcagcggccggtgccaggcggcgcggggcagcgggcgcggggcagcccggcaggtgtctcggccgcgggaccggaggctcgctcgctccgctgccgccgccacggcccgaacgtccctctgcacacccggggtcccctcctgcccgggtccggctccctgcccagaggcgtcaggggtggctgtggcggcgtccgcaccggtaggcggctcggggctctcgagggcgccaggggtgcgagcgcggggcggtggcccgggaggggcgccggacgcgggttgcagtccagccgggctgacaggtcgctgaggaagcccattgcagggaagggctccgggacataatagcaggttaatcccgagaagtccggagcgagctcccagcgccgagctgcgccgagctgcgccgcgctgcgggctgggctggaggcgtgcagggacctgtttctgcttggggggcgggagccggagacagaaggaagggaccaggacgcctggtctcccagggcccggggctggcgctggcgctggccgggccttggtttttccccggggcaggaagaaactccgtccagaccttaaagaagacaacggccccccagctccccgtgtctagcctaaggaggaaggggtggtaaccgctggtgacctgtctgtttctccttgactggatctgcgctcagggcgctccctgggtaggggcggaaggtttgctgcagggagggagactaaagggatgagctccagtgagtgggtggacagggagcaagcggacccgcgctcctttcatccccgctcagggacagttccccatgccccgcgcttaaccctggccccagttcctcctgcccagagctctgccaccatccgctgtgggcagccagtggggagccaagctccaatattgatctgaaaagcatggggtgggaagggggatcgccaacagtgtagctggggtttccatggagacagggagagaggaaaaaattctctctgcatcaagaccaaagaacaaatatctcccatgaaattgccccgagtgtccaatggctgttgctatgaggtcattgtggccagccagagccctccaggctggaaggagtgtgttcgttggggtcagagccacccagggcttgggggacggaggtgatgtggaattctcccagctgttccgagagcaaacgactccaaggcagcccgaagtggctgcggagcttttgtttttcttggagccttaatttgattaacacttcaggagcagtggcagagtgtacagaaagcaaggcaccaccaccttctcccactgcccccctgcaggccaccccctgaatggagcctgggtcacagagctggggagggagctgatttggacttggaggaccctgggtgtccctggagctggttcttgaatgcatgggttcagagcgggggcctccaaaacagatctgagcatcagaaggagcaagaactgtgtctcacctgcccagcaccgccaaagccacaaaaaacaaacaaacaaacaaaaaacaaagaaaaaaaagtggcagtccaagcgtctggcccaggcctacatggaagacagcgacatctgcagtggaaagtccttcaggaacatctcatctttgactcagatgaggaaactgaggcctagggagtggaagctacttgcccaaactcagagctgagaactgaacccaggtgttctgactcccaggcagtgaccctatacccccttccctgaagctgtcccaaagtggagccagcatggcccggtggcatcaccactcaccttcaccca

SEQ ID NO: 1271 - DNA, 1424 bp, Artificial sequence
  DNA replication origin
gcctggctgcgcgccgccgagcccggcccggctagaggcgcggcgacccagctgcccggccgccgcccgggcctaggggacaggcgggcacagctcccccaacccgccgctgcgggcactgcagcgcggccctcgctgtccccctaccccccccaccgccccccgccggcgcctggagcccagaccccggtccgaccgcggcggacccaccggagcgcggctaccactcgcgcgcacccaggcgctggcgctccgggtgcctggggctgcacatcggggcgctggatgtctcccgaccgccccccgcccggcccctccctgcctcctggcccccgcgtcctgcggcccagcccctccctggcgctcacctccctacagccttccgggagctggacggggcctccccagctttgggcagcttgggacagtggcccgagactgtgggaatccgaaacctcgcttctggctagccacaaggtctgggcgcgccccaggcagcagggtcttgactctgagcctccgttttctcatccgggaagtgggcttaagacgctgtgattgggaggacaggaggagtttagggaagctctcttggctcactcaccaagtcttactttgcatttggttttctatgtgcttgttcgatttatcctcccatactaggcagattcagcctcttgtttgttttgggcacagggcggtgcctgccatgtttgtggaaggaataaatgaatggaatggaatgggctgcaacagcctgtgcttggctagtccagagagctcaattccacatcactgtaacccctaagaattgtctgcccaagtccacgccacaccctctcaggtcactgatctgattctgtgtgctactcatcctccaggctgcatcccccagctgctcacaggtagagggacctcttatctaaacagtaaaactaaggcccggaaagggaggcacctgtcccacctccctaggggttgggaacagaggcaaggaccaggtctatgccctcaccccctgatcttagttcttcactgattttggagtatgaagtttgctcccacagaggccatcatgtttgggtgctgggatggtgccctggggtcccctgggctcagaacagaggaagggctcagtaaacatttggtattgggactgggtggaacgtggcagggatttgtggggctgggcaagagtatagatggaggttcacataccatatgtccaaatatttgcaggctataaatcaagctaacaaaatgcaaaataaattatgttctattcttctatcttgacaaatacactttcctaacaaggcagaaagctggctttgagtgtggcattctcatactcctcagaccttgccctggagctggtggcacagggagagggggcccctagtgcctggcctgggcccctgccc

SEQ ID NO: 1272 - DNA, 979 bp, Artificial sequence
  DNA replication origin
ctaggctaaggaaagagcatgtccaaaggcctggaggtgagatggcagggtgggactgaggaaggaaaagttcagagtggtggctgggcaggtgaggagaggctgggccacgtgcaaagctggaagaggccagcttgggccagggaacgagggaagagaagccttggaggaggctgacgcttgtggggctctgcgtatatgtgtgtgtgtgcatacatgtgtgtgtgaatgtgtgttggggaggtggatggggcacagggggcagtatcttcagcctcctaccagcaactatgcacacagaagcccagccggtatccccacagaggcagacgccccggcactgccttgtcggaaacccgccggggcaggagcagctgcttctaaatcaaggccaaaggcagccaaggggccgggttgggtttggtggttctgctgtatgggctgatgtgggggcaggggctgaagggggctcttgggcagggattctgggccagaatgagcctggctggtttggggaagtttattttggaagctgggatgatgcaaaattaagtggggaggaaaaaatagatgaggcgaccgagagggtctgtctgtggctggcggggctgtaagtggccagcgagaagtgcgttgttgggtaaacagatgggggtggcagctttctgcacgctcgctataaatatcccgcagtttgccgcccctgctggggtttcctggcaccgtgggtgtggagatcaaggtacagacacagggcacttccggagtggcagagggtggccagggccctgctcagatcccagcctcctgggggtggagtgggcaccgggaactgaggctgaggcccgagtgggggcgggagatgcttctttgctattaactggctgtggttcttgggcaagccctgtgacttccgtgggcctcaatttcttcacctgtaagatgggcatgataaaatgaggcagggcatgtgtcgctg

SEQ ID NO: 1273 - DNA, 2546 bp, Artificial sequence
  DNA replication origin
gagtgttcctggaggcccttttccaccccgccccctctggttttcacttccacctcattggccactcccagctacaaggaaggttgataaatgtggtcctttagcagagcacattgtactcctgaataaaatctaggctctgttagtaaagaagcagaggagaatggccataggggaggctctaacacagagagagaagaagtttccagaaggaaaaaatggtagacgcattggctaaggcataaagggttaaccattggacttggcaacgagatcatgggcagcatccctctgctggctgatcggggaggggagatggagttggcagtggcctgaagcatgcaggggagaaatgaagacatgttcactgaccacgattgggaaatcccaggccaagggaagatcttggtgcccagagagaagatgcaggatcaagagtggtttggggtcctttaccttgagatgtgaggatttagccatgatagaagctaagagggctgagccagagaaggaaggagaaggaagggatgggggagggtggggaggactgcaggtgtgaggccccagaggagatggtggggaacaggatccagaagacagtggcaggggcagccgggccccaggcaggagccctcaactggggtttcagaggacagcaggcgaagagggagtggaggggccactgttgggtgggtgggtgggtggagaaggcaagccaaggatgtgcccgccaagggcctggggacctgcatgacataggggtgacagcagcagagaaggggcaggtggggccagtcaagactaggagtgtcgggaaacagttggagccagggaggcctgggggagagaagagagtgctccaccggccaggcctttcagggggctgcacaggaggtctcagggcaggtgtagtgtgctcggggcccggggggtgggaagtggtcaccatcagagagtggggctcagcatttagcgtttcggggagggtggtcctgagggatgataaggcccagggtggcaaggtggtgggcctgtggaggagggagtccctggagataagaaggtccaggaagtggcagccagggggctagacaggtcatccatgatgtcactaacatcacccaggatggtgatgggatgggtggaaggaaagagcatgagccaagacttcaaggaatgcagaaggtgtcggggaggtcagcaggggacggcaacgaagaagaccccagcctggcagagtgtgacagggacagaggagtgtccccaaggaaagcagggtcctgggcaggcagggggtgcgggggagccatgggcaggctgagggggtcacagagaggcctgtgagctatgaggacatccaagacctgtacctgggaccaaaggcttgggcgaggacagacggtgctggaaaggaaggcaaagaagtaagagggtgagagaagatcgaatgttcagggcagacttggttatcccattttagagatgagaaaatggaggcccagagaggagaagagattcacccagggtcacacggggagtgaggaacttgagcaggccccaggctctggccacacaagcctgcacgggtgccttcccctctccaggccacagtttccccatctgtaaaaggagatcagtgggtgtggtggctggaccttagctgtgacccatgaagatttggtgatgacataagtttttggagtgagagatccccttccctggccctgcccttttaactgagtcatctccaaaaaggtagactttccaaattcccccaaccctgtgttgggtcctcagggggctgagtcacagggaaagtcgagactgggaggcaggtggtgattgatgcacatgaggttgggttgcctccaggacgggtacctacgtgccctctttcccaagagcctgcctctcacccacctcggtcacccacctgggttgatctgatcacagcaaaccctctgcagtgaacaaatggcagatgcttattctctccttttccacctttgtccctatccactcctgtccatcttctgcatgctgctggagccatcttcccacggccaccttgctccttgtccctcccctgctctgaagtcttccagggctccccatcacctatagaaagtcaagtccatcatctagcatgccaggcccttcatgctgcagccccacggccctcttcagcaacaccatgtggtgctccatgccaacttcgtgccaggccttgggtcatgccattcccccacccacccccttccaatgaggatggccttttgtctctgccaatccaaattgcacaaatgtaaaaccataaccccaatgtccccatgtcctctgggctcaccctgttcttagtttcaaccaataattataattaataaaatagtccaaaaccccacactctgtactgcagggtctccaatgcccttctcaacactgctgaggtctcccaagcaggacttctgtgtcccttcaccgctagctctaccgttgacctgaggcacatcccccctgcaccctgctgcctcccagcctctctctgc

SEQ ID NO: 1274 - DNA, 1254 bp, Artificial sequence
  DNA replication origin
ggtctgcggttccaagcagccagcccatgaatggggactgtgtttcctctgaggggcttcctggaatgacagcagtaccagctatctctggaagcctctgaggagctgggggaccatgaacccagacatcccagggttgggaatcaggggctactagccacaagagccagcccacccattcccatgttgtctggtcacctcacagcaaccgccagagatatgcagccccttcagggaatgggggcgactggaattaagtctggggaatcatctctggacctccagggcctcgaactgtgcctgagacccaggatctgggagatgatgggtggatgatggatggatggatagatggatggatgaatggttggatggatggatacatggatgggtgggtgaatgaatgggtggatggatatatgagtgggcagatggatggatgaatggatgatggatggatgaatggatggatggatggatgggtggatgggtggatgaatggatgaacagatgggtgggcagatgagtgggtggatgatgggtggatgcacagatggatagataagtgaacgatggatgggtgggtgtgtgagtgggtggatgggtagatggatgggtgggtggacagacgggttggtggatgggtaggtgggtggatgggtgaatggatggatggatggatggatggatggatggatggatggatgaacagatgggtgggcagatgagtgggtggatggatgatgggtggatggacagatggatagataaactatggatgggtgggtgggtgagtaggtggatgggtagatggatgggtgggtggacagacaggtgggtggatgggtaggtgggtggatgggtgaatggatggatggatggatggatggatggacggatgaacagatgggtgggcagatgagtgggtggatggatgatgggtggatgcacagatggatagataagtaaactatggatgggtgggggggtgagtaggtggatgggtagatggatgggtgggtggacagacgggtgggtggatgggtaggtgggtggatgggtgaatggatgaatggatggatgtgtgaatgatagatggacagattttagttctgaaaatccacgttttgaacatttctgtggcagcagctgtcactgcccatctatacccactatcccatttctcactgcaaataacaaacagtgactctgcctctacagccgcagaacatactggcccagaagtgcctgaaa

SEQ ID NO: 1275 - DNA, 1058 bp, Artificial sequence
  DNA replication origin
tatggcaaggccttttgagcacagaatgtcaatggatcctaaaacacacaaacacacactacacacacgcacttacacacacacgcacacacacagcgaagtggatattattggcatgctcagtttatagacaggggaatttaagcttaggagtcgaagtgaatttgccaagccctgcaactgttggggcagtatttgaacccagacctgtccagttgttggagaaacctgatatgccccctccttcctgcctgttccaccaccctggatctcagctcgccccagtgccaccttgccgattcaatccagtccagtccaaacctcatgcctgagtgtgtgtgggccagggctgaggagggtaaggggagatgctagggcaggaccttgctggatttatgatgtgccaaccctggcttgggccccggaatccagatctgaactagacaccatccctggaggctggaaatcaaggtgggggagggggtgcaggcggggaggcgttggcatggaagacctggcgacagggcgggaggtgcggggggaacatgacccagtctgggtggtggagttcaaggcaggcttcctgggatggcagtacttgagtaggatccgggtggctcctgagggaatggcatgagtagaggtgtggaagagagtaacagggagaaagggtgcagtggttttgcctagagtggttctgtgggtggagcccagagtgtgagggatgagatttgagagatggagacagggtagaccctgaagggcctagaatgccaggcaaagatgctcagaccttctgtgtgcgatagggagacatggaggattctagaaggagagtagcttatgcatttggaaagctgctctggagtggaggtggaggtgggagtggctgagggaggggctggcaagcaattgtggggaccccgaagggttggggtagaggtcagaggtggcagtgacaggaggagggactgacacagaactggggtggggacaggaagggggtggaagatttgaaaaaatccaggaggtgaatccaaagaatcagatgcacagga

SEQ ID NO: 1276 - DNA, 808 bp, Artificial sequence
  DNA replication origin
tagaggtgtggaagagagtaacagggagaaagggtgcagtggttttgcctagagtggttctgtgggtggagcccagagtgtgagggatgagatttgagagatggagacagggtagaccctgaagggcctagaatgccaggcaaagatgctcagaccttctgtgtgcgatagggagacatggaggattctagaaggagagtagcttatgcatttggaaagctgctctggagtggaggtggaggtgggagtggctgagggaggggctggcaagcaattgtggggaccccgaagggttggggtagaggtcagaggtggcagtgacaggaggagggactgacacagaactggggtggggacaggaagggggtggaagatttgaaaaaatccaggaggtgaatccaaagaatcagatgcacaggagtcctgaatcctcaggtctgggaagattccagggtctacaccccgattttagccagcgagccctcagctgggatgaaatcttccacagaaacccaaccactcaaatgaacatggggctggagctactgcagagccaggcagcaggattccatttacgcaagttctagaagacacaaaactgatctatggtgacggaaagcagatcggtggctgcctggattggggcactcatatgaaggggtacaggggaaacttctagggtgacaaaatgttctagagcttgatcatgatggttacctgggcgtagatacttgccacactcatccaactgtacatttaagacctgtgcattttactgtgtgtaaattatatctcataaagagaagga

SEQ ID NO: 1277 - DNA, 702 bp, Artificial sequence
  DNA replication origin
gcctctgccctgctgtgtggcctcaggaccatcaaacctctctgggcctcagcacctggtctctcagaggtccctggagctcagctgtgtgagaaggggctctttattgtccgtctgggacccctgctctggggcatggatcccaggagagagggctccccctgggcagatgctgggctaagggagcagccacctggaagtcaggaggcctaggtccaggctctgccttttcaggcctcagtctcccccctgtgaaaaaaggaggccaggctctctcagaggggatactgggccatcagattgcgagggaagagaggggagggtgggcagtggctgggtggggcagggcaggagtggccctcacccagggcacacaaaggggccatgtgtcctcggtgggcagtgaggggcgggcccgggcgtctgctctagggatgggatttggcttcagagaggggctttattatgtttcctttttaattacaatggtcctggctcctacaacggcagcttttgttggggcggcttaggagagggagggaggcagggctggccagtctggggctggaggggcttgatgggagggggccttgctcagaccctcctgtctgtaccctgggaagggaggtgtgggggcatgagggaggggccggctttgggggtggagcagctgagtttgagccaaagggacacttcttcctg

SEQ ID NO: 1278 - DNA, 1042 bp, Artificial sequence
  DNA replication origin
ttcctggactccactccaggcgtttgaaagccctggatgtcccaacaatttcaatttttttccctggtcctaaggggccaagaagcccagctttcaggcagggtctaggcatggcctatggggtggtcagcagtgggcaggtgcagatgcaaaggagggcagaggttgctgaggctgtggatggccttgtgacaggtcccgaaagggcacctgagctaggacgcccaggcgggactgcgagggaggtggccactctggggcagggtggggacagccctcaggactcctcgggcctgaacgtctttgggaggaactctagcatgtccagggcagggcgggggtgcctgggaaagcggagtgagggagcccccggcaggcttgtgtcaaggcagggacaggtgccttcctcagggcccaagtgactggttttacctcctctctcaccgtcaagtccatgggtgggagtggaggcggaggaagtaggggatgagcaggggagttgccagaccagagacagcttgaacccagagtccactgacgggttgtggggctgagaaaggagagacggggataggaacagcacggagtgccagcaggaggccagagtggcagggacaggagtggagtgaccttgggggtgatggggtggagctgtgtgctgggcgccctgtctatccaccccaccatctggggcctcaggggcccggggccaccatctgattgtggtcattgtggtcctggtcattgctttcacccctccttgcccctctctcatctcctgcccaaagccttcttcctccacagagcttaaggtttacttattgaaattagcccgtctttttcttcatggcttctgggttttgtaacacgctgaggaagggcttccctacccaagattctgaaaatgtttccttttagcgctcaccgttctcttctcttctttctgtcctctgcctgttcctgccccacttcccatgattatcatgcttttgtttgtttgttttttgaaggagtctcccactgttgcccgggctggagtata

SEQ ID NO: 1279 - DNA, 1539 bp, Artificial sequence
  DNA replication origin
cccccggtgtccacacacactcaggccgcaggcacatgggtgagtggccgtgcacacctgttgggagattcccacagggtggacagggagacgatggggctcaaagccctgctggccaggtggccacagccctggctgccacgggaaaggccttccagaactgggagagaatgtttcaggcagcattcagcctagcaagggattattttcccagtttaagtcatgaaagttgatttaaaaaaaaatctctctgccaccaagccctattataggctgtcaggatctagtgggaaacaaaatcaaatttctgtctcctcgactccacatctagtcagagagacagacaatcagcttacagagcaagcagccagcgcatcacagaatgagcgctgcggaagcccgaactgtggggaaagaatcagggtttgactccgttatgaaaggtggtcagcaaagccctcactgggagggggacctctgagcagaaactcgaggaaagtgagggggcgggggaacagcatgtgcaaaggccccgaggcaggaatgtccttggcacatctgtggctgcagcagagtgggcaaggggaagtgggttagggggtaaggtcaggtcccaggggaccttgatggccattgtaaggactttgactctccatgtgaatgccaggggaagtcactaggggtgaagatgacttgagctgacgcatctgcaagggggcctctggctgctgttttgagaacagactaaagcaggtgggggtggggagagggcagagcagagagccccgggaggaggtgatgggcgaccgaggcggaggtgagggaactcattcaggcgagaggcgacggcgcctggatggggcggctgcagtggagcagggagatgtggtcagattttggatgtgttagatttgctgatcgactggatgtgtgagaaatagaggtcaaagatgaattcaaggtttctggccagagcgactggaaagagagagtcgccgttgactgtcatgggaaagatggtgaggatttgagggctgggtttggatgggttcagtgcaaaaagcctcttgtgcctctaagcggagacgatgagtaggcagcagaggctgctcccgggtgatccaggggctgcggacttggacttggaagcagccaggctgcagttggtatacaaagtcacggagctggataaggttagctggcgatcgagtgcagatcgtccaaagactggggctctatgcctcatgcggaggctggagagagaaagcaaatgcaggaagatgaaacaggagactcagtgagatacaaggagagccaagagacagcagcatctcaaagccaagtcgaggaagtgttttaaggagttgatcagcaatcctgctgagaagccaagaaagtggagccctgaggatgggccgttggatttagcagcatggaggccactggagacctggacaggagcagttttgggggacatatcgacagtgaaaacatgactggagtgtgggcttgcagaagactgagagaagaggaaccgga

SEQ ID NO: 1280 - DNA, 1893 bp, Artificial sequence
  DNA replication origin
agtatttgatgagttttagcagcttcagcaaaactctaatttgaatttcaggcgctggtgtgtgatttcctcggtgacagctccgagggatgcttgggctcggctgtcatccagtggggcttcttgctggctgccgcagcgcctgccttcccaaggaggaaaggcgggaggccgagaggagcggggcgccactgaagctggggaggagaggcgcaaataagtgacagggagagaggggtgtggaagggagagggacatgggagcagatgcagagggacaagaaagagggagagagagagagagagatggagagagagggagagagagcaggggaggagaggtagagagaggggtggagagagagagagagggatagagagagatggagagagagcaggggagagagagaaaaagagagatggagaaagagagatggagagagaaggagagagggggagagagagggtgagagagagagggagagggtgagagagagggagagggagagagagagatgggggagagagaagagatggagtggggagagggagagagagaaagagagggatggagagagggagagacagggaggagaagagagagggatggagagagagagggggaaagacagggagggagaaagggggagaggggggaagagagagatggagagagagagaaggagagagaaatggagtgagagagggagggagagagagagggacagagagatggagatagatggagagagagagggacatggaagaagacgcagagggacagagagagatggagagagagacggagagagggagagggggaagagacagatggaggcaggggtgcgagatggagagggagggggaagagagagacagagatagagggagacggagagagacggagagagagggggagagatagatggaggcgggggagagagatggagagagggggagagagagatggagatagaaggagacagagggagagagatggagagagagaggaggagagagatggagaggaagagagagacagatggggagagagagagagagaaatggagagagggagagatggaaagagagaaagagatggagagagagatggagagagagagagcaagagagagagatgaagagagaggagaaggccaggagagagtcagagtatgagggtgagattgggggccttggggagagacagcaacagagaaaggagatgggaagagaagagccagaggagaaaaggcaagagacgtgtggagagagagatagagagagacaggcagccagagagaggccagaagagactgaccagtcaagctagactgagggagagggcaagagagacccagatagacagagggacccgcaaggagctggagggcagaggcagagacagggattcaaggaaggctgtggggagcagtagaaggaccaggaggggagggaggcagagaggcaggctgaggacagcaggagcacctgctcagtgccagccccatggatgtggggcctggggtcccagcaggaaccagacaggcaagatccagagggccgtgagggggcctgggctcgggcatccagtgagagaaggaagttcaacctcccagcccccgttccctcccacagccccactcccacttcagctgttgcagagtcctgctcagcacaggtctccccaccaccctgacccccagcatcaggcagtttgcaggcaggagctctaatgcccgaaaccaaggctgtatgtgggaagggagtttatttcccaggtagccctcccgctctgccctacacacacacacacacacacacacacacacacacacacacacacacctgggaagaagggaggaaagggagcgactgaatgaaagagggatct

SEQ ID NO: 1281 - DNA, 1622 bp, Artificial sequence
  DNA replication origin
gcctgatccccatttacatagagacaatgttgataataatagaactcgcttcaaaggattgttattaagattaataagaatagtgactattctgtcattttatcctagatgcagagagcccttggaggccctcccccatgcggagcagcaccccagagaggtaacgtgatttgccttaagtcacacaggcaggcagtggcaaagacaatccagcctcagttccagggctgggccaggcctcaaggaggagccagggcctcccttgtggagggcaacctgccggccgggcactgacgagctggtgtccagcgagagcagaaggggcccctgctccccaggagggtggtgagaatcaaggagccagctgaggaatccaggtaggattccagccccagccaagagtgccgctgagacagacgaggctctgggacagagctgacttgggccagggggcggggcaggggcgggtggcttccctgaggactggctgcctgagccaagctgaaggaggagtgaggggtggtggggaggagaggctgaaggagggagcagtagagacaaaggccgtgtgcaaggaggggcacagtaccttccagaaagcttggggagggagaggcggggactggagaggtggtaggggccagaccccgcccctctctccctgcacttgcaggtgtgataaagatttgggtctttatccagagagagagcgatggaaagctctggaaaagctccaatcaggtcagaggaggggagggcaggggcagggctgaccatgaccttgtgcactgaatggcttcctggctgcagtgtggctagcggctggaaggggccagagggtgtgcacagaggccagggatgtggccactgtagctgtccccgtgagaggtgagggaggcttagagcaggctgatggcggtggagatggagatcaggctggaagcatggacacactccagacatgtccaggtggtatcagcaacatgacttgggctgtcctggccacgtggctggtggagaaggaggcacagagacaaagaacagtttcctgacttgtgcaactgggcggcccatggtgctgggagaggcccagggcatcatctggggcaagggcaggtggtgtttgaagggctgtggaggtgacaatgggctgtgcagggactgtaatggaggtgatctagggctgtgcagggactgggagatgagcagagtggaggggagaccgggagagaaggaaatggggaggccgtgagaacagcagtttgctggaaggggaggagagagggagaaggcaggcgagtgagggaggctttcgttctggtttgttaggacaggacagacttgaatgtgaaggatggagcagcccagacctctgaggccccttcccatccagtcatctttccactctgctctgctgcttgcttagtggttccaaactgtggacgtgattgattatgtgtaaacagcaggaagcaattagtctgtgcatgcctggccattaataagcctcttatgtatttagaacaacacctcccttacccttcaacccgagaacaaatgtctggagaaccgccaggagtaagcagaagagacctctgggcagccacaccatcggccctaac

SEQ ID NO: 1282 - DNA, 1529 bp, Artificial sequence
  DNA replication origin
acacgcaggtggccgccgccgccgcggccgtgacgacccagagcgcagggggcaggcggccccgggcgggggccatggccgggccgggccgggcgggcgggggcgccacgcaccctcgggcttggccgctgcggcccgcgcgtcgggagggagcgcgctccctcgctctccgcacacccggccgggcgcacaccccggcgcacacgcggctcccagcgcacacgcgggcacccgcgcccgccgccgccgccgccgccccgggcgggggccggcccgtcacggcgccgagccaatcagcaccgaggcgggggggtgggggacacggagcccgcaccgcggccacccggcccgcggccaccgccgccgcacgtgcgcacgcccacactcccccggcgggcaccttcgggggcgcgccccgcgctgcgcacttggactcagggctcagggccccagtgcgcgaagccaccatcgggacgtcccggcgacaccaggaccagacccacccagggattccctctgtggacacacgcgcgggccgcacatccaccgcatgctcgctcctgcccgcatgaccccaacaccgagtgcttcgcgtggtgacacactccgatggatacacactagttcatgggcagaggctcagagatgggctcagcggcaaactcagaggcacttttaggtgaaaaaccaaaaaaacaccaaaaccaaaactctctccctttccccaccccaacaacttggcatttagggaccacgggattttaaggaggccttagattgcagtggtcaggagggcaggctcagggaccaggaagacaagtgtcctgctgtgtggccttaggcaagtttcttaagctctctgagtctaaaacttcatgtctgtaaaacaagaataccagtatcgatatcctagggtggcgtgaaagggcccaggtggaactcctggcagacggccgggcacacagccaggtggccggtcatgggagctgttatccagtgagggggactatcattccctgcttttccctcccctgaccttccctgtctccagttccatcccccaggactaggggtctcatccagggatggctttgggctgtgaggggaggacagggatatagggctgcatcctggggcctgctctgccaccctcaagtccctcacacacctggtgggccaagcagtccgagaagcaggcaagagacctgcagcctcctgagagggtggatgcccacgggagcaagtgcctgattgcttcccactgccgcctggcacagaccatcgtccagtcccctcttccttcgttcccagctctcatggtcactggggggtgaggagaattggagccatggctggaagttacataggatgagaaaggccatttggggaacatgtgccctgagtcagaccctgctctaggggctttataaactcgctccagtttaagcctcacacagccttgcagggctggcacacctaaggaaacagaagctcagaaaggccatcatttgccttagatcacacagctg

SEQ ID NO: 1283 - DNA, 1894 bp, Artificial sequence
  DNA replication origin
gtggccgcggtgcgggctccgtgtcccccacccccccgcctcggtgctgattggctcggcgccgtgacgggccggcccccgcccggggcggcggcggcggcggcgggcgcgggtgcccgcgtgtgcgctgggagccgcgtgtgcgccggggtgtgcgcccggccgggtgtgcggagagcgagggagcgcgctccctcccgacgcgcgggccgcagcggccaagcccgagggtgcgtggcgcccccgcccgcccggcccggcccggccatggcccccgcccggggccgcctgccccctgcgctctgggtcgtcacggccgcggcggcggcggccacctgcgtgtccgcggcgcgcggcgaaggtgagcggcggcggcggggcggggcaggggcggccgaggggcgcggggcgcggcgcgcgctgcctgcggctcaacttcctttgcatggaccctgagctccaaggcggccgggatccctcggcccggggggcggggtggcaccgcggaagagacccgggattaagggacagagcggtggagatgggaacccgcgagcttgaggaagacggacaggtaccggggactgggggacagtgggaaaggacaggagacaggactgagggatgtgcagctggggacagaatactgagggtcggacgccggggacaaggggacaggactggacagaagacaagagaagaggtaaggaggagagggtacagtgaggtagggcaaggaacagggttggggacagaggacaggggggtaggcactggggttggagggacaggagaatgggggaggaggttcagagggcagaaggcaaagggggtggggacagcattgagagataggagccaggcgctgagaaacgggaccccggagagcaggactggctttgaggggaggcaggaaggaggggtgcggaatgagagtctgggagaggggtcagggcccgagggccacagtctggcgacgggctggggagaagaagggagggcaggggagttccagctggaggagaggcagcttcgtgggcagcgggagcggcttggggaggagagggctgggggatggggaggccacagagagattgaggcaggcaggccccggagagcaaagtcttgtcagagaaggctgggatggcagggtcactctggggccctgtgtgggaggaaggattggggtggggaggtgcactgagtcgttgggaccaaaaaggtctgggaaatgacttctggtggtgggggcacaagaagagctgagagggagcacctaagcctgccacccacacacccgttagctccctggagaccccagctccatccagctcaggaggtttccctgggtcccactccccacaccccaacccctgccctgaccctcctctgttcccacagctctgccccaaggaagccagagcgtctctgtgcaggctcccagggctgatgtccagggaccagagctgggtcctcaccctgccaagatgaacttccaggtgtaagcgaactccggagctggtgctgctcttccacgcccagacagatcacacatctgcccttcacacacagctcaccgagggcccaccctacacacaagcacacacacaggctacttgggattcacacttgtgacccaggcctgtagagactgacatgtgcggtcagtctccccaccccacataacatccacagccacacacacagaaatgaagccagtatgcatgagcacaaacacacatgtacatgcacgtacagatgcatgcacatgaaaatacgcaactctgtgtctacatatatacatcacaccacatatgtaaggagcccgtcgtttgcatccatgcccacggaaatgcatgtgcaccaacaaacacacacagacacagataaaatc

SEQ ID NO: 1284 - DNA, 1522 bp, Artificial sequence
  DNA replication origin
catagttctaagcactttgcgagtattaactcattgaatcctggccactacactatgacgtaggaactactgttatcctggttttatagatgaggagagacagtgaggcaaagcaacttgcccaaggtcatgcagctggggatggcagagctgggatttcaactcagaagtctggctccagagttggtgctcgaaaccgctgaacttctaacctgtagggtggagggaagtgggaccggggccctgggtgaatgagcacactgaggggtatgaagccagggacacccagggagtacagtctgggttgggcctgtccctggggccctgaacaggctgcttctgttcagggggatcttatcagggacctgtgtgagaagacaggcaagggccttgtggaggaggacagtgagaagagagcccctgggccatgacttagggtggcagctgtacccataggtgtgctgctgggttcctgtgtcggagcaggagcaaggcatgcagacgagggagcctaggcccaggtggtgtgcatgagtgtgtgtgtgcatgtgtgcgtgtgtgcgtaagtgtatgtgtgcatgtgtgtgcatgtgtgcgtgtgtgcatgtatgtgtgcatgcgtatgtatgcattgtgtgggcctgtgttcatgagtgtgtgcatgtgtgtgtatgtgtgcgtgagtgtatgtgtgcgtgagtgtatgtgtgcgagtgtatgcatgtgtgtgcatgtgcgtatgtgtgcatgtgtgcatgtacacctgtgtgtgcatgtgtatgtgtacatgtgtgcatgtgtatgtatgtgcatgtgtgtgcatgtgtgcatgagtatgtatgcatgtgtgtgcatgtagcgtcagtgtatgcatgtgtgcgtgagtgtatgcatgtgtgcatgtgtgtatgtgtgcgtgtgtgcatgagtgtatgtgtgcatgtgtgtgcgtgcatgtgtgtgcgtgcgagtgtgtgcgtgtgagtgtgcatgtgtgtatgtgtgcatgtgtgtgtctgtatacccgtgtgtgcatgagtgcatgtgtacgtgtgcatgagtctatgcctgtgtgcatatgtatgcatgtgtgcatgagtgtatgcatgtgtgtatgtgtgcgtgcatgtgtgcgtgctttagtatatgtatgcatgtctgcatgagtgtatgcatgtctgcatgtgtacgtatgtgtacgtgtgtgcatgtgtgcgagtgtatgcatgtgtgtgcatgtgcatgagtgtgtgcatgtgtgcatgagtgcattagtgtattatgcatgtgtgcatatgcgtgcatgtgtgcgtgagtgtgcacatttgttagtgtctgcatgtgtgcatgaatgcgtgtgtgcatgtgtgcatgagtgtatgtctgcgtgtgtgcatgtgtgtatgtgtatgtgtgtgcatgtgagtgtatgtatgcatttgtgcatgagtgtatgtgtgcctgtgtgtgtatgtatatgcatgtgtgcatatgtgcaagtgtatgtacggatttgtgcatg

SEQ ID NO: 1285 - DNA, 928 bp, Artificial sequence
  DNA replication origin
caggactggtgtggagaatgtcttgtgggggtgaggcaagaggggtctcctgtggtggtccaggcatggactcgtggggggtggaagtcagttggtcattttgaagggaggtccctggggctttagggggggatggatgtgacatgcatgagagtcaaggatgacagcttgggtctggaggtgccatgtcctagggcggggcaggtgcaggtgtggcagggttgtttgtttttcacataaccgaatggagacaggagtgggcagctgggtcctaggggagaggtcttcgctggtgaccgcgagttgggggttgttagcacaaaggtggaattcaaagtcatgggccctgaaacagccgcccagaaaagatggatctgggcacacaggaaagagaggagggcccaggacattcccagggacccatggcctttagaggccatttaaaggaggtggggctacaaagacagagagggacaggccacacaggtcaatggaaaatgggcgtgggctgggacacacgagcaagagaaaagtgtttccaggaggaggaaatgaaagggggaagaggcgcccatggatgtggccacgcagggctgctgatttctgtgaagaggtgaggaaagacatggagaagtcccgcagaggagaggaagaagtagatacgccaggcacggacagagagggtcgtatgggaagagaaatggtctggtgaccggaggggaaggcaggttcaaggcagggtctagtttcctctttaatgttggggcatcccggatgctgcctgaatgctgtgaacttctcttgctctcccctccacttgggaccagcctgccaggggcctcaggtgcctagagacaggtgggccagggctgggctctaccacggggcacatagctcactctctctctgtgttgccagcacctggcac

SEQ ID NO: 1286 - DNA, 718 bp, Artificial sequence
  DNA replication origin
caggaggatcacttgagcccaggagtttcagatcagcctgggaaatatagggagaccccatctctacaaaaaaaaaaaaatcactgggcatggtggtgtgtgcccttggtcagctacttgggaggctgaggtgggaggatcacttgggctccggagatcaagactgcagtgagccgtgattgtgccaccacactccagcatgggtgacagatagagacattgtctcaaaaaaaattttttttgtagagatggggtcttgccatgttgcccaggctgatctcaaactcctggcctcaagtgatcctcccgccttggcctcccaaaatgctgggattacaggcgtgagccaccacacccagccctcacttctatttttaaagctcactcaggactggtgtggagaatgtcttgtgggggtgaggcaagaggggtctcctgtggtggtccaggcatggactcgtggggggtggaagtcagttggtcattttgaagggaggtccctggggctttagggggggatggatgtgacatgcatgagagtcaaggatgacagcttgggtctggaggtgccatgtcctagggcggggcaggtgcaggtgtggcagggttgtttgtttttcacataaccgaatggagacaggagtgggcagctgggtcctaggggagaggtcttcgctggtgaccgcgagttgggggttgttagcacaaaggtggaatt

SEQ ID NO: 1287 - DNA, 1438 bp, Artificial sequence
  DNA replication origin
ctgtgtgcagggcagcaggatcccatggagcagagggactttcatgcaatgggggccgaaaggcagttcgactggctgaactcgaagacctcctccctatacctgcctcctgtcccccggcctgtggtgtccaagccagggagggggcttagagggctttgcactatctcccagcacccagactggacctccctccccaagcccatgcaagaggcaggggtgggacacgcaccctcaggaaggtgtccagagagccgttctccatgtactcagtcacaatcattgccaggcggcctgggcgggcagtagggagagggtggctcttggtttggggctcagggctgctgatcagagaccccaggagcataccaccatctcaggacctgtgccagcactggaaaccccagggtgccttgggtttccactggggtcccaggctctgggcaccccgagtcattcagggacctgaaccaagaggacagggtcaggtggggcagagcaggatggatgaggggatggacccagaggcctctccaggcaggaggggcactgcagggggaggctgtctttgcccggcacctaccacgggtgacgacaccctcgaggcggatgatgttgggatggtcgaattgccccatgatggacgcctcgctcaggaagtcccgcctctgtctctccgtgtagccggctttgagggccttgatggccacgggcacatcccgctgccctggcacccgcagcctcccgtagcagacttccccggagtctcctgcaggccccgagaggggcaggtgtggagggagggcagtgggaccctcagactcccccagcctcccaggcccttggaccccctgggcttgccagacccctgggtcacacgctccctctgccctgggtgcccccaccttgccctgggtgcccccaccttgccccatgctggccccgccctcacaacccctgagactcaccagagccgatgattttctcgatgtggatcctagaggcctcgatctcccgagtgaaactgcggcccgcccggcctggctcctcgtaggtgtggggttccgcatagaactggggctctgggagctttcccggggggtgatgcagaggcaggaagacaggtgggggtgctgaggggcgggaggagggccttcagtggggcccaggagagattgctttttcctgacattccctgggcctgggatgggtctggggtggggtgaggggtgtctctgggagtctctggatgtggtagcaaacaacacgcaccccataagtatttcccaagtgaaagtggggtctctggagtcgctctggggtttctatggggctgtggagtctccagtgagttctgggcatgtctgtcattttctggggtcacttttacagtccttgagatctttctaaattgttctggagtagggatgtagcaaaa

SEQ ID NO: 1288 - DNA, 1201 bp, Artificial sequence
  DNA replication origin
gcatgggggccagttttcaccctggccccaataggagccctcccttagcctctgtcccacagcctctgggtaaggtttcgcatggagaaaggatcctgtgacaacaaaagaaagaaggaaggaaaggaaggagggagtggagagagggagggagggaggaagaagggaaggaaggaagggagggagggaaggaaggaaaggagggagggaggaaggagggaaggaaggaaaggagggagggaggaaggagggaaggaagggagggagggaaggaaggagggagggaggaaggagggaaagaagggagagagggaggaagggggagggaaaagaaaggagggaaggaaggagaaagaagaaaggaagggaggggagggaagaggagaggaggggagggaagggaggaagggaaggagggagggagtgggggaggaaggaaggaagggagggaaggagagaagggacgagggagggagtgggggagggagggagggagggaggaaggaaggacaagaaggaaggagagaaggaggaaaggagggacggagggaaggaaggagggaagggagagaaggagggagggagtggaggaggaaggaaggggggatggagggaggaaggaagggagggagggaggaaggagagaaggaggaaggaaggagggaaggagagaaggaaggaggagggagggagggaaggagggaggcaggaaggaaggaaagaaggagggaaggaaaggagggagggaggaaggtgggagggaaagaagaaaggagggaaggaaggacagaaggaggaaggaagaagggaaggaaggaagggatgaggaaaggaaggaagggaagaggaaaagaagggaggaaggaagaagggaagggaggagaaaggagaaggaagtgggggaagagaaggaagaggaagagttagaaaacgactaggctgtggcccctgagcccccttggcttgtggctggtattggccgagcatctgcttgtaccaggcgtctcactccctccttccttcgtctccacagcggctcttgtgaggcctccctcaggacaggtgctctgggacggtgggggctgtgttgtccctctggactggaaaacaggaccccagtgtttagctctctgactcagacggctcgggggacaccctgccaggcctgggcagcccctcaactcttgtgtgtccgtcgcag

SEQ ID NO: 1289 - DNA, 876 bp, Artificial sequence
  DNA replication origin
tgaagtctgcttgaaatgtccctggtgagcttctggccactggggaagttcagggggcaggtctgaagaaggggaagtaggaagggatgtgaaacttggccacagcctggagccactcctgctgggcagcccacagggtccctgggcggagggcaggagcatccagttggagttgacaacaggaggcaggtgaggccagagtcccagagggagggggctgcagagttctgggacccaggggagctggcccaggaggctgggcagctgaggcagggagggagggaaataactgtgcctgattctaggacagggatgggggtgcagcactgatccaggacccagaatgggtgagtggagggaccttaactccttgagccagggcttgggggagggtgagaggcgatgagttagacctaacaactgaagggtaagaccagggttcctgggtcctggccccataacacataagaaaccaggaaaagcctggggtgctagagctggcagtgggacccagcagaggggactgtaggggcagccagtcacccatgctcaggtggatgctgaaaggcgctgagcatgcagaagagtgagcaggtgtcgctttgggcgtttgtgaattcctgtgtgtatgcagagctccaccatctgggtgagccagtgttaattaaataaggagcaggcgctcaatacatatttgttcaatgaaatcgattacctgtgggagtgtatgaatgtgtgtgtccgtgcaagtgagggacagggtctatttgggtatcagttgtgtgtctaggggggtatagtggatttctgagtttgcctactgtgttttgtaggtgcgtggatgagagctgtgtttgtgtgagtgtgtgaagatgt

SEQ ID NO: 1290 - DNA, 1304 bp, Artificial sequence
  DNA replication origin
cttgaacccgggaggcagaggttgtagtgagccgagatcgtgccactgcactgcaacctgggtgacagagcgagattccgtgtcaaaaaaaaaaaaattgttgcgtgcctgctctgcggtgggtactgagaaaatcaggagaaataagatcaggctcagtgcttggggccctctgcgtactaggaagacagatttgtaggcaacaagctctagcccagtttctcagccttgagaaagtgacatttagggcagataacttctggttgggggcggtcctgtgcattgcaggaggtgttacagcatccttggcctccaccaccagatctcagtagcaaccctgtgaccccaaaaaggtctccagacattgtcaaatgtcccctggggggatgccaaccccggttgagaaacattggtctagaccataatcctggtcatttgttcattcattccacacatgtcaagttcatgcctattgcatttgcctctttgaggagagagtgaaatagttaatgcagggatgacatgggcgtgcgggttaccaggaggctcctaaacaggtgatatttgagccagacctagaaagagatgctgggacggagaagatgggaaagaggacattgtaggccgaattggcaaaatggacattctggattcattccttagaggtactctgagggcctgctgtgtgcagggcatctctggtgataccaacaaactgagacagcccctttccagcatgcagaggctttgggcatgccgagaaaggtctgcacccggttcagaggccgtggagggatcataagtgcttcccagggaaagggagacaggggctacatcttgaggcttagcaggcaggagatgggcaggcaggagaaggaaggaagagatgcagacagaggaggcagcccctgcccaggctacagagcctgggagcccaaggctttgggagaactacaaggaggcagctggaaccagggcatggcattctgacagtggagatgggggcatgaagctggagtgggagatgaggagacggacctacctgaagagcctggacttgatactgagtcactggggagctatggagggcatttgagtagaggcatatttttgttttagaaaaatcactgtggcagcggtgagaagatggttggaggggagcaggcaagaggcagggggacagttgcagtggttcaggaatgagatcagggtggctgtgcacagggcgtgcaggggacaatcccacagacacccgggaggtaaaggcattaggatatgggcttgaatgtggggttgagggagct

SEQ ID NO: 1291 - DNA, 1619 bp, Artificial sequence
  DNA replication origin
ggggaggagcagctggaaggggaaagacggtgaatgtgagagagattaaaagagacattaagagaaaaaaaaagagacaaagagagggcaagcagggggaaaagatggaaggaaggagggagagacggggaggcaggaagggaagagaaaagagagaatgaataatggattcatttccattttctgagcagaacccatttccagatctaggggaatgcccggggcagaatggctaactcagcctgctcgacaggagcatagggaccttcacctccttgtcccctgcccttgtcccctgcccttgtcccctgcgtggctccttggtggacaaggcatggagcaaggctggtgggattcagggccagatcccactgagagatgggagagggtgactgaggggcctgggccatgctcaagagccaagtgatcttcagtgagccacagcccctctcccaagcctcaggttccaaatctgcaaaacagtcagagctggggccgcgcgcgtctgtgtgtgtgtatgtgtgtgtgcgtgtatgtgtgtgtgtgtgtgcatgtgtgcatgtgtgtgtctctgtgggggtatatgtgtgtgagtatttgtgtgtatatgtatgtgcatgtgtgtgtccatgtgtgtatttgtgtgtggtgtgtgtggttatgtgcgtgtatgtgtgtgacagtgtatgtctgtgtgcatgtgtgtatgcgtgtgtgcatgtgtgtatgtgtgtgtctctgtgggggtgtgagtatatgtgtgtatatgtatgtgcatgtgtgtgtgtgtccatgtgtgtatttgtgtggtgtgcgtggttgtgtgtatgtgtgacagtgtatgtctgtgtgcatgtttgtgtatatatgtgcatgtgtgtgtgcatgcatgtgtatttatgtggtgtgtgttgtggttgtgtgtgagggtttgtatatctgtgtgtatgtgtgtgtgcatgtgtgtatgtgtgtctcaggggggatatgtgtgtgtatgtggttatgtgtatatgtgtgtgagtgtatgtgtgtgtatgtatgggtgtgtgcatgtgtatgtatttgtgtgtggtgtgtggtttgtgtgtgtgtgtgtgcatgtgtgtatgtgtctctgtggagggatgtgtgtgtatgtgattatgtgtgtgtgtgtatgtctgtgtgtatgtgtgtacgtacatgcatgtgtgtgcatgtatgtatttgtggtgtgtgtggctatgtgtgtgtaagagtgtgtatgtctgtgtgtatgtgtgtgtacatgtgtgtctctgtggggggatatgtgtgtatgtggttgtgtgtgtatgtgagagtgtatgtctgtgtgtatgagtgtgcgtgtgagtgtatgtgtgcatatgtatgtccgtgtgtatgtgtgtgtgcatgtatttgtggtgagtgtggttatgtgtggttgtgtgtgtgtgtatgtggggggtatgtgtgtgcatgtgtgtgtgggagtggggtgtgtgcatgtgtggttatgtgtgtgtgtatgtgtgtggggtgtgtgtgtgcatgtgtatggttatgtgtgtatgtgtatgtatgcgcgtgtatgtgtgtatatttgtgtgtgcacacatgtatgagtgtatgtg

SEQ ID NO: 1292 - DNA, 1520 bp, Artificial sequence
  DNA replication origin
agcccgggtccccacaccgcgcccgtagggtcacccgggggcagcgcgggcgctggagcgcggcgaccccgcgtgcccgggccactgagaccccgggctccccccgcgcagcagtggtctctcccggcgctgtggctcctccagataaagcagcgatttcagcccaaatgtttctcaatttttattgaatgctgcaaagccggagagcgtctggcgcggctgacaggggcagggagagcggacggaggggagggcgggggaaggggcttcccaaagcgggggccggcactacctgtcagggcagggagtcccaccccctcgcctcagccctgccacccgggtccctgcggcttcgaaagggaccgaactgcaatgaatggaaaaaaaaaaaaaagggtgtgtgtgggggggtggcatctgggaacaaaacaggcggctttcccaggcaccggggctgggccggggcctccgagtgggagactgggccttggcgctacccgagggcctggggtggggctggggggagggtggtcactcggcactggtgggctgggcccttgcaggcagaccccaggcctcccctccctgccccgttgttctgagctggcccgcgagcccctcactgcagactcgtctatgtctgtattagatttctccttctctgttgatcttgctcccagtgcagtttggggatggggtgaaggaagtccatgggtgaatctggggaaagccccagccacccccacgctgtggaatggacctgtctgtgcagccgtggttttgtgcatggccgtcccttcagggagaacacaaccctagccccaaccctgtgggccctgccctgctctgacagccttcatcaccatcatcattaacagactttactgaagtctggatggtgggcggctgcagggggcctgcggcaatcacccaggctgaacccctggcagttgggagcccactcctgactgaggagacttcatcaggagctcggaactctgtggagtgagtggaggagcccagtgcaggagcaggtggtttaagtcgaaggcagtttaagtctatgctacccacatctcctgtgtccctttgtcccacatactatcaaaatgtcccagcaatccctccccttcagtccataccaagaaaatggggtaccacaggctttgggaatccatctaaggtttggaaagttgggtcgtctcttgaagctccaagagtccagttgaaatgggtgtcatcctggaaggccaccaggaggaggcagcctgggagggagacagaacaggagtgagcagggagagaagagaaacaggagatttccccctattaagcctacagacccctcaccagggtcaagagccagtggggtggggctggcagagccactaccgttcctatttgagtgagcagggagagaggagaaacgaagattcccccttttaagtctacagacccctcaccagggtcaagatccactggggtggggctagcctttattttcagttcttgcctgtcag

SEQ ID NO: 1293 - DNA, 1048 bp, Artificial sequence
  DNA replication origin
tgggggaccctgtgctacaacttcagtttctctttcggtaatgagcactttagtgaccgcagtcagggggtggggggtgtccctggatggcagccacagtttctggcactgaggcagctgtccttcggctcctgggggatttggcggctgactgcggtttcccggagtggggccactggggcacctagggtgccacgggccctgggtgtggagggcagccctggggcctggctgctggcgggagctctgtggaatatggctgaggtaccacttattaactctggctttggggaaatgactcatgcgttggcccgctatacattgggatgtttacagtattatggggagcttggcataaatattgctatttaggttgcagtcagcggtgctggaggggaagaaaattggcccctctctcgttggaagaggcctgggtgtgtttttaattactctggggtagatggaagggccacatctgtccagccatcgccctggcagaggctggttggaatctggtgggctgtggccagcctggaccctggccctggacacagggctggtgggcgctgacgtcacaggagggtatggctacttggactgccacttgggggcagggtggggaagggaagccacagcagggtgggaggagggctgcagcaggcaccccaatgcttgcctcaggctcttgttccgtttgccccctggacactaggaagttagtccatcagtggttaataaggagctggccgaatggatggggagatggtgtgaggtggaggtcagagggcctgcttctcatttactatgggaccctgggccaggtcccttccctgtgggggcctcagtttctctgggtgtaaaatggcctggctaaatatcttgtagagtccatcgtctacgccctacttcccctctttgagcctcgttttcctcccccgtctagtgagagtgatgacagcgcctgtcctgcctgtctcctggggtgtttgtgaggatcagaccagatgatgggtgggagaagtcccccttcaaagccagggatggacgg

SEQ ID NO: 1294 - DNA, 842 bp, Artificial sequence
  DNA replication origin
aggcatcatgggcctggccttggggagctcacacactggctgtgcacagccccctgggaggaaggtcccactggtattgttctcctggatggacagatgaggcttctaatactcagagccaggggcggaggcgggggtggcttgatgaggccacacagctagtcagtgggacagacgtgcactcagatccaacggatatcaagccaggtggcccttcccccacttcttgtgggcacttgggtgggaggtgtcagggatccctggcctttgggggtcttgacatcccaagctcttaccagccatgtggctgtggacaagttgcagggggcagcatggattgtcctgccctatggaggttttattctaatggacaggactgatgccagatatctagtgagtagcttaagtagggatggtgctaagaagaaaactgctgcagagatgggagggccagcgagaggagggatcaggaaggcctttctgaggaggtgacgtttgagcagaggccagaaggaagcaagagagggggttcagggatatctgggggagggtgtttcaggcagtgaggagagctgggcaaaggccctgtgacaggggtgtgcaaggcagccagcgtggctggagcgggagggccaggggagaatgggagcaggtgacacagagggaccagccatggcaggactttggcttctacctggagtgagatgggagcggtgcagggctttgaggaggtggcaggatctaacctgggttcagaaagcaccactctgtcttaagaggccagagagtgagggacagagcaggggacaggaagaaccatcacagagtccaggcacgagacg

SEQ ID NO: 1295 - DNA, 968 bp, Artificial sequence
  DNA replication origin
tgggagcaggtgacacagagggaccagccatggcaggactttggcttctacctggagtgagatgggagcggtgcagggctttgaggaggtggcaggatctaacctgggttcagaaagcaccactctgtcttaagaggccagagagtgagggacagagcaggggacaggaagaaccatcacagagtccaggcacgagacggtggtggctggaccaagcgggcagtggtggggagttgtcagtaagtggccctggttttgctccccaggctgcctcacatagtttgggggatccagagggggcggagagaaaatggaccttaaatgtcttctccctctggcctgcccccactcaccccaggaggctctgttggcatttttggcatggaaacatatgtctctttctttctaatgtaaattgataatgtattgacaatgcgatctcctggcagccaggttggtgactctagcatgtgctagatcattctggcggggggaatggagggcagagggacagagaagagcctggcccgggcccaaatccacccccatcaggacttgctgagcgactgtgcacaaggccccttccctcttttgagctgggggctgcactgggggattagcggaccaccgaggggctctgcagtcacaccagttgggttcatgtcctggcaccagctcttactaggtgtgactgtggacaagttgcttcacttcttggaacctcagtttccttatctgtcaaatggagagggtaatagtccttaccttagtaggtggctgagacatagtaagttctcaacaaataaccatcatcggctaggcgcggtggctcatgcctgtaatcccagcactttgggaggccgaggcaggcagatcacgaggtcaggagttcaagaccagcctggccaacagcctgtcaaaccccatctctactaaaattatacaaattagccaggcgtggtggcgcg

SEQ ID NO: 1296 - DNA, 1303 bp, Artificial sequence
  DNA replication origin
tttcgttattgcactgagccagagccaacgtgagaaactgaggttttttgtttttttgtttttttttgctgggaagaaaaccaggctgtcaaggcaaatataacccgccttccctgagcttttagacctcattccaaacctccgaacaggaggaatagatgggctacagggtcctttcactcactcgacacatatttaagtgcctactatgtgccagagttattctatgcatcaggcagtgagcacctaggatgtaactaaggtaatctgcagggaacccttatctcccaaagagagacaggagggcttgggatttagataagagggagactagggggcgcaggctggaggaaggcagccaggtgtcgtcaggggagggaaaacagacggctccaggaacgcggttttaaggagttttacttagggggaggataaagtagaggggacagacttgtgaagtgtcaggttgggaagacagatcccagcagccccatagcgagagaggagatgtctcccagggctgccgctgggaaagattaggcacttagatagaatcagaggataggggtcggggggagagattaagcacttagatagaatcagagaacaggggtcggggcaggggtggtctccaaagccagtgccccataggaaaacgggacctgcatcccccaccacaggggagacctggggacagggagaaggggcaggcagaggggagcagggcacataagctggatcgtcaatccccgccgtcagcaaggagaggcttggcatcgcagggacggctcatgctcaccactggacaccaagaacttcacacggaccgccccccagccaggggaggaaggttctgttctgctccctattttactgatgaggaaaatgacactccgaaagctgaagaaatgagtacaaggccacccacatcaggaagcagggaggggccggtatgatggtgaggggtctggggctgaagaagggtggggctctgggagggatgagacgggcggggaagggccgccaggcagagggaagagtgggagtaaaggcagggaggtttgaaagggtcaggtgagttccaggaatggcaagacactcagggtggtgggacacgaggccctggtgagaccagtgggtcttgcctggcatggtgtcccccagatggcactcagaaatgcagctgtggttgtcgcagtgatgatcaaggcttgagggcatgcttactcaatgctgatgccacagaggtaccatcccaagcccgccagaccgcaggaccccagggccacgggtctcacctttt

SEQ ID NO: 1297 - DNA, 1351 bp, Artificial sequence
  DNA replication origin
attttgtttcccatctgttcttccagtcaacagtctttttcacccactactggtttaggcattgtggtatggaagaaagagtgtgagctccagagttgggcaaccctggatttacaggccagttttcccaaatcttggctgtgtgaccctgggcaagttgctttcactctctgaccttcaggtgcctcatctgtaaaatgggggtcccttaccagattgttatgtggattaaatgagtcactgcacatcaaatgctcggcacacatcctggcccgtgctggacacttaaatgatggctcctcttgtcacatgatcacgaggcactgggtcctgcactgggctgtcatggtccagtcaggtggctttggtggatatccaaagtcagtcggtcccctgccctgatggaggaagcgcaggcaccaagcccagtctgggtggtcagggaaggctcccatgagccgagtcggaagggaaggcaagggctggctaggtgcagagaccagcacaggcacaagcgtggagtgcggagtgggaggggccttttcctttggctgtgcccaggctgcctgtgggggagaggcaggagatgaggctgctgagtggacgggccccctggggacagtttgtcggggagcttgacaaggttaaggatcttctttggacatcctttcactttctctcaataacctggtgtggatctatcatcccagtatttatctaaacccttgctggacccatttatatcctccgcctctccagcttctcggcgtaatgagctccagatgtggtgaaagggccttccccaaacctctgcctcaagccgggagggtgctgggattgcagggatgagtcttcgttcaccaaaagacaggaaggccttagagcctgcaactcaaccttagcttcacccttacacaggcccaagacacttagattcgtgatcccctggggttccaggccgctgtaaggaccccaaatcctgggcctgagtgttctgtgggctccttagggggcaccccagagacactggaccctctgtggccaccccaggagtgagacaggcagccaggaagctttcagcccatggagatagcagaaatgtccccaaaccaaaccaaaatggtggctcaaaggtgctcagaaacctcccgtcttgtggttcccagctgtcagtctcaatttctaccatctcaagccatgttctcactgttgttctacaaatgactcacttttctatttcctgggtaaatgtatgaagacagaaagtccatatcccgccataaataaaacaccagcatctcttgacaccacagaagttaactgtaactataaatacaacagaggcaggaca

SEQ ID NO: 1298 - DNA, 1628 bp, Artificial sequence
  DNA replication origin
aaggaccccaaatcctgggcctgagtgttctgtgggctccttagggggcaccccagagacactggaccctctgtggccaccccaggagtgagacaggcagccaggaagctttcagcccatggagatagcagaaatgtccccaaaccaaaccaaaatggtggctcaaaggtgctcagaaacctcccgtcttgtggttcccagctgtcagtctcaatttctaccatctcaagccatgttctcactgttgttctacaaatgactcacttttctatttcctgggtaaatgtatgaagacagaaagtccatatcccgccataaataaaacaccagcatctcttgacaccacagaagttaactgtaactataaatacaacagaggcaggacagggtgaccatgtccggctccagcctggtgctcactctttggctgggcttctgcagaagggaggacacctgagaccagggctcaggggaccagagaggggcccagggagggaggaaaaggtggcgcgaggtgtgcagtggagcttaccactgctggggcagctggggctcgatcccccaggcctggtacggggccatggagagcacacctcagaactgccacccgccctctcttgtcaaggctgttcatggggagttgcctcccctacacgtgtctgtgtgccgtgtgtcaggaggcagaggctcttgcaggcactgggcatctttgtggccccagagcagaaaagagaggtcgacaggggaggtgagaggcaggggaagggaggtgaggggcaggggaggggaggtgagggacaggtgaggtgaggcaaggggcaggtgaggtgaggcgaggggcagaggaggtgaggcgaggggcaggggaggtgaggtgaggggcaggggaggtgaggcgaggggcaggagaggtgagccgaagggcctgtgccctagagacagctccatactaggccctgagcccgaggcccccctctcctgctctttgttgcaaaagaccagtgtgtttcagagaggtggagaggtgttaacgtctcagcagccccagtggagactttctctttgagggatcaggggattgaagagaattgaaaaagggaaaatgttctcagtttatgccgtcctagaatacagtgtcaggtgccactaaatcctcttgcagatggccccggtgagaaaactgaggtccggagccaggaagggacttggcgagggcgtggacatgccagaaagatggcctctcctgtcactgcaccgacctgctgtccctgaatctgtttatgctcactttgactatttttaaaaacaaagaccgaaaaaacatttttagatggatgcaggggaggggatgccccaaatcaaatgggcacactgaggtctgaagaaagaagcctcagaaagtcccatccatcctgctggcctacctgcctcctccctgcccttctggcccatgctcccagggtgagcttggaattcttgatagtagacaaatggtgaggacagagaggggagccatctcactaggaggggcttctgggggagctagatgcactgggtttgaatcctcgctctgccctgaaatggccacgtgaccttgggcaattacttcactgcaaagtgcctcggtt

SEQ ID NO: 1299 - DNA, 1206 bp, Artificial sequence
  DNA replication origin
cagagtcctcaggcagtgggagggaggtcagctcctgaaagggagggcctgagtcaggccacaggggagtggcaggtctggaatgttcaccttggggagtaccacaggaggtcaggagacatttatctcagcccactctgggctggcagcccctcgtttaatttattcaagggcctgggggggaaactgaggctgagagagactgcgtacggctcagagacacacaaatggggtcacctcgaaccaggacacacttctgtccctttagaatccattttctgaagtccttcagaatcaacaggccaggccccctgtgggacatggatttgacagatgtctggtgtggactccgggtgcatggctcatcccgtacctgcaggatgccagccctgggaggtggtgggggcaaggagagggggcaaggtgtggccctggtatgtaggtacctgtgccccttgctagagggggaggttggggggcatgtcctgaccccaatgtgtctgggttgaggagggaggattcactctctagcccacaatttgcccagggtccctggcatgtccaggcacaggcaagtggtccccttagagaaggaaatggggagggagctagagagacggggagagagacaagtggggaggcaggggagggagagagagaaacagagaggaggggagatggagagactaagacaaggaaaaggaagacaagaggacactgaaggagcaggggacagaggcgggggcaaagagacaaggggaggaaggagagaagaggcaggtgggagggaagagtcaagttcagagagctgggaggggcgggaagggtgtgggatgggaaagagctgggccagtggtggcccagagaagcctgacctggaaggggcccaactgagcagggcagggtggggcggggaggttcctagaggggctaaggagggtggctgaggactgtgagtgagtctgcatgactgtgagaatgcacttccaagtgtgagtgggtgtgagcgtgcgctttcaggcccaggcagactggggtgtctcgtcttgatctcttggcttcacacaccctctgcattttatattcatgagaactgagctgaaagattaattcatatttaatacagccttcgctggcaggatggggggtggtgcagattttttccttaaaggcactaggtaaggaagaattgattgattgattgat

SEQ ID NO: 1300 - DNA, 1456 bp, Artificial sequence
  DNA replication origin
ggatgaatgggggtaccaggaggcttccaggactgcccttcgacctggatccggaattccataaagaagacctcagtcttcacaagaagtcttggggcagaaagggaaaggaggggctgccagagagactggaacagaggttgtgagaggcggtggccggagatggagtttcaaggcagaatgaaaagacacaaagaccagcagagagagagagagagagagagagagagagagagagagagagagacatctgctgggcgaccaggctgtggaactgcagagctggcaaggccctgagaagtcatctaattcaggcttgtctttttatagctcctcggcagcaaaggcacagagaggggaagacactatcctaaggtctcacagcatggctccgggggaggtgggactaggacttcattagctgcccccagtgagccaggaagtaagaattcccctgggaggggggagcctaggttggggttggggggcattcactctaacctatgggggccatctctgagcctgggggcggggactctgtgtagtggagagaaagacacataaacagatggtgacaattcagagtgacaggggaggcatgaagcgtgggagctcaggggatggtcaactaccccagtcttgggggagggagtggttaagggaagattcttggaggtgacgtcaaaactgagacctgacggataaacggatgctaagatgaacggtgcaggggagggaagagaaagaggggaattctaggcctagagaacagcatgtgccaaggctcagaggtaggactcagcacatcccagttgcacagcatggctgaaggcagaatgggaaggctgggccggagggtgtcaggctttccttgtgggataggaaggagtttgacctttatcctgtgtgtaatcaggacatgttttaggtagatacacaccatgaccagatttccattttagaaagatggttctggagctgccagaggggaatggctggatggggaagagggcaggcagggggcgcagggagaccactgcccaaatccagaatgatgacaaggtctgcagagccagggcggtggttcatggggccaggagggaaggtaactactcagggatatttaggagagaaaatgggcaggacttggtgtctgtccccatagccagcctgaggtgagggagggctggaggatgactcggggtgggactggaagaagaggtcgtggggggctggccaggtacactgagcttgagacagatggatcgagcacaaggacctgaaggcaggtggaccacgtggtctggcagagggtgaaagggtcagctgtagtaagggaagcgacagactaaggatcagagaggttaagtgtctaagcccagatgacacagaaggcaggggctttgctggcttgaatcccaaagcccagacatttcctatcactcgggctgccctt

SEQ ID NO: 1301 - DNA, 1219 bp, Artificial sequence
  DNA replication origin
cctggtggcgcgggcctacgatgagctcctgcccgccctggagcgcgccctccgggaggccgagcccggcccggctccgccgcccaccgcgcaccccttcgccggctacttcaccttcgccaacctgaccttctacgaggtgcgcgccgggccggcgggcgagctgcgcctgcgccagttcgggccgcgcgtggaggcgctggtgcctccagcgttccgcaccctggcgctgcgccacctgcacggccgcgtcttccagctgcacgtggcccacgagttcccctgcgcactgccactcggcgacgcgtggctctcgctcgaggcccagcacgggcagctggtcaacttctaccccttggatcaccacgggctgtcacccggcttcgacgtgcccggcctcaacacgtacagagtgctgcggctgcggggcaagccggtgttcaagacccagtgaccccgggctctgcctggacccccctgtccctggcctcccagctttctagagtaaggtttggaaggggagcctgtgggaatgcctgttggagaacccgggtagttggcaaagtggagtagggtgatgctactcaaagtgtggtcttggaccacagccagaaattcaaatttctccacatctataggggaggaaggattaagtacaggcattaagagtaagcatttagaaactaacaggcaaccaaaaatttaagcatcgaaacagtagttttgtgcctgttgaatctaaaacaaaatatgggcttgtattttgtcttttaaaaataaacctaagcaactgggcgcggtggctcacgcctgtaatcccagcactttgggaggccttggcgggcggatcacttgaggtcaggagttcgagaccagccaggccaacatggtgaaaccccggctgtactaaaaatacaaaaattagccaggcatggtggagggtgcctgtaatcccagctaatggggaggctgagacaggagaaacgcttgaacctggaaggcggaggttgcagtgagccaagattgcgccattgcctccagcctgggcaacagagtgggactccatctcaaaaaaaaaaaaaatcaacctaagcctgggcaacatggtgagacccccatctctacagaaataaaataaaaattagctgggtgtggtgtcctgtagtcccagctactcaggaggctgaggcaggaggatcacttgagtctaggagttgga

SEQ ID NO: 1302 - DNA, 1552 bp, Artificial sequence
  DNA replication origin
cggagccgggccgggctcggcctcccggagggcgcgctccagggcgggcaggagctcatcgtaggcccgcgccaccaggtcgggcccgggcggccgtggccctgccagcagcagcaccaggcccagacgcagcgggggcaccagcgagaaggtggcggcgtagccgtccagatcgccgtccttgcgcaccacgcggtagccccgctgcgcgtggaactcccacggcgtgcccgtctcgttggcgaagtaggcgcccgggcaggccagcagcggcgccagcagcgtcttggccgcgtcgggccgcaggagccgccggggcccgccgcccaggagcgccacggccagcttggccaggtcggcggcggtagagtacatctggcccgacggccggtaccagcccaggtcatagagtggcgccggccgcccgctgccgtagaagcccgcggccaggcgcgcgcgcacgtcgggcgtgaggtcaaagcccgtgtctgccatccccagcggctccagcacgttctccgagacccagcgctggtagtcgccctgggcggtgtgagctgccaggacgtgggccaggagcgagaaggccagcgtgctgtaatggcatctggaaggagagcagtggcaagtgggacggggcccttcctcacccgcccgcgctgtctgaaatgccaccagtttcatgggactgggcggggctgggaaggaacctgctcccctgcatcccaggtggtcagacctggaagagactttggagcactgactctgactctcttctacatctgggaagaccaaggcccagagaggggcggggaattgcccagggtcatacagcaggatggaggagagctgagctcagcggtgcacctgggaaagctgtcacacaaatcttattggtccttcacactttagtatgatttaccttatctaatggaaaattaaaggcttacactgctctggggaaacaaaaatgatagtgaccatgtatgaggcaaggtctcacccctcccttcttccaggctgtagcagacaccagtaaccagcaagaggcctcttttctttcccagagcaaatacagtttcagaatctctaaaacagaaaggtgcaaggatgtgtgaaaattcacaaattctcctaggcattcctgaactctgggccaacttccttatttttgcagatgaggaagattagttagatgagtttcacagagataaagtgcaccacccaaggtcacattgccatagttatttgcagagctgagaggaggactccagcctgaagatgtccaagcatctcctctctctgcatctcctggatcatttcttccttaagggaagtggggcctgaggttcagcatttggagaagcagagggacaaatttggaaaagggtcactgaccagcggctcagaagggggcccctgaagctggggagtgccagctgtcctctgtccagccccacagccccactgctcccagagtggggcttctctgttcagtggccacccagctatccactccccatctggtcagcaacccgtttatttccaacct

SEQ ID NO: 1303 - DNA, 1002 bp, Artificial sequence
  DNA replication origin
aacaactttactgaagtactacagttacataaaacatacctgttttacatggatagttcatagagttttgacaaatatatacacctatgtaaccatcaccctaatcaagatataaaacatttccatcacccccagcaagttctttcttgttcttttgcagtcaacccccgacccccatctcaggcaagggctgattggagcctattactggagattagttttaccagttcttgaacttcatgtaaatggaataattttttgacaatttcacttcgaagagacagactattaaaaagacaattgtttgtgtaataagtacacgcatgctaaaagtacacgacctgttccagttttgggttagcaagggattcctcgaaaaattaaaagaataaaccgctactatcattattagaaagaattaacctggagtagaaagaggtgttatgtggatggggatgggggacatgaaggatgggggacatgggggatgggggacatgggggatgggagaagcgcaagacatggagtgcgaatgaggttggggtccagccagaaggaaaagcatgaacaaaggcttggagacaagagcaattccgtctggactcaaacctggatttcgtaacttgtctccattttactaccatcgaaactgctgtgctctccaagttttttgcccagtccaagcagggcaattatgaataagtaagacgctctaccaacatatttcagtgttttcccccattagactgtaagttctttgaaagctagaacttcataatgtaacccttgttacgtagtaggcaagcattaataaatactggttgaattaacgaataattgggtgagtgaatgaacgaacgcacgcatgcaaacccgaaagtccctggaggaaatggtcaccttcggaggtttagtctggcccagaagccctaagaccacggactgtgccaggtcccactccaaacgccggggagacgctctaggcaagctacacgttctttg

SEQ ID NO: 1304 - DNA, 1069 bp, Artificial sequence
  DNA replication origin
tgggtgtctccgaccctttttgtcccggcgcggcgggagcgcgcttggcgcgtgcgtacgcgacggcggttggcggcgcgcgggcagcgtgaagcgaggcgaggcaaggcttttcggacccacggagcgacagagcgagcggcccctacggccgtcggcggcccggcggcccgagatgttatctgggaagaaggcggcagccgcggcggcggcggctgcagcggcagcaaccgggacggaggctggccctgggacagcaggcggctccgagaacgggtctgaggtggccgcgcagcccgcgggcctgtcgggcccagccgaggtcgggccgggggcggtgggggagcgcacaccccgcaagaaagagcctccgcgggcctcgccccccgggggcctggcggaaccgccggggtccgcagggcctcaggccggccctactgtcgtgcctgggtctgcgacccccatggaaactggaatagcagagactccggaggggcgtcggaccagccggcgcaagcgggcgaaggtaaggctcgacccttccctcaaacgacaccgcctggtgccgagcttccccgaggcttctccgccctcccccgccgccgccgggtcttgggccctgcgaccactcagacctccccttgtatcgctgcgcacgccacgtcccctctagctggacgggtggggtgagaaaggaaaagtctttgccggtgttgactgcggtctttgtgctgggtcccgagcgacgtgggaaggggcatcgatgattgctgggaggggtattttattccttaggtctttcttgcacaccttttcattttcttgactggaaaatggctccctgacgtggggttacggttggcgttcttggagacctcacttgtttgttcacagataggtctggaagctgttgggcgatattgatggcgtttcagctgggtgcacgagggggctgtaggttgatgctgaagaaatcgccttagccggggagatgaaaagaaagggtcgtttttgcttttgtttttgtttgagcaaaaccctgctgtgtggtaggagttctagtcttttt

SEQ ID NO: 1305 - DNA, 1165 bp, Artificial sequence
  DNA replication origin
tgcgcggggcccggcgggcaccggaggaaggaagtgatcagacaggaagggcccgggagctgcagcagcaggaggaggagggcggtttgggagcgcgtcgggccggcgtgcggggccagctgcgggcgcggggcgcgggccgcgggccgggcggggaggggtcccgcggccgccgcagctgtcggccgcgccggcccgcgtcccgggcgctctgctggtctcgcagccagaccgctgggccgggaaggaattcgaggcattcgctttgtttaagttgccagtagacagtccttaggactaattaatggtggaatctgcagggggacgccggcgagcggggccggggcctccccccgcccgccgcggtgaactttccgcagcgcggggcccgcctcccggcgcacccccggcccccgcccagccgcccgggcagggaaggagccatggcttcccggagcgcaggaatgaagtgcggtttctggggctggtggcctctggctgcggagcctgcctgcagggaacctggcgacccgcagcggccgcgctggggcttcggagcccggtttagagctcttggaggtggctgcggtttctgtgcataaccttggaggagcctctgtgagccgagaaagaccatcttgctttggagcatctgtttcttcatcgcgtcaacccctttcctaacactgcagagcttgttgtggcttgtttcgggaatgccgaggccagtgctcacccttgcgggtgggagaggggaagagagtaggcacccccaaaacccctgtagtgtgatttccagaaggccagactgcctgcagctccaccgtcgcaccttcactgacttgaatgaccttgggagaaggattgcgctgctgagcccttggtgccttatctgtcgttggaggagaaaatactctctggacctccctgccttttggggatgttttgaggggtggggtttgctcagggtatttcttttacagacggctgcagttctggcctaaggagctggactggtgtcagagccgggagaattcagatcacctaataagatttgactacctcaaattagggagggaggggtttggattttaggaggacatttctttttggggaatctggaaggtgtgttccagattgccttctgtcaccttgtttgcaactt

SEQ ID NO: 1306 - DNA, 848 bp, Artificial sequence
  DNA replication origin
tttttatagagatggggtttcgccatgttgcccaggctggtctcgaacttctgagtttaagcgatccgtccgcctcagcctcccaaagttctgggattacagacttgagccaccacgcgggccgaaagtgtccctcctgaaatcgagaagtcttgtcttccatttcgatttcccagggcgcctagcacaggacccagctacggaggcaataaaaacttggtggagtctaagtcctgggaagggaaaaaaaggacggagggggcggggcctacagacaaccccgcccatcacaaagaccccgccttccagaacgctgacgtcacaatttggccccgcccctcattgtcagtcccgcggagccagaggaggcgccggtcgctggcagctgagcggcggaacccttcgctggcgggagcgcggttcggggccgcagaggtgagggtccgtgaggcggcggcggcgggagcgcggcgcggggaggggagggcggcggggttgggaggccggtcccgggtgaggtcggggcacccgcggccacggggcagaagaaaccgcgggcgcagccgaggagagatggggtgtggagttgggggagagttggaatggattttggaggaagggctcaggaggagaccttttggggcgagacccagcacatgtttgtggagttggaggaagagactctgaggagatttttcctcgggagggggagggaaggttctgaggagacttcttggtgggagcgagactctgaggagaaatgtttggggcagagacgcggaggagacattttcgagggggcggcgaagagtttcgggggtagagtttggggttgggggagggggcgc

SEQ ID NO: 1307 - DNA, 1034 bp, Artificial sequence
  DNA replication origin
gtcgtggggtcgggagctgccatttcgtctctccgcttcctcctgggataagtgggtcgcatcatgcccacttgatcgcggacggaaagcagccccgttcagcgcaaaggaggaacctgaattaacaaggacgcgatttcctggctgcgctcccggggtaggaggtttgcgctgggtcccatcccccggccggtcctgctcaggaaacgcggagagaaagccaggaaccaggcctgccaggccctgcggcccctcagcgccgtccctcctccccggccctcggctgcaggaagccggctggcgggaacgccctgcctggtgggtgggaaaggccgagagcgcgcccggcaccggcggcttcccaggcccgcggccggctggcggcgcggagctgtcactgcggcaaacggcgaacgcgccggccccctcccccgccgcccgcaagcctggtgcagtcggcccatgagtatttcatgaagtgccgcagccggattcatggctcactggcgcaggaggggagagaggctgagtcctgtcaagcgccagcgccccacccgtcacggagcgcacgccgcgggggccaggctggggagggaagggtgtccagccctctcttttgggtggtgagatgctgaggcctgagggtttctaggtgagtgttcaaggtcatggctagtaaacggcagggccaggatgcaactcggggtctgtttcatcctaaagtttgtgcctcgggtctgtggttctgctccaggtttttggggtgtttggggggcgggggttacgttcttgccgcacctcaagaaccagagttctgtaccctggggctaccgatgtcctctcagaggtctgtgaaccccttgtaattgtgtaacatgttgtgtgtgttgcatttttcttcgaagtttcaaaggcgtcagtgatccaacaagggttaagaattatagccctctgcagggcatggtggctcatgcctgtaatcccaccactttgggaggccgaggtgggaggatcgcttgattccaggagtttga

SEQ ID NO: 1308 - DNA, 1773 bp, Artificial sequence
  DNA replication origin
gtctgcagcctggccccagcggccgtccgcggggaactgaggccgggagcggcgcccctcctggggcctcgggggcccggggcgtcccgcctctctgtgccctcggacgggcgcgcgccagggagagggtcccggaggacctgcccggccggagggaggccaccgggggtggccgtccagagccccgggagaaaagggaggactgaggcagcgcccagggaggctgcgggatcccacgcgcgcgttgggggtgcccagcgcccaggcgagaactggaggggcaggaagcacccccgggccggggaccgcgacgccccccgaggggccccgggcgccaagggaagccgggcgctgccccctgctggccaggttcgggcgcggcgccgcggaggggcctcccctctctggagagagttgaagggggtccggtgtggagccccggctggctccgggctggggctgaccggctctgtgaccttgggcaggtcactgcatctctccaagcctcagtttgcacgtctgtcaaatagaggggcattctctcactttgcagggtccctggaaataagtgagatccccgctagatgctttttttagaaactgtaaagttctgtataaatcctagctaatcacataatgccggaactggaagggcactgagaaatctgctttattacaaatggggagagtggggaatccgtcttgcccaaggtcacactaccagtagaagaatctaagactaaagtccccaggtctgggaaagttcgggattaagagcagggctctcagtcagggtcccggttgcattagcaaactggccttggccacctactagctgtgtgatctcaggaaagcccttaccttctttgaggtgtggtttcctcccatatgaagtggggacaacaattctcaccccacaggcttactgtacaaatctaatgggattgtcactcagcacagcccctggctccaaaccagagctcagccactagtggccatcatttctctgagtagcagcagcagcaacccctccactcttccttgcaaccagcttccagtgttttccagttgagcccgtggtgtgggtctgcgctgtcctctggatcacacagccactggctggggtctcagccctcctcacaaggacatttggggacactttatcagcagcaagtgaggccattggggtagccagcctttttcagtctttagtcctgctccactggtggggagaagtaggcagcctttgtcattgagacatccaggaagctgggacctagagggtggctaggagggagggaccaggccagctggacttgactggcaggggctagggcctctacccctacaacaacctctacaagcacttcagggccctgctgtcagaccaaggctttgatctcatgaacaagtaagtcccagtgcagcccgtgggtgggggatggagatcatgtctctgcagccacagaagccctgagccctagtgctggcttcccagtcccaggcctgcctgctggctcaccgccttccagaacctagtacagggccagaaaaacagagatgcttccttagagtttgtcagttacctgatggatcaataatgagggcgggaccactggctcatcccttctctcctaggccacggatggatgactattctttttggtgagagtaatgtgaatgtgagcagaaatacagattctcagagtatggagttcccagacctgagaggtctctttcattgcacagatgtttcccgtctaaggcccacag

SEQ ID NO: 1309 - DNA, 1277 bp, Artificial sequence
  DNA replication origin
gcgggcaggtgcgcacacccggcgtacccgcccgatccacttcctcgcgcggcgtctccccgtcgcggccgccttgtctccgccgcgacccccgccgaactcgggggccgcccgccccgccgccccggggccctttccggctcgcgccctcgcgatcccgcacctgcctccgcctctcccagagccctgcggctccttctccgcgctccccttcccgcgcccgccgctcctccttgctccctcctccagctcctccctcgccgggctccctccctactcggccccccgcccgcccggaggaaggcttggcccccggcctccccgctcgggatggtccggagctccgagccccggcctgcgactcgtagcagcccccgcccagcacccggggtgggtacgcgcagcggaagggaggtggaaaaggccccgggccagcgctctccggcccccacctgtaggagggcaggtgggctggctctggggtaggggtctgcagggaggtgggccatgcccagagacacttggtgaaagtccagcctcccctatccgtccgggtccccggtgttcattcctagttggatttttgttttcttcgtctaacaaatattgattgatctactgtgtcaggcatgttctaggcactggggatacagcagtgaacaaaacagaggtagacctaagggagcttccgttctgttgcggggagacaacacatttaatacgcaaaatgcataaaatatttatagaggtaaagggtagggaggataagaaagcagagaaagaaggtagggagtggaagtgagggctcaggggcacctccctgcaaaagtagcatttgagcaaagttaggaggtgaaggagtgggtcttgggaaagaccctgagccggatggtgtccaagctggatgaatggaagggggcggggggggggggcggtcagagaggtaggggagggacagctcccagcatccttcaaaggacagattccgagtgccagcccccagcccccagcaggtgtttgggatgctgagatgaaccagcctggttgcagagaaccaggggagagagaagacttgagcacaaagacaggaccagcaagaggcttccactgaagacagtgaagaggcacgaacaccggccatggcttgtgtccaggtttctcgcagctcatgaggaactggccttgccttctgtgtccttaccggttttttggttggttggttggttggttggttggttggtttggagacggagtcttgctctgtcgcccaggctgga

SEQ ID NO: 1310 - DNA, 1209 bp, Artificial sequence
  DNA replication origin
gagctgctgggcacacctcccagacggggtggcggccgggcagaggggctcctcacttcccagtaggggcggccgggcagaggcacccctcacctcccggacggggtggctggccaggcggggggctgactcccccacctccctcctggacggggcggctggtcgggcagaggggctcctcacttcccagtaggggcggccgggcagaggcgcccctcacctcccagacggggcggctggcctggcggggctgacccccacctccctcctggacggggtggctgccgggcggagacgctcctcacttctcagacggggcggctgcggggcggaggggctcctcacttctcagacggggcggttgccaggcggagggtctcctcacttctcagacggggcggccgggcagagacgctcctcacctcccagatggggtcgcggcagggcagaggcgcttctcacatcccagacggggcggcggggctgaggcgcttcccacatctcagacgatgggcggccaggcagagacgctcctcacttcctagatgtgatggcggccgggaagaggcgctcctcacttcctaggtgggatggtggccgggcagagaggctcctcactttccagactgggcagccaggcagaggggctcctcacatcccagacgatgggcagccaggcagagatgctcctcacttcccagacggggtggcggccgggcagaggctgcaatctcggcactttgggaggccaaggcaggcggctgggaggtggaggttgtagtgagccgagatcacgccactgcactccagcctgggcaccattgagcactgagtgaaccagactccgtctgcaatcctggcacctcaggaggctgaggctggcggatcactcgcggttaggagctggagaccagcccggccaacacagcgaaaccccgtctccaccaaaaacatacgaaaaccagtcaggcgtggcggcgcgtgcctgcaatcgcaggcactgggcaggctgaggcaggagaatcaaccagggaggctgcagtgagccgagatggtggcagtacagtccagcttcggcttggcatgagagggagaccgtggaaagagagggagaggggagaccatggaaaggggagagggagacggagagggagagagggagagggagagggagagggagagggagagagagagagagagagagagaga

SEQ ID NO: 1311 - DNA, 1145 bp, Artificial sequence
  DNA replication origin
tgagatgtgggaagcgcctcagccccgccgccccgtctgggatgtgagaagcgcctctgccctgccgcgaccccatctgggaggtgaggagcgtctctgcccggccgccccgtctgagaagtgaggagaccctccgcctggcaaccgccccgtctgagaagtgaggagcccctccgccccgcagccgccccgtctgagaagtgaggagcgtctccgcccggcagccaccccgtccaggagggaggtgggggtcagccccgccaggccagccgccccgtctgggaggtgaggggcgcctctgcccggccgcccctactgggaagtgaggagcccctctgcccgaccagccgccccgtccaggagggaggtgggggagtcagccccccgcctggccagccaccccgtccgggaggtgaggggtgcctctgcccggccgcccctactgggaagtgaggagcccctctgcccggccgccaccccgtctgggaggtgtgcccagcagctcattgagaacgggccatgatggcaatggcggttttgtggaatagaaaagggggaaaggtggggaaaagattgagaaatcggatggttgctgtgtctgtgtagaaagaagtagacatgggagacttttcattttgttctgtactaagaaaaattcttctgccttgggatcctgttgatctatgaccttacccccaaccctgtgctctctgaaacatgtgctgtgtccactcagggttaaatggattaagggcagtgcaagatgtgctttgtttaacagatgcttgaaggcagcatgctcgttaagagtcatcaccactccctaatctcaagtacccagggacacaaacactctgcctaggaaaaccagagacctttgttcacttgtttatctgctgaccttccctctactattgtcctatgaccctgccaaattcccctctgcgagaaacacccaagaatgatcaattaaaaaaagaaaacacatgaaccagaaattgaggcctggctctgccatttacacactatgcagccttagggaagtcacttcatcaatctgagcctcagtttcctcatccataaactggaaataataatagcactccttcagagctatcctggaagacagtagagtatggatgtta

SEQ ID NO: 1312 - DNA, 809 bp, Artificial sequence
  DNA replication origin
ccaattcccaaggccctgggcctgtgggatccaagaggccaatgatccagggagagggaaaagcccccatttaaaatccctgtgtagcccttaaagtccccagatttaccaaaagctcctggccctgaaaaatcagcacagacagatgcaaggtctcatagccggagctgctgtctcagttgaaactggagctcaaagacactagagtgagctggccacggtggctcatacctgtaatcccatcactttgggaggccgaggcaggcagatcacctgaggtcaggagttcgagaccagcctggccaacatggtgaaaccccgtttctactaaagatacaaaaattagctgggcacgatgatgcacacctataatcccagctactcaggaggctgaggcacgagaatcgcttgaacctgggaggtggaggttgcagtgagctgagattgcaccactgcactccagcctgggcaacatagcgagactccatctcaaaaaaatagacactagagggttgggaatgggaggggtcctgacagtcagccaagtgccacccccaaccctaggttcaggtttcaccaaagctacagatatcctccatgtcaggcttagccctgggccctcggcctcgtgcagagcagggccttagttacagtagtggggttctgacctcagccaggagtcagggctaggactctgggggtccaggttggaaggggaggtggtggtagagctggggcaggatctgccaatgatggcagccattcctgtgtatccattcccagattatgccttaaccctctcactttgc

SEQ ID NO: 1313 - DNA, 871 bp, Artificial sequence
  DNA replication origin
gtaagggaaggacgctacaggcacacgagcaacaataagccaggaaggaattcatttgggaggaaagatggggaagggggagggcattcctggggagaggcacagcagaaccaaaggctggaggtcaggagcctggctcagagggtttgaacccagcaggtggcgggggatgaagttagagcaccacctaggacagattgtttctcgtctctctccttccttctgccccttgcctgtccttcggccacatgtctgtctgtatcctcctgctctctgtaccaagaccacacaatagtcagagaagcctggtcaggacccaggccccagtcctcaccttgtggcctcccacaggaaggggccctggaccttctgaagaagctgcacagctgccagatgtccatccagctactacaggtggggcgggggtgggaagccttgggacagtgcctggggggagagctggtgggggagggaaagacccctggtgggggaaggtggagtctgggaggaatttctgaggggggcctgtggggaggggatcttgaggtggagacctcccagggagggactgagggggacacaggggcatctcgggggcggagagggtatcttctaggtgtaggggacctctgggccttggagcaagactggttcgcttttcttgaataccccaattcccaaggccctgggcctgtgggatccaagaggccaatgatccagggagagggaaaagcccccatttaaaatccctgtgtagcccttaaagtccccagatttaccaaaagctcctggccctgaaaaatcagcacagacagatgcaaggtctcatagccggagctgctgtctcagttgaaactggagctcaaagaca

SEQ ID NO: 1314 - DNA, 782 bp, Artificial sequence
  DNA replication origin
tgtgcttttatcttgattgtggtgagggttccatgggtgtacacgtatgttgaaacttatcaaattttacactgcaaagtgtgcagttattgtatgtgaattatacctcaaaaaagctgttttttgtttgttttgttttgttcgagttggagtctcgctctgtcacccaggctggagtgcagtggtgtgatcttggctcactgtaacctccatctcctgggctcaagcgattttcctgcctcagcctcctgagtaactgggattacaggcatgcgccaccacgcctggctaatttttgtattttaatagagatggggcttcaccatgttggccaggctggtcttgaactcctggcctcaagtgacccgcccacctcagcctcccaaagtgccggaattataggtgtgagccaccatgctggccaaactgttctgttttgttttttaaaaggctcccagtcctcaccctgcgaagttcacagtggggaggtaagggaaggacgctacaggcacacgagcaacaataagccaggaaggaattcatttgggaggaaagatggggaagggggagggcattcctggggagaggcacagcagaaccaaaggctggaggtcaggagcctggctcagagggtttgaacccagcaggtggcgggggatgaagttagagcaccacctaggacagattgtttctcgtctctctccttccttctgccccttgcctgtccttcggccacatgtctgtctgtatcctcctgctctctgtaccaagaccacacaata

SEQ ID NO: 1315 - DNA, 1601 bp, Artificial sequence
  DNA replication origin
ccttgctgagcacctcgaggtgggcgtgtgcgtggcccaggacgccagggggatcgtgcgggtcccggaggcgcgacttgtgcacgtccctttggacgtgtagggttcaccctgggcagctagtgcagggcccaggaaagcgggcgaagagagctggacgtgggaaaggactttgggagtcccagggcttggcgtgtgcaaagcccggggagcggcggcgatggcgggggcggggcggggggcaaatccgggtggcccgagaagtggcagagaaacttgggctgacgggggtactgagctgcatccctgcaccccggagtgggtctgcgggagagaagtaaaaggccgtggatcctgcgaccccaccgcttggtgcgtcaggagcggttcttttggcaattttccctttccttggccttggggtgcggcccggacgggcgggggccgaacaggtgcgggggcccgcggggcgggggaagggggccgggctggaggcctgtgcagcgagggcgagggcggagggaggagcgggctcggcgggaggttgggagcagggctgacagccctaccggagggtcctggccagagcgcagacccagctggaagttaatgtttgatcttccccgtgatctttgcctggggctggcggccgactggtcgcctggccagagcaaatttggccttgggtcctggagggcctgcgctcaccctgggagggaaaaaaagggagcctggtgagcatgcccttcccacctcccgttcctgttccagggtcctcttcctcccaccatccgtagccatgtgctgcagccacctgcatttccaggacacttaggagcctgggaaaggaagagacactaagggaagttttagagccaggaagagtagccaaggcccagggaagggtcactggaaccatgaagtggcagggagccctagagtggacactgggcagtcatgagttggtgtccatataaaggccagagcctcagtttcttcatctgtaagaaagagatgagattatctgcctctggagaagggatgtcactggattcttgtctctgctggcagcggtgaggattggagagatgagacagagatgtaaagcccttagtaggactcagacctgtgcttgctaagaactggcgaacaagacctgcttctacgcagccaggtccaacacagaaagatacagcacaaacctgcagagtgctgggagcttctcacctgacactcccaacctccatgcactccccgttccagactcctccacaatcctcagtacaactgagccacaagtcttgggggagcattttctcagctggggttggcagagcgcagccagggattctgagccaaattccagttcaaatagacgggttatcccagcccagctccttactgacccccaagcttgggccaggaaagaaattctgggcccctgggtaagaggggtagggtggggacgcctagagaccggaggagaggcaggctgcttgggatagagctctggctgaagaggacgggacctgccctggcctccccctcactccttttatggccctaggcaaaagccactcaaccttccctttctggacctc

SEQ ID NO: 1316 - DNA, 889 bp, Artificial sequence
  DNA replication origin
ggcaagtccttgaagtctatatttagtgcccgccacccctcccccgcacagttgggaggcgggcggtgggggggtgggggtggggagagccccgcccccgccgggcgtgtgtgtcgtgtgtgtttggggcccgcgcgggttgcgcgccctccgccttcgcgcctcctgcccccgaggccctactgctgcccctgtgcccctcgccccgccgggcgtcgcgggccaacatgggccaggaagaggagctgctgaggatcgccaaaaagctggagaagatggtggccaggaagaacacggtgaggctgcagagtttgggccacggcccccgcccccgggaggcgcgggcaagccccggattccggggtggggacgtactggcggggcgccatgggggcgcgtacgggactcggggacccgagggaggagcggctggtgcagggcccaaggccccttggggacccttgctgagcacctcgaggtgggcgtgtgcgtggcccaggacgccagggggatcgtgcgggtcccggaggcgcgacttgtgcacgtccctttggacgtgtagggttcaccctgggcagctagtgcagggcccaggaaagcgggcgaagagagctggacgtgggaaaggactttgggagtcccagggcttggcgtgtgcaaagcccggggagcggcggcgatggcgggggcggggcggggggcaaatccgggtggcccgagaagtggcagagaaacttgggctgacgggggtactgagctgcatccctgcaccccggagtgggtctgcgggagagaagtaaaaggccgtggatcctgcgaccccaccgcttggtgcgtcaggagcggttcttttggcaattttccctttccttggccttggggtgcggcc

SEQ ID NO: 1317 - DNA, 825 bp, Artificial sequence
  DNA replication origin
gcggcctgacgcggtgcggggccgggaccggggccggagcctggaccttggcggtggaggaaggcgaggagccgggggcggggccgtcccagctgaggagcggagagcggctggagggtcgggggcggggcgtgcggaggggcggggcgtgtggaggccgggacggcgcccccggccggcggtgaggccggctcagcgcggagcagctcagtgccccccgcgccccgctccggcagctccacgctcgcgcccgccatgccggagcagttcagcgtcgccgagttcctggccgtcaccgcggaggacctcagctccccggctggggccgccgccttcgccgccaagatgccccggtaccgaggggcggcgctggcgcgggaggaggtgagggggccgaggcgggaggggtcgggggtcggcgccgggcctggccttgacctccacaggcgtgtcgcacccgagctgcgatggcccttcaccgcgccccgaaacctgccccctccctaggtctgggaggaccgagcgcatctccaacagctgcgtcctcaccgtcgaggcgggggaaggcccgagggaccgttttggggggcctcgaggtctcttcgatgacaaactccacaggtcgggggacgtaccccaagtgccccgcgtgaccgcctcatcacatatgtgtttgcctagcgccttccagcctcagtttgcgttttcatcttcggagccccacaagtgtgccccccgagtcactccccttctgagaggcaggcttcccgcctcagtcctgaactttcttccccccggctgcagagaggccccctcccgcttgcg

SEQ ID NO: 1318 - DNA, 1277 bp, Artificial sequence
  DNA replication origin
gagccaccacgccgggctaatttttgtatattttgtagagacaaggtttcgccatgttgctcaggttggccttgaactcctgaacaatccgctcacctcggcttcccaaagtgctaagattacaggcatgagccatcgctcccgtcaacttttaattctattacacagtagtatatggtcattgtataaaagttaggatatacagattcaccaaaagaaaagaaagttactcataatgtcttcagctagtgcatatctgtcttcagctagtgcataaaatgttgctggtgcaacattttagtgcatatctttccggattttttcttttcttttcttttctgtgcgagaaaagaaaagattctctcaatcgccgccctgtggggtaaaataccatgaggccattttaagagggggaaatgcaggcttagagaagcaagcaatttatccaaagtaaccaagattggaatctaggttcctctgactccaaaaccaatgttccttgctgcggtgctttcctagctttttacttggagaacttttccccagaggacctcaggcttcagaactaaacctaagtggatttctatcctgaaccccatccctcatccgccccaaaggatggtgagccagattaaggggtgaaaggcaggagcaggaagagtaaaggcgtgggtgcgatctatggtcgggtaagagggaactagtacacgcacgtgttcggttcttcgcaacatcacaatcaagcgggcatcaggcttcccattgtacagataaggaaactgaggttccagaagagaagtaattttccccaagtcacacagctagccaggggccccgatccacacatccccggggcggcgggggttatcaggagggagtctccggatgcctgcaaagctgaggctgagagctgggcgtacgcagcaaaggaggggtggggcgattcggggcggagcgaggcaaggagattgggcgggactggggagagaggagggaagggtggcgggggggtggtagggcagaaggggcgaggtcatggggaactcggaacgaatcagcagaggagggaggaagagggagggggctctaagactcgacgcggagatggaacagcctgggccgtgcaagggaggaggatttggaagacccagagcgggatgaaacgggacagagccctgaaggggcagggatgggggaaggcggaggagtttctactgaggccaggggtggggcatcgcgccagggggcggggtctgaggcggtgaggggctgggggc

SEQ ID NO: 1319 - DNA, 1108 bp, Artificial sequence
  DNA replication origin
gggcggctggccgggcggggagctgacccccccacctccctccgggacggggctgctggctgggcagaggagctcctcacttcccagtaggggcggctgggcagaggtgcccctcacctcccggacggggcggctcccgggcggggggctgacccccccacctccctcccggacggggtggctgccgggcagaggggctcctcacttctcagacggggcggctgccgggcggagaggctcctcacttctcagacggggcggctgccgggcggaggggctcctcacttctcagacggggcggctgccgggcggagaggctcctcacttctcagacggggcggctgccgggcggagaggctcctcacttctcagacggggcggttgccgggcggagggtctcatcgcttctcagacggggcggccgggcagagacgctcctcacctcccagacggggtcgcggccgggtagaggcgctcctcacatcccagacggggcggcggggcaaaggcgctccccacatctcagacgatgggcggccgggcagagacgctcctcacttcctagatgggatggcggccgggaagaggcgctcctcacttcctagatgggatggcggccggccagagacgctcctcactttccagactgggcagccaggcagaggggctcctcacgtcccagacgatgggcggccaggcagagacgctcctcacttcccagacggggtggcggccgggcagaggctgcaatctcggcactttgggaggccaaggcaggcgggtgggaggtggaggttttagccagccgagatcacgccactgcgctccagcctgggcaccattgagcactgagtgaaggagactccgtctgcaatcccggcacctcaggaggccaaggctggcggatcacttgctgttaggagctggagaccagcccggccaacacagcgaaaccccgtctccaccaaaaaaatacgaaaaccagtcaggcgtggcggcgcgcgcctgcaatcgcaggcactaggcaggctgaggcaggagaatcaggcagggaggttgcagtgagccgagatggcagcagtacagtccagcttcggctcggcatcag

SEQ ID NO: 1320 - DNA, 862 bp, Artificial sequence
  DNA replication origin
gtgaggagcgtctctgcccggccgccccgtctgagaagcgatgagaccctccgcccggcaaccgccccgtctgagaagtgaggagcctctccgcccggcagccgccccgtctgagaagtgaggagcctctccgcccggcagccgccccgtctgagaagtgaggagcccctccgcccggcagccgccccgtctgagaagtgaggagcctctccgcccggcagccgccccgtctgagaagtgaggagcccctctgcccggcagccaccccgtccgggagggaggtgggggggtcagccccccgcccgggagccgccccgtccgggaggtgaggggcacctctgcccagccgcccctactgggaagtgaggagctcctctgcccagccagcagccccgtcccggagggaggtgggggggtcagctccccgcccggccagccgcccctactgggaagtgaggagcccctctgcccggccaccacccggtctgggaggtgtacccaacagctcattgagaacgggccatgatgacaatggcggttttgtggaatagaaagaggggaaaggtggggaaaagattgagaaatcggatggttgccgtgtctgtgtagaaagaggtagacatgggagacttttcattttgttctgtactaagaaaaattcttctgccttgtgatcctgttgatctgtgaccttacccccaaccctgtgctctctgaaacatgtgctgcgtccactcagggttaaatggattaagggcggtgcaagatgtgctttgttaaacagatgcttgaaggcagcatgctctttaagagtcatcaccactccctaatctcaagtacccagggacacaaacacttcgga

SEQ ID NO: 1321 - DNA, 1043 bp, Artificial sequence
  DNA replication origin
caagcggcgatctctaagcgctgctctctgctcggccgcgggccaggaggggagggtccggccttgccccgcaggcgtccattggcggcttcccccggcctccgcgccatgccgcgggccgtgtgaaaggcggcagcaccggaacccgcaggtgtccgcgggcgcgccaagcccttttgggtagggggcgccttactcgctatgctgcaagggccccgggccttggcttcggccgctgggcagaccccgaaggtggtgcccgcgatgagccccacagagctgtggccatccggcctcagcagcccccagctctgcccagctactgctacctactacacaccgctgtacccgcagacggcgcctcccgcagcggcgccaggcacctgcctcgacgccactccccacggacccgagggccaagttgtgcgatgcctgccggcaggccggctgccggtaatgctgggggcccccaccgcttccccctatgcttttccaggtgtgggaaaggagggaggggtgcctgagatccagtttgagtggagcaggtagagttttgggaagagggaagatgagctttcagtttccaggacccagtgcccccaatatctgagtagaagaccccttcattttcagactttggatgaaataatctcatccattctagtggagtggaatgagcactggattgcgagtctggagggagacccaactcactactcccagtgcactgtgtgaccttggggaagtccatgcagccagcgttgccgccattcattcattacttcattgtttggccagaaaccagtactgggtgcctgctattgtccaggcaaagagtatggcctggggacactgtgggactttggtaagacagagggataggtctagtgggtctctcacatccaatctgccatggacagactccaaattgtccagccagctcctgagatagccccaagtatctgccctaggtcctcccccaggcccagtcttccctcccagacagccatgtagcagatacaaatgtgggcagcccccttggg

SEQ ID NO: 1322 - DNA, 1584 bp, Artificial sequence
  DNA replication origin
cacgtcgcaggcgctcgaggaatgcgagttgcctgaaagaacgaaggaaggaaggaaccgggtgcgatccagggcggcctcgcggacggggcaggaagcgggtgggggtgcgcagaggctgcagcggcccgagcgcagctgggggcagcgggagaggagtggggtcagcgactccgctgggtggggggccccccaggccgcgaggctgggaaccgggaggccgcgctgctggcggagcggcgggggcgccgcgaggctccggatgggctgcgagccccgcccgcaggctgcggagggagccggagccagagcggagccagagctcagacatccgggcgccagcgaacacctgcgagcggcccccagggcccgcggggggagcgtggggcgccgggaggggcggggcggggaggaggcggggccggctcggctccgccctgccgggctccaggccacgtgggccgaggctctgccccagcccgggcgccgcagcgccgccggtggggagcggctgtctccggggaggtctgggagtgggcagagtggagcccttggaagcagcgctgcgggaaagagcgcggcaggaggttctcaggtttagcctggggcatggggaagagtcgtggccacgaggggtgatgaggccgggaagacagataattgaaggttgtccggcgcgtccacagctagagagctataactggctttctgaaaagggcaccatttctggtgtcacagacatgaatttgaattctggctttgttacttagaagccgtgtggccaccggcaagttacttcgcctgttctgagctagttcatttataaaataaagacacctcccaaatgtctgtatttcacagccgatgcgatcagctctgaatccgatcgcatgcgacaatttgcacaagacactcagcagtgaatcttgtagttaaggaagcctcgtggatactttatgcgccttatagtttatccgaacaacacacatggaagggaggtaccgacatccccctttcacagatgagggggagtcctaggtctttcattccacaagcgctccctgggacaagcaccccctggggaccaagcatgtgccaggctttgggaatggcgagggaaaagagccaatttgaagagaaggcaagaacatgagctttgaagctagaggaagctggggttcctaaactctgctctgctactttcttgctgtgtgaactgtttcttgctgtgtgccactttcttgctgggtgatcaagttattcagcctgagtcttttttctataaaccaaggaatgttacccatcacggtggtttgtgaggattagaacaaaaatggaagataaaatagtctggaacctggcaggcacttccataggtgattatgacagaagacactatcctctctgggagttatctgacctagggccaaattgctttcactctctaatgactaatggattggcatgctggtctttcttttgtcctggccacctgaacaactcagtcctgggagtcctgacaggcaatttccttggaattagcttaataatacctcgtaggtgtgtgatgcatttcaaagaact

SEQ ID NO: 1323 - DNA, 890 bp, Artificial sequence
  DNA replication origin
ggaggcggcgtgcagggcgctggcggcgtggggcgtggggacgccggggccgcagggacgctggggccgcgggggtccgggaggtcccgggagtcccagcgggggaggtgcggaccctcctcccggcgcctggccccgccgcggcggtccgaacagccacattccttcgggtttcccacacactcgctatcaaagagtccccaaagtcccagcttttcccgcgcccctcccccgccagtggccggagaagctatttttcaccccctcctggtctttaatctgttgtggggaaagaaagcggcttttgttggacgaggggctgcgcggggggcggagagggggcgccggcgattgtgtgtcccgcagctgcgcgtccgggaccgccgggggttggggccgccgggcgcggggcgcgggcggggagggccgggtagggccagggtggggccgccggggcgcgggcagggagggccgcggaaggtcgggcagggccagagagggggcagtcagggcgcggggtgcaggaggggagggtcgcggtgggtgagggagtggaggaaaaggccacctgggcgctcgagcctattgtcctcttggccctgttccgcacctggctaggagattgggggaagatggacatacactgaagcacgcacatagaaagccgcacacccagggaagatcctatactagacccggggacacatcacacacagcaggctgaaacacccagggaggaagacacataggcgcaccccgcgcacagcccccaaggacagccccacactcagacaagggtggacagcatattctcaggtaggaatacactcagaaactgaggtcgggcgcggtggctcacgcctgtgatcccagcacttttgggaggctga

SEQ ID NO: 1324 - DNA, 1699 bp, Artificial sequence
  DNA replication origin
atcagttagggctctggctgcagctgggagcggattggggcggagggaggcagagggcggtaataaagaaacaacaggaagctctgcttttattagccctgggtagtagcagctgcaggtgagtaatctgatttctgcggcgtcctgttttctccgctgcctggcggttcctcgacacccactcacctgccgccagccacgggagagagggcaggggggagggaggatgggcgtggggccccgcccgcccaggtccctcgcccacgcccacgcgggcgcacccgccgcgccgacgccgccaccggctgcgcacctgccgcgcttgctgcggggaagccaggctctgctgtggcggcggcggcggcggcggcggctggcggggaggagacgcggactcccactcgcggccctatcgcttgctccccgcctccccgccagagctgcgccaccaggctctgggcgcgctcccatgatcggaaggctgagagccgtctcccagctccacccttgacttctgaacctcagttgctgcttctgtcaaatgggagcacgtccacctaccagtgctagactggagagatcaggaaaggggtgctaaagttacaaactgtaaagggctgtagcgatcaccaaggcatcggaaggaaactggccaagaaaggcaagtctcttagctttgctgggcctcggtttccttatctgtaacatgggaatgagtaacccttcctcataagcagatgatgctcgtgacgtggatggaacgcagagcaggacaagggcagtggctgccgtggggtcattattactgttgctgttagcccaggccagaatctgcattccctcttcttacttggataccccggttttccctggttctcagcacacgtttaggaaatggggggcttggatcacaaaaggattttcagggtcaggggcttgcccaagactggggattggctccatccctaactctctgaaccaagctttccatctgtaaaatggggttgacaacaacttccctgaaacccacagacatataaagaccaatgagaaactcagaaacacctggtaaactgcgaagtactacccacatgcaaagactgtaattatttcttccaggtgcctctttgccctaaagagtcaaggatgagtcaagaaccaaatgagatgagccaggaggatccctgtgagaagggccggatggcattcccctttacccatggagctcactgcagtgtgcagcgatggcccaagggtggagaggaaggtcaggctgggtcctgcccttgggggctcatgtcccagttagcccacgacgcaaaggcccaggtgtgatgggagcacagaagaggggggaagccgactctctgggcaagggggatcaggctggtacagggggtacttcccagaggagtcagccttgacgggactctctgaaaaatggttgtagctcaggtggggagaggggcaaggcacgtgctggacagagacggattccagcagaaaagtccagagacaagaaagggggtagtgtgctcaggaaaagggcgtgaaacgtgactgaaatgcaggatggggagaggaaatggattcaagataaagtcaaattggagccgggcatggtggtgcacgcctgtaatcccagctacttgggaggctgaggcagaagaatcacttgaaccccagaggcagaatttgc

SEQ ID NO: 1325 - DNA, 911 bp, Artificial sequence
  DNA replication origin
ttactcattcccatgttacagataaggaaaccgaggcccagcaaagctaagagacttgcctttcttggccagtttccttccgatgccttggtgatcgctacagccctttacagtttgtaactttagcacccctttcctgatctctccagtctagcactggtaggtggacgtgctcccatttgacagaagcagcaactgaggttcagaagtcaagggtggagctgggagacggctctcagccttccgatcatgggagcgcgcccagagcctggtggcgcagctctggcggggaggcggggagcaagcgatagggccgcgagtgggagtccgcgtctcctccccgccagccgccgccgccgccgccgccgccacagcagagcctggcttccccgcagcaagcgcggcaggtgcgcagccggtggcggcgtcggcgcggcgggtgcgcccgcgtgggcgtgggcgagggacctgggcgggcggggccccacgcccatcctccctcccccctgccctctctcccgtggctggcggcaggtgagtgggtgtcgaggaaccgccaggcagcggagaaaacaggacgccgcagaaatcagattactcacctgcagctgctactacccagggctaataaaagcagagcttcctgttgtttctttattaccgccctctgcctccctccgccccaatccgctcccagctgcagccagagccctaactgatcgccagaaaccggttgcttggggtccagaccaatccagtgcctgaaataccctctgtgccgcacagggttgggttaatgcttcctcaagggtggacttcggtcacctgcatgggaaccacctggggtgctggttaacaacacacatctccaaatacggcttcacacctgctcgatcaattcctgcagtttg

SEQ ID NO: 1326 - DNA, 1281 bp, Artificial sequence
  DNA replication origin
agatacaaaaaaggagaagactatgcaactgggacaaggtggctcaagattagaacagctaacagtaccagctttggatccagagagacctgggtacaaatcccaactctgctacttactagctttgtgaccttgggcaagctacctaacctccctcttcctcagttttttcatctgtaagtcaggaataataatcatgtaaatggtatgaggctgagctaaagctacaaagattgactggcttgacatggtactgagcattgggtaagagctcagtaaatgtcactgaggcaggagaatggcgtgaacccaggaggcggagcttgcagtgagccaagatcgcgccactgcactccagcctgggcgacagagtgagactcggtctcaaaaaaaaaaaaaaaaaaggctgttagaatcatccaggtgagagattatggagtcctgaactaggggacctggggtgcagagggacaggaagactaggaagaaggggacagattctggagcaaaactggggagataaaatggattggattggaaagctggatgaggagctgaggagcagacctcacctgggacaatatccaggtgtgttgccctgagacagagaaaccagaagaggcaggtggcaggggagagtgagatgatgagtttggagctggtcaagttgagttggatgcaggggagttgccaagcagagatgtctaggaggtgctgtgtttatgaatcagggactcaggaagggcagagctcagcttaaagaaggtaactgggagtgggtgagttgtcctgggaggatgtagaggctgcgcagtaggccgaggtgcccatgactgcggaggcaggaggaggaagggctgcgggggcctgcaagggagctgctagctagataggaggaagacgaagaaggggatccaaacttgccctgaagttgagggaggtgacagcttggaggagaaaggtgaggtccactccagagtcaggtgtcacagaagggctgagaagaggtcactggatctagccatcagggttgtccatgccctgggcaggaacattttcctggtgtgagggggactggactctggagaagctcaacggtgaaaagtctttctcagtgcacccagggtgaatcatggccccttcccagccgaggtccattctgcctgcttcttcatcctgcccctcacactccatggatggtactccgtgcctagtcctggttggtctatacactccaggagcaatcgctaggaatcacgataagtgtattctccatttgag

SEQ ID NO: 1327 - DNA, 1263 bp, Artificial sequence
  DNA replication origin
gcctgccttggcctcccaaagtgttggaattacaggcgtgagccaccatgctcagcctaatttatgtctttaaaagatcactctgactgccttgtgatcaactatctatgaactgatctaaatacttcttgaagccactagtatttttagccagtaccccctctgtgtgaagcaaaacttccctttactggtcttaaatttacttctttcgagtttcaaggggagcccccttctgcctcctatcttagggttagtggcccaatgcgagatctctagtaaaggttttcacagagtgggtgggaggagggtctcccagtttataccttacctgctctgtgatgtttcaccacctgtaaaatgaaaataatgagagtggccacctcaagaggctttgatgatgaaatgggacacagcttggcagcagggagtaatcaatataggctagcttccatgcagatgacaattatggtgatcaggaggaggatgataatgatagggatgatggtgatggtgatgatgatggtgatgatggggatgatggtgatggtgatgatggtgatgttgatggtgatggtgatgatggtgatggggatgatgatgatggtgatggtgatggtgatgatgatggggatgatgatgatggtgatgttggggatgatgatgatggtggtgatggtgatgatgatggggatgatgatgatggtgatgatgatgatggggatgatgatggtggggatgatggtgatggggatgatggtgatggggatgatgatgatggggatgatggtgatgatggggatgatgatggtggggatgatggtgatggggatgatggtgatggggatgatgatgatggggatgatggtgatggtgatgatgatgatggggatgatgatgatggggatgatgatggggatgatgaggattctgttgtgtgatattgggggagtcagtgaatgacattttccatgtctgtcaaataagggtgttggaccaaatgatctgtgaaggtccatcgaggtctgatgttctagaattttctagtttaagtgctctcttcctcctttcagcctgggttaccctcttccctgcaattttggtgctccctagtgatgtgtgatgagagatggagtattatagtagagacaaaactgatgtggagtcaggaggcccgaggttccagcggcaccatttatagtggagtcttcatcatggtgcatttaacttacacacattttttttttctctttgagacagggtctt

SEQ ID NO: 1328 - DNA, 963 bp, Artificial sequence
  DNA replication origin
acgaggtcaggagatcgagaccatcctggctaacacggtgaaaccccgtctctactaaaaatacaaaaaattagccgggcgaggtggcgggcgcctgtattcccagctacgcgggaggctgaggcaagagaatgtcgtgaacccgggaggcggagcttgcagtgagaggagatggcgccacggcactccagcctgggcgacagcaagactccgtctcaaaaaaaaaaaaaaaaaaaaagaaagaaagcagggaacgtcactgagaggctcttacacaactccaggcaagaaacagtggtgcctcggacacaggtagtaacggtggagacggtgagattgcggaagctttggaaggtggagctcatgctattcctgatgggtcagtttggggtgtagagatgggacagttgagtttgtcagcgggaggtcatcgatgaccttgacaagagcagtttcagtggagcgatgggggtgaaagccccacagagagagctggagagagaaaaggaaggagggatgaagatggtcaattcagaaaacactgagatgttttcctggaagggggagcaaagaaatatgacggtgtgggtgtgggggtgtgtgtgcatgggcttgtgcatgtgtgtgtgtgtgtgtacaattggaagaactgcagccgattgtgtggtgatgtgaatgagccagcagaagagggggacccctggagctgtgggagagacgcaaggaattgctcactgttgtcctggaggaggtgagagaggatgaagggcagtgtcccagtggagggcgtagaattcaagttccacaaggcgtccaggtaacaggcacggatacaggcgggagtgaagggagaggtggagtctgaggaagtttccttctgattgcttctgtttcccagtgaaacagaaagcaaggtctccagcagctgacagctagtacagcaggttctttttttctcaggtg

SEQ ID NO: 1329 - DNA, 952 bp, Artificial sequence
  DNA replication origin
aaaatatcaaccttaaggaaaccaggaaaagggtgttatcattcatccatacagcatttgttgattcccactgaagttccaggccaaggtggggtaggggatcagtctgggaatggggacctgacatgcgagaaagacacataaggaaatattccctttttattcattcactcctctggcatatgccaaccctctggggacataatgaaagacatccacagccttgctctcaggaagcttttaaaggaagtggggaggcagatattcctcaaatagccattcaactgcatattataaacggtgataagggttaaggagaggaagtacagagtgctatgaagacatcatgggggaccttgatgtacttggtggtgggagggtcagagatggcatctctggggaggtcagcatctaaaggagttgaataaggactgatagggtggggaaagagggtccaggaggcagaaacagcatgtgccaaggccctgagctgggagagggcagggtgcttgtgaggccagtgtggctggaacccagctggcaaaggaaggggtgcgttatgcagctgaggctctagtggaccatacttaggagccagtgaaggcttcagggaaggacagtgaggacagctgtccattctggatggaacactggaggggcagagtgggcgaggcatgggcacaatggcagctggtgccagggaggcagcaatggggtggagagaaggggagagtgggtgcgtaatgagcgcgatggcagcctgtgtcagggagacagcagggggttgagagaaggggagaaatttgagggctgcttgggaggtaagtggggcaagacgtggggttggattggccctgggagaggtggcacgagaggtcccagtgggtaagctctgtgacccaggaagggctggctaaatctgacctggggaaggcctcccagatggagcaca

SEQ ID NO: 1330 - DNA, 1021 bp, Artificial sequence
  DNA replication origin
aggagaccaaggcttggagagaagaggcgacttctcaaagatgatccagaggagtaaaggaggccccgggattcaaacccccctccgtgaggtgctctccacctcccgctgtcctcagtgtggacttagatcccagagcatcttcacccctctgagggggtgaggccagtcccctccctggctggcttgcagacagcgacccaggttcaggtagcggcctaacccacccagctctgtctctgtgggggtggtttgacctgatgcaggtttgagcctgtatcaggctctgtggggggttagggcagggttctcaaggctgagcagaaagcttccaccccacccctccactggggactccaagcaggtgacatttctgtttggggagctggctgccccttccctgtccccagcccttcaggaattctgggtctcaggctctggaaggagggagaggagagagagaggaggcccaggcagaagtggggagacagtaggctgggagaaggaggggcatgggggtggggccagagcaaggccacagcgaatgatagtgacagcaaccgtgctaagaagagctgccactgtggagggacaggcgctgcaaaggtgctttacgggaattatgagccttaaccttctctgtggccctgagaggcagggaggatcatgaccctcactgacagtggaggagcagtatccaggagcttgagtaatgtgcccagggtcacatggccagtgaatatgaagccagaatcacaacccagggagttgtgactcccagaaggaggggactgatgggaagcagagtgaaggagcaaaggactgatggggtggccatcaggctgggagtgggggacaaagacgtccagctgcctggccgtcccatggctgtcatcgtgtgtacgagtgtgtatgtgtgccagggagagagagtgtctgagagtctcggttgtcaaatcttggtgacatcctggtggcatgggttgtctgactgtggctgagcaatctgggttgttgaggg

SEQ ID NO: 1331 - DNA, 946 bp, Artificial sequence
  DNA replication origin
gccgccatcccacctgggaggtgaggagcgtctctgcccggccgcccatcgtctgagatgtggggagcgcctctgccccgccgccccgtctgggatgtgaggagcgcctctgcccggccgcgaccccgtctgggaggtgaggagcgtctctgcccagccgccccgtctgagaagtgaggagaccctccgcccagcatccgccccgtctgcgaagtgaggagcccctccgcccggcagccgccccgtctgagaagtgaggagcccctctgcccggcagccaccccgtctgggaagtgaggagcgtctccgcccggcagccgccccgtccgggagggaggtgggggggtcagccccccgcccagccagccgccccgtccgggagggaggtgggggggtcagccccccgtccgggaggtgaggggcgcctctgcccggccgcccctactgggaagtgaggagcccctctgcccggccaccaccccgtctgggaggtgtacccaacagctcattgagaacgggccgggatgacaatggcggttttgtggaatagaaaggggggaaaggtggggagaagattgagaaatcggatggttgccgtgtctgcgtagaaagacgtagacatgggagacttttcattttgttctgtactaagataaattcttctgccttgggatcctgttgatcggtgaccttacccccaaccctgtgctctctgaaacatgtgctgtgtccactcagggttaaatggattaagggcggtgcaagacgtgctttgctaaacagatgcttgaaggcagcatgctcgttaagaatcatcaccactccctaatctcaagtacccagggacacaaacactgcggaaggccgcagggtcctctgcctaggaaaaccagagacctttgttcacttgtttatctgccgaccttccctccactattgtcctatg

SEQ ID NO: 1332 - DNA, 1553 bp, Artificial sequence
  DNA replication origin
ccatgaggatgggaaggtggtaaagtttatgcaaacaatagtgtgagggatgcctctccttccggtcggccctcctccaggaggcgcatgggtggtggtagcaagtgggagtcttgggtgccctgtctcgaatctacaaggtgggagcgggtgagaacccagcgactgcgcggctgaatgacagggagtagccccgccgcctccaacatggcagcttctatccagcgaagccgggtccccgcttccgggttccgtactgtcggccaggctacttccggcagcgcgatggctgggttcccgggactcgaacggaagttccggcgggggcggccgagggggaagagtgtgtctgcgggagaaagaggagaatcgcccaagcggcctcggaagtcccagggagtggaggtacccagccggcggctgcggaggatgggcgtgtagggggaggtcggcctcgggagggtcccggagagcggggagggggaaccgtgatgggggggatgggggtggggagtgaggtgcgaaggcgctgtccagtcttggggacttcgggagtggagcggggctaggcaagggggtgtctgagtataaagagacagacttcagggtcggaaatagaagagcccattgtggggcgggggcttccccagagtcaaaggtacaaagctttattgtgggcaggtgggagtcctgggtcagggtagaaaatttcactgggtagggtgacctttggtcagaacagaagttcccattgtggggagcgggagatcctgggtcagggtggaagttctcaaggtgtatagagagagacaggtcagggggaaggcacccctccgaggagggagcctgggcgggaggtgcaagtccccacggtggagaaggaagggaatcgcagctcagggcaggaggtgcattccccatgggaagaggaaccccgggtcacaggtgaacgatcccattgtggggagctgccctcaggggtcagagatggaaggtgaggccagttgggaggggtgggcaggcacttgaggcaggtagtggaagcttccggcgagtttggaggacgccgaggatggggaggggccagccagcctgacattcttttgtgtgtttgggagtcccagagcgtggtcaagccagggctcgtttgcagtcagtggcagcagcagcaggtagctccgtttagggggggcgtggagcaccagtttgggggtgggtggagttcttacgctttctggggacatgggcagccccctgggggtctgggaatggatgggccagaaactgctgtgaaggctggatgggggctgggtggggggaggttgagatgggggttggaggcggcactgagtaggggatggaagctcctttccctggcacttttctctccatttcccatagggcccggagttggggaggcagggacccagggatgattggagaggagggggaaggcactcacccctgaggagttagagggggaatgaagcaggcgtgccgctgcctcccctctgccccctgccctacagtccctatgccctgcctctgcctgt

SEQ ID NO: 1333 - DNA, 1032 bp, Artificial sequence
  DNA replication origin
gtattagtcactgcgcccaggagccagtttacacctagcgaaggcggaggcattggacaagcctgggtctgagcagacagaaccccttcctgcgaccctggagtcccaatcgtgctgccattttccttctgcccaggactctccagtcctcagtcaccttggacaaagaagtgtggatcctcagattccatcttttccaactccaaggcaagtggaactagaaaataaggtgcctgtgtgtcaggtctccccagctctgctgtggcgggcccttaagatcacctcactgaaccctcacgctgcctcatgaagtttatacaattattagctctgttttacagagatagaaactgaggccaagaggctaattaatttccaaagcctaaggccagaaagtgatggtacccagacttgccccagggctgacttctgagccagtctggtacctagggcacactgccgcctccttccaaagcgagcttagggggcaggattccagtgggaaggaagctctgagcaggcagcctcagccacctctgagactctgtatcctgggccaggtgccatggcagagaaggtgctggtaacaggtggggctggctacattggcagccacacggtgctggagctgctggaggctggctacttgcctgtggtcatcgataacttccataatgccttccgtggtgagcggggcagtggggctggggctacttgaggggatggcagaagcaaaaccctgggttccacctccaccaccgggcggggaatgtgtgtctggctagtccctgggaacacagcaccccatgtcgtgatgatgtggcctacatgtaccctaccaggagggggctccctgcctgagagcctgcggcgggtccaggagctgacaggccgctctgtggagtttgaggagatggacattttggaccagggagccctacagcgtctcttcaaaaaggtgggtgcaggctgggcacggtggctcacgcctgtaattccagcactttggaaggccgaggtgaggagatcact

SEQ ID NO: 1334 - DNA, 1444 bp, Artificial sequence
  DNA replication origin
gagcaggttcgggagacggaatgaagggccgggtgggctcgcgaggggccggggagtccgcggggagcgagggagtttccgaggggcgggtcgtgttcctggcagcgtccctccagggcaggcccgccccctttgtcccagttccccgctgcccgggctggggcggccggggttcattcattgccggcctgaggactcctagctcggccccgctccgcgctacagcccaaagcccagcctgagacccagccgccctcgtatgcccacggcctagctccccttccctccaacagacagactgggaaaaccgagtgggcgacggctgagcaaggtcactccgctgtcgggggcgcagccggcctcagaccagctttcgtgcttcccagggcctctctgcgaccactttcggggtccgcgccaggcgcggggcgggggcgggggcggcttcggcgcggcgggcagagtccagcgggcagcggtgggggaagggcgagccgcctggggagagggccgggctgcgagcctggcgatccagattccagcccgctgtcgccagctgtgggaccgaagggcaactgtttcacctctctggccctagtatctgtatctgtaaagtgccagtgataacacctgtctcaccgagatgctgggggaattcaggaaaatcatgcaaaagtgcctggtacggagcctggcacgcagagggctcttggtcaagtgggttggagctgcgtgagcccagaaggggatagaggcagcgtggaggaaggcggcagcgggcccggtcgctgggaatgaaaggcctcagtgtctggggcttcctccccgtactacccgcagagtttgttcagggtggaggtgcgcacctggccaagtccacgtctacacggcccacccagagtagcctaagttgggcgggattcctaactctgagccaggagtgaccgggctggccctggcatgggcagaggctgagcgggggttggggtggggccccctccaggaccaaccacggtgtggttgcccctgagctggcctcagcctgcctggcaaaggacctcacccttgaggccatgtgatctatttcctgcttcctcccagctgacccttgagggaaagggggtgggggccgcctagagcaggaggtattagtcactgcgcccaggagccagtttacacctagcgaaggcggaggcattggacaagcctgggtctgagcagacagaaccccttcctgcgaccctggagtcccaatcgtgctgccattttccttctgcccaggactctccagtcctcagtcaccttggacaaagaagtgtggatcctcagattccatcttttccaactccaaggcaagtggaactagaaaataaggtgcctgtgtgtcaggtctccccagctctgctgtggcgggcccttaagatcacctcactgaaccctcacg

SEQ ID NO: 1335 - DNA, 827 bp, Artificial sequence
  DNA replication origin
cccctcggaaactccctcgctccccgcggactccccggcccctcgcgagcccacccggcccttcattccgtctcccgaacctgctcgggttcccgcgccccacgcttgctgcagaggcaccgcctcctacgcccgagccgcgggccctttaagtgctgacggcccactccggccccgaccccgcccctccacgcccccaaggaaacatgtcactcgggttacggccactacggggagggcgggaggacaaaaggcctccgcgctgtgacgaagactgcgcagcgcgcgcccgcggaaggcggaagtgggcggtgccaccccgcgagaggcgccgccggcgccaggtcccagtagcgggtgggtccttgccggtgccccgggtccccgcgctagctcgtcccaacccctggaagagggctgcgcttccgagggggcagggggcagagggtagggggcccacgcctccgccccactctgacccgcaggttttcagacttgccggtgtgtgccaaaccatgaattcaaaatcttgaactacccgatcccacgggactaaggcaggagggggtcgcagggggcctggtgctggaagtccagtttgcaaataaaccaaggagctggaggaagctgtcaggccacactagcggttccagcgctcttggctctcagcccccacctgccgggaagggtcggtctgcactctgccttccacgacggcaggttagaaaatgattgtttgtttacaatgaaaagtagtagagctagagaataatatgcacaaaatgtgacatcctgcgtgatgaaaccagagcaaaggagccctaaat

SEQ ID NO: 1336 - DNA, 1849 bp, Artificial sequence
  DNA replication origin
ccaaagaactgaaagtcaggaactcaaacacatacttatacaccaatgttcattgcagcattattcacaaaagccaaaaggcataaacaattgaaatgtccatcaactgatgaacggataaacatgcaatgaagtattattcaaccttaaaaaaagagtaaaattttgatacctgctacaacatgggtgaaccttgaaatattatgctataatattatatgttaaatgttatgctataataagccagacacaagatgacaaatattgtatgattccacttatataaaatacctagaatggcaaatttataaagacagaaagtaaattagaggttcccaggggctggggtggtgtggggagaggaatggtgagttattgcttaatggtcgtataatttctgtttggggtaatgaaaaattttagaaatacgtagcagtaacggttgtgataccgaaaggaggtactgggaaggcaagagcatggtccctataaatgataaggaaaggagggaaggaagtgctgggaagggaagagcatcgtccctataaatgataaggaaaggagggaaggaagtgctgggaagggaagagcatggtccctataaatgataaggaaaggagggaaggaagtgctgggaagggaagagcatggtccctataaatgacataaaaaggagggaaggaagtgctgggaagggaagagcatggtccctataaatgacataaaaaggagggaaggaagtgctgggaagggaagagcatggtccctataaacgataaggaaaggagggaaggaagtgctgggaagggaagagcgtcgtccctataaatgatatggaaaggagggaaggaagtgctgggaagggaagagcatggtccctataaatgataaggaaaggagggaaggaagtgctgggaagggaagagcatggtccctataaatgataaggaaaggagggaaggaagtgctgggaagggaagagcatcgtccctataaatgataaggaaaggagggaaggaagtgctgggaagggaagagcatggtccctataaatgataaggaaaggagggaaggaagtgctgggaagggaagagcatggtccctataaatgataaggaaaggagggaaggaagtgctgggaagggaagagcatggtccctataaatgacataaaaaggagggaaggaagtgctgggaagggaagagcatggtccctataaatgacatataaaggagggaaggaagtgctgggaagggaagagcgtggtccctataaatgataaggaaaggagggaaggaagtgctgggaagggaagagcgtggtccctataaatgataaggaaaggagggaaggaagtgctgggaagggaagagcatggtccctataaatgataaggaaaggagggaaggaattgctgggaagggaagagcatggtccctataaatgacataaaaaggagcgaaggaagtgctgggaagggaagagcgtggtccctataaatgataaggaaaggagggaaggaagtgctgggaagggaagagcatggtccctataaatgatatggaaaggtgggaaggaagtgctgggaagggaagaagagcatggtccctataaatgacatggaaaggtgggaaggaagtgctgggtagaggaggacgtgagaacgtggtccttgactgcagctccacccccacagacctaggtgaggacaggcatttttgttttcctgtcccaatgttgcgtttcccaagaccacccggcctgccccgcccccatcctgtgcctataaaaacccccaagaccttagcaggcagacacacaggtagccggacatggagaggagcacat

SEQ ID NO: 1337 - DNA, 1088 bp, Artificial sequence
  DNA replication origin
ccgttctcaatgagctgttcggtacacctcccagacggggtggtggctgggcagaggggctcctcacttcccagtaggggcggccgggcagaggcgcccctcacctcccggaccgggcggctggctgggcggggggctgacccccccacctccctcccggacggggcggctggccaggcggggggctgacccccccacctccctcccggacggggcggctggccgggcgggggctgacccccacctccctcccggatggggtggctgccgggcagagacgctcctcacttaccagacggggtggctgccgggcggagaggctcctcacttctcatatggggcggttgccaggcggagggtttcctcacttctcagatggggcggctgggcagagacgctcctcacctcccagacggggtcgcggccgggcagaggcgctcctcacatcccagacggggcggcggggcagaggcgctccccacatctcagacgatgggcggccgggcagagacgctcctcacttcctagatgggatggcggccgggaagaggtgctcctcacttcctagatgggatggcggccgggcagagacgctcctcattttccagactgggtagccaggcagaggggctcctcacgtcccagacgatgggcggccaggcagagacgctcctcacttcccagacggggtggcggccgggcagaggctgcaatctcggcactttgggaggccaaggcaggcggctgggaggtggaggttgtagcgagcggagatcacgccactgcactccagcctgggcaccattgagcactgagtgaaccagactccatctgcaatcccggcacctctggaggccgaggctggcggatcactcgcagttaggagctggagaccagcccggccaacacagcgaaaccccgtctccaccaaaaaaatacgaaaaccagtcaggcgtggtggcgcgcacctgcaatcgcaggcactcggcaggctgaggcaggagaatcaggcagggaggctgcagtgacccgaggtggcagcagtacagtccagcttcggctcggcatcagtgggagaccgtggaaag

SEQ ID NO: 1338 - DNA, 974 bp, Artificial sequence
  DNA replication origin
catcccatctaggaagtgaggagcgtctctgcccggccgcccatcgtctgagatgtggggagcgcctctgccccgccgccccgtctgggatgtgaggagcgcctctgcccggccgcgaccccgtctgggaggtgaggagcgtctctgcccagccgccccatctgagaagtgaggaaaccctccgcctggcaaccgccccatatgagaagtgaggagcctctccgcccggcagccaccccgtctggtaagtgaggagcgtctctgcccggcagccaccccatccgggagggaggtgggggtcagcccccgcccggccagccgccccgtccgggagggaggtgggggggtcagccccccgcctggccagccgccccgtccgggagggaggtgggggggtcagccccccgcccagccagccgcccggtccgggaggtgaggggcgcctctgcccggccgcccctactgggaagtgaggagcccctctgcccagccaccaccccgtctgggaggtgtaccgaacagctcattgagaacgggccatgatgacaatggcggttttgtggaatagaaaggggggaaaggcggggaaaggattgagaaatcggatggttgccgtgtctgtgtagaaagaggtagacacgggagacttttcattttgttctgtactaagaaaaattcttctgccttgtgatcctgttgatcggtgaccctacccacaaccctgtgctctctgaaacgtgtgctgtgtccactcagggttaaatggattaagggcggtgcaagatgtgctttgttaaacagatgcttgaaggcagcatgctcgttaagagtcatcaccactccctaatctcaagtacccagggacacaaacactgcggaaggccgcagggtcctctgcataggaaaaccagagacctttgttcacttgtttatctgctgaccctccctccactattgtcctatgaccctgccaa

SEQ ID NO: 1339 - DNA, 1225 bp, Artificial sequence
  DNA replication origin
tgctcttcctcggagcggccgagtcggtgcgtcgggcccagcctccgcgccgctacaccccagactggccgagcctggattctcggccgctgccggcctggttcgacgaagccaagttcggggtgttcatccactggggcgtgttctcggtgcccgcctggggcagcgagtggttctggtggcactggcagggcgaggggcggccgcagtaccagcgcttcatgcgcgacaactacccgcccggcttcagctacgccgacttcggaccgcagttcactgcgcgcttcttccacccggaggagtgggccgacctcttccaggccgcgggcgccaagtgagtgtggtcccggggagcggcgccccttcccggctcgggcggcaaacaggaggtggggctgggcggccagctggggcgcgcagctgccggtcgcccccatgaccccggggcccgcgtgtggcctcctgcggccacaggagtgagcctggcacacctgatgaggaggaggaggtgcgtttgactggggactgataaatgaaggttcagggagatggcaggctgggaagccctgggtatctgcacctgtgcaccgagagggctgagttaggccatacctgatgtccctttcagattgacagcactatcaggactccagggtttcaaatcagtggtgtggagcctggttctaattcaactgtgaacctggacatgtcacttcagcctccctgcagcctcttctatggttgtagaaaggggttatataaggatacaaccctttgagccctaatgtctctaagagggaaagagaggggagttctggtgtgcagtgtatttgggcaacagtacagatagtcattcgtttgctcctctcaatcccttttacgtaggaagtgtccaggaagggtctgactctctctgagaactgttggaacttgggggtggctggttcagagaacagagtagagagcgctggggtggggataaggggagaccacgacccatgaagttgtcaaggcaggggcttgtcctgaaggagtgagccttgagagccctgtattgacagatgttaagtcagggagtggttactatcagcttctagaaagattcattcggctgctgggagagaagtgggttggagaagagtaaaaatggaggcggggaggtttccccagcccctggcttagagcagtcttccatccttaccttggttcctcagccatcttccgg

SEQ ID NO: 1340 - DNA, 1233 bp, Artificial sequence
  DNA replication origin
cccttaatccatttaaccctgagtggacacagcacatgtttcagagagcacagggttgggggtaaggtcacagatcaacaggatcccaaggcagaagaatttctcttagtacagaacaaaatgaaaagtctcccatgtctacttccttctacacagacacggcaaccatccgatttctcaatcttttccccacctttcccccctttccattccacaaaaccgccattgtcatcatggcccgttctcaatgagctgctgggtacacctcccagacagggtggtggcctggcagaggggctcctcacttcccagaaggggcggccgggcagaggcgccccccacctccctctcggacggggcggctggccgggcgggggctgaccccccacctccctcccggacggggtggctggccgggcggggggctgacccccccacctccctcccggacggggtggctgccgggcggagacgctcctcacttcccagaccgggtggctgccgggcggagaggctcctcacttctcagacggggcggttgccaggcagagggtctcctcacttctcagacggggcggccgggcagaggcgctcctcacatcccagacggggcggtggggcagaggcgctccccacatctcagacgatgggcggccgggcagagacgctcctcacttcctagatgtgatggcggccgggaagaggcgctcctcacttcctagatgggatggcggccgggcagagacgctcctcactttccagactgggcagccaggcagatgggctcctcacatcccagacgatgggcggccaggcagagacgctcctcacttcccagaccgggtggcgggcgggcagaggctgcaatctcggcactttgggaggccaaggcaggcggctgggaggtggatgttgtagcgagccgagatcacgccactgcactccagcctgggcaccattgagcactgagtgaacgaggctccgtctgcaatcccagcacctccgtaggccgaggctggcggatcactcgtggttaggagctggagactggcacggccaacacagggaaactcgtctccaccaaaaaaatacgaaaaccagtcaggcgtggcggcgcgtgactaggcactaggcaggctgaggcaggagaatcaggcagggaggttgcagtgagccgagatggcagcagtacagtccagcttcagctcggcatcagagggagaccttggaaag

SEQ ID NO: 1341 - DNA, 849 bp, Artificial sequence
  DNA replication origin
gaaagtgaggagcgtctctgcccggccgccatcccatctaggaagtgaggagcgcctcttcccggccgccatcacatctaggaagtgaggagcgtctctgcccggccgcccatcgtctgagatgtggggagcgcctctgccccaccgccccgtctgggatgtgaggagcgcctctgcccggccgccccgtctgagaagtgaggagaccctctgcctggcaaccgccccgtctgagaagtgaggagcctctccgcccggcagccacccggtctgggaagtgaggagcgtctccgcccggcagccaccccgtccgggagggaggtgggggggtcagccccccgcccggccagccaccccgtccgggagggaggtggggggtcagcccccgcccggccagccgccccgtccgagagggaggtggggggcgcctctgcccggccgccccttctgggaagtgaggagcccctctgccaggccaccaccctgtctgggaggtgtacccagcagctcattgagaacgggccatgatgacaatggcggttttgtggaatggaaaggggggaaaggtggggaaaagattgagaaatcggatggttgccgtgtctgtgtagaaggaagtagacatgggagacttttcattttgttctgtactaagagaaattcttctgccttgggatcctgttgatctgtgaccttacccccaaccctgtgctctctgaaacatgtgctgtgtccactcagggttaaatggattaagggcggtgcaagatgtgctttgttaaacagatgcttgaaggcagcatgctctttaagagtcatcaccactccctaatctcaagtacccaggga

SEQ ID NO: 1342 - DNA, 952 bp, Artificial sequence
  DNA replication origin
gccgccccgtccgggagggaggtgggggggtcggccccccgcccggccagccgccccgtccgggagggaggtggggggggtcagcccccccgcccggccagcctccccgtccgggaggtgaggggcgcctctgcccggccgcccctactgggaagtgaggagcccctctgcccggccagccgccccgtccgggagggaggtgggggtgtcagccccccgcccagccagccgccccgtccgggagcgaggtggggggggtcagcccccctgcccggccagcctccccgtccgggaggtgaggggcgcctctgcccggccgcccctactgggaagtgaggagcccctctgcccggccagccgccccgtccgggagggaggtggggggggtcagcccccccgccaggccagccgccccgtccgggaggtgaggggcgcctctgcccggccgcccctactgggaagtgaggagcccctctgcccggccaccaccccgtctgggaggtgtgcccaacagctcattgagaacgggccaggatgacaatggcggctttgtggaatagaaaggcgggaaaggtggggaaaagactgagaaatcggatggttgccctgtctgtgtagaaagaagtagacatgggagacttttcattttgttctgcactaagaaaaattcctctgccttgggatcctgttgatctgtgaccttacccccaaccctgtgctctctgaaacatgtgctgtgtccactcagggttaaatggattaagggcggtgcaagatgtgctttgttaaacagatgcttgaaggcagcatgctcgttaagagtcatcaccaatccctaatctcaagtaatcagggacacaaacactgcggaaggccgcagggtcctctgcctaggaaaaccagagacctttgttcacttgtttatctgctgaccttccctccactattgtcc

SEQ ID NO: 1343 - DNA, 1047 bp, Artificial sequence
  DNA replication origin
ggctggccgggcagaggggctcctcacttcccagtaggggcggccgggcagaggtgcccctcacctcccagacggggcggctggccgggcggagggctgaccccccaacctccctcccggacggggcggctggccgggcggggggctgacccccccacctccctcccggacggggcggctggccgggtggggtggctgacccccccatctccctcccggacggggtggctggccgggctgaggggctcctcacttcccagtaggggcggccgggcagaggcgcccctcacctcccggacggggcggctggccgggcggggggctgacccccccacctccctcccggacggcatggctggccaggcggggggctgacccccccacctccctcccggatggcacggctggccgggcgggggggctgaccccccacctccctcccggatggggcggctggccgggcgggaggctgacccccccccacctccctcccggacggggtggctgccgggcggagacgctcctcacttcccagatggggtggctgccgggtggagaggctcctcacttctcagacggggcagctgccgggcggaggggctcctcacttctcagacggggtggttgccaggcagagggtctcctcacttctcagacggggcggccgggcagagacgctcctcacctcccagacggggtctcggccgggcagaggcgctcctcacatcccagatggggcggcggggcagaggcgctccccacatctcagacgatgggcggccgggcagagacgctcctcacttcctagatgggatggcggctgggaagaggcgctcctcacttcctagatgggatggcggccgggcggagacgctcctcactttccagactgggcagccaggcagaggggctcctcacatcccagacgatgggcggccaggcagaaacactcctcacttcccagacggggtggcagccaggcagaggctgcaatctcggcactttgggaggccaaggccggcggctgctccttgccctcgggccccg

SEQ ID NO: 1344 - DNA, 1154 bp, Artificial sequence
  DNA replication origin
cccagacggggtctcggccgggcagaggcgctcctcacatcccagatggggcggcggggcagaggcgctccccacatctcagacgatgggcggccgggcagagacgctcctcacttcctagatgggatggcggctgggaagaggcgctcctcacttcctagatgggatggcggccgggcggagacgctcctcactttccagactgggcagccaggcagaggggctcctcacatcccagacgatgggcggccaggcagaaacactcctcacttcccagacggggtggcagccaggcagaggctgcaatctcggcactttgggaggccaaggccggcggctgctccttgccctcgggccccgcggggcccgtccgctcctccagccgctgcctcccgggcggcgctcgccggcgcggcggcaaagactgattgtgggtcttaagaccctcccataagagggtcccatcctataccctgaggtaaggaatgctgatgtcatgaagcctccgtgaaaatccacgaggacagggttcaggagcttctggatacttgaaaaagtggagcctcctgaagggtggcacaaccagggaggccatggaagctctgagccccttcccccataccttgccttacatgtcccttcttctgtatccctggcaatatcctatataataaaccagtaaatgtaagtgtttctctgaattctgtgagccgctccagcaaattaattgaactcaaagagggggtcatgggaacctcaacttgaagctggttggtcagaagttctggaggcctggacttatgactgatgtttgtatgtattgttgggggtaggggcagtcttggggactgagccctcaacctgtgggatctggcactgtcttagggtacatagtgttagagccgaattggagaacacccagctggtgtctgctgcttggtgtgtgtgggaaaaaaccgactcatttggtcacagaaatcttttgtgttgacgtggttgttgtggtatgagagtaggggaaaaacacagagttctcggggcgcgggggcgggggggctcacggctgtaatcccaccactttgggaggccgagatgggtggattacctgagttcaggagttagtgaccaccctggccaacgtggtgaaaccccat

SEQ ID NO: 1345 - DNA, 944 bp, Artificial sequence
  DNA replication origin
gatgtgaggagcccctctgcctggctgcccagtctggaaagtgaggagcgtctctgcccagccgccatcccatctaggaagtgaggagcgcctcttcccggccgccatcacatctaggaagtgaggagcgtctctgcccggccgcccatcgtctgagatgtggggagcgcctctgccctgtcgccccgtccgggatgtgaggagcgtctctccccggccgccccgtctgagaagtgaggagaccctctgcctggcaaccgccctgtctgagaagtgaggagcccctccgcccggcagccaccctgtctgggaagtgaggagcgtctccgcccggcagccgccccgtccgggagggaggtgggggggtcagccccccgcccggccagccgccccgtccgggaggtgaggggcgcctctgcccggccgcccctactgggaagtgaggagcccctctgcccggccaccaccccatctgggaggtgtgcccaacagctcattgagaacgggccaggatgacaatggcggctttgtggaatagaaaggcgggaaaggtggggaaaagattgagaaatcggatggttgccgtgtctgtgtagaaagaagtagacatgggagacttttcattttgttctgtactaagaaaacttcttctcccgtgggatcctgttgatctgtgaccttatccccaaccctgtgctctctgaaacatgtgctgtgtccactcagggttaaatggattaagggcggtgcaagatgtgctttgttaaacagatgcttgaaggcagcatgctccttaagagtcatcaccactccctaatctcaagtacccagggacacaaacactgcggaaggccgcagggtcctctgcctaggaaaaccagagacctttgttcacttgtttatctgctgaccttccctccactattgtcctgtgaccctgccaa

SEQ ID NO: 1346 - DNA, 1225 bp, Artificial sequence
  DNA replication origin
aagcacatcttgcaccgcccttaatccatttaaccctgagtggacacagcacatgtttcagagagcacagggttggggataaggtcacagatcaacaggatcccacgggagaagaagttttcttagtacagaacaaaatgaaaagtctcccatgtctacttctttctacacagacacggcaaccatccgatttctcaatcttttccccacctttcccgcctttctattccacaaagccgccattgtcatcctggcccgttctcaatgagctgttgggcacacctcccagatggggtggtggccgggcagaggggctcctcacttcccagtaggggcggccgggcagaggcgcccctcacctcccggacggggcggctggccgggcggggggctgacccccccacctccctcccggacggggcggctgccgggcggagacgctcctcacttcccagacagggtggctgccgggcggaggggctcctcacttctcagacagggcggttgccaggcagagggtctcctcacttctcagacggggcggccggggagagacgctcctcacatcccggacggggcgacagggcagaggcgctccccacatctcagacgatgggcggccgggcagagacgctcctcacttcctagatgtgatggcggccgggaagaggcgctcctcacttcctagatgggatggcggctgggcagagacgctcctcactttccagactgggcagccaggcagaggggctcctcacatcccagacgatgggcggccaggcagagacgctcctcacttcccagacggggtggcggccgggcagaggctgcaatctcggcactttgggaggccaaggcaggcagctgggaggtggaggttgtagcgagccgagatcacgccactgcactccagcctgggcaccattgagcactgagtgaaggagactccgtctgcaatcccggcacctcgggaggctgaggctggcggatcactcgcggttaggagctggagaccagcccggccaacacagcgaaaccccgtctccacccaaaaaatacgaaaaccagtcaggtgtggcggtgcgcgcctgcaatcgcaggcactcggcaggctgaggcaggagaatcaggcagggaggttgcagtgagccgagatggcagcagtacagtccagcttcggctcggcatcagagggagaccgtggaaagaggggagaggggagagg

SEQ ID NO: 1347 - DNA, 893 bp, Artificial sequence
  DNA replication origin
ccacagagcaagattccacctcaaaaaaaaaaaaaatctctaaaaatactgttactaaatggtccattctggtcatctctgggggagagcctgccaggggcgctttagtccttcatttcgtgttgtgctttatcacttaaaatgtttcccaacaagtgtgtatctcttttataatcggaaaaaattaaaataccttcattttaccaaaaaatgaaattaaggccacctcagacagaatcagggaagacaagcctcagccaggggactctgctgagaccttgaggtcttcccctatatgagtggctcgccccctccgcatgtaggttggcccaggccagggcgggacagcctaggtgatctggcaccggcttctgcatgtggacagttggccgccattcggtcagtcagccaccggctaaacatttcttcacacctgctttaatgccaggcctggaccaattcctaggcatgggaagctaaataagtcacagttgttgggtagcaggcaataacaatactgcgtgataaatgctgcaattgagggggtctcaggaattctggacgctcaaaggagaaggtgagaggtgcttcctggaatccatgcatctgccgaaactgggtgatgaagcacaggctacactggagtgagccaggagggaggcgggacggcattccaggcagcgcactcagcaagggcaaaggcagggaggtgtgaaatggcgtgatggatgtggggatactgagagagtgtggagtgaaggggacagatggaggggcaagaggacaacaggctaaggccaggttaggaagattataggtactcgacctcgaaatttgaacttgaccctgaaggccactaaaagatgtacacatcatcagattggcagagggaa

SEQ ID NO: 1348 - DNA, 957 bp, Artificial sequence
  DNA replication origin
aagcaaggagaccggtcaggaagcctttggtgtaacccatgttattgtaatattcattcatttactcaacagatgtttattgtgcacctactatgtgctgaggccatggcaggcaggctctggggatgtggctgagaacaggacagagcccctggtccttgatatcctcaaggatgctccctcctggaggccattaggttcctgttccatggtgttctgctggaaccctccggtcccagagtgtgcaggagcctcccctcctggcaaagggtcttctctcatggcacaagggctgcagtacagccagtcagtggctcctggttcctcaaactcagtgagcacctgcttgcccttcgtgctgcccctcagcttgggatggcctgagtcaagaccagccaggagctccaggcttcatgacccctttctttcccccagggaggccccgtctggcccctccccagaatgtgacgctgctctcccagaacttcagcgtgtacctgacatggctcccagggcttggcaacccccaggatgtgacctattttgtggcctatcagaggtagaggggactctctcggctggtggatgggaagactgagggggtgggtgggggctggaggggcttctctgggacagctgcacccagtgtgggcagcactggctagctctctgggccctacgggagatggcatgtggccggcatttggagaggggcttttgataaaggtctggaggtggggaagatgttgaatgaagagcagtgtacaggtgaccagtctgccggggcgggggtaagtctttgaggaaagttggtgtggggcatggatgtagctgtgggggccagaggatgaaattctcaagtggctggatgaggtgcttggagctgtcccagctgatcagtgaggcaactaggtacacagcagaggagctgttacctgggcaattaggcatccctca

SEQ ID NO: 1349 - DNA, 1046 bp, Artificial sequence
  DNA replication origin
gtgggggtcggggcggcgggggggcgcgttacaggtacgtctttggtttttgtttgttgcagccaaagtttctagttctaattattctacagctaatgtgtattgtttttatgtaaaggaaaaacagaggtatttttaatcaccataaataagaacgactatccacctcagctgactcatgcgatgtccccaggccaacacgtgggctgaacccaggccgccttccaccgaaaaccaccaggtgtgccattgtggtttggggcaccggcacaccaagcagcggcctgctttgcattttctttttcttgtttgttcacagtgacagctgatgacccactggtggcattccgtgtaacaaacacatgccaaagattgcagatttcgtaggcaggagggagggaaggagggagggagggaggcaaaggcacgctggagtttatcaagcaataagtcctggcatcttccttatgcaaaacccaggctgggagtggacagtgataagggctagggacagatattctgtaggctgtggatgccacgccaagaggaagaatgaagggaggggtacatggaaggagatggtggctgaggcaggagggcacggggaagaaagggaggtggttcagaggctgctcccccacctgctgggccctttccagggccttcccagaagttcacctgatgctaagcagcaggggtgtgtgggcagcaggggtgtgtgggcagcaggggtgtgtgggcagcagggatgtgtgggcagcaggggtgtgtgggaggtggggatgtatgccctggcgggggatgggggaatcaggaaagagattctatttggccaagagagggatattgaggctatagagggctggagaatcatgttcaacggtgagtgtggggaaagatggatccaagatggacccttttaaaaagacacgtgctttagggagcctgtggtttcatgggtctccacaagcatccagaaatctgtcctctgacagcaccctggctgcccatcccctatcacagggtaggtagaactgtctatctgt

SEQ ID NO: 1350 - DNA, 1137 bp, Artificial sequence
  DNA replication origin
gtgacaaaaagaatgtactatatcacattgaaatttttatattgatttcatggtgacatattttccatatattgagttaaataaaatatattgttaacactaatttcactcctatctttactttttgatatggctacaagaaaatttaaaattatatagttaaaaattatagttagaattatgtagttataattacatagacagtgctgttctaaaatctgtgttcctaagcactgctgtactgcatctcttgcacaaaggtggtggtagtggtgatgggggtggtgacggtgatagaggtagtgatggaggtggtgatgaaggtgatgagggtgatagaggtgatggaggtggtgagggtgatggaggtggtgagggaggtggtgagggtgatggaggtggtgatggaggtggtgagggtgatggaggtggtgagggaggtggtgatggaggtggtgagggtgatggaggtggtgagggaggtggtgagggtgatgaaggtggtgatggaggtggtgagggtgatggaggtggtgatagaggtggtgatggaggtggtgagggtgatggaggtggtggtggaggtggtgagggtgacaggtagtgatagaggtggtgatggaggtggtgagggtgatggaggtagtaatagaggtggtgatggagatggtgagggtgatgaaggtggtgatggaggtggtgtgagtgatggaggcagtgatagaggtggtgatggaggtggtgagggtgatggaggtggtgatggaggtggtgagggtgatggaggtggtgatggaggtggtgagggtgatggaggtggtgacggaggtggtgagggtgatggaggtggtgatggaggtggtgagggtgatggaggtggtgatggaggtggtgagggtgatggaggtggtgatggaggtggtgatggtgatggagttggtgatgatgatggaggtggtgatggtgatagaggtggtgatggtgatggaggtgatgctggaggagatggtagaggtggtgatactggtgaggttgatgggatgttagtcgtagtggggtggatgatagatgaagccatcttgctatggtctaaatgtttgtgtgcccccaaaatttatatgttgaaacctgaacacc

SEQ ID NO: 1351 - DNA, 1134 bp, Artificial sequence
  DNA replication origin
ccttcccccaaccgagtcgcgtctctgcgaggctgaggggagactccaggcggcagcggtggggcccagagagcagggagcgaggccgcgggggacgctcctgcctcggtgccttagacctactgtgtgccaagcccctttgcggcgaaactctcccttcctgggctgtcaacggggcctgcctggagcgccggccggccctccagaggggaacaacaggtcaccggggaggtcgcctgcggctccagctccccgggggccccgacgcaccttcaggaaaacccgacgctgggcagctcgcgggcgccggctgttttcctgcgagacccaggcggtcggcggcgacttccggcgccctcggccgcagcccaggatcccttgcgccctgcggtagcccggggctgcccagggctgcgggctccaggcacccagagcgctgcgaccacatgaaaggcccggcgctcagcacccgccagccacctccagctggtttctaactacaccgccggggcctccatgcttctcagagaccagccttcgaagtgccgccttacacccggggcctggccaccgggcgggcgcggatggagctctggtccacatttgggagctcacagttgttcctgccaggtaggtgttacagacagatgagcagactgagggtcagggaggacaaacaaattcaccaggatcctgctgttggtaagtggcagaatttagagtgacaggcaagtcccacttttgccactatatcaaggcctggccagagttggccattccatgagggcccaagctgtaagctatggccagtcctcttaacttggcactttttaggagaatgtcgaggccgcagaagcaacagcagctcagaacttgcaagccaagcgccgggtgccctccccttaccagtaggggcagctgagcccccaggctctgccactgtaatctcaaatggtggcttggagtccgcctgcaattactcagcaggcaactggcttccctcaccccaccccaaactgagaagcctcaactgtcagcggatctgacttcaaatccaaaccattagggaggagaaaagcaagaaacctttctgttcaagtaacccagcttcagaacacataccccctaacgtgc

SEQ ID NO: 1352 - DNA, 1511 bp, Artificial sequence
  DNA replication origin
aattcttccctgtatgggaatttttctttcatgctatattctcctcttggtgtcttgtctaattttccttttctccccccatctattgttcaactgaggtgtgaaagaagttgaaatccacctgtaaacccgggggtgccacatcccttcatttattcactcactgattcactcaacaaacattcactgaggattactctgtaaatggccacgtactgggtgctgaggacaaaaaaggtgaaggccactgccattcatgtggctacactgttctgtcccctttcggtccctgcccttgaaagttcccaattcttgctgacctcctggaaaagcctagagaaataccatcaaataacggagagataatttcccttcaagactttcactaggtcagttgttctaacctttttaggaggcaaaaggaatagagagggggaggcagccagccaggattatttgcggcattttagataggaaagctgagttccagagaggggagggaaggcaagagagggaaaggaactcaattatttcatagagtcaggccttgtgcctttttattctcatacatgccttgtgaggtgggtatttttatcatcattttacatgggcaaaaactgacacttaggttaaggagctcatccaagtcacccaatctataggtggcagagctgggcttaaaacacaggtgtgatcttggaactaagctctcagcctgctgactcagcaactacactgcaggtcagtagtggatttgggaacctcctgcttcccagtcctctgcctggtcttctaggccaacagttttacaacttggacacgcatcagaatcacctggagggcctgtgaaaacacataacgctgagccatacccccagtttctgattcagtaggtctagggtggggctgagaatttgcatttttaactagttcccaggtgatgatgatgatgatgatggtccacggaccacagtttgagaacactgttctaggtgttctctttcaaaataatgactccctctcttccccttaacgactccaaaggtaacataggtttgtaaaatacaacaaatatataacatgtagaacctacagaaaaataggaagaatggaattcatccacattcttctgctcagaaataaccactcttaacagtttggcacatctcctctgtcttcttttcagaggctaagcacagaggaagcggggtggcctatggctgctcggctaagacccggttaagatcccagtgcttccgtgagaccttgggcaagcctgaaccaggtctgggtcccctcttcggcaaaactgcatttacactcccatcccgcattagtttgttgggagggtttaaagaagagcgtgtatttatcaagcactcgacacaatgtcagatgcggagtcagcgctccataaatgttggctgtcatttttgttctaacgtaagagaaagctggatgatcccatctgggtttcagccccgttttccctcttcactcctccggtgggt

SEQ ID NO: 1353 - DNA, 1297 bp, Artificial sequence
  DNA replication origin
tacgaagattccatatccacaccgccctcctcaccctctcgaggctgttttcctcatctgacaaatgtgtaggctgaggctcagagaggtgaagggactgctcagggcactaaggctgtgactgacagagggaaggacacaaaggcccttcctaggccaaagtgtcaaggggtgccggccccagctaggccccccagtgggggtgtgttggggaaggagatggagggttttcatcccctaagcctccagcacagcttccctcttctctctgaatctgcaccaccacagactcttttcctttccctttttacaagcgggtgtctcgccagagattcgccgacttttcacataaaacaaacccataaaaacccaggcagtttcagtgagaaagaagcatggatctagcttgggggctgggggcagaagctggtggcttcctcctctggccccacaccctagcttgcaaggaacagggagaaaagcaggctgggggcaatgggcatggtacagtgggcatggtacagagggcacaggtgtagagggggtacaggtgtggcggaggcacaggtgtggaggggcacaggtgtggagggggcacaggtgtggagggggcacaggtgtggaggcgcacaggtgtggagggggcacaggtgtagagggggcacaggtgtagagggggcacaggtgtggagggggcacaggtgtagagggggcacaggtgtggaggggcacaggtgtaaagggggcacaggtgtggaggggcacaggtgtagagggggcacaggtgtggaggggcacaggtgtggagggggcacaggtgtagagggggcacaggtgtggcggaggcacaggtgtggagggggcacaggtgtggagggtgcacaggtgtggagggaggcgtgtggttgtttctctccatacctgttggagctgctgggtcctgccgagggggctgcctgcaatgaagtgaaaaagacattttccatcacacgcaggaaaatgagaggagcccctggctgctggaggctctctgggaggaatatttttggtgggaggtggggagaatactgttacaatgcctttctagcccattctgctcagacaagtgcccttaagtgacctgagatgttgagtggaaaggaatcacccagcccgagctggatgggtcaaggactcaatgaacacacaggaggtgctaaagccatgttgtcagagcagagtcacactgagccccacctgggccccagcatgcccagaagggctgggaattgcagatggtcctgcggccggtaactag

SEQ ID NO: 1354 - DNA, 1247 bp, Artificial sequence
  DNA replication origin
tttcttcctgatggccagctacagcccccagaggtttgggcttgttccccaccccaaggaagtaacagatttagagggtcaaagcaagaaagccagacatcaaaaccccacccttctcccactccccatcagaaaaagtgggagaggggggactcgcccagcataatcagcctgctgactatgccagctgcccaggactcccacgtccacacgaggtcaggagacagaagccgccagtcctgtggtggtctctccaagcagcctgaggttccctccttacccccacccccaagtcttaacctaaacctagctccaaggggtaaggcagcgcctcgtgccccaccccaaggaggctttgggaaagcccatgagggaggtgggagctggggtgggcctggtgagtaaatgaggagggcgggaggtcacctctctgaaggtcgccttccttggcctgcttggagggcagaggctcaaactcctcagtgaagggcgagcaggtacgcttcagaggcagcctgtggggatggcagtgggggagcttgtgagaaacttggggacccctagaggctcaaggaccctgctgggcctccaggggccctagaaatggggaagaaaacacaagggtggatgcaaagcagagggacagtgggggtaaagcagcaggtctggagttggactgcctgggtttgaatcccagccctgccacgcactaggtgtgtgacctgggtgagtcccttagcccatcagtgaccccatgtataaaatgggatgatgagaaagcaatgatagcaatacttcatagagggatgtgaggccacaggagaccatgctcactgcgcttagaacactgtgacgcacaggagggcctcaataaatgtggactcatcgtcatcatcatcgttcctttttaaaagaagtcaggtcagatgtgaggcggggtgggggggtggaaggactgggggctttggagtaagacaggcttggggtccagtcctgctgcggtgactttcacagctagaaggcacttcacttctctgagcctcagtttccgcatccataaagcaaggcaataaccctgcttgcctaactctgaggctgttgtgaggtgacaagtgacataatttggggtgaaagcaccaagtgaaaagtacattttgttcatagggaagaaactgatcataacagcaaatgatcttcataaagtgctttcccacttacgaagattccatatccacaccgccctcctc

SEQ ID NO: 1355 - DNA, 917 bp, Artificial sequence
  DNA replication origin
cttaatccaggctggctaagccacaggacacctgccctgtcagaatgagtttgtgcacaccgacagtaaggggtttgggaagggagctcttccttgcaccagccctcccataaccagggtcagagacaccagccaagcccaggaggcagaagcatgaaaaggctcttcatcgcgctgcatattcactcattaagtgctacagagtgttcactataggccaggcactttgcaaggtggggcagagtcagtggtggcccctccctgccctgtagacctcaccttccagtggggctggggttgaagggacagatgacccaagcacaaaagatggtaacaaaatagtgagaccatctgaaaagttctaaaggaaataataatatggtgtcattgattattatgggtgggagggcaggggctcccacagaaacctatctgccaggggaggacaggggagctgagacccaaaggacaagcaggcaggtgaggaggggctggagctggggccggggagcactctagaagggagcagggtgggatagggtgggggaagcagcaggttggtttgtgcaaagatcctaaggccagtatagcaaccaaagccaggggtggtttcagggagagtggacagaatgaggtcagaggcaggcagagatcagatgcaaggtcttacaggtcagagtaaggattttattccaaggactagggaaaaccatggagggtttcccgttgcaattaaggaaagcaacaggctgggggcggtggcacacgcctgtaatcccagaactttgggaggctgaggcaggagaatcacttgagtccaggagttcaagactaacctgggcaacatggcaaggtcccatctctacaaaacaaattttaaaaattagccggccatggtggtgcatggctatagtccc

SEQ ID NO: 1356 - DNA, 1215 bp, Artificial sequence
  DNA replication origin
cgccgtgctcctttaaagaccctactcaaagtgcctggagctcacctgggtgtgtttgtgaggccctttccctctctttaccccgcggaggagtccgacctggaagcctcctgctggacttctctactggactgagtgcccgggagtgccagagccagtcccaaaaaggacccaggagcggggacaccacggggaggcgccgccactccagtgtgcgggaccctggcacccccggcgcgttctccggcctccccaggatcacctgcacggggcggggccgggggcgggacgccccgggcgggggcgggatcccagggtggcagcgccgggcggcggcggggaccctggctgggagcgcggcggtgccggcgggaggccgagcggggctcgacagagcaggtaggaggcgcctggtcgccggggttgcccggggctgcggggagcgaggagcggtccggcccaggtgcggtggcttcctgtccacctgccggccgcgctgggcgaaggagggcccgggggtggggacgaggggtccccagtctcacccccacatctgttggaggaagtgcctggggtctgcgcgggagggcgttggtccggggtggtgggagggaggctgatcatctccagtgggtcttggagacgaggtcgtttccttgtcccctccccacccaagcatctggcggaggggccgaggctcgctggaagaaaagggagtcgaccttgacccggcctggagataaaggaacttttacccacttggggccttatccgccccatctgttaaatgggcgccttgatgggtctgccctatgcagaggcccctccggaagatctgcgattcagcgagatgaaaacccacggcagagaaggagcccagggccgtagtttccatccacagcacgtttggaggggctcgggggtcgctcatccagcagcgctcctgaggaaggatgcagagacggctccagtcctctgggtatccttgtgggaggagatggctgtgtcaaatatgaaggctggattagagagaccaaggcagcccttgagtctgggagaagattctggaaggccccttggaggaggtggcatctgagtggggcagggaaaggaaaggtggtggttagggcagcgctttggagtccctgctttacccctcagccaaggccgtccaacagtctcgggcaagtccacacttttctctatgtttcagtt

SEQ ID NO: 1357 - DNA, 958 bp, Artificial sequence
  DNA replication origin
tgcagagacggctccagtcctctgggtatccttgtgggaggagatggctgtgtcaaatatgaaggctggattagagagaccaaggcagcccttgagtctgggagaagattctggaaggccccttggaggaggtggcatctgagtggggcagggaaaggaaaggtggtggttagggcagcgctttggagtccctgctttacccctcagccaaggccgtccaacagtctcgggcaagtccacacttttctctatgtttcagtttgatgtgctccttaaatgaaacaatttctctgacagattaaatcagataactcataaagtgtttaatacagggtgggtatatagtaggcactcaatgaacatgagctattaatgtctgctagcagctgcttgggggcagggatgatgcctatttggttcacccttgtatccccagcaccagcacggtgcccagcatgcagtaggtctcaatacatatttgtccaatgaatgaatgaatgcatatgaagtacaatgcttggcacaaatagtgaatttacagatggctggttctaagaggtgggtatggatactagagacagtggtctaggtggatggaacagttataagcagaagccaagagcaacagattataggcaccccctcttatggtgcatgtgtgtatgtgtgcatgtgtgtgtgtgtgcgcttgtgtgcatgtgtgtgcatgtgggtgtgtgcacgtgtgtgcgtgtgtgtgcgtgtgtgtgttggtggtggtagtagaaagtgacaggcacagccagagcaccgggatagaagagggcacataataccctggaatcctgagtcccatcagcccgtgggagtggatgatggggcaggaactctaggtaggccaatacctttactcatgtcctctaagtggggagaggggacagaagggcagccaagagacaccaaaggaccatgaatgcct

SEQ ID NO: 1358 - DNA, 969 bp, Artificial sequence
  DNA replication origin
gccgaggcgggaggatcagtgaaggttgggagtttgagaccagactggccaacatggcaaaaccccatctctactaaaaatacaataattagccgcgcgtggtggtgcgcacctgtagtcccagctgccagggaggctgaagcaggagaatcgcttgaacccgggaggcagaggttgtagtgagccgagatcgcgccactgcacttcagcctgggcgacagagcgagactcggtctcaaaaaaaaaaaaaaaagatatctggaagtagagcattctagattacatcaaagacgaaatagcgtgcatcaggtaggattttggcttttgttctaacaaaaatgagaggctgctggaaggttttgagaaaagtgtctgattaaggttttctaacagaactaccctgccggctacacttagagtagatgctgagtggccagggtagaagcaggaagaccacttagggggttagcgcagttcagggaagagacgatggtgccctgaaccacgatgacagcagggagggtttcttgatggtttgaaagccgaggtaaaggaaaggagtcaagagtaacacacgcttgcgtcctacaccaaaggaaagccactgcggtcagcgggagccagggaagaccctgggaagggcaggtggtttgtggttttggtggatggagggcgaaggaatcaggatttcaacttggggcacgtgggacggtcaagagagaagtctgagctggagatgcagggatgtctccagcacacagctagtgtctccagccacgagagcaaacacacacatactttcaggtgggctaagtgccatggaaaaaaagagaaaagggaggcgagagtgtgtgtgggggcgggaacgatgcaaaagatggccggaggaggcctttctgagaaagggacgccggctttccctccgagaaagggaagcgagaagggcgagaagcgcttgcgaaaaagctg

SEQ ID NO: 1359 - DNA, 1128 bp, Artificial sequence
  DNA replication origin
cggcctcgtgtcggccggagggggcgggcgcaacgacgcgcgctgcgtcccggcgctcggctttccctccgccggtcccgccctccgtcgcggcggcgcggtgtaccctgggatagggagcgatctccgagcgaggcggcaagatggacgcgggatttttccgcgtaagtagaagcgccgggcgccggggtgaggccagggacttctcggtaaggcctggtaggagaccttagcttggcacagggtggccagcgaggggagcttcggagatcttaaggattcctcctagagccggcgcaccccccccccccccgtgcgctgcggcggagaccggtgcgcccctgcgcagtctcctcctccggaatggtcccccctacgcggcggcgacggtggccggaaaatggcggcgggaatgggccgggatggtacctcgctgcccgcctgcctggcggggcctgcaggccgagcgccgtgcgtgccgccgggtcctggggcctagcggagccggaggaggaagtcccgagtgggaggccaaaggaaagccctaaggtcactggtggcggcagggcagggagaatatggtttgggggtacatcttgggagagcaccttaggggagggagaacaggaagaagcattcagcggctttttttgaaaaagcgccctccccgccccccaacgtcctccctccaggtcctaagccttcgtggaggcgccaggtcagggttcgcgggagctcccgcccaatttgatatcccttcagggagggggacgtagataacttgttgggacaatgtgaatttaaggttctgtgagggtagagggtgcaacgaaaactatgcgcgggtatggaggcaggttgtggagtgattcaattccttcccgccctccacatccctcaccacccgccaccatcgtgttttactcttggagtccgctggtgaaaggtaactcttacctaggctctgccagcgtcgtctgcccatcgcctgcaggcagggaagttactccgtcgtagttggttctcggggcccacactttatcaggctcgtgctggagcctgtgtgtcccatagtcccctcctgtaggaaattagtactagatcaagatctagaagggacacaggact

SEQ ID NO: 1360 - DNA, 1193 bp, Artificial sequence
  DNA replication origin
caggtgcttgcaatcccagctactcaggagactgaggcaggagaatcgctttaacctgggaggcggaggttgccacgagctgagatcatgccactgcactacagcctgggtgacagaacgagactccgtctgaaaaaaaaaaaagtaagtagaatttgcggggggagatgaaagaggagatgagagtgggttgaaagtgggagagggtctggcaacctggtgggcagagggagccaggaaaggaaagaggaccagcgggccaggatggctgaaggactcctgagaagaatgaacctgatgttcagttttaagttgtctgtacacagctgcattgcaatgcaactcccccatccaccatccacaaatcagtaaaggtctaccacatcttgacacatggccttggagaaaatcaagcaaaaagggctatatgttctatccctgcgctgccagtgtgtgtgtgtgtgtggggggggggggggggggtggagggggagggggggtggtggtggaagggccctcaagggagttgacagctgaaggagatcaagaattcagttgcaggccggacgcggtgactcacacctgtaatctcagtgctttgggaggctaaggcaggtgaatcatgaggtcaggagtttgagaccagcctggccaacatggtgaaatcccatctctactaaaaatacaaaaaaatagctactaggcatggtgacagatgcctgtagtcccagctacttgggaggctgaggcaggagaactgcttgaacccgggaggcagaggttgcagtgagccgagactgcaccgctgcactccagcctgggcaacagtgagacttcatccccccaaaaaaaaaaaaaaaaaatggaattcagctgcagcaggttatacagaaggaagagaggtagaggctggctaggagaaatggacctcctccccaaaagtccccagagagattgggaggtgcggtggttataaaacacggccccacaattctttgacatttctctcatcaagatgtggggttttgttttttcttttctttctttttttttctttttgagacagggtcttgctctgtcacccaggctggagtgtacaatcatggctcactgccacctcaacttcttggactcaagcggtcctcccacctcagcatcccaagtagttgagactataggcatgcaccaccatc

SEQ ID NO: 1361 - DNA, 1331 bp, Artificial sequence
  DNA replication origin
ctcaaaaaaaaaaaaaataaataaaaataaaaaattgagtgcttaacgtctgtcaggcactattctgagagctttatgtgcatagattaacactcactgcactgcagcctgggtgacagagtgagactgtctcaaaataagctgtatagctgggtgcagtgactcatgcctgtaatcccagcattttgggaggtcaaggcgggtggatcacctgaggtccggagttcaagaccagactgacccacatggagaaaccccatctgtattaaaaatacaaaattagcagggcgtgatggcacatgcctgtaatcccagctactagagagaatgatgtagaattacttgaacctaggaggcggagattgtggtgagctatcatgccactgcattccagcctgggcaacaaaagcgaaactccatctcaaaaaaaaaaaaaaagggccgggtgcggtggctcacgcctgtaatcctgtgtccagaattggtgggttcttggtctcactgacttcaagaataaaaccacggaccctcgcggtgagtgttacagttctcaaaggcggcgtgtctggagtttgttccttttgatgttcagatgtgttcggagtttcttccttctggtgggtgcacggtctcactggctcaggagtgaagctgcagaccttcacggtgagtgttacagctcttagggctcttaaggtggtgcatctggagttgttctttcctcccggtgggtttgggatctcgctggcttcagcagtgaagtcacagaccttcatggtgagtgttacaactcataaaggcagtgtggacccaaagagtgagcagtagcaagatttattgcaaagagtgaaaaaacaaagtctccacagtgtggaagggaactccagcgggttactactgctacctcaggcagcctgcatttattcttacctggccccacccacatcctgctgattggtccattttacagagagccgattggtccattttacagagagctgattggtgcgtttacaatccctgagctagacacaaaagttctccatgtcccagctatattagctagatataaagtgtcaacacaaaggttctccaagtccccaccagagtagctagatacagagtgtccattggtgcattcacaaaccctgagctagacacacggttctgattggtgtgtttacaaaccttgagctagatacagagtgtccattggtgtatttacaatcccttagctagacataaatgttctccaagtccccaccagactcaggagcccagcgggcttcacccagtggatcctgtaccagggccacaggtggagctgcctg

SEQ ID NO: 1362 - DNA, 1662 bp, Artificial sequence
  DNA replication origin
cacctccctcccggacggggcggctggccgggcagaggggctcctcacttcccagtaggggcggccgggcagaggcgcccctcacctcccagacggggcggctggccaggtgggggggctgacccccccccccggacggggtggctggccgggcggggggctgaccccccccacctccctcccggacggggcggctggccgggcagaggggctcctcacttcccagtaggggcggccgggcagaggcgcccctcacctcccagacggggcagctggccgggcagggggctgacccccccacctccctcccggacggggcggctggccgggcggggggctgacccccccacctccctcccggacggggcggctggccgggcgggggggctgaccccccccacctccctccccgacggggcggctggccgggcggggggctgacccccccacctccctccccgacggggcggctggccgggcggagacgctcctcacttcccagatgggggggctgccgggcggagacgctcctcacttcccagatggggtggctgccgggtggagaggctcctcacttctcagacggggcagctgccgggcggaggggcttcctcacttctcagacggggtggttgccaggcagagggtctcctcacttctcagacggggcggccggacagagacgctcctcacctcccagacggggttgcggccgggcagaggcgctcctcacatcccagatggggaggcggggcagaggcgctccccacatctcagacgatgggcggccgggcagagacgctcctcacttcctagatgtgatggcagccgggaagaggcgccgctcctcacttcctagatgggatggcggccaggcggagacgctcctcactttccagactaggcagccaggcagaggggctcctcacatcccagacgatgcgcggccaggcagagacactcctcacttcccagatggggtggcggccgggcagaggctgcaatctcggcactttgggaggccaaggcagacggctgggaggtggaggttgcagcgagccgagatcacgccactgcactccagcctgggcaccattgagcactgagtgaaccagactccgtctgcaatcccggcacctcgggaggccgaggctggcggatcactcgcggttaggggctggagacctgcccggccaacacagcgaaaccccgtctccaccaaaaccagtcaggcgtggcggcgcgtgcctgcaatcgcaggcactcggcaggctgaggcaggagaatcaggcagggaggttgcagtgagccgagatggcggcagtacagtccagcttcggctccgcatgagagggagaccgtggaaagagagggagaccgtggaaagagagggacaccgtggggagagggagaggaagagcaatacaactattcttaacccttgatttaaatcttttggggaaggggatgtatgaatgttcttcacctcagacctgtttgctaaaggtgaatagacattcctgaataaaacagagctttctactcatcacggctcttctcagccctctccactatggaaaataagccataaagtcatccaggagagaaacctacaaacaactcttcacttagcaagaacagacaccgggccacagataattg

SEQ ID NO: 1363 - DNA, 967 bp, Artificial sequence
  DNA replication origin
gtcagccccctgcccggccagctgccccgtctgggaggtgaggggcgcctctgcccggccgcccctactgggaagtgaggagcccctctgcccggccagccgccccgtccgggagggaggtggggggggtcagccccccgcccggccagccaccccgtccgggggggggggtcagcccccccacctggccagccgccccgtctgggaggtgaggggcgcctctgcccggccgcccctactgggaagtgaggagcccctctgcccggccagccgccccgtccgggagggaggtgggggggtcagccccccacccggccagccgccccgtccgggagggaggtgggggggtcagcccccagcctggccagctgccccgtctgggagggaggtggaggggtcagccccctgcccggccagccgccccgtccgggaggtgaggggcgcctctgcccggccgcccctactgggaagtgaggagcccctctgcctggccaccaccccgtctgggaggtgtgcccaacagttcattgagaatgggccaggatgacaatggcggctttgtggaatagaaaggcgggaaaggtggggagaagattgagaaatcggatggttgccgtgtctgtgtagaaagaagtagacatgggagacttttcattttgttctgcactaagaaaaattcttctgccttgggatcttgttggtctgtgaccttacccccaaccctgtgctctctgaaacgtgtgctgtgtccactcagggttaaatggattaagggtggtgcaagatgtgctttgctaaacagatgcttgaaggcagcatgctcgttaagagtcatcaccactccctaatctcaagtaatcagggacaaacactgcggaaggccgcagggtcctctgcctaggaaaaccagagacctttgttcacttgtttatctgctgaccttccctccactattgtcccatgaccc

SEQ ID NO: 1364 - DNA, 947 bp, Artificial sequence
  DNA replication origin
ccagccgccccgtccgggaggtgaggggcgcctctgcccggccgcccctactgggaagtgaggacccctctgcccagccagccgccccgtccgggagggaggtggggggggtcagccccccgcccggccagccgccccgtccgggagggaggtggggggatcagccccctgcctggccagccgccccgtccgggaggtgaggggcgcctctgcccggccgcccctactgggaagtgaggacccctctgcccggccagccgccccgtccgggagggaggtggggggaacagccccccgcccggccagccgccctatccaggaggtgaggggcgcctctgcccggccgcccctactgggaagtgaggagcccctctgcctggccagccgccccgtccgggagggcggtgggggggtcagccccccgcccggccagccgccccatctgggaggtgaggggcacttctgccgggccgcccctactgggaagtgaggagcccctctgcccggccacgaccccgtctgggaggtgtgcccagcggctcattggggatgggccatgatgacaatggcggttttgtggaatagaaaggcgggaagggtggggaaaaaattgagaaatcggatggttgctgggtctgtgtggatagaagtagacatgggagacttttcattttgttctgtactaagaaaaattcttctgccttgggatcctgttgatctgtgaccttatccccaaccctgtgctctctgagacatgtgctgtgtccactcagggttaaatggattaagggcggtgcaagatgtgctttgttaaacagatgcttgaaggcagcatgctcgttaagagtcatcaccactccctaatcttaagtacccagggacacaaacactgcggaaggcagcagggtcctctgcctaggaaaaccagagacctttgttcacttgtt

SEQ ID NO: 1365 - DNA, 1202 bp, Artificial sequence
  DNA replication origin
ccggatggggcggctggccaggcggggggctgacccccccacctccctcctgggcggggcggctggccgggcagaggggctcctcacttcccagtaggggcggccgggcagaggcgcccctcacctcccggacggggcggctggccaggcggggggctgaccccccacctccctcccggactgggcggctggccgggcggggggttgacccccccacctccctcctggacggggcgactggccgggcagaggggctcctcacttcccagtaggggcggccgggcagaggagcccctcacctcccggccggggcggctggccgaccccccccccccccccccgcctccctcccggacggggcggctggccgggcagaggggctcctcacttcccagtaggggcggccgggcagaggagcccctcacctcccggacggggcggctggccgggcagggggctgaccccccccacctccctcccggacggggtggctgccgggcggagacgctcctcacttcccagacggggtggttgccagacggaggggctcctcacttctcagacggggcggttgccaggcagagggtttcctcacttctcagacggagcggccgggcagagacactcctcacctcccagacagggttgcggcccagcagaggcgctcctcacatcccagacagggcggtggggcagaggtgctccccacatctcagacgatgggcggccgggcagagacgctcctcacttcctagatgggatggcggcggggaagaggcgcttctcgcttcctagatgggatggcggccgggcagagacgctcctcactttccacactgggcagccaggcagaggggctcctcacatcccagacgatgggtggccaagcagagacgctcctcacttcccagacggggtggcggccgggcagaggctgcaatctcggctctttgggaggccaaggcaggcggctgggaggtggttgtagcgagccgagatcacgccactgcactccagcctgggcaccattgagcactgagtgaacgagactccatctgcaatcccggcacctcgggaggccgaggctggcggatcactcgcggttaggagctggagaccagcccggccaacacagcgaaaccccatctccaccaaaaaaaaacgaaaaccagtcaggcgtggcggcgcgcgcctgcaatcgc

SEQ ID NO: 1366 - DNA, 1458 bp, Artificial sequence
  DNA replication origin
cgtggccccttttcctagtgcccaggtggcccctcccgcggtcggcgctccggcctgtgccgggcgtccaggagggctcgctcgggctcccgtgcgcgctctcagaagcagggaactggcgcctggcgcggcggcggggacgctctcgagtccccaggcagtgatcgggggcccccgggggaaggacgccgctcggggccaaccgcagcggagccctcgccctgccgcgacccaaccgccgcccagccctgtggttcgcgggcgaagcgcttcctctagctgccggtggccggccgagaaccagggacatgcagaagtgccagcgtcgaggcccacgtgcgacctgacctcgcgtggacattggctggctccgtcacacccagaccgctggcacttcccaccccaccccacctagggtgtgagcgggtccctgccctgccccgccgggggaggcgcggaggtgtcggttcgcagcggcgccggggagcgtccgttcgacacaggaaggagggaaggaggccggaggcgccttcgcagcgcgcagcagccctgacagatctgataaagaggaaggaagccgacaacgctgctgatcgggtctggcagctccccaaactgacgaggtcctgcagctgtcccagccctgcttgcagaagtggcgccgaaaggaggggaaccgcggcccctgctggccacttcggaaccgcacccgagtggtgacaggaaagcgagcaggggctttagggacaaggccggctgatgcctctcgcagcaggaggtgggggatgcagggcccctctgggcccgagacctctacctcctgcttggtgcgagagacctgcccctcaggacaaaccaaccaaacgtgctcttggccgggcgcggtggctcacgcctgaaatcccaacagtttcggaggctacgacaggaggattgcttgaggccaggggcttgacaccagcctgggcaacagagctagaatcctgtctctatttttatttatttatttttttaaagaatctatatgttccagctggacctctgcttacctggcaaccaactaccttagttgtcaggggccagggagccaagtccactcttttaaggaggaaaacagacacacttttaaagattgctgagcactatctgcatattgctatattgcctagctttgactgtcatttactagctgtgggattttgagcaagtttcttttcttatttagagacaggatcttgctctgttgcccaggctggagtgcaatggcacaatcatagttcactgcaacctcgaactcctgggctcaagcgatcctcctgccccagccacccatgtagctaggaccagaggctctcacaaccttaatttttttttttttgtagagacagggtcctgctatgtttcccaggctcttgagcaagtttcttaacctccacatgcctcagtttcctcacccat

SEQ ID NO: 1367 - DNA, 978 bp, Artificial sequence
  DNA replication origin
gcaggaggctgattccccacagaagtatgggatgagacggccaggatctgggccgggggcagtatcccgggccggggtgggggtggtaacctatgcctctgtacaaggatgtggctgcacagatgcagccagaggctcccaccagctgggaccaccctgggaccgagaccaccctggagcgcaggtcccattcccgcccggagcctcggagccggcccatcactggtcttgaaggttgttagggtccccgcctccagcgggaggagtccaccagggcggtcagtagggccgccacacggcctcatccatgcggcctggcgtgctcagggccgtgggtgagttgctgtggctgccgtcggcctccacgccatcactctggccgcccaggctggggttcatgaggttgccggcggcgacagaggcagcgctgctggtgcaagaggccagcatgcgggtaggtgagcggtcgcccccactgctgctgccggccaccatggagaactggtaggagccagaggatgtcccgtagtagaggtggtagggggacgggttggcctggaagggcccgctctggttctgcggggcccccgggtagggtggcgggaggtaggtatggtggaagcggctggtggccggcatgcccgccacgctgaggctgctgatgctcgtgcccgagggcgtggcgctgtaggggaaggcagctgacatggccccgggataatgcatcctggggtctgggaagcggctctccgtgagggttggcagcgtggggaaggagcggtcaaactggcgggggtcggagaatgggttcagttccgaggtgcctggaggacagcagggaagaggtcagttccagctcgagacaaccccaggagggcttcctgaagaatgaccttgggctctggttcccaaggcccatctgggggacccctagttctagacctggctctcctcttcctgccctaggctgcccggggc

SEQ ID NO: 1368 - DNA, 1373 bp, Artificial sequence
  DNA replication origin
tccgttcggatccacgcccagggccagagtacgctgctgagggaaacataccccagctgacttgggaagaccccaaagccccgagaagttccaagtcccagccgaagtcacacacacctcaggctcatagctctccgtcctcagccaagcctcggcgtggcaggcagagcccactccggctagcaccggcccttatcctttggtgggtgacacagaggggttgctgggctggacagactgcacctctggaccactgctgggggctcatccacctcccccggctgccagagtagaagggaggccctgcaccagggcctcaacttggcagggccctgaatgagccagttctcctgggtacccagagtaagagacaccacagccacagtggccttgcaaagcctcatggacccctgctctgtgcccagtgccattctaagtactcgatgtgaattaactgaatcctgatgaactgttatcgtctcatgttttatatggggaaactgatgcgcagagaggttaagtgacttgcccaaggacacaaagctagtaagtgtccaaaccaggataactgtccggctccagaagccacacagtaagccttgatcctgtgctgcctcaaagacgggacagctccctctcaagtacgtgttggggctcaggaccagaggccctaggattgtgtgccaggtccaatgtgctgtgtgaccctgagggaagtgcctcaccctgtctgggcctcagtttccccatcaagggtgttagactcaatccctgagcccctttgaatgctgaggttttgggggtctgtgatgacaaaagttggggacagaggatggaacacccttgccttggagcccattgagaagccacattcctgggggagcaggggcagagtctgggctggacactgtgaccaggttggggtctgggtccccaagtttgtctgactgctgtctcactttgctgccaaggcaggttagggtggcatccagtcactgtgtggccacgagtcggctccagagacacaggcccagggtgaggtggaggccagagctcctgtgaactcagtgcccacaacccaggtgtgagcgcacagaacctccgcgtgctgcacctgggcaggagaggcacgtgtgtccccagcagaggccttgtgatgagaaccagtcctttctctgccacagagactcagtcttgctctctctctgcctccattttcttgtcttcaaaagcgggttccaactcccagtctcacacggtcattggagccctttacacatccacggccttcccagctgttaacatgggccggtggggagaggaacctgcctgggcagggctgctgggaggcctgagctgactctgccctcagc

SEQ ID NO: 1369 - DNA, 1102 bp, Artificial sequence
  DNA replication origin
cggccgaggaggcgcccgcgccggccgcccccgggggaagccgcgccgtctccgcctgcccggcgccctgacggccgctgttatgcgtattcccgtagacccaagcaccagccgccgcttcacacctccctccccggccttcccctgcggcggcggcggcggcaagatgggcgagaacagcggcgcgctgagcgcgcaggcggccgtggggcccggagggcgcgcccggcccgaggtgcgctcgatggtggacgtgctggcggaccacgcaggcgagctcgtgcgcaccgacagccccaacttcctctgctccgtgctgccctcgcactggcgctgcaacaagacgctgcccgtcgccttcaaggtgagtgcgggacccggggcgggagggcgccggccctggggctccgggcgtctgagctgcgggagccagagcctcgggagcagtggggatgggaggtgcccgagacgccgcggcgacacccgggcacccggttcagtctggctgcgcgctcggctccgggacctcggcgttccgttttggatgcgccctgcaggaatgacttttaacggggttgccccgctccacctgggttttggggcgccttgcgtagagacgttggtgcggaaatgggcggatggggttttgcgcccccctaacccggatcgctcagatacagccctgcgggtaacggagaagaggatcccgggacaggggcaaggacaccgcgggtggggtgcgaacggtgaaagggcctaccctccgcctccagcacccctcctcccgcgccgcttcgcaaaagcttcctgctcacaccctcgggcttccgaaattttaccggacggcgctaggccgggatcggggcactgctctccagacgtttgctcggggatattatgcgtcccgaatggcgagttgagattgggggacccctaaccctggcagcccccagccatttagaggacctttttctttatgccagggagtaggcgactgtttcattttcatttttttaagggggcagcgagatgaaacgaaaacgcctcggttttcccctaaacctctcacagctgccgtgagaaaagggcagggcaggaaggg

SEQ ID NO: 1370 - DNA, 1269 bp, Artificial sequence
  DNA replication origin
cctcagggcgcagggggcggcgcccggccactactcgccagggcccgcccgctgcgaggcctcgctggcccgacggccgcccgcagcctgcccggctagtcccgcatcctcggcgcgcggccccgcgtgcggccgcccctcgtggctgtcccggctgcctgggccgcggcggggcccgcgcggggctgtgccgctgccgccgcctcccgccccgaagctcgcccgcggccgccccgactccgcggccgcagccccagaacaaatcctccagaatcaagtggcggggccgcggccgcccgcgcggggttagtacccccggggcccgcggggcggggctggcggagcgacgcgtcgcacagccaatcggcggagcccccatcgcgggcacctcggtggcgttcgcggggaggaacggggcctgccggaggccgcccaacggggaggggcggaaggcgccaccccgcggaggaggccccagtgccacagcccagggcccccgagagctctgggagcccggggcaaatgctagaaatttgcttagaacgtccgggtcccacggaaggcgcccttgccgccctctctcgggtcgtagctccctgacgctggggcgcaaccccttcgctcctcctccccgctggccgcggccgggcttccccagctcttgctgcttcgggcctgtgacttctgcaaccccgggctgggggccgcggggtctcagggccggtgacgccgcactgggagccgccccaaagaggttactcacctccctcgtcccgcacattattctgacccaagagcctccaccccacacgggattttgcgcgtcgtccacgcccggccggcggcctttgctgctcccagccctgcgcggctttggtcccagcctcggtggcccctgtgccaaaccggggacaggcggaagggagtctcctagggaccctaagtagcctggggccaacaacccctttcctctctgctctcccctcaaaacaagtttcaggatcttgcaggcctcgcggcgtcgttcttcgttgtggcggcctgtggctctttgaaaaacacgacgaggcctgcaaaatgcgtttttctttttttcctttacgcatgtaaccacggtcctgcatcgtgaaacggtacgcgcgtcggtggcaaaagaaaaacagcagtggctgcaaagctaagggccctcgctttcagaggagagaattttctttctccatgcgggtggaaagtggcctctgcgggtccaaccccacttcttcttgggcc

SEQ ID NO: 1371 - DNA, 1027 bp, Artificial sequence
  DNA replication origin
ccaggcggccccgcgaccttggtctggggacccaagggcctgcacccgccccccctccccccgccgccctggtcccttggatctggtgcccacggggagccagcgccctacggagagccggagccgtgccgggccctgcgccaggtgccagggcccacaagagtccctcattctctggaaacttgtctgtgaacccatcgtaagcggagagggagaaatcaggcggaggaacaagcaaagggcacggtgcaaaccgaaaccattcgacaaatggaatttaccaccacctgaaacagcgggtcatggtcccgcaacctgctcgagggcagcacgtgttgcccgcccccggccagggccctacctggccacgacgcgctgcgccttctcggagacgttcccggaggtgggagcgcccaggctggatcactcgctttcctctagttctgctgctcgtgccagcgcgtccgagggcgcgcgggcctgggtccgcaatcgacaactgccaggcgcaggctctcttaaaaggttcagtaagggacctttgccgtccttcctttcgacacggcctgagggcgtgctgtgaggtcccgaggtgggtaggggccagctctcccggtggtcggggtgagtccagagtccttcgcccctggagcgcacgcggggcttgatttcgtttggcaacgacgaaatggcgcgcgctgagcaggggtcagatccatgatgagatcttgcggccaccgtcggatcctaagcttctttgcttccgaggcttggaattcattgttttgcacctgtcgagagccggaggcaacgaaaatctagccccgtctccaaagcggcggggaggctcagcacgcgttcgttccccagagtctagggaggtgtctggggcgataattcggaatgattgtggcttgatctttcccgttgccctcccaactgtagccggcccctaggtctgctcgacagacttaggaggcgggagaggaaggggtgatttgcagtgaagcccaggagaggttgggcc

SEQ ID NO: 1372 - DNA, 777 bp, Artificial sequence
  DNA replication origin
gcccttggtccccccaaaaggagttcctgaaaagtctgtgtctgttgcagcaggtgcggcctgtgaagtgtgtgtatgcttgtgtgagggtggtgtgtgttcacatgcacatggtgggggtgggcacacaaggcgggaggcctaacatggtggcagggacagactttggttgctgagctgggacagcctgtgacagaggccccagcacacccgcaggtcttaccagaaaccctcagatggtgctggtctgacctgaaggtgggcacatgcagggaaggggtacatgcaggacaggggtgcatgtgggggagggccatgtacagggcaggggtgcatgtggaggaggggtacatgcaggatgggtgcatgtcggggagggtcatgtgcaggacggggtgcatgtggggggtgcgtgcaagacagaggtgcatgggagagaagggtttgtacatggcaggggtgcattgggggtgcatgcagggcaggtgtgcatgtgggggaggggcatatccaggacaagggtacatgtggggaggccacagggctcaaatgctgtcagggcctctgggaagctgggaccccagtgaatgcttgaggggagccaactctgcctgacctcctcttatgattgtctatttaaacaatactgtaaattaatcacattaatcgaacccacctccctgcctcctgctgcttgcccctgtgatacaaataatatgagcacaatgaaaaatcttggaaaatacagaaaacacataaaaaatgttaaagcctgaa

SEQ ID NO: 1373 - DNA, 680 bp, Artificial sequence
  DNA replication origin
cttagccgtgggcaggcagtagggagccacgggagggtattgagcaggggagaggcaggctccaatttgcatttccgaaaagtcacctgggtgactgcagggtggcactggacggggagtggtggggagagaggattggtggcaggagatgtccaggcttctgtgatgtccaggactggggctgaggcctgacacgggacagtggctttgtggaaaggggagagatggatttaagaagtgtttagaaagctgagtcaaatgagtcaaggctggcccagatttgtggcctggagactggacggtggtgaggagcacagcagggcctgttgaggtgtggtgggatgagggtggagcctttaggaacatgggggtggaccctgttaggtcagagtgtgaggggttcacactggccctgccatgtctgaggaggtctctcctacagctctggagcccacgagagaagacaggagtttgggcatccatcagttgtccagacgtggccatggaaatgttgtgcctaaggagataggtcagagggcaggaagctgggatgtgtcaggctttgagggtggggcggggtgagcatagaaggtgactgggtgggttcagggatgaggggagtccaaggaggcctgtaaggaaggggtcataaatagggtgcggtgaccaggatccgctgg

SEQ ID NO: 1374 - DNA, 906 bp, Artificial sequence
  DNA replication origin
cagcactggctacagccactcccgctgcaggcctggctcagattccaggtgacccccacaagggagggtttgctccatggaggctggcgtcctctcccaaactctgagagactgtggggtccctgagggcaggggcagagttgtccccatctttccccaggggctctttaataaagaaaggtagcagcacaacaatagtatgggtgttggaacctgctggggtgccctttgtagggagagcgggggtagtttgtttgggactgggttgggttaaaaggagtgagctggattaggaggatttatcttaaatgtggtggatttaagttgagttaggcccaaccacccaggatggttaggcagagttatctgggttcaactggattaaactgagctagttagattgggcttgttagtagagtggggctggattagttgggttgtcctggttaggtgaaatgacctgtgtggttgaattgggttgggttatttggactgagagagccaggttggtttgagctgggtaaattgagttggtttggcctagttgaactgggttttggggttggctttgtttgggttagttcagttgggttggtttgggctggtttaactggagttgtctggttagttgcattcagcaagttagttgtgttaggctgctgagttgagttggattggccaattgggctggttcagttgagttgggctaatcagttgattaggctggataggtagtggggcagggctccttgggttggggtgggcggttaggtttggttagatgggttgagcccattccttgggttgggtttgttgcttgggtgactgatttgggttggcttgggcagggttagttgggtagagctagtgggatgagataggtcacttgggtttctagaactggac

SEQ ID NO: 1375 - DNA, 1343 bp, Artificial sequence
  DNA replication origin
gctgcccattgcacagaagcagacatggagtctgagaggacagtggcctcgtgaggtggccgagctgggcactgcgttagagacagggagggggcagcttctgccacccacatccccagatcagtcggtccatgagtcctcactgagcctggtcctggctggatgctctgccaggcacacagggacagcccagcccagggcctccatgttgcttcccacgctaccaggcccgggagcaccaaactcctcgagtaccaggaagcgagcccgcacacaccttagctgcaggtcctagcacccccgcctttcccagcctcatactctctggacagacaagagactccccctcaccccaggacctacagcctacggaggcctggagccacccagcctgggccgcagggacctcagggagggtgcagacgggggacggagggcacaggccagggccctaacaccaggcagagccgtccacagtgggatcgcccacctcgttggctgcctggagcatggccaccctgtcctgcatgtgaactcgggagtggggagagcagagagaggcgggggccgtcattcagcctcttggaactattcttgtcagtgcctcgttcctggaagcctctttgggctgggccctgtgtacaggcagaggttggtgtgggaggggaaggctggggtgtgtgtctctcactggaagcccttggaaaacccctcccctccttcggggcagcccctgccctcaatttgcttacagtctgttccaagcttctcaatccatcagatcaactagaggaactttataaaatgcaggttcctgggctccttcccagtctgctgaatcctaatctcagggctggagccctggaatctgtattttttcaaagcctcgagacctggatgagaaggcagcactgagatcccctggcccaggttctggcgactgctcatgattattttttggaccccgtcggtgggatgctgtcttatttaatcccatgtccctgcaaaggatccagtagatgccaaatgaatgtttgctggcagtactggtgggttgggcagggtatggactcacctagaggtatgcctggacctcccccggcctgctgtgtgaccttggacaaatcactgccctctctgggccttggcttagagggtctccaaaggcagatatttagtgagccactgatggtcaccaagggctgcccgaacatccaggaggtgatcttactcccagcgtgggagggaaccagactggcctccaaggcatctctgggattcccttagtttgccttctgaaaaatgggcccgggccatggaggcatcctgaactgcactgctct

SEQ ID NO: 1376 - DNA, 852 bp, Artificial sequence
  DNA replication origin
ctttgtttcctcgactgcaaaatagggataataatactacccacctcatagggttactacaaaggttgaattagttcatatatctaaagtaattaaaacagtgcttgatcagtggtgcataggtgtcagctaaaataatatatagtaaatatttgttgagagatagagggaccaatatgtacatttctcctaccatccccaagggggtctgatgtgaaggtcaggtcagttaagctcattttgcaattggcattttccattcggaatgtcctcacctgcctcagagcacagaggttcattttcacccacccttggctggtcccacagggttctgggtgaagcctgagctgggtatcccaattaccagcagggtaatggtagaagcaagatgattagctcagtctctaatgcagaccatgtgtcaatggcggtgctggcagtgcttgtggttatggtgttgatggtggtggtggtgatgatggtgttgatggagatactggtagtctgatagtagtgctggtgtcaatagggatggtggtgatggtggtgttgatagtgatggtagtgattgtagtggtgatgacgttgatgatgatgctggtaatcagatagtagtgctggtgtcagtagtgacggtggtgatggtggtagtaagagtggtgtcaatagtgatggtggtgatggtagtggtggtggtaatgatggtggtgctgatgcttgtaatggtgttgattgtggtagtgatggtagtgctggttatggtgttagtggtgatgatggtggtgttggtggtggtgttgatgatgtggatggtggggatggtgttgatagtggtgatggtggtagtggtgg

SEQ ID NO: 1377 - DNA, 1329 bp, Artificial sequence
  DNA replication origin
ccatgccccaccacggagctccactcatcccccacatcccagctccagggccacgcctttggaaaggcaccctgccccgaacccttgatgcagtgaggccccccacatgtctcttcctgacacccattcctgcttgtcataattatagtcattgtcgatacatttgggattctttggttcatatgtttctctctgtgctctacagcaggctccaagagcacacagggtcagctcttgttgtgtttatagtagcatttgataataatgaaaggaagggagggagggagggaggaaggaaggaaggagaaaaggcgggggaggggaggggagaaaagggaagggaggaagggagggatggaggaaggaaggaaggatggatggatggatggaaggaaggagaaaggaggagagggagagggaagggaaggaaaaggaagggaggaagggagggagggaggaagggagggagggaggaaggaaagaaggaagaatggaaggaaggatggatggaaggaaggacagaaactgagatttgggaaatagaccatcaaactcacacagaaaataacaccataaaggcaagatgattgcttgagttgagttccaaatttggctttgagcttcccagcagccaaagcagaaaggaagatatggtcagtgacatgagtgttggtgtcagaaagggggaacccatcagttcctcaaggaagtccagctgtttgtgggagagcgcatggtggcagggcggctggggtcctctgcccccctctgtgtgtgcactcatggctttctcgaggcagtctgtgggtaaaagctgagacgctgctgagcgacggtgtctgtgcagagagctgaggcgacggaccacggctagcccaggggaatgggtgtgtggtgtgcccactcccctaccccatgtgctcccaaatcctcagtccatgggtcagggatgatcatcccagccggggagcccagctccatgcctggctcttggcaaagcttggctctcagaagatcttaggctgcgcctcaaggagtcacctctggccggggagaagggctacctgtggctgcagggtgtggagtgtggtggtggagggtgggccctggagtcagcctcattttcatgcctactccagctctgccatttcccacaagttccctccccttgccctgcttccttcctgctttgtggaatgggattgtcacagcaccgccctcgggacgacgctggaaggattgaatgagacaaagcacatccagggatgaacatcgtaggagcccaagacatgtcagcacttgttagggtcattataactagaggtgccc

SEQ ID NO: 1378 - DNA, 967 bp, Artificial sequence
  DNA replication origin
gcaccatggggccagcgcagggcaggctgggagctcactggccacaggggaggggaggggagaggggcgggggcctggggcctgggaggacgcacttgtgagcaggggggtgggcgggtgtgagtgtggaagtgggtgtgggcgccctgcgggtgtgaggcatgagaggcacgtgtgagtgtggtgagctggccgggccacacgcagcgtcacttgaaaagagcccaaaccgtgctgggtgcagaaaagctctccaggcatgctggctgttgttctcatctggttctcacaacagctccagcaagaaggaggcaattccgtgaaggaggcggtggaggctggcagatagggcttgccaggtctctcccgagagctcccgccgcagctgcagcaatcacgacacagatcatgatatggttagttcatatttaggaagtgactggtgggacttgagcccactgccaggcacggaggaggcaccggaagcatttgggttgaatttgctcagactctgaatctgtgctctggacaggcacctgtgcccggcccaggccctgcactcttttccagtggcttctcaggggtcggcctgcagcagccaggggtgggtatccatgccgtggcggagagatcagagttgcactgtggggagtggctttcttttgcctgcagctgctgcttggtgttctctgccgctcacggcctatgagcacagagattgtgtcctgctcttccgcctgctgcccacccattacatgtgcccatggaacataagaagagcaagtcatctatctgaggggcatacccgctgctggggacaggttcagtggagctcatgagtggtgtggaggggcagcaagtgcccagcagaccctcaggagcacctggatgcactttgagtttgggggagtcgggaggatgcagtctctttgcagcagtgccccccatgcctggacagaggccttca

SEQ ID NO: 1379 - DNA, 950 bp, Artificial sequence
  DNA replication origin
tgttcctgtctacttcctgagccaagaggcccaccatcatgcaacaagtccatggcccaggacatgcgggcatctatccagcattcatttactgagcacctactgtatgcagatcctgcagtgggcattgaggagacctcagagactagaacatgggtcaaggagacagacaagaaaatagacagatgtaacccccgtgatcagtgccaggatatggcctgcgggtgctgaggaaacacctggctcagcttggggggcaggggtgagagggggctggtcagccttccctgggctggggggtggtatttggtgcaaagacataaaagatgtctttgagctaatcagattcctttattcttttagtcaacaaatattaattgagcacatgctatgagcctagcgctggagatgatgtcaaaatggcagtgaacaaaatggatgaggttcctggagacagtcaataaacccacaagtagatgaaacggcaagtgttgatgggctcaagaaggaagatgatgcaggaacagatggatgggagggagaagggaggacaggcaggggctgtttgggatcaagtggtcagggtaagcctctgtgggaaagagcactgggcggaggcctgagggagtgagggagcgccatgtggcatctgagggcagggtgtcctaggcagcgggaacagccaggccacaggcctgggagtgtgcaagcatggcccacaggaggcagtgcagggcgtgtggcacagctggggtcgacgtgtgtgtcagagcaagtggggaggggaaaacgggaggaagggctgagtgggagcaggatggggaggggctttggaaggtaagaagactgggttttctcctggggccagtgggagctttggaagggtttagtgagcacttgtgcttctcttgctcatgccaaacagcgacccagatctcctgtcccacatg

SEQ ID NO: 1380 - DNA, 1562 bp, Artificial sequence
  DNA replication origin
ggcaacagagcaagactccgtctcaaaaaaaaaaaaaaaaaagtccctataaacttttagattacaacccaaagtacaaaataaataccacgtgtccatactgacacaaatagatgatggaaggaagacggaaggaaggaaggaaggaaggaaggaaggaaggaaggaaggaaggagggagggagggagggagggagggagggagggaggaaggaaggaaggaaggaaggaaggaaggaaggaaggaagaaaggaaggaaggaaggaaggagggaagggagggagggagggagggaggaaggaaggacggaagggagggagggagggagggaggaaggaaggagggaagggagggagggagggagggaggaagtatgcacagaatatctcagaaagcgcactctagaacgatggcatcagaggcctctgagagggactaggtgcttgcaggtccatggagggaggacgtggcatatccttttctacactgtgaattttgaacaaaaataatttaaaaagcagtattctgaagcaaaagtgacaaaaggttcatatctgcccagatataggcacccagatgtatatggataattatgttctgtaattttctgcatatttgaaagattaaaatctcaagaaaaggccctataggcaccaaggccctgaggcaggatgaagtgccgccactgtgggctggagagtggggccaagggacaaggtggcacaggatgagagaagtaggtggggactcgatcctggagccacagaagaccacacccttcccacacattccagaggctcccatccctgccagcctaatgccatgtctttctgaagtgctaacagggccccagagtctgcctcctaaatcacccagtaccagccctggcccgggctctgctggctcctcgacatgacaagttcattgttccccttcttccgaaggctgcttttccccaagaggcagctctgagcgggcaggtttctgtgggcagatgccctgaggcagggttcacaaaggcagtattgtgtggctccacagagcaggatcctcgccccatcctccagcccccacatcaaagaggaaagaaatcaaagctgcagcggcaggagaacacagcccatccctggtcccagagggagctctcgtgtggtacatttcatccctggcagatgaggaggtagatggaggcaggatactagcagtatgtggccagcaccggctgaacagaatgaccaccaggacaagagccaagtcgagggacagcatcatctccagggagcacagcactttaccatttgcagcacagcacgtgaaggcagggctggaactgagaggctcacggcagatgagaaaatcaaatcagagcgtaccaaggtcacagagctagctagagagccgaggctctcaggtcccctgcccagtgtgtttcccgggagtacaaggtggtttccacaccagcagctgcagacggactaatgaagacacaagggctagacctcccacctgcaccacttagtagctgggatctctgggtagtcaatgacctccctgaccttga

SEQ ID NO: 1381 - DNA, 1165 bp, Artificial sequence
  DNA replication origin
ccgactgcagtaagctccgccgccccctaaagcggaaccggatcaccgagggcatttacggcaggtgagcggctgcacccccactccgcgggcgcgggccctgcggtccccctccagctccgaggggcctggccccgttatgtaaccccgagtaggccgcacgcccgcgccgggggctctcctaaggagcgctggccccggagccgctggcccgcccgccggggtccgccccgggtgcgcggggcgtggcgagggtcggcccggccgggcgggcagggcgcggcgggcgctggctgagggagccgccgcgccgccgttggaagcgccgggcccgccggggggaggggcggagagcccccaaccagcccggcgttcctcagcatcccggccatgccgctgggccgggagggccgcttccgggacctctgactggccgccgctggcccccgagccccccggtggcctgggggcttgccggccggagccaggaggcgcgtggaccacagcgcgggggggtgggggaggctgacaaagttgagagcccactgtggcccctcgttcccccaagctgccagcatactggcctggggccatgctgtcacttctttcaccttctgcttcccatatgggatctcaaacttggcacccagggctgaagctgatacccccaaatcatgccctgtggccctgctccagattcggaagggtctgatgaccagtttttcagcaaatattgttttgacaattccaagcagatagcttgctttgaacgtttttaaaaagggattttctccaaactcttttttttttttttcatccgcaagaaaagcagtgtccctttaaatagaaattgaattcagtccaccggtagagaaagacaacaggttcatggggcaacttactatcatagcttccccaagtcgatttgtgtacgactgttattttctggttcttctcagaatgttacttgtaaatggtatttgccttgatacagatttcggtggagaagtaattagtttacaaagaagaattctcagcatgtggatgtaggcttaattgagtcctcatggtgttttacaattagcttctctagctgtgggatttcaagaaatatgtgaggtagctgatgacacccaagttgtcttaacataactgtacaccttgc

SEQ ID NO: 1382 - DNA, 1043 bp, Artificial sequence
  DNA replication origin
aagggccacgccgggaccggagcgccggtgaggccccgcctctgcccaacttggccgcactccgggcgcccgcggaggccccgcgcgcctctgcccgatcccggcccggcccggctgacgcgcgcacactcactgcggtgccggccaccgcccccccagctctgcttggccaagctggggctccggatcagcgcccgccccgccgacttgagcgcgtccatggcccgctccggccgccgccgccgctgccgcagccaaaactccgtcaggaaaaactttccgcccggccctgcggcgcgcgggctgcgcgctcctcccctcccagcgccagctccgccgcggcgtccgacggggcggggcgagagaggacaggccccgcccccagacgggccgcgcccccgacggccggtctcgccccgcccggtccctgtccaggctccaggtccaggcaccaagagtttccgaggccgcccgaaggcgccagaagatagcaaatcgcaagccctagacgcccccgctttcctccttttccccaatccccaccccgtaggggcctgagggcctgagagcagcggcctaggatttccagtgaccattttacagatggggagactgagggctcctccagtggtgaaagatcttgttcagggacaaaagcaatgcgatgtccagggcagtgggagacttaggaaatagtggaggctgtaagccagggatatccaaacttttggcttccttaggccacattggaagaagaagtgtcttgggccacacatgaaatacactaacactaacgacagctgatgagctgaaatatatatatatacacacacactcatgttttttgtttttctgtattgttttttttcccctgagacagagtttcactctgttgcccaggttggagtgcagtggtgcgatctcgggtcactgcaacctctacctcccgggttcaagctattctcatgcctcagcctcccgagtagctgggattacaggcatgcaccaccatgcctggctaatttttgtattattaatagaga

SEQ ID NO: 1383 - DNA, 1285 bp, Artificial sequence
  DNA replication origin
gtcccaaggataggcagggggaagaggagcaggggagaagaaagccaccagttaggagggagcattattaccaataatctccttgatactcctgccaggtaagagtttttatccccatgttgcagatgaggaaaccgaggatcagaaaggacaagtgacttgctcaagattgaagatggcaagagaaattctcttccacatccaaagcggctacctcttccacgtccccagattcagagatatttctttctagcctcccttcccttgccagccccccttccttcaaaaccacttccctgggggctgccccaccaccctccctccctcattcctggagaaaacccgcaggattctcccactggaacagatggccatctcagaagtcctggtcaaatcttgccagtttttaaagggtctattttgggatgcaatcagtgtgataaacggtacatcccctggcctagtggcccagccctaatgggtctctgaccccaccccccaccagcaggcaccaccccacattcccaatgccaatgccagtctcagctgggaggcggccacagctgaacaacagagtggggccagaggaggagggaggcgggccctctaggcccagacacgctggcactccttggaccagggagctcgggctcccctggcagagccctgtaaggccaagaggggatgggatgagggggtgctgtactgtcagttgtttcctgatgaggggagaagctgtggcccgaagtaggtggcagggaggtgggagtgtgcagcagtcctgggctctggctccaaaaccagcaggaaggtgtgtgtgaccccaggcaagccactctcttctccctcccaaacaacgagacctgcgctaggctgggtcttctggcttcaggggaaggtgccaggtgacaagttccctgagcgtaatcagagactgggggagagaaagggggggaggcccctcccagcctcccagacgccccagggagaggtggcggcgagtctgtcgtttgcctgggcacccaagggactctggaagcccgaggggaaaggtgcgagagaaaacaggtttcaaaaatagtcgggacgccaggcttgccacctggacccggctagaggaagggacgtaagggtctagatcgcctgatgtggggctctcccgaggcaccccaggcggggcctcgttcccaatttcaagtacgtacctgcgaccccgggctcacacctggatgggtgtctgggcacccggagtcaaaagttggcccggtgggtcgggcagggggcg

SEQ ID NO: 1384 - DNA, 1022 bp, Artificial sequence
  DNA replication origin
tttccccaaggagctggatgatggcctggatgaagcgttttcgaggtaatgctagcttcctgtgctgggtagggggcctggtgtgcgtgggctggccctgctgccctttctcctggggacctttcccctgattaagaacacaagccactcagaccccctccagagcaacagtcccatccctccactcaaatgcttccaggggcagggagctcactggggaggaaaccccttccagcgttgtccagagctgttagaaagttcttactgttgagtcaaaaactattcctggtggctgctctgccgcagtctgaggtgagcgaaacacactgcagctcaagttgatttcctccgacttgaggaggcgtggccttcaaaaatgggcttttttttttttttacaggctttgctccctccacaggtctgtgtttatgaacaggggaagggagaaagtgtttaatgaagctcgtgaagcgttccatagcagggaaggtcaggcacagtgaggaggtgttttggtatagcctttggtggcatttccccgttttcccaggggccatccttgtggccccctgcagcttggggacatgccactgagaaggctgtggctgaggagaggcctgggcaggtcagggttccgagccctgggtccccgtctgtcaggcctccctttctcacttgagaccctcagcagcctcctacagccctcccacatcaggggctttgtttggggttggagtcagcgatttttggtccagcgggtggggacagagtcagggtctttgccctcctgcctcctccttcctcttccttgcctccttcttgccagggactagtggaaaccccttggtccagcctggggcgagggcgacagtgacaccttccctgcctcactggctgacgacacctgccctctgaagaaaatcttttgtttgctttctccacattattttgagcatcatgtgccctttattaacaattttgaaaatcagcaaagcattaaacagaaagtaacaccatcctgt

SEQ ID NO: 1385 - DNA, 892 bp, Artificial sequence
  DNA replication origin
aaaggaaaaagggcggtggggggaaggggagtggcctggccggcagcgctgctgcacctggggtggtcagagttggacagagtgctggaggaggtagggaggccccagagaaagggcacctgagagggcaaagagcaagcgcaaagccccaggattgcagtttggaatgtgccaagggcaggaggaagtctgaggctggagaggagggaggaaggaggtggactgggaaatgggctcagagcaggtgcaggcctggaccacagggcggtggcaaggctcagacctgctgtgcagggctcagtgtggggtctcgaggacacgaaggctgcacagccaggggcaatgcagagactgaggctctaggatactgaggctgtcatccagggtcaagcccaagagagagcaacctccgggcttgcaagcgggcagatggaaggttgaaaaggcaaccccatgtcctcctgctctgttgtctgagcggggggcttccagatttgttgaagaaaaggatgtgtgcatggccagctgcctgggtttggtggtggtcccaaatctgtgtgtcgggagccctgtgggtgtctgtgggcctctggcagtagcctgagtcagagattggtgtatccccgtgtgatgtggagggctggtgtctcttggtccctgccagccgagcaagaggctgatgcagcgagtgttctgggcatgctatatcatttctctgggtgtgcatgagtgagcctgtgttggctccgtgggcctgtatgtgccaggagcgtgtagacctgaaggtctgtacatgagtcaagggtgagaggcctgtgtgtttccttgtgcgtctgtgggttcctgcttgtccgtagtgggcagcagtgaggggtgtctttgactttggcct

SEQ ID NO: 1386 - DNA, 1442 bp, Artificial sequence
  DNA replication origin
ccttccttccttccttccttccttccgtccttccctccctccctccctctctctttctttctttttctctctctttctctctctctctttctctctttctctttctctctctctttccctcccttccttccttctttctttctttttctttcttttcttttctttctttctttctctctctctttctttccttccttccttctttctttctttctttcgttttctttctcagagtcttgctctgtcacccaggctggagtgcagtggcacaattttggctcactgcaacctccacctcccgggttcaagcaattctcccgcctcagcctcctgagtagctgggattacaggcacctgccactatgcccggctaatttttgtattattagtagagatggggtttcatgatattggccaggctggtctcaaagtcctgaactcaagtgatttgcctgcctcagcctcccgaagttttgggattacaggcgtgacccactgtgtcctgctggaggcttgtttcttttcagatggttaggagagcacatgtgcctcgggagggttaaaggcaagttagcgagcacttgatgtgacaaccaatggggagcaggagtttctgagagcaggattcagggttgatttcctagaaggggttatggtgctaacagagggcaggaatggtctcgtgcgggagtgggaaggccccacacgggggactctgtgcctagctactggcaggacgtcccctgcacctctccaagcgagggctgaagagaaagaacctggagcagaggtctggaggaagccattgtctgcctgggcggaggaaaaggaggcagggagagagccagggctggagtgatgggcagggccaggctaagtatgagtttggggcaaggcctttgtcccctcaggcctccaagtccctgtcttaatgtgggtggttggagcaaatgctctggggtgaggcagcccgccagacctccctgcctgcatcccctttgtcttggtctctaacttgcctctgcaggctttcttctaggcccggcagagtccatctcctgggccagacccacttcggctgtccttctgtgtctgccaccctcccccaccccagacacctggagcccatcagagtgcctggcaccacagcagctgcatgtgcccatagaggggacagcctctctcacccctgcgcctcagacctcaccagtgtttccatcagacacagtaactgggcgcagggaaggcaaagaagggaagggaagcactctgctgtcatcagctccgcctcacctcggtatctgcagataatcactgagccattgggggttctgcagcataaactgggttactttcatctttccccattggtaatttagggttcagcgttctttatttttatttatttatttttttgagacagagtctcaccctgtggtcca

SEQ ID NO: 1387 - DNA, 1167 bp, Artificial sequence
  DNA replication origin
tcaatgagctgttgggtacacctcccagacggggtggtggccgggcagaggggctcctcacttcccagtaggggcggccgggcagaggtgcccctcacctcccagacggggcggctggccgggcagggggctaaccccccacctccctcccggacggggcggctgtccgggcggggggctgacccccccacctccctcccggacggggcggctggccgggcggggggctgacccccccacctccctcccggacggggtggctggccgggcagaggggctcctcacttcccagtaggggtggccgggcagaggcgcccctcacctcccggatggggcggctggccaggcggggggctgaccccccccacctccctcccggacggggcggctggcctggcgggggctgaccccccccacctccctcccggacggggtggctgccgggcggagacgctcctcacttcccagacggggcggctgccgggcagagggactcctcacttcccagacggggtggttgccgggcggaggggctcctcagttctcagacggggcggccgggcaaagacgctcctcacatcccaaacggggcggcagggcagaggcactccccacatctcagacgatgggcggccgggcagagacgctcctcacttcctagatgggatggcggccgggcagagacgctcctcactttccagactgggcagccaggcagaggggctcctcacatcccagacgatgggcggccaggcagagacgctcctcacttcccagacggggtggcggccaggcagaggctgcaatctcggcactttgggaggccaaggcaggcagctgggaggtggaggttgtagccagccaagatcacgccactgcactccagcctgggcaccattgagcactgagtgaacgagactccgtctgcaatcccggcacctcgggaggccgaggctggcggatcactcgtggttaggagctgcagaccagcccagccaacacagcgaaaccccgtctccaccaaaaaaatacgaaaaccagtcaggcgtggcggcgcgcacctgcagtcgtaggcacttggcaggctgaggcaggagaatcaggcagggaggttgcagtgagccgagatggcagcagtacagtccagcttcggctcggcatcagagg

SEQ ID NO: 1388 - DNA, 874 bp, Artificial sequence
  DNA replication origin
ccgcccggcagccaccccgtccgggagggaggtggggggggtcagcccccgccaggccagccgccccgtccgggagggaggtggggggggtcagccccccgcctggccagccgccccatccgggaggtgaggggcgcctctgcccggccacccctactgggaagtgaggagcccctctgcccggccagccaccccgtccgggagggaggtgggggggtcagccccccgcccggccagccgccccgtccgggagggaggtgggggggtcagccccccgcccggacagccgccccgtccgggagggaggtggggggttagccccctgcccggccagccgccccgtctgggaggtgaggggcacctctgcccggccgcccctactgggaagtgaggagcccctctgcccggccaccaccccgtctgggaggtgtacccaacagctcattgagaacgggccatgatgacaatggcggttttgtggaatagaaaggggggaaaggtggggaaaagattgagaaatcggatggttgccgtgtctgtgtagaaagaggtagacatgggagacttttcattttgttctgtactaagaaaaattcttctgtcttgggatcctgttgatctgtgactttacccccaaccctgtgctctctgaaacatgtgctgtgtccactcaggtttgaatggattaagggcggtgcaagatgtgctttgttaaacaggtgcttgaaggcagcatgctccttaagagtcatcaccactccctaatctcaagtacccagggacacaaggccgcagggtcctctgcctaggaaaaccagagacctttgttcacttgtttatctgctgaccttccctccactattgtcctgtgacc

SEQ ID NO: 1389 - DNA, 1313 bp, Artificial sequence
  DNA replication origin
cgccggccacgcccgccggccacgcccacgcgcgcgccccgcgccccctcccgccgccgccgcgccgcagccggctgagggccgcgcgtccgggggcggggcagaggccgagcgcgggcgggagcgcagcccgctccaagccccgccctccccgaagggcaggcgtcgcgcgcaccccccatccagcgggcgccaatggtccagcggcgcggggcaggcgagggcgggggcggagagcgcaacgagggcattggctgcatccgagggatccccgttgggccacagtcgtccattggttactgcccagccttcgctggaccccaagcgacagagaccaccccccagcccgcccgcgaggctcgggttggtggcccccggaagcgggccggagacggtgttgctctggaggggtgtgcccgtcgctgggtgacctctctcgcccccgagtgccagcccggggttgtcagggagctggcagcccgcgccctggcggctgccccgggcttctcagcgctaacgccgggctgcaggggtgctgctggtggctggagccaagccagagagctgtgaccgcggccgggtcggcggaggtgatgtttccactggccccctcgcagaccactggcgtgccttccttttcccacaaccctaaacggggccagggctcctgggtggagcacggagggaggctgaccgcagccttgagaagcagcgaaaggaagagagccccgggcgtgtctacagaagaccacacacataatgtgacggacgtctaccttgatgcctacgtgtgtttatatgcacatgtgtgcgtctgggcatagatctatatgcacacagagactggcatgtgggtgtgtacatgcactcaaacatacacttaatttgggtatggacacccaagtgattataccacagtatgcatagacatatatgtaaattagtacaaacatggacatgtgcacccgcatacccacagacactcaggcaacagataacctccaaaaacagccaggcatcaactcccagacacgcgtgtcctcaaccccaaggccctcacatcttcctccttggacttagtctctgcatcttcccttcctgttaaacctaacccagggtgaagcaacattgtgctgtgtgggtctttcatgcaaaacactttatagagacaaataacagcagagggagagacaaattaagaggtttgtaataggcaagagggaaaatatctactttcagctgcaatttaaaatgaaatgcagtgttgacgagacagaaaatactgcagggaagcctttcccgacagaagaagc

SEQ ID NO: 1390 - DNA, 893 bp, Artificial sequence
  DNA replication origin
cttcaagccttgtgaggctgtgtttgcttttgatttcttaaactaagactcagacttaaagtgatccttctaaatccctcctggtacaatccctacagggaaccagctcaagatctgcttcattatgccaataacctcggagcttctgtaatatgaccactgctttatcatctcttcctgcatcatatgcaattatgtacaattgtgtacaattgttctgaagctcaataagctcaatagaaacagaatgcacaacatcctctggtttgtaggttgcttactagattacaaaatatttgcaggacaccaaatacccccttaaatcctgggtttttaggtaagcaggtcctataggggttttggacttaaggtcacacagtgaaaaagaatgggaccagtggctctgtgtccacaaatgcaaaaagagggtgcactaaggaacctgaactccactctcattagcaactccacaaagggaaggagtggagctcactgggcctgggggttggatacgacataccagagtctgggagtgagggggcagttggtctaggggttcagctgccatctgtcacggtggggacgattaactgacccgagtggtgggaaactgtgtagggaggaaagaaggtgggacatttgggaggaaaggggaaggtgcaaagtgcagtctgcagggccagaagtagacctgggaccaggagtgactgaggcaagggaaaggggtgggagcgccagagggtcttctctccttagagggggcagttggtgggaggagtttgggggctgagtccatacctccttgattttctcccgctgggctcgcacttggctctggggctcctgactctcatcggccctcgttcccaggaccgggtggcggagacggctcc

SEQ ID NO: 1391 - DNA, 896 bp, Artificial sequence
  DNA replication origin
aggacagatcacagggccccagggacgggaaggactaaggctttcaactctcagtcagatgggagccatggggggtttcgagcagaggagtggcatgatatgacttgaatttttgttgttgttgttgttgttgttgtcgttgttgttgtgacggagtctcgctctgtcacccaggttgaagtgcagtggcgctatctcggctcactgcaagctccgcctcccgagttcatgccattctcctgtctcagcctcccaagcagctgggactataggcgcccgccaccatgcccggctaattttttgtatttttagtagagacggggtttcactgtgttagccaggatggtctcgatctcctgacctcgtgatccacccgccttggcctcccaaagtgctgggattacaggcgtgagccaccgcgcccggctgacttgaattttttaaaaaatctctctggctgcaacgctgaggacagatgggtggatcggggaagagggaagggcaagggtagatgccaagggggcggggaggaagccagtggaataaatgcaagagagaggaggtagctgggtcagggcagtagcacggagaaggtgagatgtgggcagtgtctggaaatctcgcagagacggccagcaggatttgctgcaggactggatgagggggtgtgagacagggtcaagggttgggggccacagctcttgggaggaggacattggtgttaatcaagatggggaagactggaaggaacaggtctggaggaaggcatgggattggctttcagacagtgaaacatgcgatgcccaaagaccttcaagtggagacatgcatgcagagttggatatgtgacttttagtagagacagggtttcactatgttggccaggctggtctcaa

SEQ ID NO: 1392 - DNA, 3056 bp, Artificial sequence
  DNA replication origin
aagggctggggtgggctggactatgctctggtgtggagggaagagagaagtggcacctctctccttcctaggtgccccacagaagagaagggctgggccaggcctggcatgttgaggaggggcaggtctgttgcagaggaggggccggggaggctggaagtcatgggttgtcctctgctcagagcccttctccagccccgtcatgggcacggcagctacgagcactgtcacctctcggtgtggcgcaccctccccacctcattccccacgcgggggctcaggcattctcacaagcctgctcccggtccctccccatagggtggccacggggattaagtgaaacaaggccaggcaccatctgaagccctcggcggcagcactccccttgggtggtgggccccccttgccatcgggtgcccgccgggtgtgcgatgagtgcctgcgtacgggtctgcctccctcactagctcgtgggctctttgtggggagggattgcatgcgactcccgctctgtgcccagtaactacacggcgcacagagatgcccatggagtgctgagcaggtgaatggaagggaggcctgggctctgccgggatgggaggcttgggctgtgccaggaagggcctggaatgccaagccaaggagtttagccacaatcacgcggtggtggagtgtgtgcgtgacaaggtccaggcttcctctggaggggcacgcaggggagggagccaggtcattagggtccgcggtgttgagatgcagctgcctctcaggggcacttatgtgggcatctcacatgtgaaagtcccactgctttacagcttgtgtgtgtgtgtgtgtgtatgtatgtatggggtgtggggtgagtgtgtatgtgtggtgaatgaatgtgtgtggtgtatgtaggtgtatgggggcgtgtgtgtgtgctgaggggtatgggtgtgtggatgtgtgtgtagggagagtgtgtgtgtgtcaaggagtgtggtgtgtagtgtatgaggggactatgtgtagtgtgtggggtgtgtgcatgaggcgagtgtgtgtaatgtgtggggtgtgtgtgtggaatgtgtgaggggagtgtgtagtgtgtgaagggagtgtgtggtgtgtgtgtgggagggagtgtgggtgataggtgtgtgtgtgggagtgtgggtggtgtgtagtgtgtgtgggagtgtgggtggtgtgtagtgtgtgtgcctgaggggagtgtgtagtgtatgtatatgtgaggggagtgtgtgtagtgtgggggtgtgtgtaggggaagtgtgtgtgtgtagtgtgtaaggggagtgtgtatgtgaggaaagtgtgtgtaatatgtgtgtggtgtgtgtgaggggagtgtgtgtagggagagtgtatgtaatgtgtgtggtgtgtgtgaggggagtgtggatatgtgtgagcgcagtgtgtgtaatgtgtgtatgtgtgaggggagtgtggatgtatgtgaggggactgtgggtgtgtgaggggagtgtatgtagggggagtgtatgtagtgtgtgtgtgttaagggagcgtggatgtatgtgaggggtgtgtgggtctgtgtgtgtgggggagtgtgtaattgtgtgtgtgaggggagtgtggatgtatgtgaggggagtgtgggtgtgtgggtctgtgtgtggggggagtgtatgtaatgtgtgtgtggtgtgtgtgaggggagtgtggatgtatgtgaggggagtgtgggtgtgtgggtctgtgtgggggagtgtgtaatgtgtgtgtgtgaggggagtgtggatgtgtgtgaggggagtgtgtaattgtgtgtggtgtgtttgaggggagtgtggatgtatgtgaggggagtgtgtgtggggggagtgtatgtaatgtgtgtgtgtggtgtgtgtgaggggagtgtggatgtacgtgaagggagtgtgtaatgcgtgtgtgtgaggggagtgtggatgtatgtgatgtgtgtgaggggagtgtggatgtgtgtgaggggagtgtgtgtaatgtgtgtatgtgtgaggggagtgtggatgtatgtgaggggactgtgggtgtgtgaggggagtgtatgtagggggagtgtatgtagtgtgtgtgtgttaagggagcgtggatgtatgtgaggggtgtgtgggtctgtgtgtgggggggagtgtgtgtgtgtgtgaggggagtgtggatgtatgtgaggggagtgtgggtgtgtgggtctgtgtgtgtgggggagtgtatgtaatgtgtgtgtggtgtgtgtgaggggagtgtggatgtatgtgaggggagtgtgggtgtgtgggtctgtgtgggggagtgtgtaatgtgtgtgtatgaggggagtgtgaatgtatgtgaggggagtgtgtggggggagtgtatgtaatgtgtgtgtagtgtgtgtgaggggagtgtggatgtacgtgaggggagtgtgtaatgcgtgtgtgttaggggagtgtggattatgtgaggggagtgtgggtgtgtgggtctgtgtgtgtgaggggagtgtgtaatgtatgtgtgaggggagtgtggatgtatgtaaggagagtgtggctgtgtgggtctgtgtgtggggggagtgtgtaatgtgtgtgtgtgaggggagtgtggatgtatgtgagggtagtgtggtatgtgggtctgtgtgtgtgggtgtgtgtgaggggagtgtgtgtgaggggagtgtgtgtaggagtgtatgtagtatgtaatgtgtgtgtgagggaagtgtggatgtatgtgaggggagtgtgggtgtgtgggtctgtgtgtatggtggagtgtgtaatgtgtgtgtgtctgggagggtgggtggggtggtaggggtgtgtgtgtgtgtgtgtggagtgtggacgtatgtgagggtagtggtgtgtgggtctgtgtgtggggggagtgtgtgaggggagtgtgggtgtgtgaggggagagtaggagtgtatgtagtgtgtaatgtgtgtgtgtgaggggagtgtggatgtgaggggagtgtgggtgtgtgtgtatgggggagtgtgtaatgtgtgtgtgtctgggagggtgggtggggtg

SEQ ID NO: 1393 - DNA, 1860 bp, Artificial sequence
  DNA replication origin
ctggcctccgttcgccttccccccatcagcccggccccaggcaccccccacccgcctcccgtgtcccctccttcccgtgctccctcccgtccagtccccctccgccctccgcctcccccgactcgtccatgcccatgtcccccctgctgccgaggctgggtccttcagtccccgctcccgcgctcccgccccagccagctcgggcccggacctgccgcgcggccgcctgggcctcggcgtggcgggcgcagacccggacggcggcggcagcggcggcggccagcagggctccgagcagcgccagggaacgggcgcggcggcgcggtggcgcgggaggctgcgcggcggggccggggctgggcggcccgcgttggcccggccgggcccggcccatggctgcggctggcggcggctgccggcggcccgggaagcgaaagagcggggcggggccgggggcggggcggccggggcggggaggggcggggcggccgcaggggctgggcggggggtcgctggttcccggcttcgcagcccggccagagcccggggcggggtcagctacaccggaacgccaagaggggctgatcgcgtctatgcggtcgggtccgtagtcccggccaccccagcctccccaggccgcttcctgcctctccgcgccccttcccgtgcttccgttcccaaagctaagccaggcctctgcggcccacttgcctggcccagcccagagagcgattccagactggggactgggacaaagaaggggctggggagaagccacacaccctgtgctttcctggagaaggggcgtcgggggcctctgaggcctcgtgtcctcctctgctggcagccgggcacgaggccagagactgctgaggggcatccgtccatccttatcccaccagttttctaaaagttcctctgtcatctagagcaagacaaattaaaaagaaagcccagcccctgttcccctcatgtgcagttggggggccacctccgcagatgcatgggttatggggattggccttgttccaggcacagcaggtgcagctctgaacctgcacttccctgggcccaaatttcctcatctccaccaaggagttaaaagagccccccaacccccaccctccgggctctggtctggtgaggggaaggcgaggctccagcccctcagcagctggagctaccagaggccctggcttttctggagaacagcatgcggcatgcttggaggagggccttggaaataggggtgggtggtgttgaggacatattttcatgcctgtcaatccccaggaccttggttccttggggctctcttccattctttcaaagcccccagttaccatggggtggctctagatgtctctacctgcattttctcaggcgagggtggcagctgcagaagcctctagacaagaattctgagcccagaggtgagcagtgcctgcctttgcagagccccaccaacccccccagcgcaggggcacctgtcaggcctgagggatccaaaggatgctgagctctgcccatgtgctggacttcaggtggggtgatttacacattctctcactctgttctcaagccaccttgtgaggtagagactgcttccctggttttcaaatgaagaagcctgacctctggcacccaggtctatgggtccaaatctcctgccatcctgcctcccaggcttcccacgggatgacccggtcgactgagttgggggtggggtcctgcctccactgcccatcctgttcttctttggtggccagccatggcagcaccaggtgaggccttcccagagcccacacagggcgtggcacatcgtgggcactcctcagtgtctgtcagatgaatgactcc

SEQ ID NO: 1394 - DNA, 1698 bp, Artificial sequence
  DNA replication origin
aggcaggaagcggcctggggaggctggggtggccgggactacggacccgaccgcatagacgcgatcagcccctcttggcgttccggtgtagctgaccccgccccgggctctggccgggctgcgaagccgggaaccagcgaccccccgcccagcccctgcggccgccccgcccctccccgccccggccgccccgcccccggccccgccccgctctttcgcttcccgggccgccggcagccgccgccagccgcagccatgggccgggcccggccgggccaacgcgggccgcccagccccggccccgccgcgcagcctcccgcgccaccgcgccgccgcgcccgttccctggcgctgctcggagccctgctggccgccgccgctgccgccgccgtccgggtctgcgcccgccacgccgaggcccaggcggccgcgcggcaggtccgggcccgagctggctggggcgggagcgcgggagcggggactgaaggacccagcctcggcagcaggggggacatgggcatggacgagtcgggggaggcggagggcggagggggactggacgggagggagcacgggaaggaggggacacgggaggcgggtggggggtgcctggggccgggctgatggggggaaggcgaacggaggccagtgtggggctgggacagactggaggggtctctatccagaggggtgacctggacacagtgaagctggttcccgcagagtcttaaagggttactggggagccctgggacagtgaggaggggacacaggagaggacagaaggtgcaggaggaacagggccaagcagccagggccaggcggaaggcggagtggggacaaactgggagggggcagtcggaccagacagtggatgagcagggaccaggagggactggaggctctggggcagttcagaggcaacatttgcacagatggaccgggaggcactgggagagctcaggaagatggtgggagaaggggctccatgcggaagcaactgcctgttggggaccaggagaccaggccgccaaatggtgcccagcccagtctctcctcccaagcaggaactggcgctgaagaccctggggacagatggcctttttctcttttcctccttggacactgacggggatatgtacatcagccctgaggagttcaaacccattgctgagaagctaacaggtaccaggagagactggcggctggggaggagggcgccttggccaacggtgtcttcactgagcaggagcggccgtctggagtggagggaagctcgtgggatctcagaggccctggactcctcccagctctgacactttgtagctggtggcttgggcgagctgctccagcaacccctgagcctgtttttctcagacttgtgagcaataataccagctaacattctttggtctgcgaggtagctcacgcctgtaatcccaacactttgggagatggaaggatcgcttgagcccaggagttcaagaccagcctggtcaacatggcaaaaccccatccctacaaaaatacaaaaattagccgggtgtggtggtgcacacctgtagtcccagctacttgggaggctgaggtgggaggatcactagaggccatgaggcagaggttgcagtgagttgacatcacaccactgcactccagcctgggcgacagagtgagaccctgtctcaaaacaaacaaaca

SEQ ID NO: 1395 - DNA, 825 bp, Artificial sequence
  DNA replication origin
cacgcccaaggcaagtggggtaactcggcacataaaaggcccaggagtggctgcggagatgtctgccttccttcttcctctgccaggctgagtgagccccgggtggggtgagggggtggggagagaactgggggctggggagggggcagcctgacttcaagaccttaatgaaagagagtacaggcatgcctgtgggcctttgtggaggatgggacagtgctggggatcatggatcctctgaggactgtttttaaaaagctgaagaggagaaggaagagaggactacttcttcccataggtgcagctgcaaagacatcaagctggacccatcgaggatttcggattcagccatcatggggctgctgccggggaagccactgcccctcctttctcctcagcactggggttataaaaaaatacctacaaaccatgagaaagtttgtgtaaaaacacttttctgcacatataaaaagagagactggccgtggtcagtggctcaggacgtggaccaaagtcccaagagtggccaaggggagtccgtggtgccccagaggtagaagagctagcctggggcacccctggttgccgggacagtgccggctctggagaaggctgtggtgtttggctgggttgtgcttctgtggatgcaaggtctgaggggcaagaggggcggcaggagcgctggctcccgcagtcctgcagagaccctgtgctaaggtaggcggtgggagtgccttggccctgggcctcgggaacccccttagtgaaccccattgctaaaggcagaaaccccttcacagtaaacttccccagatagctggtcag

SEQ ID NO: 1396 - DNA, 1077 bp, Artificial sequence
  DNA replication origin
gggcgactcgccctggcgggtccccgcggggagagggtccgcgcgggtctccggccactgctgcgcgcggcaaagtttcactgagcgcggcggcctccgtgggggcccccgggaccaggggtgctgagcagggccctgcgctggaggagctcccgttctcctgaggggacgcctgtcagcagacagcaactgcagcctccggagggctgcggggcgcagaggtgacaagacccaccggtgctgccggcgaaccgggggaagatcttctagccagtgacacttgggggcgggggtgacagctgagttggtgttccccttcattcgtttagttcagcgcgttgaagcgctcactgtgtcctaggcagacaccgtgctgtgcgcggggatcacagttatctagttcctctcgcgaggactccgagggacaggcagggtgctgcggagcgcacaggaaaggacctgaccctgtcgcagggaaggaaggtgatgcttaagctgagctctgaggaatgatgaagaatgagctcggcgaagggggtgctggtgtttgatgcagggctcagaggtgggcccagtgttgggggttgagggccagtgtggctggagggcaagggggagagcaggagggctggctgcgaagcgtgcaggccttggtgctcagtgaatgtggtctagagacggcagagaaagatgggtttgggactgattgtggattttatcctgtgttggctctagtaagccagttttaaacggatgagcgatgtgattaactgtgtttgggaaggattcctctggctgtgtgtgagggttaggcccggctgggtctttggaggtaaggtcggagaggaagtggcagtaagcaccgttagtgcaatttgtggccgacacggacattcagcacagagcctggcacacagagggactctgataataaaggcttgaactgagccgagaagatggagcccacgcaggaggtggcaggacctggaccaggctttgggtgctttgcactggcatgaccactgagtgaccttagacaagtgccttcccctgtccaacttcctttccccatgtgta

SEQ ID NO: 1397 - DNA, 962 bp, Artificial sequence
  DNA replication origin
agccacttccttctgggggtgatcgcgaagattcagcgatgacacgaacaaattcctaagcccgggaaatactgtaagaaattttcaatacagcaaaaagaaaatgtacatttctgaggctgtcgagaaccgttcacacagcagcttccgaatccgctcttgaaagagcggatcagaaagaacacgcactcctccgcgcagggaaatatgccgcacgcactcaagggaccggccgcgaaagttagtgcgtgggcggggcacagcgaagggggccagggccttgccggggcggggctggcgcccggggcggtcgcgacgtagccccgcccccagcgttggcgcgagatccgaacgtcggcggccgcggttctggcgttccctgaggcgccgggagcctgcgccggcgtcctgccggcttcgtctcctcagcggccatgaggcggacaggccccgaggaggaggcctgcggcgtgtggctggacgcggcggcgctgaagaggcggaaagtgcaggtgggacgctgggggatgagagggcgttgggaaccaggtagggcctggaggcgtaagacgggaggagtttgggggacacctggagatgatgaaagcgaagtcggggacagagaagggaacagcgttggggattcacaggcgagagggattgtggtctgaagaaggttgaaaaacggggcttggggaggatgggagggacggaaggaaagagcgtgctgttggggggtctggaggagcggtgcgcagggaggggcggcgaaggttcaggtgtgggagaggcggagggaaagttcgctcggagcagttgaactgaccaggctccctaggaggccacagtccctgcgagacgtcctagtagaggctggagcattgggagatggatgcgaatgcaaattggggaaattctcaccccggggtctgtttccacccaatttgccaagttgcaggcca

SEQ ID NO: 1398 - DNA, 1067 bp, Artificial sequence
  DNA replication origin
tgcggccgccctccccgaccctcccagggtcagccgggcccagaagccggagcctgcgcttcccgtcgtcccgaagtgcgagaagcgcggctgcagctctgcgccgaggagccccgggagtccactcccgggcctcggtcttcccatctgtgtgacgccacaggaagtcctgagacgccacctctgcgcggccgacccctctcccgcgcgtgcaacacgtgggcctggcggggcagagctgcttgtgcgcggcgggcggggtgcggggcgctcggcgtcgcctgggcccgcggaggcggctgtagccagagcgcccgaggccgcccgccctcccccggcttggggcggggccgctgcccggctgctcttttatctgccagctccgccgacccggcccccgcggccctcccagctcggctccggctcaggtacggggctgccaagacggggaggcctggctggccgcagacgagggtgctctccacggggcgcggcggggctgcggggctgcggggctggacgtggaaagagcaaggctccgcggggcaggggcggacttgggacccggggaagacaggcaggacgcggagccggaggggagcacctgggctaagtgagaggacgcccgcccggggaagcagccagcggagggcgcaggaaggaggagctcgctggatgggggcgtcttgggaagggtgggaggagcagaaggagcacggctgaggaggatgcggatgggggcctgagagcctgtttgtccagtgagcaggggaggggagggctgcttggagaaaatgaaggatggagggcagggagtgggtaggggcgtctggcccgggcaaggccgctgccttcctggagcaggacagtcagggagctcactgctttctggaggaggaatgtaggtgagaccgggacaggaaggggtatgggtgcccagaaccggctgatgtgaaggagtcccacttagggatccaggaacagtgggaatagcactgctgggggccaagaggggcacttgctccatgggcccaagcagtctagacaccttgggggatgagggagcc

SEQ ID NO: 1399 - DNA, 916 bp, Artificial sequence
  DNA replication origin
gcggagccttgctctttccacgtccagccccgcagccccgcagccccgccgcgccccgtggagagcaccctcgtctgcggccagccaggcctccccgtcttggcagccccgtacctgagccggagccgagctgggagggccgcgggggccgggtcggcggagctggcagataaaagagcagccgggcagcggccccgccccaagccgggggagggcgggcggcctcgggcgctctggctacagccgcctccgcgggcccaggcgacgccgagcgccccgcaccccgcccgccgcgcacaagcagctctgccccgccaggcccacgtgttgcacgcgcgggagaggggtcggccgcgcagaggtggcgtctcaggacttcctgtggcgtcacacagatgggaagaccgaggcccgggagtggactcccggggctcctcggcgcagagctgcagccgcgcttctcgcacttcgggacgacgggaagcgcaggctccggcttctgggcccggctgaccctgggagggtcggggagggcggccgcaggagagtggctgcgtttcccagctagagctcggccggcccctacgcttactcagcccaccccgccccctgctcccgaggccactctgctcgagatacgccccagcgttcgcaccttcatttctctgctggggcagctccaccccctctttgggcacccctggcttcttcaagttcccacccgaaacccgcccctcgggcagcttccccggctctgcccagccgagtgcacccagcctggacctgtattcaaacacccactctctaccctctggtgttacacattcccagccctgggagcacctgaagggtgaggaatcccttcacatagcaggccctcggtaaatactggatcaacaatgccacagattgcccg

SEQ ID NO: 1400 - DNA, 959 bp, Artificial sequence
  DNA replication origin
cctcgtttacctccctccctccctcccttccctgcgggccccgccgggttccccattgtctgaagggacggggcggtgccccagggaccagcggctttaggaccaaactgcgggcagccagggccgcgaccctccctgcgaccgtcccctggcgaccgcagctggtgattgaggggcggcgctcccgggccccacgagggttcttctgtcttcgcggccggacgcgcggacagcgtgggtggcggcaggttgggcatggggacggcgggaggcggtggcgagctcaccgcgggaccacccgggggcctgttcccggggcctgccccacccgctgaactgtgaagggggtggtggcggcggcctggaggtgtttttggcgggagttggggggggcgtccgcgcagggggagtcaggcaggggcggagttacccggattggaccgttagccccgcccacccctccccttcccacgcgcgcgggctccggggtgttgagttcggggagattcgaaaaggcgcggggaggaagggggcggggccaggggccggagcgcaaggcgtgctctgattggccgggggcgaccggtcctcttttcctcgcccggaccagggccacgcccatcctgggtccggtgctgcgtctaattctctgcttttcttaaatcttgtcgctgcctctgattttaattcctagcttttgggaacctgtcatcctacgtttttggtactagctggcgtctacaaaagtcataatgttaaaaagatcaacaagagatacagcatttttcatgacataacggcagcaaatataagtcaaaatctagaggttcataaacattttgcttgctgttgggcaaggaagcttaaacctgagggacaataggagttcaacattattggttactattagcttgggcgttttcttatccaccacgtcagacacagacaaagcaggggtg

SEQ ID NO: 1401 - DNA, 1248 bp, Artificial sequence
  DNA replication origin
cctcgacggcaccccggagcggacgcccggtgatcgcccagccccctgcccacgaacagccgcgcccccggagagcggggacaaaggcgaggctccgcccgagccacacacaaagcggagcgacccccgcccaccaacccctccgaggcccgcagccccgcccgccgccctgcagcagggggtcgctgccacggcccagcccctcccgccgaccgcgtccctcttgctggcctcagccagccgccgcctcctccgagccccgcacccacctgctcagtccgagccgcctgaccacactctgagcaccaacagacccgggcgcgcacaaaagcgccaaacagaggcacgtgacctccgcgcggggctccgcattggccgagagcggcggcacgtgccgcccccgccccccacaacccgcgtggagcgccgccccccgggaccccgaagcacctcgggaagtgtagtcctgtcccggagggcaggaggacaatgccgggggttgcagggcgcctggggagcatccccaggtgtgggcctgggactaggggggtggtctcgccgtggaagagggcgtggcagtggaccccggactaggtccgaaccagctccccattctcgagaacaagggcagggcggagcaggcggagggcgggggggtccttccctacctttccaaactttggccgcctggactccaccttgtagagccacatgcccgcctcgccccaagggcagcactcggacagagcagtgccccttctagtgcgccacccacatgggtgcctaagacgcccgagcccctgtgacagcacaatgccactccacgcccctgcagggccccctgcccccggcaccctacaccgacaccggcgtgtcacccatattgtgacatcatcgtaatttctaatccactcagcccacaggtcgcgggcgtggcccttccctcactgtgtgcgttcttgccagcatcctcaggttcccgagccggtgaccagggacctgtgcgggaaagcgtggggctctggaatttgatcgcctttggtctaacaaagccactcagcttaaatgcagactccatctgttcttccaagccttctgcggatgataggggaggaagagcaatagccgttctagactacacagattgcagttaagtgttgcttttgttctcagagcacgtgctccccagagcagcactgggttctttttaaaaatcgaaaaaggagccacaaggtcactgttctccct

SEQ ID NO: 1402 - DNA, 1542 bp, Artificial sequence
  DNA replication origin
ggcggcgaggcggcgcaccccgcgcgggagagggggcgcaggcgtcaccccgtcctcactcagcaacacccggcgccgcgccgggcgaaggctggcaaacttctcgcggccggcaggtgggctccgcgggccccatgggcgcaggcacaggtgtgcggggccacagccgggccttttgcagccggcgaccgcccccccttccccgcgggcttttgcacacgacgcgccgacggcagcttcacacgggttggcgagggccggataaagccggcggccgcggggcgcagcggctgacccgagacacgggagcgcttggcacgcggagccagagccggagctgcagccgcagcgggagccgggggagctcaggggccgcaggagccgggccggagtgagcgcacctcgcggggccctcggggcaggtgggtgagcgccacccggagtcccgcgcgcaactttcagggcgcactcggcggggcggctgcgcggctgccgggactcggcgcgggactgcatggaggccaaggagaagcagcatctgttggacgccaggccggcaatccggtaaggcgagagcctggggacgggcgggaattttggcggcagccgacgcacctccgcatttgccatcctagcagtggttggttttggctgcggcttgagctgggaccatgcaggaggggtggggtgaggtgagggaacgaagataatgggctgtggcccaaggaccgtctctcccttggggcgcagcccagattctgacccctgcccgcggggggcctggggccgggggattggcggttcccatgcctggagtcccgccccgcccagcactttgccccaggcagccccgccccggggaggccctgtgtcccaagtgcgctggagggggcctgctgttctcccagagcctgcgctctgttccttccccgcgctccactggacagcacgccccttggccggttcccagggtcttcacctcctctggcctctgaagggccccgggccccaggactcccattcccctatcatccccgtctgaatacaggcttctcacctctggtttgtcgagctcggagcgtccttagctatttttcccagtggacacaaggcctcacagagaaatgggactagagtcggccctccttacctcatctcagagctgagcgttccctctcttcccctctggccaggtcatacacgggatctctgtggcaggaaggggctggctggattcctctgccccgacctggcctggacttgcaggccattgagctggctgcccagagcaaccatcactgccatgctcagaagggtcctgacagtcactgtgaccccaagaaggggaaggcccagcgccagctgtatgtagcctctgccatctgcctgttgttcatgatcggagaagtcgttggtaagcacttttgggctaattaaatgaagttggtgcatggatagactggatgttcccagcaatactgacactaaaagccccaattactgaacacacactacagtaagcctttatatacacattatctg

SEQ ID NO: 1403 - DNA, 967 bp, Artificial sequence
  DNA replication origin
gggctgcgcgcgcccggccgcggcctcccctccctctacccgcccccttccgacctaccgagctgcgggctggggtgcggggctcgctggggtggaacgcccggtgcatcttccgcgcgggtctcgggtgcctgcggggcgcggtgctctttggcgggcctgcggggaggtgcggcccgaccaaggaggcctggcgtccgccccgccgggagggagactgcagcttttctccgagtcactgagccatgtttgcgggcggtgcagttgcggagacggcggcggcggcggcggcgcggggctgggtgcgatcatctgggaggatgccgtcccctgccccgccggcgcggtggtatctcccttaaagaggccggcgcctcattgttccccggctgcggccgcagggagccagggccacctcctcggcgtggggagtgagggcgcggaggcgcctgcacctggctgcggtgcccacggcgcccccccgcgaggctcctggtggagggttggtctgcagtcggcgcaggggagaggccttggtccgagccaggatccaccgcgctcctgccgctctcggggctggacagtcaatggggtccccgccgctgctgcagtcgctcggctgccacacgctgttagtcagatcccgcacgctgttggccccacagccagcccggggtcacttaggaccgcattcctcagtcatccagttgttagatcagtaagcatccgccagaaaagtccattccttcttactcgatttattctgcacccattacttctcagcagggtgatgattcctcctcccagcgctcgctctgtaaggcacgatgtacaaaaaatccctgtcgctgtgctcaaagatcaactcattttattttctgtcctttatgccccttctcccgagagtctggcactgggttaggtctttatataaatgatcttgcttaatcctaaccaaaccccacaa

SEQ ID NO: 1404 - DNA, 841 bp, Artificial sequence
  DNA replication origin
gccccgcaggcacccgagacccgcgcggaagatgcaccgggcgttccaccccagcgagccccgcaccccagcccgcagctcggtaggtcggaagggggcgggtagagggaggggaggccgcggccgggcgcgcgcagccccaggcccggacctgccgctgcagacggtccccggggccgcgggccctgagcgcccgctgcggctggagggtggccgagccccggcgtggcgtggcctcgcggttcccgagcccggccacccctgcggggagcagcaccagtggtgcgctccggagcgcgcacacctccgacgactcccggctctgcaaatcctcgagagagggaggaggcgagcggagcgccggccgcgcgcctcgtcggtggcgcggaacgtcccggctcgcgctacggaaagccggaggggggcggggccgtcggcgtaagggggtgtgtccgcgcgcaccacgggggcgcgcgccggctgctgactggaggcggcggcagcggaggcgcgagctgcccgataatggcggcctgcagagcccatgagagggagaagcggcagcgtctaccctgaggtaaatctggcctttcggcgtggcggagaggtcttgctgcagagccgatggccctgcatgtgcctccctccctgggaggcttgtcacagacgtgtcagcggagtcatcctggggaaggccctgcgctcctcaggccaccgaccccagtcgcggcctcctctcataccggggccacctccccccggccctcagcccccagccccgaggagttgaggcaactgcagggctggctcctcagagcgaaggggctcaggaggctcccct

SEQ ID NO: 1405 - DNA, 1131 bp, Artificial sequence
  DNA replication origin
cagcgtctaccctgaggtaaatctggcctttcggcgtggcggagaggtcttgctgcagagccgatggccctgcatgtgcctccctccctgggaggcttgtcacagacgtgtcagcggagtcatcctggggaaggccctgcgctcctcaggccaccgaccccagtcgcggcctcctctcataccggggccacctccccccggccctcagcccccagccccgaggagttgaggcaactgcagggctggctcctcagagcgaaggggctcaggaggctcccctccgggcttcatctgagcacggccgaggagggggagggcctgacacttggccaatgagcgcggcctgagccgccgcgtcgggcaacacctctggccgcgactggcccttcccgggcgccggcaggtgtctggcctggccggctcgcgtcccagcgcctggttagagcagcgggagcgagggcccgccactttcggtcgaaagtcacttaggttcgcatcggatgcatcattggatccgggatcccacgggtttcataaacacctctctcctccctattcaggaaggtgctcttccccatggggactgtaccaggctggagaggacatggcactgcttcagagacacgaaccaccttgagtggatgtgattggcgatccccgtagagcaggaaagctcgtctgctgtgcagccggcgcagaggattctgtggcaggaaattagacactaggaaattcagtagcgatttgaagggtgggtgtccagttagaggaagtgggactgaacacaatctcagaagtcatttctttttattaaatctatcctgtagacttaaagcagtggatcccaacttctcaggctctagggtcagtagccttttgcttccccagctgtacagaataaatattgtacaatctcaggttacttttctagcccgtggtcacaatctacaaatgagaattcgttcatgaagttggttataatctagaaattctttgggcgctgaggaagcccactttagactttctccattcaacacatgagcatttctgtgcagggcctttgccctcgcctttaaaccgttcagtaagttgaattcccaagaactctgtcagagagccccttgatatgca

SEQ ID NO: 1406 - DNA, 914 bp, Artificial sequence
  DNA replication origin
cctacctttgattccagccctagtctacctctcgctggctgtgtgggcttgagcaagaacttaacctctctgagtttccttctgtgtcaggcgggaatggtgagacccagctcctgtgtggcttggagatgcagggaagtggagcctgcaaccaaccgcaaggtgctctggaatgtggggcctgcaatccgcaaggtgcaagttagatgaatctgacttcagctttcgccctttaccaactccttgctgcacttctggcccgcatctcttttcctaatcccagtcttgctcacagctgccggcagcaaatcaccgagaacacctgcactgtgccatggggtctgcagatggatccaacgtggttttgctctcagttggtggcagaggcaggaagcttcaccacgactggtgagagaccagtgctactgcaaccaagatgaacacagcagaggggatggtgacctcttctgcccggggtggggtgggaagcttcaaagaggaggggtatctgagccctactgggaagggatttttgactgggtttgggggagacagagagagtgttgggccgagagcactgcaggcgccaggtctcagtgagggcaagaggccagggaagggtcgcggagagtgagagagggaggagcgggagagaaggtgggagggcataagagagaagatggggtgcagagaagtgatggggtttgtgaatagatgggtaggctcagactgagagaaggggctcgaggggacttagagaaaagatgggagctcggggaagggaagggctcagggaggggactggggtttcttgaaacaagagttggggagagggtaggcgcatctgccaggccccaaggccacaggagaagccccccacagagattagagcagccgtcctctaattcagggct

SEQ ID NO: 1407 - DNA, 1087 bp, Artificial sequence
  DNA replication origin
tccagtcgctggcgtccccggagccgggcggcggcgaagttccggcctgcgggctggcgtcggctccccagctctgcggggagaagcgctctgcgcccagcacctccaccagcgcgcgctccaggccgcagtagttgaagaagcgctccttctccgacaggggcagcgagcacgtgggacacagcgcccgctttcccgccgcttccggggcatcctggggcgcagcccaaccccctgaagccgcaggtcgctctgtggaggccgggctgctcggggcagcgtcccgcggggcacccagaaagaggcgccgcaccagaccctggcccttggcgttctctttgttcaccgaagccttgcagtcccgcttctggcggtagaagatgagggaatcaggcctcggcagccgcctgccgcttccccggcggaccggcctgggcgtcctgggcgatgcagggggccccagctcgttgcaggggtgcggcgtgagcggcccaggactcccacgcagggctggctcctgtcgcctagctatcacctggtgcgtcttgacatacttggctttgtcggcttccagcctctccacggcgctgggggtccgtcctctggacggggtggagggaggggccaggagcatcttagcagagctggtcaggacagtgccccataagtagccagccacggggcctagagcaattggcttgggctctcactgacctgcagggagagaggaaggtcaggggaagggtaggaaatgcccctggtcctctcctgccggcattcctcagtataggatcagtcagccaccctctcccatccaggttagccggtgccacatccagggagcagaggctcaggccatcccctttccctgtccttcagagacattgagtggggtctctctggccactcagaaacatattcccctttgaaggtgccccaatctggccacagggtcgtgcaagcaggccttagcaagcaggacacttggaaaaggaaacagggctggtcccggcccaattcctgaaagtggcttcaaccggaaaaaatacctcttcccaacccagcagctttgagcccaagacaagaa

SEQ ID NO: 1408 - DNA, 1226 bp, Artificial sequence
  DNA replication origin
gaaagcgggcgctgtgtcccacgtgctcgctgcccctgtcggagaaggagcgcttcttcaactactgcggcctggagcgcgcgctggtggaggtgctgggcgcagagcgcttctccccgcagagctggggagccgacgccagcccgcaggccggaacttcgccgccgcccggctccggggacgccagcgactggacatccagcgacaggggcgtggacagcccgggcggcgcgggcggcggcggcggctcggaggcagcgggctcggcgcgggaccggcgccccccggtgtcggtggtggagcgcaacgcgcgcgtcatccagtggctgtacggctgccagcgcgcccgcggaccgccgcgcgagtccgaggtgtgaccgccgcggctccggactggccccgggactggccccgggcacggaaaaggacacccctcttctggcgcgctgggtgcctttgcgtaagcccttccttctggaactcagtttcgcgtctgaaccttggggaggtggaacaagttgctgccgaaggcccttccctgctcccgcggcgaagggggagggagaggcctcttggtccctgtggagacccggtctggggagtcacgattggggtgggagatgagcaaacctgctgaataaagttaaaacgttatttaaatggggagctgaggaaggagcaaacgggttttcgcggttaaacccgtgggttttggaatgtgtgttcccggctgtgtgatcctgggcaagaacttgacctccctggacgcagcggcacccctcggttattaaggagggaggagtaggggatagaagtatttcaaaatagttgtaatgcgcatggcaaagtgcccagcatatagaaagtgctcaataaacgataactgctgtgacttctaccgaatgagtactaacactgttgtgatctccactggcctccaggtcgatccaaactagagctgggagctgggaataatgcgctttgggagcccgaggaggcgtctgctccagaaatctgggctccaccagatcctaaaaggccccattcccggagttttgctgccccagttgtggtcactgggtatgaagggctgagatccaacctttcggacacaaaaagaagggaaccgggccgggcgcggtggctcaggcctgtaatcccagcactttgggaggctgaggagggtagatcacgagatcaggagttcgagaccagcctggccaaca

SEQ ID NO: 1409 - DNA, 975 bp, Artificial sequence
  DNA replication origin
tccacatccctcgcctaatcccctgaccctgtcccaccccagacccctttcccagggcctctgagccctccccttgcctccaggccctgaccctcctcctcgtcccggtcccccactggtcacctgaccccgctcctcaccactgcccctgactccgcccaggttcccccggccccactaaactcctccgtcagcccagccgatgttcctccgcgggaccgcccggccgcttccctgaccgcggccctctcccgcagccctctggcggcgcgacccccctcgcaggcggcggcggcggcggaggcgcgcggcccgggcttctgggacgcgttcgccagcaggtggcagcagcagcaggccgcggcggcgtccatgctgcgcggcaccgagcccactccggagccggaccccgaacccgcggacgaggccgcggaggaggccgcagagcgccccgagtcgcaggaggccgagccggtggccggcttcaagtggggcttcctcactcacaaactggccgagatgagggtgaaggctgcgcccaagggtgactagcaggctggcagaaccccgcgcccgctgctcccacccctgataaaaaaccctggcccgacagcctgtgtgaccgcgtgcttttgtccagacatccagaaagactgcttttgcgggggtcgacctcgggcggggtccagctggaggggtcctcacctcatcaaacatacaaggcgaaaatgaccagagtcagcccgcatatcaggatgggttttttatttaaggtacaactttccaggaagttggagagctccagaggactgcgtccatcgccctctccagcctcatttaattcaacaaactgtgcctgtggccctactatgtgcgccgtccctgtactaggaaaaaggtcaaagattaactagagaacccagagtaccagcgggtcccacaaaaggtgacaaattgaggcccaaaaataggact

SEQ ID NO: 1410 - DNA, 1840 bp, Artificial sequence
  DNA replication origin
atgtttgatgaggtgaggacccctccagctggaccccgcccgaggtcgacccccgcaaaagcagtctttctggatgtctggacaaaagcacgcggtcacacaggctgtcgggccagggttttttatcaggggtgggagcagcgggcgcggggttctgccagcctgctagtcacccttgggcgcagccttcaccctcatctcggccagtttgtgagtgaggaagccccacttgaagccggccaccggctcggcctcctgcgactcggggcgctctgcggcctcctccgcggcctcgtccgcgggttcggggtccggctccggagtgggctcggtgccgcgcagcatggacgccgccgcggcctgctgctgctgccacctgctggcgaacgcgtcccagaagcccgggccgcgcgcctccgccgccgccgccgcctgcgaggggggtcgcgccgccagagggctgcgggagagggccgcggtcagggaagcggccgggcggtcccgcggaggaacatcggctgggctgacggaggagtttagtggggccgggggaacctgggcggagtcaggggcagtggtgaggagcggggtcaggtgaccagtgggggaccgggacgaggaggagggtcagggcctggaggcaaggggagggctcagaggccctgggaaaggggtctggggtgggacagggtcaggggattaggcgagggatgtggagggaggggaccgggatcaggatccctggggagagaatgaggtcagggtttcaggcgaggctcgaggagggacgctggaggcgtgcgcaggtctgggaagctggaaggatccctgggaaagcaggtgggagcgggagggctgttcagatcccccctgagggaagccctggggaaaagaggcggggcacagacaggaatcaggttctgagattgagggaaagggggactaggagcacgggagaaaggtggagcgacaggaaggcctaggtcagaggcttaggggagagcgcgggactcaagagaagtgggaagatgttggggggaagggcagtcacggagaggtgatgaagcttgaagtggaagcctcaagtccaggaagttccttggggaactggggttgggggtgggggaaaagaatggaaacctgggggcgggagaggctgatgggtcatggggaccctaggagaaaagaatagggtcaacggtgagagggggatgtgatcaggatggagaaaaggcagaaatggagaatgtgccagagatagagccaggagggagactgaggtcccaggtcccacccgctaatccttggcctcaaagacctcagacggtggttcccaaagctgcaagctgcagggccctgggggagcttgctgaaaacatggctagatccccaagactctgccacaccagcgaaatcggagtctctgaaggagggtccaagaatatgtttgtgacacgcttccttggagggtgagggtttaggcaatatttgagaacctttgagttggatcagctgttgcaaacacctaaaggtattctgcgttcttggattttagagagatggcccctcccaagcggatgggtcgtgagagcccataaataccttctagcacctcaatcccaacagctggtcgattcctcctgagatttaccctaatctcccagatatgctgatttggcctgtttcctgctgagagaaacagaaacagcctgggactgcccctccccagccctcagtggttagaaagacaaacaaaccagaaggaaaggaccaggcagaagggggacctcaggccccttccagaaccaccacaaacacacacgcacatactggtcagcgc

SEQ ID NO: 1411 - DNA, 1561 bp, Artificial sequence
  DNA replication origin
gtcccaggcttggggtcagaactgggtgcccagatgccgtgtccggggcatccatggagctttgagactacctgtccaggcagggctgggtccgggactggggtttgaagacaggtcaaaggcaaagacgtcttcagatggggccctggggagggcaagggggatgagatgagcccacggtctccccaccaagacacacctggacagagcctgttacctgggagacagtggggccagagacagtgatgggctcctctggtgcggggagtccaggacctgagggggcgtctggggaacaaccaggaacaaagcaatggagacaggggtctgaaagcaggttggggggcaacaggggtaggggagcagcaggagcaggtacctgtgggggggtctgaagggagctaggggggcgcagcaggggaaggtgcctgttggggggggtctgaaggcaggtgtgggggtggtgggggcaggtacctgtggaggggggggtctgaaggcaggtcggggggcggcaggggaaggtacctgtgggggggtctccggtatcgggatcttcttcagcactaagctgagtccggctggctcccgcagcagttccctcaccatgttcttacggggccatcccacctgggggacagaaacactggctggtatcaacctgggcaggaggctctaaagcaaccaccaactctcaccctcgtgctgggagctctctctcagcctcccacttctgcctcccactcatgcagcctcctgggggcttccatgggccccatcacctgggctctgcagaggatgctctcaccagacttagctggctcatctcctggaaggcagctcccacaaccctggtcagaacccttggttgcctccccacccaccagacttgggttccactcggtgaccccttcacctcctaccatgtccctctcctcacgcaccaccacctgctcgttgatctggacaacctcgtctccaggctggatctgcagtcgggagtcagtgggaacctgacgtggggaatggggcctgaggttggcctggcttgcaggtgagaggcctcggggatgggcggctgagaagggtgtggggctctcacctgggtgtccacttgggacacaaagtgctggcaattgctggtggtgtgaatttctaggccctgcagaggcagaggctatagtcaccgggggctggggggcaacagggccaataggcaggacccccgccagacaccaggactctatggtgggtggaactgtggcaagagctgaccccaagctggtcctgcccagacttgctgtatgactttggacttgctactcctgtgggcctctgccttctcctctgctaagagccagagggaagctggagaccctgatttctgaggtaccagcttctcagcaacattcctaaagggacaagcagggacagggcagggatagggctctggtcttccccactggtcaaagattaaaccaagaaaggtcacatcctctccctttctcctaactgcccccaagcccctgccccgtctccatcccaaggctggaacacacta

SEQ ID NO: 1412 - DNA, 1210 bp, Artificial sequence
  DNA replication origin
ctcgccgacgcactccccccaccccgcccccgtcctgggggtgggtcccgggcgctagggtccaaagcaccgggatacagccctgcgctttcccccagcgccagtccgggcgcgcacttacttcgcgggagccggtgaccgacgtgctgtagacgcgcaggccgctcatgctgggggtagacagacgggccggcgggcagagggcggcggtagcggcagctgcactgccgggagacgacgccgccgccgtgctcgggagcggtttccttcctgctccgcccgccaagtcatcgcgctcgggaccaatgggcggcgcgggcaggcggggtgggacctgcgcgacaccgccccgcacgccagaggccccttcccttccccctcggttaccaggcgcgcaacggacccgtcccacgcagggcgccccttctgcggctgccctgatcgtccttttcggcccttccctgatctggagctcagtgtgagactggggaggggcctgggtggcaggacaggcccgggagagggtctggcagaagcctccctctccagccgcacacaggtttggtgcatccaactccccagccacgagagccgctctctccaggaggaggtgctctaatagcacagggaagcttggggctttggaaggtttgagctgctttcagacccaaagttctctaagaaccttgctccaagggatccctcgctccaccacccaacacgcaccactaaccctaggggataggaagcataggacagcaggaagagcccatgcttagagattttcccccaagttcctctccactcaggtgggaaggtttagacaaggaagggtgatagcaggacgcagaggccacaccctcaaggaaccagatggagaccaaggctgacagctggaaagcgtggcggtagaggatgatgtcaggactcgagagcctaggctcaagctgacccttaagatccaccccaggtcttggggtggtccaagctcaaccccagctccatgctgcagatggcattcccaaactgctactactcccagcaagaattcagcggttgagggggcagactccagcaacgagcccaactttggagacctagctgtctggcactcaacatcatgcttctcagatgtccccctggtccagggctcaggcaggttaacagcccagaaagacaacccttgctctggtaaagccacttcctcaca

SEQ ID NO: 1413 - DNA, 1022 bp, Artificial sequence
  DNA replication origin
gctgttgcttaagacaatttctgagactaatgggtaaggaatgttgcctttagatggaggagaggggactacatttagagaggagggaggagaagtggcctgcattgggggagggactctaaggttaggttaggaatgacagggagttggtcaaaaggtccttcatggccaggtgaaggctggggggagtgtggtgatggagtccagcaggggaactctggacaggcttgactcaagccagcttcaggaactcctgcagcgtgttttgttccacagcctccacgaagagctcatagtcctggagaaggggaggcgaggggtggtcacctgaatgcagggggcccaagtgctttgtggcagatatgaccctggctagagtcctcttccaacactccccccacccccccgtcccccagcccataccccacagtactggtccccgttgacaatctggggtggggtggccttggggttgcctgccaaggctcgcatctcatccctcagggcgttgtcctgggagatgtccactagctggtattggatgcgcttcccatccaggattcgggtcacctcgctctgctgggacttgatctggggacagagggtgggtaggggttagtggataggctggaggatttatgggggaaatgctgggcagggtgagagaggctgtgaccaggagcttttgtccccccattcccctccacactaggggagggttctggcctctaggagttgggaggatgagtcaggcttgaggtggtgcaggatgaagagagggattatcagccacgggggagggggtcagagtgaagggaagtgggatcaggctcagggtggggaggggaggggagggcaggctgcggtcgtggtcagggtcagcccggtagtgggagtgcagagaatgggtgtggggttgatgggggatgggcacgggaagttcatgccgcggctgcaaaggacccaggatgcccgatgaagacattcaggatggggcctcgggaccgggtccgggagaccgt

SEQ ID NO: 1414 - DNA, 1261 bp, Artificial sequence
  DNA replication origin
ggcatgggtctagtggcaaaatggctttgtgcggtgttgaagtgtccccacgagttggtgggtctgtgcctgtgcacaggtatctgctggctgcacacatacacagtgaggctctgctgtcccagctgagaatgtaaacccagctggggccagctccttccccccactgcatccctcccttcacaggatccacttagcccttcttgggagaaagaggaacctagaagacaaagacccagcagccaggcccgccagccggggctcgagttaccaaggggcgggtcggcaccgccccctccctggcccagctggtcccaggcctttcctacgtgcctggcgagatggcccacccaagagcctggcggagcagcgggttgagggggcgggtgctttattgggggctgggactgggtccaggacagggactggggccgggaccgggaccgggactggggccgggaccgggaccgggactggggccgggaccgggaccgggacagggaccaggactgaatttcaggctggacttcggggctcggcgtgcccgcagcagcagtgctgctttgggcacaaggcctgcagcctgcagcgtgagtgtatcgtcctggtagagggtgggcgggaatgtgctgaagatctcaaaggcagaggcatccatgaccctggggaccaggcagagcagatcaggctgggcagtgggaccagagcccctctgtggccctggccctgccctgcacccacctggcctgcgctagcagagctcgcacgtccccaatggtgttgtcaggctgcatcatcagtaggaaggcctgttccccattctcagacttgatgcgcagcatggagagcgggggtgccggcgtgttgggtgactcctggctcctgcacagcccagaggccatcagcacgcggtgacccaacgcccccaggccctcacctcctcatcccgccctcacctctctcgctcagcggccaaggtgggcgtctccaccacaatctcctggatccgggcaggcaatgggcagcagttctggaaggtatcagtggagggtggacagagccctaggccccatttgagtcatccccacaaaccttagagggacacttccttgaccagggacagatgagaccagtgagcaaagcgggagggggtgttctgtataaaccaaggccagaggagaggcaatggaaggggaagaaggttctgggaggcagccccatggttccccccaggtaaccccccgtttcagtctaatggaga

SEQ ID NO: 1415 - DNA, 1001 bp, Artificial sequence
  DNA replication origin
ctggaaggtatcagtggagggtggacagagccctaggccccatttgagtcatccccacaaaccttagagggacacttccttgaccagggacagatgagaccagtgagcaaagcgggagggggtgttctgtataaaccaaggccagaggagaggcaatggaaggggaagaaggttctgggaggcagccccatggttccccccaggtaaccccccgtttcagtctaatggagacagaaccccacacagacgatgatcaggctggaagcccaccccagcctggggtcagggaaggcttccctcggaaaatgacaactgagctgtgactgaaggatgaatgggagtccttagaaatggaatggatgcagggatattccagacagcatcaacaaagatcctgggttcagggaaagcttcctagaggtggcgacacatttgggcaactgccagcattatgtgtggctgaagctggggctcaattggactggaaggaaaaggttggtgtgaggaggggcctggcaatataggacgggccttgagtgccagcataaggaacctggctttatctcaagaaccactggaacatttcaacagggaaggcagcctggaggatggtcagcaggggcaggagtggcagtgggaggcagctgtctgggagagacactctgaaccctagactagggtggtgggtggtgggaatgtggagaagggatgcatctgggagaagttctgggggtggacagaccagacaggacttagcaatgtgtgggtgagggaggcagaggaggcctgagaaactaaggtttggtgcctttcacaggtggacacctaggaggagaagcagaatagggagcgaggagacagaatgatgagggccaaggagagtctgaggcaaccacgaagggagtacccagtactgagttggatattttggcctagaccttgatggggtggcctgggccttgggctcacccctggcctggactctgactttagccctctta

SEQ ID NO: 1416 - DNA, 1642 bp, Artificial sequence
  DNA replication origin
ctctctgtttcccctaggtggctactgtaccccaaaccattattcgaagacactccctacatcctggaacctggagagtaccccacctcagaggcctggggcacatcggaccccagcgtgggctccctgaagcccatgagattggtaaagaacagggcacacccacaggccaggaggtctaggctctgcccctggtcccaagtagctggtcctgcagtctgtgggaagggatgggggatgaagtgtaaaacagcaccccttggagactgcttcctgggagcttctattgggaatgggagtgggaggagaggtagggattaacctaagaggtaggggaaaagggaagacatggggttggggttctcaggatcaggaaaatcctagatccgcagccccatctgtctttcccatctctgggctggtgtctcagctctgtctcctctgcagggctgcccaagtgtggagaagccaggggagcccagggtaagagtctgggcttaagagccaaagagggcctttggtggcggggtgcaggtgtttggttatcgtggtctggacaggaaatccagagaggagggcactgggggccagaagcacggtctggggggatgggacctgatgggctcactgggaactggcttttgatgtgtaagaaggtcagaggtcagagtagagataggaattgggtaaggggatggagttcagcaaggaggtgggagggctggggggtgccacattggcctgatgctgggcagagccattcctgagctggctgggtgtgtttgggtccagatgactcctgacagcccctttcccccaggctgtggtgtatgaggccccaggctttcagggccgcagctgggaagtgagccgagacatctacaaccttcagcagccagaggacagccagagcccccacctggcctctgtggggtccctgagagttctcggaggctggtgagaactcaggacccttccttctatttcatcacctctggcctttacccttgggagtggggagtgacctgggctgcgtaggggtggggacagctgtctcattcatccatgggcctcctatgactgaacctgcctgtctgtcctcctgcttttcccagctgggtgggctacgagaaggagggcttccggggccaccagtatctgctggaggagggggaatacccagactggtcacactggggaggctatgacgagttgctgacctccctccgggtcatccggacggtaagcaaaggcaattggcccatccctctgcctctggccacagccagacctcccccagtacagtttgtggagggaagaatttgtaccccctctccgtgttctccctgtaagtgttcccagaggtctagcctctcttcccctgctgctcttctccaggtcgtactgacagcctcacccctaattccccgggtgggctgtgaccctggggtctgggcactcccaggggtttcggtttgtgggcgggagagacctgactgtccctggggacccaggacttcggggacccggccgtcgtgctatttgaggccatggacttcgaggggcacggcgtggaggtgagcaaggcattgccggatgtggagctggtgcaacacggccccagcacacaggccatccacgt

SEQ ID NO: 1417 - DNA, 841 bp, Artificial sequence
  DNA replication origin
tgcagagagtggagggttgagtgaggttgctgtgtgggctccagggttttctaggctcctatggcggtggattgggcagcattgtagtagcagaggcagaatcaggaatgctggggtcctccaagcaggggtcaatgtgactgcttccgtgccaaggaagagggagatgtaggacccaggctggctctgagacctgcttggatgccccagaagtcaggggctgggggacaagggctgcagagagagggaaggggggtggaggaggctaccttggagagggggacgggaaagagaagtagggttagctggggggaggtggtttctatctgccactacctgggtattttgggcccaggtggataatgacagactcaggtgggaggctagggctcacttagagtggggggcaggtgacctccagaaacatcatccttctatgtccccttcctgggagaaggttctctgggccaagattggcaaatatgggagtcgagaagaagtgagacatagctgggactgccagtgggaatgtgtaagatacgtgtgcatccaagcgtgtgtgtccacgttcaggggtaggtgaatttcaaggggaagagagcttggggctgtgaattgactgtgtgtgtattgtgaatgtgtgcacgtgtgtgtcactgtgcctgtgtttctgtctgtatgtgatttgtgtgtctgttgtggctctgagtgcctgtgcgtgtttgtatttcttgggtgagtgtatatttgtgtgtgtgtccctggttgtgtatgtttttataggcttctaggtgtatctttgtgcctgtgtgattgtgggtctgtgtcggtatctgtctgt

SEQ ID NO: 1418 - DNA, 1252 bp, Artificial sequence
  DNA replication origin
gagccgctcagggttagccccgagctgcccgacaccgtctccagcccccgcgcggggaggctgcgctggctcctgctcggcgccgattctcgctccctgcaccagggaggcggcggcggcggtggcggcagtggtggcccggcgcctggggccctcgcgccacgtacctttctcttgggcatggtggcggcggcgacggcagcgggacgtaggtgctggacgcgggatgcagcggcgcgcgggctttggtcggtccgggggtcgttctcgcctcttcttcacactgctcgggctccggggggtttataaagtttttatagcgctgggagccccggaccggttagaaccggatttcacctcccgccgccgttcattggcccagctggggtcacgtgggcggggtttaaactcacctcctctggagggagtgaggaggggggtgtgtggggggggtagtgcgcggagacggcggcgcgccgagggggtgggggcgcagtcggggtggcgcgcgtcgaaggcagtaaatgaggaggggtgcgcgagtcggcgggctccgggttccggctcccgccaagagctgtcttttgcaaactagcaagttccttccaccttatgcaacccagcaacccacttctccaagccgtgcgacactcacggcgcatctcagcggctttccttcctgctcccgctgggggccccagaagaggggtttgcgaggcctggctgcactgccctgctcctctggaagcaggaggaagcgcgcggctggaggcacaggctgcagttcccagagcccaggctgacgccaaagtgggaaaaaggcggggaaaccagcttggcgcagccggacgtgcatccttccgagctgccacttcggagaagcctttcgtgcacctcacctgaaagacggtcccactcgaggtgggctaggggtttcagggggagactttccatgcagaggtgccttttgggtgccgtgggtcaggtaggagctgtcctttcagcacccgttgcgcagccgcctccccaaatgctatcgaagcccccacccccaactcctctcgggtggctcccttaaggtccctgtattcccaaacctccagaccccgccacagtatggtggagagcggccgtcgaggtctaccagcactcacttccccctacactctacccctctcggagacattttgcccagctgcccaacccgacgcggccaccaagcctgggcactgcagccgcagctggcgaaatc

SEQ ID NO: 1419 - DNA, 1248 bp, Artificial sequence
  DNA replication origin
catttggagtgatacaagaaaagggcaattaaatttttgatatcagcaactaactgaatgaacaaatctaacaaagggtgaaacagcagttatacctggtctgttttggcatctccattttctgcagggttattcccctccttgccagcatcagcttttccctttttccctttgggtaccttctctcccttctgaaaaaggggaaaaaatagaactgtttctccccatttcgtattaccaaggtatggtctgcaaagttctgcacaaggtaggattgtttactcaagataaaacacaaaccctcacccatttgacaagaacaactgatcaaaactaggctaaattatctgtaatttgctataatctttagtacttagaatttcctaagtaacagaagaataaattagtttaaaccctggggtatttaatatttaaatgcagattttcctataaactaacaacagaattcttgatcaggaaaccaacgttatgaatgacacggacgaggtaagctatccacacagtttataacctccattaatggaggcaccattatgctaattaagttaaggcactaaggacagtcctcattctgtgaaaatgatcagttccaatgttagcacttacctttgcaggggcctttttaggcttgggctctggctttggaggagcaggtttctttttttggcaggaagagaggaaaaagtgaacatcagtacaatggactgaagaaaaccacccacaaccaaccaaaagtaccaagggtagagaagtttctcctcctcctcaaaagtttttgtggttggctttcttctagaatgttggatttccagaagcccactcaaatgtcccactttggctacaggcatcagaatttcagaaccagcaaaacccaaaggggcaagagtcccaagtagaggcaatgattcaaaaccaggcactaaccataattcatggaagcaaagggaattgttttttgatgttttttagtttcagggacaagcacgaaaattcaaaagcatacacttacagcagacaacctcgcggatcttctctgtggctattaaagacaacgagaaagttagaaataggacaggtaagtcgctttgaaagtttggtatcaatttgctctagattataggagtgtaaattcaggacacaggttacggttaatcaccgagtccagtggcctctgctagtccaaggctttgacccttgaagagagaatgacttacttcgtccttcacc

SEQ ID NO: 1420 - DNA, 1128 bp, Artificial sequence
  DNA replication origin
aaagcagccaggcctcccaacaaccaaccagctttttttgttttgttatttttttaaaaaaaaatagagatagggtctcgctctgttggccaggctgtcctcccaaagtgctggggttacaggcataagcccccgcgcgcagccccagctttcttttttttctttttgctggagttaagcagtatgatctcggctcgctgcaacttccgcctccaaggttcaagccgttctcctgcctcagcctcccaagtagctgggactacaggcacgagacaccacgcctggctaatttttgtatttttagtagagacggggttttgccaaggcgaggccaaggcaggtggatcacgaggtcaggagttcaagaccagcctggccaacatggtgaaaccccatctctactaaaaatacaacaattagccaggcgtggtggtgcgcacctgtagtctcagttactcgggaggctgaggcaggagaattgcttgaatccgggaggcagaggttgcagtgagtccatatcatgccactgcactccagtctgggcgacagagcaagactgtctcaaaaaaaaaaaaaaaaaaatacctagggcccccagctgtagtcatgtcccattctggaaaacactaccatagggaattactggaagtaccctggggaggtaggatgaagccactgttggttgagcaaggttgtctgtgtatcaagtaaggaggcttgctgcttttcataattctttctgagccccagatctatcagcatatctgatcttaaccttccctgctggcaacacttcggtgactcccagttctcttccagacaaagagcaaatgtcttaacatggcccgcaaggccctttgggatcttgagataggtccaccatggctccactgggctggtgaatgagggaatgagataggagaaccaagaaacagggaggacttcctggaggaagtgacatttgagctgaaatctcaccaatttatgtgcgagaaccaggtgatggtggtgaagcgctttctagggagaaggaacagcgtgtaaacagttcctgagacaggaggaaaccttgtgcatgtgaccacctgaaagaggcctgaagaagaaaccggaggaatctgcagaggc

SEQ ID NO: 1421 - DNA, 1076 bp, Artificial sequence
  DNA replication origin
ggagagggccccgggtcggaggagcgagggccgcaccgctggagcccactcccgcctccttccccacgggccggcgcacttgggagctggacaggacgctcttcctgggctcggagcaggcgcgggcccgggttgagccgagcctgagcaggggcaggctctagctggcggctggccagatgccctccaggtgcgcagcgcgtgacctgcggcagggcggggcggccccacgagagttcttcgagggtggcgggcgagtcacgtgagcaggggttggggtccgccggataatgggggatgcgggagcccgctggaggagtggaggggcgccttggggaacggcggttaagccccagcgacgctcctggcctggatgtcgggccgtatccttgtcgaggctggggagctgggccgaggagccccatcccgcgggcgccgcctcccaggtggggcgcggagctcggctctgcgccgccaccgtgtggccgaagggggcagcgcctgcttggtgccaggaggctcctcggggctgacggcggggactcgcacgaggcaccgaggagcctctggcgatcggctttcgataccctgcccccttccgagctagggtccaggagtggggttgaggttgccatggcgacgggtgcgcgggctggtatcttcctctggctgctgtggggccggggcgtggacacccagcatctgccctcaccctgctcactgaatcaccttggtgtggacgaggattatccttcccaaaagcagccaggcctcccaacaaccaaccagctttttttgttttgttatttttttaaaaaaaaatagagatagggtctcgctctgttggccaggctgtcctcccaaagtgctggggttacaggcataagcccccgcgcgcagccccagctttcttttttttctttttgctggagttaagcagtatgatctcggctcgctgcaacttccgcctccaaggttcaagccgttctcctgcctcagcctcccaagtagctgggactacaggcacgagacaccacgcctggctaatttttgtatttttagtagagacggggttt

SEQ ID NO: 1422 - DNA, 1919 bp, Artificial sequence
  DNA replication origin
tcacgtgactcgcccgccaccctcgaagaactctcgtggggccgccccgccctgccgcaggtcacgcgctgcgcacctggagggcatctggccagccgccagctagagcctgcccctgctcaggctcggctcaacccgggcccgcgcctgctccgagcccaggaagagcgtcctgtccagctcccaagtgcgccggcccgtggggaaggaggcgggagtgggctccagcggtgcggccctcgctcctccgacccggggccctctccacctcgggggaagaaagaggcctctgcctccgcctccttccctgagcgctgccaccctcactccggccctctgaccgcgggtcccggacattgcgcttaggggtcgccttgcagggccagagaagctggcagaccacgcgcgcgcacgtgccggggcggggcgtcaccgggggcggggcctggaagggcggggtcggcgggctcgggttcccgcggggcgcgcgcggggtgacgggagccgggactacgcggaagtgggggtaggggccgcgggacggggaggggcgtccccagtacccgcgagtggcttcagggagcgcaaggccagctgagtctgggcgctggatgggcggccttggcattaggtccagatttgggtcctaagtactgtgcccaaccggcccgaggggaagggggaggagacaggaaccgcgcccattttccggatcaggttcttggaaccagcccggaaatcctgggactcaatctgggggccagatctggaggcgatggtttttctagagacgggctgatgcagccccagtatgccgtcgcactcatttcccacattccaggaacggtccaggtctgcccttcagcggtttgggaactccgcgacgactccctctctccacaactgcagggtgggccgcgctctgaaaacctggcaaagcgatgggggtccctcagagcccctccttcatattcagtttcaaaaggatttggcattggggaaaccttgggacctcaagccacatggagaaagagctccaggtcacaagggcttggacctgagggcacctcggctggctcctttctcgtgcagtctttgcaaaagaggaccaggtggtggccagaagggcactttgagggctgaagagctcaaactgcacagggataggaccgaggtgcagagtccttggggccctttttttttctgtcatatcttgttttgccattcggcctggaaatacctggaaattcttcctgcctgtttttccctcagaaaagttttttttatgtaaaagtggccaggcacaactgtaatcccagcactttgggaggccgaggtgggcggattgcttgaggccaggggttcgagaccagcctgggcaacatagcaagaccccgtctctgccaaaaatacaacaaattagccaggcgtggaaacgcgcgcctgtaatcctaactgctggggaggctgaggcaggagactcgcttgaacctgggaggcagaggttacagtgagccaccaagatcaagatcgtgccactgcactccagcctgggcgacagagaaaacagaaaaggaaaaaaaaaaaaaagaaaggacatctctgccgggctctgtgtgtggctcatgcctgcaatagcaacattttgggagcctgaggcagagggattgcttgaggccaggagtttgagtccagtctgggcaacactgagagaccctgtctctacaaaatataaacaaaatttgccaggtgctgtcatccgcctgtagtcccagctactccggaggctggggtgggaggatcacttgagcccaggaggtcgaggctgcagtgagcagccactctatcctgggtgacagagaccctgtctctaagaaatgaatgaatgaacatcttgctgtgagatgtgctgtgtaacc

SEQ ID NO: 1423 - DNA, 807 bp, Artificial sequence
  DNA replication origin
gccccgcccctgtgaggatccgggctcgccggccgcgggcgcccgtcccccgccccgctcactcacctccgggtccagaggcactagctccatgagcggccagggctccttgagctgggcgagcggcatctcgccgccgccaggtcacccgcgctcctccggcggccccggctgcgccgcctcccgggtcctggggtccctggctctgcgacccgaaccgccgcgcccccccgagcccctcgcgctccggctgggccgtccgccgccgccgccgcggcactagcacttcggctccctccgtcacccggcgccgccgcgcccattggctacctgcgcgggggcggagccggagaagccccgccccagcccccgcggcgcggcattcccagcgcggacccccgcccccgccgcgccccgagggccggccccgcccctgccgcgagcccccggcccgcgctcggctccgccggagaggccctgctggctccttcccttccagtggtgtacccctggacacaccacaccagggccaccgttctcccccgctcagctcttttggaatcccagcccagatgttccttctccttccaacgggagagaagcaccttatccccgaccccagcacacacattcacactgggttcctgggcctgatctaggctgaggcttggaaggagcctgagacccactccccttaggccctcaactcaccaggccctagagatcccctatcctctaatttctaccccgccctgaagctaacactgtgatctccgggcgatctcagtgccccaggccaagatgggc

SEQ ID NO: 1424 - DNA, 1434 bp, Artificial sequence
  DNA replication origin
gctcgcggcaggggcggggccggccctcggggcgcggcgggggcgggggtccgcgctgggaatgccgcgccgcgggggctggggcggggcttctccggctccgcccccgcgcaggtagccaatgggcgcggcggcgccgggtgacggagggagccgaagtgctagtgccgcggcggcggcggcggacggcccagccggagcgcgaggggctcgggggggcgcggcggttcgggtcgcagagccagggaccccaggacccgggaggcggcgcagccggggccgccggaggagcgcgggtgacctggcggcggcgagatgccgctcgcccagctcaaggagccctggccgctcatggagctagtgcctctggacccggaggtgagtgagcggggcgggggacgggcgcccgcggccggcgagcccggatcctcacaggggcggggcggcccgaagcgccgctgcagtccggcgggcgcccgcgagggcgcgagtgccctccgatctcttgcccactgtccggctccacccccctatgcccgggtgtgcgtgtgcgagggacagttccgccaagcgccgactacctccccgccatagccaggagaggggatcctatggggcgctgagatctggtcgccttcaccccacacctaggacccgtcccggcatctgtccagagctgtcggagcttcctccattaatgcagacggggagatcttcagtgccagatgtctgggattctaccagagacaggggttatgggacccccacttctcccagggccctccgccaagagctccctgcttctggcttcaccgctgctgagcctagaaggattgctcctcttgacccctggcggatgcggagtgtgggatggcaccacccgtctggggctggaactcctggttttctttgccctgaggctagggccagaggacacctgtgtgccctaccccaggctgtggagacgagagtggggaagagcccttagaccttgtgaagatgattcctggcagggcgtggggggaccttggtgcctgcctcccttcttatgccccttccggtaggaagggctgggcccttggggagtttggcttctgccagcccagactccccagacaacccagctccttctctctcagaagcagctcctgacctcccttgagggctctgtggctccagtccctaagcgtgcagaaggccacctcttcctgtgccttttgaccccagggtcaaggtcaagcccctgaatgagctggtggaaaacttcctccttaacctcttgctgggaaggaagcaggtgatattctccttcccaggtggttgttgggggtatgcagggagggaatggagacctcatttgagcccaggagctgagatgactttctcccagcttgggcctggagcccctgtctcagtcccctcctctgccctctc

SEQ ID NO: 1425 - DNA, 855 bp, Artificial sequence
  DNA replication origin
ccctgtgggcctacaaagggaaagtcccctgccaatgcagctgctgagcagactggtacccaacagcagagaggtacccaatagcaaacaggtacccaacagacaaagacaggtgcctgatatgtggaggcagacgaagagagacacccaacaggcagaagcaggcacccaacaggtggaaacaggtaagaatggcatccatcatgcctgtaatcccagcactttgggaggctgaggcgggcggatcatgaggtcaggagatcgagacgatcctggttaacatgatgaaaccctgtctctactaaaaatacaaaaaaaaaaaaaattggccaggcgtggtggtcagctcctgtagtcccagctattcgggagctgaggcaggagaatggcatgaacctggaaggcggagcttgcagtgagccgagatagcgccactgcactccagcctgggtggcagagcaagactccatctcaaaaaaaaagaaaaagaaaaagaaagaatggcatccaacaggcaggggcaggagagaacacatacccaacaggcagggatggaggataaggacacgcacccaacaggcagaggcaggaggaattcatatccaatagaaaacagatggagacacgtacctgacaaggggaagcaggaggggactcatatctaacagacagaggtggacagagactcatccccaatgtgtgtaggcagatagggacacaagcccaacagccagagacagatggggacatatacccaataggtaaagacagatggggacatgtacccaacaggcaaaggcaggaggaacacatctccaataggcagagacagaagagaataccaacccaacaggc

SEQ ID NO: 1426 - DNA, 2086 bp, Artificial sequence
  DNA replication origin
cccacctccctcccggacggggtggctggcccggcagaggggctcctcacttcccagtaggggcggctgggcagaggcgcccctcacctcccggacggggcggctggctgggcggggggctcaccccacctccctcctggacggggtggctggccgggcggggggctgacccccccacctccctcccggacggggcggctggccgggtggggggctgactcccccacctccctcctggacggggtggctggccaggcagaggggctcctcacttcccagtaggggcggctgggcagaggcgcccctcacctcccggacagggtggctggccgggcggggggctgaccgcccccacctccctcccggacggggggctgacccccccacctccctcccggacggggcggctggccgggcggggggctgacccccccacctccctcccggacggggcggctgccgggcggagacgctcctcacttcccagacggggtggctgccgggcagagggactcctcacttctcagacggggcggctgccgggcggaggggctcctcacttctcagatggggcggctgggcagagacgctcctcacctcccagacggggtcgcggccgggcagaggcgctcctcacatcccagacggggcggcggggcagaggcgctccccacatctcagacgatgggcggccgggcagagacgctcctcacttcccagatgggatggctgccgggaagaggcgctcctcacttcctagatgggatggcggccggtcagagacgctcctcactttccagactgggcagccaggcagaggggctcctcacatcccagacgatgggcggccaggcagagacgctcctcacttcccagacggggtggtggccgggcagaggctgcaatctcggcactttgggaggccaaggcaggcggctgggagatggaggttgtagcgagctgagatcacgccactgcactccagcctgggcaccattgagcactgagtgaaccagactccgtctgcaatcccggcacctcgggaggccaaggctggcggatcactcgcggttaggagctggagaccagcccggccaacacagcgaaaccccgtctccaccaaaaaagtacgaaaaccagtcaggcgtggtggcgcgtgcctgcaatcgcaggcactcggcaggctgaggcaggagaatcaggcagggaggttgcagtgagccgagatggcagcagtacagtccagcttcggctcggcatcagagggagaccgtggaaagagagggagagggagaccgagagggagaggggagaggggagaggggagaggcagaggcagaggcagaggcaggggcaggggcaggggcaggggcaggggcaggggcaggggcagggctggtcttaaagggagaagagccacatattaactcttttaatcctaatagccctttgaggtaggtaccatataatcattcccattttacagatggagaagttgattcccagagactttgaataacttgcccaaggaaatgaataaggtttgaacccagtcagtctggctttagggcatgtatacttaactacccagctgtatgtttgcagtaatataagcttcatttccccagtgctttctgtgtgccagtccccaagctaagctaacaccatacatccttacaactaagctgcactttggagatggaaaagctcagactcaaaggggcatgagggcccgggtgcgatggctcatgcctgtaatcccagcactttggaaggctgagacaagcagatcacttgaggtcagaagttcaagaccagcctgcccaacatagtgaaatcccatctctactaaaaatataaaaataagccgggcgtagtggcaggtacctgtaatcccagctacttagaaggctgaggcagtaggatcacttcagcctgggaggcagaggtgtagtaagccaagatagagctactgcactccagcatgagtgacagagcaagactcagtctcaacaaaaaaacaaaacaaaacaaaaaaccgcaaaacaggctgggcgcagtggctcatgcctgtaattcccagcac

SEQ ID NO: 1427 - DNA, 987 bp, Artificial sequence
  DNA replication origin
ggaggtgaggggcgcctctgcccagccgcccctactgggaagtgaggagcccctctgcctggccagccaccccgtccaggagggaggtgggggagtcagccccccacccggccagccgccccgtccgggagggaggtgggggggtcagccccccgcccggccagccaccccgtccaggagggaggtggggtgagccccccgcccagccagccgccccgtccgggaggtgaggggcgcctctgcccagccgcccctactgggaagtgaggagcccctctgccgggccagccaccccgtccgggagggaggtggggggatcaacaccccgcccggccagccgccccgtccgggagggaggtgggggggtcagcccccgcccggccagccagcccgtccgggagggaggtgggggggtcagccccccgcccggccagccgccccgtccgggaggtgaggggcgcctctgcccggccacccctactaggaagtgaggagcccctctgcccagccaccacctcgtctgggaggtgtacccaacagctcattgagaacgggccatgatgacaatggcggttttgtggaacagaaaggggggaaaggtggggaaaacattgagaaatcggatggttgccgtgtctgtgtagaaagaagtagacatgggagacttttcattttgttctgtactaagataaattcttctgccttgggatcctgttgatcggtgaccttacccccaaccctgtgctctctgaaacatgtgctgtgtccactcagggttaaatggattaagggcggtgcaagatgtgctttgttaaacagatgcttgaaggcagcatgctcgttaagaatcatcaccactccctaatctcaagtacccagggacacaaacactgcggaaggctgcagggtcctctgcctaggaaaaccagagacctttgttcacttgtttatctgccaaccttccctccactattgtcctatgaccct

SEQ ID NO: 1428 - DNA, 1018 bp, Artificial sequence
  DNA replication origin
gtatttttagtagagacggggtttcactgtgttagccaggatggtctctatctcccgacctcgtgatctgctcgcctcggcctccgaaagtgctgggattacaggtgtgagccaccgcgcccggccaggaaaagctatcttttaaaattaaaatggtagtttggtgtttttttgaggggtcacatttcatgaaaatgttctcaaaccctaaggaacagtgttgagccgggacagcgaataggataattacaaaatctaagagaaagcattacacatcgtgcttaaaaacgactttacgtttaaaagataacctgtctcacgtctataaaccccgtatgccagctaaaatctctcactggcccttcttctaacgtaagtcatcgttacacagttgacctgcgatgtacattatttctatggcttttgctaactgggctggtggtgtttggtcagaaagcttgagggtcctaagaggaaaggtttaggcgctggttttctaaggttgcttaaattagagaaagtcgagggtttatccttctagcggcagttacggtgctggatttcgggaactcgaggagcctttaggggtcaggccgtcagagccgtggaccttaatttccccatctctaaaatggggaaggaggctgctctctgaggaaggcaggaatacaggatcataacccgccgcccagccaacgtgagagcagccatccagtaagagcaaggaggcggcggggcggagaggagcgagaacaaggcagtttgcaggaagtgcttcagggttgggaggggagactgagggcggaggcgggaatgtgaaagctgagctctagctgcggagtttgtaccgaagctcaggaaaggcgggtcgaaaaaactggggtgaaggggttattcagtggatgggcaagacgggccgcctctcccgaagagagagagctggatgcggggaaggctctgaggtggcggctgaggaacgtgggggaaagggggaggtgaacgcgctcagaaaaggggc

SEQ ID NO: 1429 - DNA, 1066 bp, Artificial sequence
  DNA replication origin
ataatctaagataatgctcctgtggccatgaagtctccctttacaaaatctgagggggaaaagagatcctggtgtctaggaacactggcctgggcctttcccaaggcagccttgggtctggtgaggagctggaatcccctctggcttttgtagcctgtcatatcagaacattccaagtcagcctgaggaagaaaaggctgctgctgggatttggtggggcctgtagatcaggagaacactggagctttctgtgtatgtcgatcttttcagataaacctggccttctacccaactccagctcaatcggggtctcttagaatgtaatggtaaactttaaacaatctttacgctacaggatagaaaacaaatctgacaagcatccattttctaagtgacttgttggactgtgccttttcttcaaggagaaaatggtttccattttctgcatctctcttctgtaatggtttgaacactcaggttcctgcagtccctggagcctcttctgtgggttttcagtattagaaggtactgtctttggagactggggctacttgtcatggtaggctaagttttcttaagagggagtgagaaacggtgtttaggttttcctgctgggtaactgttctatgctcctaaagcaacttcagtggcctccattttaagttagtggtgagatgatcagttttgacttcaaatccattttgatattctgatcccattgttgaatgtgctcacaacttgatttttttttttttaaaggcaagtagaccgaaggcagctttggtgactccacttctttttaaagtcaccctcctctgccctctgactttaagtgacaggcagttccctcccctctctttcaattctgtaaaatggggataatccggacctcatgcccccagagccttgtaaggaccggctaatgagggcaggcgagtgggaaacgaatcgtctgaacaatgatcagtcattctttcgggcttgcaaagagggtaaaaaaggttgggtctttagcggggtccgtagaaggctttgaagacgaaaagtgctgtagaggtgctaagca

SEQ ID NO: 1430 - DNA, 1729 bp, Artificial sequence
  DNA replication origin
tgagctccccgagaggtggcactccgggctccggcgcggcggcggctgccggctccaagccgcctccctcctccagcgcctccgcctcctcgtcgtcttcgtccttcgctcagcagcgcttcggggccatggggggaggcggcccctccgcggccggcgggggaactccccagcccaccgccacccccaccctcaaccaactgctcacgtcgcccagctcggcccggggctaccagggctaccccgggggcgactacagtggcgggccccaggacgggggcgccggcaagggcccggcggacatggcctcgcagtgttggggggctgcggcggcggcagctgcggcggcggccgcctcgggaggggcccaacaaaggagccaccacgcgcccatgagccccgggagcagcggcggcggggggcagccgctcgcccggacccctcaggtacacagctgagtggggagggggctggggcgagcgtggtcctgggggtgggtggcggctgcggtgagcgggccacagccttgggctcccctcagtcccgggcccccactgctggggagctgccattgtctggctcttctctcttaaaatggctgcctgtctgccttcctctccttccctccttcagcctttgtgttgggtttttccagaggtgtctgctcctctttttcctctcccctggtcccttcgaactccaggggtcttgatgggggtgcggggcagagtgtgcggggaagggcctggccgggggtgagggggtgagggggcgctgggggctcaggttaggagtgtaggcagtggtaggagcccaggagttgaatgaacgtttctttgctcacctgccgctcctctccgtcccccggccttcctctgggccgccccccatctgtgctttcaaagagggcccctagagctcgaggggacctcgaggggagggcaggggactgcttgggagctgctagaggccggctgcggttcacctagggcagcccggtccatctcctgtcttaggctccgccggcccagtggcctgggcttctccctggaagtgctggtaaacagctgagtgattggagtagtaagtgcagattgctttggtttgggatttgaattatggaggtaaaatccttctgtcaaagccaggagacagttggtcttaggttgacatcctatctgtgatctgattggctccccatctcctgctcttggccatttataattgcctctgatgtaatggtacaacaatcctgatgagctcataaacttttacactctgcttttctgccagtgataacccaaactatcgctgccactatctgccttttattccagagctgaaattggctgtgaccttgaggagggaggtttaagtagcaatactgtatcagcaagagcaaagcctcagacagcctgcccttgttacattgtgcccaaacaaaagaggaggcaatggcattttgcttgtaccttggatttattttgcttgttatgttttatgcagcctgaaatgaattctgtgttgtcagaacagtagctgagttttttctctacaatgggtttgctgtttgttttggttttgtgactttcctgatggtataaatgacttctttgatggctctgaagatgcatttatcttgagtaattttgacactggttgctttgcagaattgaaatgattttactgggctttttattgagtggcaaatgtgggatctttatggggg

SEQ ID NO: 1431 - DNA, 889 bp, Artificial sequence
  DNA replication origin
tgagcgatagcagaatggaatggcagttggagtgaatgtacagtactgcctctcaaagtgactgttttgaaaaaagaccaactcacttagatgctgaagttctgatgttgatttacaaaataaaataaaataaaataaaataaaaaaaccagtcccattatctttaatttcttatccatctatgcaactttccattgccctatttcttcatcattaaggagagctacaggtctttatgcagttaaggaggttatgcctttattagttcaatcaatccagttatcatgtttacccagagtttaattggtctttaagtgcacgttagagaaccactctgtacagcaaagttctcatgacactaacccccaagctgtctgtagtcacacacagggaagggcaggaggcagggatatcttacctgcggtggagggaagcgctgctgggaataggcagtttgctgggactgctgagactggggctgaggatacgcagcctgctgggagagcgtcgagggtgctggctgctgaggttgctgctgctggtaaggagactgagcctgtggctgtgagtaggggggctggctctgggggtgctgctgtgtcgtcgactgctgggaggggtatggagccggggactgctgatgtggaggctgggatggctgctgggagtatggaggctgagaggactggagctgtggtggttgagactgtggctgctgctgatacgaaggttgggcatgaggggtctgggacggtggttgctgggagtagggtggctgctgctgctgagggtgaggactttgctggttgtaatatggagtctggccctgttgaccatacccgctggggccttgttgtccataaggaggaatctgtaggaaaggaaaata

SEQ ID NO: 1432 - DNA, 1753 bp, Artificial sequence
  DNA replication origin
gaaaccccaagaatgtttttctttggctattcagaggacatctattgtgtgtcaggccctgtgctgagctgttgttgcctgacagcaggaagagcgcggctctggtttctgtgaagaggctgcgggtcagcctccgactacaagagcctcggcccacaccgggaactcagtgaacgtcagcgggagctggggcaagagcactgactctgagacagcagcctccgctcactatttgaaggcggggtggcggggggccttgaaggagagcgaagtgcgagagaactcttcaggtgtcaccaaggtgggaaggtgctacgaggcgaggcgccgagcggcgacccccatcccgctcgcccggagtcaacatggccgccgcgcagggaggcggggctgctccaagtccgggcaggagcggggcggggacgccgtcggcggagccagcgcgcaggcgcgggccgcgtgggccccggatggaggagctgaggttcggtccccgccggggaggtcgggacgggcaggggctgaggaccccgcgccagcttgggagccctggagttctggcgggagggaagctgtcaaatggaagccggtagaaatgagacagacgcccggagaagcggggagccccgcccctccgccatagcagcctcgggcgccgcctcttcctttccagcctcccgccctcgtctgcttccggccctgtggcctggtggggctctgcaggctccctcgggagtggtccttgggccgtggcccctctggggtgagcgtggatgattagtacccagaagggactgtgtccaaaaggagccggccagaaacgggttgcggacacggctgggctgacagaaggcagcccccacgaggcctttggctctgaggaccctgggtcagagcgacttctccagcctgcgcagggggtgttagtcttacccagagggtccagagctgccgttcaacaggatgtcccagattctcagatagggcccaactaccctaagcatacctagcaagggcaggctgcggcatggaagtactgggctaggcgtttgggtgacctgggtcataatcctggctcggaaagggcgcgtaccctttggcgagggatgcgggctggtaccgtgaggtttaagaagcagaaaacatgacagcctctttaagtagccctgggtacgtcacttgaccccagtgagcctcagtttccatatccataaaatggcgatggtaattatactagcctcacagtgtctgatgagatctctggagcctatttatctcacgggaaaatttttgaagagtgaaactagttgatctgtaagtgtcctgccagttaagagtctgtgatttggcaaaggggttgttgggaagtgaggtgggcaattagctgagagggagaattgactagctttgtttttacttggtttacctgtaagcaaagtgtgggctacacacatctgtagtcgctgaggctagagcttgactcgagagaggaaaggaagaatgcaagcatggtcaagtggcagaggtgggttaggtgcttttctgatcccagcttctcttctgcatgcgcgtgggaagccaaggaagaggaaaaaagagtgaattcgccctaggatagggaaggagtagccgcgtgaggttgagtatgcccatttccgtgatttctctcgattcagcgagtcatacgttggaaacgtttagattcacaaactatcgttactgtctggggctttcagaagcttgcctttgaacc

SEQ ID NO: 1433 - DNA, 1749 bp, Artificial sequence
  DNA replication origin
agtgaggagcccctctgcccagccaggagcccctctgcccagccagccgccccgtccgggagggaggtgggggggtcagccccccgcccggccagccgccccgtccgggagggaggtgggggggtcagccccccgcccggccagccgccccgtccgggagggaggtggggggctcagccccccgcccggccagccgccccgtccgggaggtgaggggcgcctctgcctggccgcccctactgggaagtgaggagcccctctgcctggccagctgccccatccaggagggaggtggggggctcagccccccgccgggccagccgctccgtccgggagggaggtggaggggggggtcagcgccccctcccggccagccgccccgtctgggagggaggtgggggggtcagccccccgcctggccagccacccagtccgggagctgaggggcgcctctgcccggccgcccctactgggaagtgaggagcccctctgcccggccaccaccccgtctgggaggtgtacccaacagctcattgagaatgggccatgatgacgatggcggttttctggaatagaaaagggggcaaggtggggaaaagattgagaaatcggatggttgccgtgtctgtgtagaaagaagtagtcatgggagacttttcattttgttctgtactaagaaaaattcttctgccttgggatcctgttgatctatgaccttacccccaaccctgtgctctctgaaacatgtgctgtgtccactcagggttaaatggattaagggcggtgcaagatgtgctttgttaaacagatgcttgaaggcagcatgctcgttaagagtcatcaccactccctaatctcaagtacccagggacacaaacactctgcctaggaaaaccagagacctttgttcacttgtttgtctgctgaccttccctccactagtgtcctatgaccctgccaaatccccctctgtgagaaacacccaagaatgatcaataaaaaaaaaattaaatttaaaaaaaaaaaaaaaaacacttttccgggagtagaggactctaaggagctagagcaggacagtcacaaaatggacaagactgggtccccaataattgggcggaacagacctcccttcctaaacctgcactagactatgaagtaaaaaagaaaggaacttttattattaagccactgagttttggcggttgtttggtatcgccgttagcctaccttggataatatccctaatccctaaattcaatagtttttctcatcctttccttaacagtatatgaccctgctaaccatttctttcttcttgaaacttttttcttgagacagggtctcactgtcacccacattggagtgcagtggtgtgatcactgctcactgcagccttgacctcctgggatcaggtgaccctcccacctcagtctcccgagtagctgagactacagacgcccaccaggatacctggctaatttttgtattttttgtagagatggggtttcaccatgttgcctaggctagtctcaaactcctgggctcaagcgatccacctacctcagcctcccaaagtgctaggattacagacatgagccactgtgcctggccttgaaactctcttttccgccaatgatacaatttgtttctggtcctttaatgataataatgataatacaatagctaccattcatgaagttcttgccatacaggcactgtgctaagtgctttatcttcatgactgcccat

SEQ ID NO: 1434 - DNA, 1165 bp, Artificial sequence
  DNA replication origin
cagctggccaggcagaggggctcctcacttcccagtaggggcggccaggcagaggcgcccctcacctcccggacggggcggctggccgggcggggggctgagccccccacctccctcccggacggggcggctggccgggcggggggctgacccccccacctccctcccggacggggcggctggccgggcggggggctgacccccccacctccctcccggacggggcggctggctgggcagaggggctcctggctgggcagaggggctcctcacttcccagtaggggcggccgggcagaggcgcccctcacctcccggacggggcggctggccgggcggggggctgagccccccacctccctcccggacggggcggctggccgggcggggggctgacccccacctccctccccgccggggtggctgccgggcggagacggtcctcacttcccagacggggtggcaaccaggcggaggggctcctcacttctcagacggggcggttgccaggcggagggtctcctcacttctcagatggggggcgccgggcagagacgctcctcacctcccagacggggcggcggggcagaggcgctccccacatctcagacgatgggctgccgggcagagacgctcctcacttcctagatgggatggcggccgggacgaggcgctcctcacttcccaggtgggatggcggccgggcagagaagctcctcactttccagactgggcagccaggcagaggggctcctcacgtcccagacgatgggcagccaggcagagacgctcctcacttcccagacggggtggcggccgggcagaggctgcaatctccgcactttgggaggccaaggcaggcggctgggaggtggaggccgtagcgagccgagatcacgccactgcactccagcctgggcaccattgagcactgagtgaatgagactccgtctgcaatcccggcacctcgggaggccgaggctggcggatcactcgcggctaggagctggagaccagtccggccaacacagcgaaaccccgtccccaccaaaaaaacacgaaaaccagtcaggcgtggcggcgcgcgcctgcaatcgcaggccctcggcaggctgaggcaggagaatcaggcagggaggctgcagcgagccgagatggcagcagta

SEQ ID NO: 1435 - DNA, 1033 bp, Artificial sequence
  DNA replication origin
aacctccctcccggacggggcggctggccgggcagaggggctcctcacttcccagtaggggcagctgggcagaggcgcccctcacctcccagacggggcggctggccgggcggagggctgaccccccaacctccctcccggacggggcggctggccaggcggggggctgacccccccacctccctcccggacggggcggctggccgggtgggggggctgacccccccatctccctcccggacggggtggctggccgggctgaggggctcctcacttcccagtaggggtggccgggcagaggcgcccctcacctcccggacggggcggctggccgggcggggggctgacccccccacctccctcccggacggcacggctggccaggcggggggctgacccccccacctccctcccggatggggcggctggccgggcggggggctgacccccccccacctccctcccggacggggtggctgccgggcggagacgctcctcatttcccagatggggtggctgccgggcggagaggctcctcacttctcagacggggcagctgccgggcggaggggctcctcacttctcagacggggtggttgccaggcagagggtctcctcacttctcagacggggcggccgggcagagacgctcctcacctcccagacggggtctccgccgggcagaggcgctcctcacatcccagatggggcggcggggcagaggcgctccccacatctcagacgatgggcggccgggcagagacgctcctcacttcctagatgtgatggcggctgggaagaggcgctcctcacttcctagatgggatggcggccgggcggagacgctcctcactttacagactgggcagccaggcagaggggctcctcacatcccagacgatgggcggccaggcagagacactcctcacttcccagacggggtggcggccgggcagaggctgcaatctcggcactttgggaggccaaggcaggcggctgctccttgccctcgggccccgcggggcccgtccgc

SEQ ID NO: 1436 - DNA, 1753 bp, Artificial sequence
  DNA replication origin
cgcccggccagccgccccgtccgggagggaggtgggggtgtcggccccccgcccggccagccgccccgtccgggagggaggtgggggggtcggccccccgcccggccagccgccccgtccgggagggaggtgggggtgtcggccccccgcccggccagccgccccgtccgggagggaggtgggggtgtcggccccccgcccggccagccgccccgtccgggagggaggtgggggtgtcggccccccgcccggccagccgccccgtccgggagggaggtgggggggtcggccccccgcccggccagccgccccgtccgggagggaggtgggggggtcggccccctgcccggccagccgccccgtccgggagggaggttggggggtcagccccccgccgggccagccgccccgtccgggaggtgaggggcgcctctgcccggccgcccctactgggaagtgaggagcccctctgcccggccaccaccccgtctgggaggtgtgcccaacagctcattgagaacgggccaggatgacaatggcggctttgtggaatagaaaggcgggaaaggtggggaaaagattgagaaatcggatggttgccgtgtctgtgtagaaagaagtagacatgggagacttttcattttgttctgcactaagaaaaattcctctgccttggaaaaaaaaaaaaaaacatatcccagagatagatagaatgactgttgagagtccgcatttctggcgaggcgcagtggctcatgcctgtagtcctagcactttgggaggctgaggcgggcagattgcctgagctcaggagttcatgaccagcctgggcaacatggcaaaaccccatctctactaaatatacaaaaaattggctgggcgaggtggctcacgcctgtaatcctagcactttgggaggctgaggtgggcagatcagttgaggtcaggagttccagaccagcctgaccaacatgctgaaaccccgtctctactaaaaatacaaaaattagctgggtgtggtggtggacgcctgtaatcccagctgctcgggaggctgagggaagagaattgcttgagcccaggaggtggaagttgcagtgagccaagatcgcgccactgcactccagcctgggcaacagagcgagactcatcccaaaaaaaaaaaaaaaaaggccggttggtggctcatgcctgtaatcccagcacttggaggctgaggcgggcagatcttgaggtcaggagtttgagaccaacgtgaccaacatggagaaaccccgtctctactaataatacaaaaattagctgggtgtggtggcacgtgcctgtagtcccagctactcaggaggctgaggcagaagaatcgcttgaacccgggaggtggaggttgcagtgagtcaagattgggccactgcactccagcctgggtgacagagcaagactgtcttaaaaaaaaaaaaaaagtcagccgggcatggtggcgtgtgcttgtagtcccagctttttgggaggctgaggcaggagaatcgcttcaacctgggatgtagtggttgcagtgagccgagatcatgccactacactccaagcctgagtgacagagcaagactctgtctccaaaaaacagattccacatttgttcattttggtggagtgggtgagaatgtacttatacaaaagatagttgtatagttgcactttgttaggtggaagactggagttgccttgttatatggaggttcaaaaatgtagaggcagg

SEQ ID NO: 1437 - DNA, 1623 bp, Artificial sequence
  DNA replication origin
cgggaacacctcccacttgcgccgtgggcggcggccgaggctcccgctcccgctgccgctgccgctgccgctgctgctccagcgcggcggggcgggggcggcgggcggcgcgggcccggggcccggagtcggggacgcggcggggccgggacggcgcgcccccggggaggcgggcagcggggcggccccggggctgatctgctggtactcgcagtccttcatgcagccagccgcgggcctcggctccgcgccccgcgggccggccgggccactccgggaccgggccgagcagcggaggtggcagcggcggcgcgcgcggcgctcgctcgctcactcactggggcggccccgccatcgctccgcccccggcccgccgccaccgcccgccgcggcctcccgccgcagcgccccctccgcctgggcccgggatggcgcttggccggaggcccagctctgacccgcggcggggccccgcaggtccccggccctcccagtctcccttttcccttctgcacaaagagggggccagcagacgcgcactcgagggctctttctgttctgcaagcaagccgtttgttgggcgtccactgtgtaccaggcacggtgccaaacgccgagattcaggtggtggacttcgtgatctacttctggcagtctgtaattccccaggcttcgcccatctctgagggtcgaactgacaggcatttgcagaggcaggcaggcgcggggaggtggggcacacgatttgctttgaaagccaggacctcttctaccttgaagtccagagtgcccactggaggtgtgtggcacaccctctggcctcgttcaccaagttctgtgtcctgggcccaggcccagattttcctaggtagcacataatgtagaggggtcatgcctgagggccccagtgttttttcaggaattctgggagtattcattttctactgctgtgtaacaagttaccacaaatttaaggcttaaaacaaacattatcggccgggcgcggtgtctcacgcctgtaatcccagcactttgggaggccgaggtgggtggatcacaaggtcgagagagaccatcctggccaatatggtgaaaccccgtctctactaaaaataaaaaattagctgggcatggtggcacggcatctatagtcccagctactcgggaggctgaggcaggagaattgcttgaacccaggaggtggaggttgcagtgagccgagattgtgccattgcacccggcctggtgacagagcaagactccgtctcaaaaaaaacaaaaaacaaacgttatctaacaggttccaggtcaggagccagagaacagcttagctgggtcctctgcttagtctcacaaggctgcaatcaggctgcattctcatctggagactcagccagggaagaatccacttgcaagcccatttgggttattggcagaattaacttccttgcgactgtttaactgaagagggcctgggatttttgctgggtgactgtataactgaggagggcctgggatttttgctgggtgtctgctggaggcctctctcaggatccaaaagccacctgcagttcctagagattatcacatttccttgccatgcaggtttctcctacatagcca

SEQ ID NO: 1438 - DNA, 1678 bp, Artificial sequence
  DNA replication origin
aaagggagaagctaatttataggaagtcttcaccttgcttcaaggggaaacccaaagttgcagatacatgatctggcagctagaaagggtacctgggggcgggtgtctctatgatagccttaccatggccacatgcccttgggaagtgttttttgataaagacaacacaagtactaatagcagccaacatagtgtgcttgttactgggctaaaagcttgcatgtgtgacctcatgccaccctcaggacaaccttacggggtgggtactattataaatcccattttactgatgaggaaactggggcactgagggggtgaagtgactgccctgaggtcacgcaattagtgggtggtggagctgggatttgaaccaggtctgttagagttcttaactacactgtataattaagaggaacaaccacaaaggatggggagttgggaggggacagcagggcttatgaagcaagggtgggtgggtgggcgtgtgagtgtgtgtgcaaggaatcacagtgcaggtggctcagaggtgggtggaaaacttctaatacaaatatatgaccctccatccataaaatggagattatgtgtgggccaatcctgggtcaccgggggatatgaagaggacaaaaacctaggggggcaaatatgacctgtcacacgaaagcactccgaagtctttcctgaaaaacaacaaggcaccgcagctgttgctgatgtggaacaggccagagggacgttccagaatgttgagcagggaaagaaagccaggtggtcagcaggggggccaggggcctgggagccggctgggtggaggcgggcgggatctgagggaaggacaggaagctctggagaacctaaggaaggttctggagaaggaaagggggcccgagaggcccaaagattttgagaaaagatgccttggggcctagggtgtgcgtggctgaggggaagcaaaagcggggttggtgtctgagactagagaaaaggaggggaccctggagggacccggagagggcagcgaggatgactaggatgtttatggtgggtgtgcacagccaaaggacacacaagatctagaagtggtcaggaagggatacaagggtcagaaagaacttggggggttggcaagagatggtccagggatgggtgagcaggaggggcctgttcaagaagccctggggcaggttctgagagggcagcgaggatgggggccgtggaggggcatggaggctggtgttcctggcagtggcaggcagacaggtgccagggtggggtcagggagaatggaggggctgggagggtggagggcaccagcgcggatggggtacccaaatggaccaaggaggatggggcatctggcggggatgggggtgcgcaggggccaggggggcagacaagaggcccgaggaggatcccaaaggggcggggaggatgaggaccagggaggcgaaggggaaggcacggagtgcccagcagggattgggaaggtggggtgcgcggcagggggctgggagggggcgccgaggcagcggaactcactcaaagacgaagaagaggccggtggtggtgaggatgagcagcagcgtgagcgcgaagacgccgccgtggccggccagcatgaggcggccgccgcagtagaagcgattgcgacccgggaacacctcccacttgcgccgtg

SEQ ID NO: 1439 - DNA, 1027 bp, Artificial sequence
  DNA replication origin
gtcctatgtgggaaacagggcttctgctcttgaaagagtggtctcatgtgtctacaaggttacacggggtggtatgtgccagagggatggggagggcaggtcagagagagtcctgggggcctgaggtctgagtttggggcatctggtgggaggtggggggatacagggcttgttctgggccctgaaggatgcctttattggggatttgattaggtcctggtggggacagttgttgagctgagaggaggagggacattgaagtcaccagggggaaagaggatgaatggttagctggggtcccaaatgccaggcagagcagtttggcctgggctcacagactccaagaggatcctgaagatgcacagacacaggtctgcctacttagggggccacttttccctttactatgacgcagggaagatgaacacactctggcatgggggtgtctccccactgtgtgccccaccctcaggtgcaagggtgcgtgcttctgctgtgtgactgtgtgggggtctgcagtacattgctgagtgactgtatctgggcagtgcttttctgggctataagtgggtggttggagagtctgttttatgcgtctgtgtaggtgtgcctgagttgtacatcttagtatgtgtgtgttggggggtgtccaagttgtgttgtttgtatttgtgtgagatctcagctgtgtttttgtctctatctggtgtctgacttgtgagtgagaggctgggtaagggacagggttccccttgctcctggcactgggtcaccataatgggtacgaggccaattagctatagtcctaacctggggggcttagagaaaggcctgaatgatgacgcctagactgttatccccaagtgaatggcctcttattgagcaatcattaacttggcccctgtgacaagaatccaaactgttatggtgaagagggtggggactggtcagggcaggacttactgcgggtgaaagggggaggccggaaaatcctataggcatgtgtgttgttatcactccttcctgc

SEQ ID NO: 1440 - DNA, 778 bp, Artificial sequence
  DNA replication origin
atcggggtagctgaagctgctgcccatggttgacttgagccgctggccatcccgccggctggggggtgcacgatcagggctggggggcactccattgtgctccttggcccagttggcttcagcagtcccctcagtggagtcctcagtagacaggcaggggctgcatccccgcacacaggctccacagcgctggaggcaatcccggcagcggcggaagcagaaggcagcccggcaccactcccacacccagggtcgccagagcaggcagcaggtgggggactcaagggccggctcagcagagccagagatgaaggtaatgctctctggcccatggtggccagggtccttggggtctggtctacgggtgcggcggcttggtgggggctgaggtggtttatcatatgtctccagacatagctctgttggccgctcccacggtcccaagcgtggaggcccagatgctgggcgggggtgtccagggcggggcatggctcattgcatggtttgtagcagccaggcacctgcgtggggagaggccaggaaggagtcaggatcagaggtgagggacaaactcctgggctgacttgagcagcttcacatttctagtttctgagaggcctgggatgtggatggacccaagtatgcccaaaaacccttgcctgggatgtggatggacccaagtatgcccaaaaacccttatctcttgtggccctccctccacaaagagaaagtctctgtggtctaacccagatttcaaaattccctgtgacttagacct

SEQ ID NO: 1441 - DNA, 1545 bp, Artificial sequence
  DNA replication origin
acccggactaggctgaacgggccgagcactcgagcggggacgcgcagctctgcagagccccggggcggggcctcggtccaggtgcgcggtagcgcttcgcggaggcaggaagtgtgtccctagcggcggcccgtgcagcgctcccgcgagacgctcacctgcgccccaggtgagcggcgagggggcgggggaggggctgagccggaggcggctcacctggcgggacaggtaagcccggcgcgggcccaggggggcgcaagccagggcggcgccggtgtcgggagccccccgaagctgagcccggacaggagagggtcccgggcccggttcctcgggggccaccctcctacttccggggtgcgcgggccgggctggggagcggcctgagcgggcgcccgggctgggcgcgcagaatggggtgaggggccgcgttcgcccttagggctgcactggctgggtgcgggggccgcactcaccggggggcagcgtcgggatgggacaaacgctggtgctcaccccgaggaacagcgtcgggacgggagggaggctgggtccgcccgcggggtagggcccttgcagctggagagggtagtgctcgccccgagggcagagttggtgtaggggctgtggtagcccgggggacagtgccaggatctggttcttccttgtccccaggactagctgcccgcggatatgggactctcgggctgcacctttggggcaggaggccgagggtgcactgagccgacggctgtttctcgagcaggactggggtggtcctccccggccgggtgtccgaggcttggcactgggctgggggcagaggctggtgcggccgggcctgtcctggggaccctcggaggaggggacggtacatagacccttgagtgtgtgtgtgtgttcgcgggactaagggggaagaggaaagcatcaacgagaaatccagggagggcgggccgggaccctctgacccccgggaacatccttgcggtgccttagatcgcctagtgacctagcccctcccatgggcaaggccactgcgggaagccccctgcactcaatatttcatttaaatctcacgggattggcggggcatgaagatactagtctctccttatttaaagatgaggaaagtgaggttaagaatcttgcctcaagccacaatagggacagggagtctcccctcactaaaccaagtgaccaggttcctaggattgggcggggtggtggcggggcggtggcagcagggtcggggagatacagcctggaagaaactgcctgagtttgacttcaggagggttcaatggctggagggaagtggggaactgaggcaggcattgtccttatcccaggtcttctcttctcatcccaccaccgctggagatgtgtggcacacacaaagtacgcaggcttcagagcctggcgggccacagtgcaaatcttactccagccctctcttgctaggtgtctctgggccagtcacttcacctttctgagcttcagattcctgatctgtgaaatggagatatactacttattttcaga

SEQ ID NO: 1442 - DNA, 879 bp, Artificial sequence
  DNA replication origin
gcaccagcgtttgtcccatcccgacgctgccccccggtgagtgcggcccccgcacccagccagtgcagccctaagggcgaacgcggcccctcaccccattctgcgcgcccagcccgggcgcccgctcaggccgctccccagcccggcccgcgcaccccggaagtaggagggtggcccccgaggaaccgggcccgggaccctctcctgtccgggctcagcttcggggggctcccgacaccggcgccgccctggcttgcgcccccctgggcccgcgccgggcttacctgtcccgccaggtgagccgcctccggctcagcccctcccccgccccctcgccgctcacctggggcgcaggtgagcgtctcgcgggagcgctgcacgggccgccgctagggacacacttcctgcctccgcgaagcgctaccgcgcacctggaccgaggccccgccccggggctctgcagagctgcgcgtccccgctcgagtgctcggcccgttcagcctagtccgggtaggtgaggtgtggcggggaggggtcgagaggcgctggggctcagtctcctcttctgttcaacaggctggtggtcctgtcagtctctgagcacctgtggaacttctgcccggccgtaaagctccaactcaaagggaagctctcttctgggaagctttccctgatcctgtctgtttttctgttggttagaacagtccctgtactcagcacactgtcgttttgttgtcttctgtctcctcctttagcctcctaccttgcagggtttggtcttgttcccctgtgttcctggtgctcagcacaggtcctggcacatactaggtgttcaacaaatattttccactgaatgaggccctgggccccaatttctcc

SEQ ID NO: 1443 - DNA, 2027 bp, Artificial sequence
  DNA replication origin
cccggctcgtgtttactcctcccagccggtgttcctacacattttaaagagggggaaactggccgggcgcggtggctcacgcctgtaatcccagcactttgggaggtcaaggcggtcggatcacctgaggccaggagttcaagaccagcctgagcaacatggcgaaaccccatctttactaaaaatagaaaaaaattagccggtcgtcgtggtaggcgcctgtaatcccaactactcggtaggctgaggcaggagaatcgcttgaacctgggaggcggaggctacagtgagccaagatcgcgccattgaactccagcctgggcgacagagcaagactccgtctcaaaaaaaaaaaaaaaaaaaagccgggggcgggaagggggaaggggggtgtgcgggggcggggaactgactggcggggcgcggtggctccgccaccactttgcgagcccgaggtgggtggatcacctaaggtcaggagttctagaccagcctggccaacatggtgaaacccctgtctctactgaaaatacaaaaaaattagccaggtgtggtggcgcacctctgtagttccagctactcagcaggctgagggaggagaatcgcttgaattcgggaggcagaggttgcagtgagcagagattgtgccactgtactccagcctgggcgacagagcaagactcagtctcaaaaaataaataaaaataaaaaataaagaaggggaaactgagaccctgaagggcagtagtgctttgcccaatgtcttattgacgactggtggctgaatccagatttttgaatctggacagaaatgcacgagctcagccattcatgccctctgggggctcagatacctgggtctagtcctcttggtggagggacgttctttatgtgggactttatctgacacttctcatctggccctgacaaaatgatagaatggaaccctgcccacttttcccccaacagaaatgaccctgccataccaaacactggctcagacaccatgggcctgcctcagtttccatctacttgaaggtggcatcagagatgggaggtctctgtggtgggtgggggcaagggccaggggtccagaaaccagctctgaacccgattgggaaggactgcagcagaccctgggctcaggaggacctgcggaaggtatggccagtgtgactgctgaagcctgaagaggaggcagatggcgtgcttgcatgatgtgcaggatgatgatagagcctcatcctccccccatgaacacatgttctctaactgctttcaggtgtcttagagtgagtgagactgagtgatggggactcgtgggcgagacagttgggctccaaagaggcagctcagaagcggctgggagaggaaggcgggtgggtgagaggcgccaggctcagtgaagaggaagggtggaggggttgggggagggaggaggtcagaagcagggtgcccagtgaccaggggtggtggagactcagtgaggggaaggggagggcttgggaggatgactcagtcagaggggaagaagagctgttcagtgactgtgctggggctcagtagggggaaggggctgagtgtgtgcaaaggtgctggcggaggctcgccatgggggaagggaggttcagtgaggggcatgggaactcagagagttggaggggctcagtgaagatgagggaggctcaggagctaccaggttgcccccagcaaggaggcttgccctgctgaatgatggtgtccctttgaacagtctcttttgtgtcatgcaatcataggtctttctcagggcagaagcccctcattgccatggtggtggggagatggacaggtgttttgccttcatgaggcagatcactgctcccaactcctcaaggactgattcaggggaagaagactaggacttatctccacccccaaccactggccagatccagagaaccagtcagacccgggttgaaaaccaacacacactgcccatctgggtgaccttgggcaagtaatttatctgagtgggagaagatgca

SEQ ID NO: 1444 - DNA, 957 bp, Artificial sequence
  DNA replication origin
tgttggccaggctggtctagaactcctgaccttaggtgatccacccacctcgggctcgcaaagtggtggcggagccaccgcgccccgccagtcagttccccgcccccgcacaccccccttcccccttcccgcccccggcttttttttttttttttttttgagacggagtcttgctctgtcgcccaggctggagttcaatggcgcgatcttggctcactgtagcctccgcctcccaggttcaagcgattctcctgcctcagcctaccgagtagttgggattacaggcgcctaccacgacgaccggctaatttttttctatttttagtaaagatggggtttcgccatgttgctcaggctggtcttgaactcctggcctcaggtgatccgaccgccttgacctcccaaagtgctgggattacaggcgtgagccaccgcgcccggccagtttccccctctttaaaatgtgtaggaacaccggctgggaggagtaaacacgagccggggcagggaaagaactttgcacaccgtggggtccggggctcctctgtgatgccaccaaggtttgcaggctcagcggcagcgctgaggtatttgttctgcgaataaagcgctctacctatcgtggaatcagtccagctagatccccgtcccaccaggacggcagtcgcccctctgcgttaacccttccactgccctagtgaggtgggaaagggggtccttgagagccctatggcccaggagagaccgggcagaactgattcggccaagggcagcatgaggtgtgggaggagcacggcacaaggagtcaagcctcctgcgttctagcccaggctctcttcgcacagaggccttaggcaagaccctcccccggatggagaccggattccgtgaatttctaaacaccagctaccagagcttatgactctgaggggccaaaccagggaagatgaggctccc

SEQ ID NO: 1445 - DNA, 1443 bp, Artificial sequence
  DNA replication origin
gaccaggagctgcagcgctggcgccagggcgctagcgggatcgcggggctcgccggccccggagggggctctggcgcggctgcgggggcggggggccgcgcgctggagctggccgaagcacggcggcggctgctggaggtggagggccgccggcgcctggtgtcggagctggagagccgcgtgctgcagctgcaccgcgttttcttggcggccgagctgcgcctggcgcaccgcgcggagagcctgagccgcctgagcggcggcgtggcgcaggccgagctctacctggcggctcacgggtcgcgcctcaagaagggcccgcgccgcggccgccgcggccgaccccccgcgctgctggcctcggcgctgggcctgggcggctgcgtgccctggggtgccgggcgactgcggcgcggccacggccccgagcccgactcgcccttccgccgcagcccgccccgcggccccgcctccccgcagcgctgacctccacgcccggacccctggccaccccgacaagcttcgccgaggtgccgaccgaccgactgatcgcggacgccggctggaaggactacggatccgcaggaagaggcagttgggggccaggggcccagtagaggaggctgaggtgcggtcttagcggctggtgcgttcgagggtcggtcatggcgtgtggggggctggtccagggcccgggaactcccttccctggagcttctggcgtctgctgggtccctagtaaagctgccactttctgttgccgcctctcccgaccatctggagagtgagaggtggtagcatcaagtctccattataagagttggactcttgagggggctcagatcccaggaacgggttggcggcaaacttttaccacttggaacctgccgcacggatgcagcaccccccatcctcacccccacttgcgtggcctttcccgggcccctcggagctgtgagcagtcttgcccttgaggatgctgcttcctggcgccgcccagctccgtgccttcgggaggacagaataatgaggccccaggatggggtggaggctggcacagggctgtaccactgaattccccctctaggcctgtttcacctttggggagacggaatcccagagaggtttaggatttgttctcttcatacttaggcccttcttcttctaggagacagcttttcttatgccgtcatgcaggttcgcaaaaattacagcctgactcacataaccaggacaggatgtctggcacctgctcacccagggatccttacatagcagaacctagaggcttaactcccaacctgttactaagatggctcggccaggttggaaccaggtgataccctttaacaggccccaagggggcaggtgtggtatcagcttccagaaaggggggccttaaagagccagatctgaggtgagatctgcttctcttcctgtcca

SEQ ID NO: 1446 - DNA, 1625 bp, Artificial sequence
  DNA replication origin
attgcattgtaaagttagcttctattgacctggagtctcccccatctggctaggagcacctgaagggatggaggctgagtcctagtcacatctgtgcccttggtttcctaaacagggcttggcacagagcagacaccaagaggcaatctgagccatactgacagggcaaggacttctcctccttccagggtatcccttgttcttgcagaggggggctgccacactgggctccaccttcccctccctgccatgcctggggccacaatcctggaggtgcagcagctggggccccaggaatgacttgactgtcccggggattaaagcctcgactggtttcctaatcacccaggtgacagcgagcagccgaggaatgcctcggcgaactccactgggccgcgtgtgagtcagccaaggagaatctgcccccgccccctccagttcctagttccttgggagggtgggggaggtaatcccccagcaggcaaccctccccctctgtgggaagccaaggtagtaggaggcaggggaaaggcctacttcatccaaaggaagccatcagttggcaggaacgcacaggagtcctcgctgggtttcttggtttcttttatcaaaggaccctccctaacacctagaagttgaccttgggagccggggaaggggtgggaaaacattgaacctactgtaatctgctcctgggaagacccaaaattccctaggtttgattttcacctcattaagtaatcttgggtggcaaactgccccagctataaaatgggtacaataatgaccacactgtggtatttcagaacatgacagcgtctgggctgtacagatgaaaaagcagtcttggggtcgttgaggttcagataaagggaagagttggaggagggaggggctgtcagaattctcttctccctttcctcaggagagagaggacgtggggcctgaggcctgggttggccttcatttccaatcttgggaaggagaagaaacacctaaattggtcacttaatgttgcccttgggggtggggtatcaggtctgaccttcggcttaataaatattgggccacaaccccagctgagagagagggagtccctgacaagttttcttggcttttccacggggtggagggggaagggggggtttctccagcaaaaggctgtaggagcacaatggcagaggctgctcctagaacctcgagagaggaaaggagggtgaggtccagggatgcccagatagggaaggaaaagctattttggactcaagcatgcacacttacccacccagggccacctggcgtcttttgtccttgcaggcagagacaaattcttcccccaatgcccttgacatcctcctcccctctcccagccaggccctgggtgagtgatccgtggggaatcagggttctccaagagtcgagatggaaaagccaggtggggaaggattagtagatgcagggggaggtctggtctaccattcataatgctgtgcaattgttacagccatgtccccgttcctcagtttccctagctgtctagaaagtcaaacagactacaaatgccttccagccacgagagcctcagaagggattcccccacatcccccgcctggcgtcctctcacc

SEQ ID NO: 1447 - DNA, 1283 bp, Artificial sequence
  DNA replication origin
cggacggggcggctggccgggcagaggggtcctcacttcccagtaggggcggccgggcagaggcgcccctcacctcccggacggggcggccggccggaaggggggctgacccccccacctccctcccggacggggcggctggccgacccccccccgcctccctcccggacggggcggctggccgggcagaggggctcctcacttcccagtaggggcggccgggcagaggcgcccctcacctcccggacagggcggctggccaggcggggggctgatccccccacctccctcccggacggggcggctggccgggcggggggctgacccccccccccttccggacggggcggctggccgggcggggggctgaccccctcacctccctcctggacggggcgactggccgggcagaggggctcctcacttcccagtaggggcggccgggcagaggagcccctcacctcccggacggggcggctggccgggcggggggctgaccccccccacctccctcccggacggggtggctgccgggcggagacgctcctcacttcccagacagggtggttgccggacggaggggctcctcacttctcagacggggcggttgccaggcagagggtttcctcacttctcagacggagcggccgggcagagacgctcctcacctcccagacagggttgcggcccagcagaggcgctcctcacatcccagacagggcggcggggcagaggcgctccccacatctcagacgatgggcggccgggcagagacgctcctcacttcctagatgggatggcggcggggaagaggcgctcctcgcttcctagatgggatggcggccgggcagagacactcctcaccctccagactgggcagccaggcagaggggctcctcatatcccagacgatgggcggccaagcagagacgctcctcacttcccagacggggtggcggccgggcagaggctgcaatctcggctcttcgggaggccaaggcaggcggctgggaggtggttgtagcgagccgagatcacgccactgcactccagcctgggcaccattgagcaccgagtgaacgagactccatctgcaatcccggcacctcgggaggccgaggccggcggatcactcgcggtcaggagcggagaccagcccggcgaaaccccgtctccaccaaaaaaaaacgaaaaccagtcaggcgtggcactgggcaggctgaggcaggagaatcaggcagggaggctgcagcgagccgagatggcagcagtaccgtccagcc

SEQ ID NO: 1448 - DNA, 913 bp, Artificial sequence
  DNA replication origin
ccgcctggccagccgccctgtccgggaggtgaggggcgcctctgcccggccgcccctactgggaagtgaggagcccctctgcccggccagccgccccgtccgggagggaggcgggggggggtcggccagccgccccgtccgggagggaggtgggggggtcagccccccttccggccggccgccccgtccgggaggtgaggggcgcctctgcccggccgcccctactgggaagtgaggacccctctgcccggccagccgccccgtccgggagggaggtgggggggacagccccccgcccggccggccgccctatccaggaggtgaggggcgcctctgcccggccgcccctactgggaagtgaggagcccctctgcctggccagccgccccgtccgggagggaggtgggggggacagccccccgcccggccagccgccccatccgggaggtgaggggcgcttctgcccggccgcccctactgggaagtgaggagcccctctgcccggccacaaccccgtctgggaggtgtgcccagcggctcattggggatgggccatgatgacaatggcggttttgtggaatagaaaggcgggaagggtggggaaaagattgagaaatcggatggttgccgggtctgtgtggatagaagtagacatgggagacttttcattttgttctgtactaagaaaaattcttctgccttgggatcctgttgatctgtgaccttatccccaaccctgtgctctctgaaacatgtgctgtgtccactcagggttaaatggattaagggcggtgcaagatgtgctttgttaaacagatgcttgaaggcagcatgctcgttaagagtcatcaccactccctaatcttaagtacccagggacacaaacactgcggaaggccgcagggtcctctgc

SEQ ID NO: 1449 - DNA, 1426 bp, Artificial sequence
  DNA replication origin
agtgagccgagattgcaccactgcactccagcctgggtgacagagcaagactttctcaaaaaaataaaaaaataaaataataataataaaaagaggatacagaccatttacagggtttttcctggtccattatcctgctctaataatgccaatcaacatgtgatcattattccctggggacagaactagtcaccactagtttgtgactctacctcatttgaggtggcatccagggtgacatcccagacttccttaccttacttgaagcacgatgagccttaattttcgaatagaaatgttgaccagcaagccagcttttttttttttttttccaggacaaggataaattcccttaagaattttgcaaacatcacatgttttctttccccttgttgcaatatatgtaatttatctcctggtgtaacttgcttaatagttaccgtttgttaattccatctgcttcccaagaggagaacatactgttacgtggtgaagtcctgggttctgtgagtctcccataagccacagctggtcaagaaacgaatcaatggggccacgaacaaagtggccatggaagcaggtatgggtgaaggcatgagggcaggcacgggggcaggcaagggggcaggcaagggggcaggcacggaggcaggtatggaggcaggtatggaggcaggcatggaggcaggcatgggggcaggcatgggggcaggtacgggggcaggtacgggggcaggcacggaggcaggcacggaggcaggtatgggggcaggcatgggggcaggcatgggggcaggcatggaggcaggtatgggggcaggcacggaggcaggtatgggggcaggcacggaggcaggcatggaggcaggcatggggggcaggcatggaggcaggtatggaggcaggtatgggggcaggcatgggggcaggtaaggaggcaggcatggaggcaggtaaggaggcaggcatgggggcaggtatgggggcaggcatggaggttttgcccagcttctccagtacgaccttccctcaccaaagccaacctggttgccatcacctctgagtggccacacctgagcccttgtggctcagccagccagctggtgactgcctggttacacaaacattttccttcatggaagacagcaatttgtcctccttcgatggatccttgttgtcgagctggacttgcgtttccatcctccctctgcacttccaatcagggtctcactgaagggcacctgttgggtgtcctacaggacattgcctcctgccgagaagctcatgcttctgtgaaggctgcagaggtgtgaaacagtgggccaggccagacacagtggctctcgcctataatcccagcactttgggaggctgaggcaggtggatcacctgaggtccgaggttcaagatcagcctggccaacatg

SEQ ID NO: 1450 - DNA, 1122 bp, Artificial sequence
  DNA replication origin
gatcgcgccactgctctccagcctgggtgacagagtgagactcgtctcaaaaaaaaaaaaaaaaaaaaaaatggaggaatacaccgtgtctatagggttgatgtgaggatgagtggcaagagggtgtaaagcacacagcgggcccctggcccatagaggagcttgggacatgggcaccttggtcgtggccccattgcccctggcagtggaggggctcgagcaggtgcagctcgacacggagccctgaccccgctctttcctgctccaggctcatagcctcaggagtggtgatgcgcccctatgtggaggccaacatctcccacaagtcccacaccaccatcaaatacttcctgaagatgtggagcagcgtcagcgagaccctcatcttcatcttcctcggcgtctccacggtggccggctcccaccactggaactggaccttcgtcatcagcaccctgctcttctgcctcatcgcccgcgtgctgggtgagggccagggctggggcggggtgggggttgtggtgtggggtgtgtgtggggggtggtgggctgtggtgctgtgtgtgtggtgtgtgcagtgcactatgtggaagggccaggctatgtggtgtgtgcatgtggtgcagtgtataagtattgtgtggaggggctgggctgtggtgtgtgtgtgtatgcgtattgcgtgtgtggtgtgtgtagtgcattgtaggggggctggatgtgtgtatggtgtgtgtgtagtgtgtggaggggttgggggtgtgtgtgtgtagtatgttgtgtggagggctttgtatatatgtgtgtgttgtgtggagggattgggctgtggtgcagtgtgtgtatagttgtgtggaggggctgggtgtatatgtggaagggctgggtgtgtgtgtaggggttgggtgtgtgtagaggggctgggtgtgtgtgtgtgtgtgtggaggggctgtgagggtgtgggtgtgtgtggaggggctgtgagggtgtgggtgtgtgtgtgtagagggcctgggtgtgtgtgtgtgtgtgtggaggggctgggggtatatgtgtgatgcagtttgtggtggaggtttcctggttggctcctgcctgctcccagcacagctagacaggagg

SEQ ID NO: 1451 - DNA, 792 bp, Artificial sequence
  DNA replication origin
gaaaggccttgcgcggcttcatgccatgatcagtgacggaatgattaacagggcggctctctggggtgacctccggtggagcggtggtgacatccccaatcgagcgttctcgtggtggctctgagcttcgaatggtgctggcagttgggctgagctggaggccatggctcctgagaacaggcagcagccccaccaaagcaaccaccacgagtaaggaagggaagatccgatgtggagagaggccacagatgccagaccgcagaaccatggtgctgcttccagagccagcctcgaccttacccaaatgagagtaaaaccgggcacataggtagcaaagggtcagcaagtgggaagagagactggcgtagtctctaggaaaagttcatgttttagagaggcatttccatggaagcaattttctgggggtggagggaggctgggtttgcaatctggaactccaaagtggggaaagggggcaaggacccaggaacgaccacgaaaggagaccaaaaggtctggaactccgggcctgggaagggggaggacggatgtgggaaactgagccctagggatagaggaaggggcaggatagggatagtgcaaaggaaaggaagaaggaaggctgggacctttggctgaggaaagtgactgaggagctgggactctgggctgtgggctaaaggaaggggtagggagcctgagctaaaggaaggggaccgaagggggtgagagccagtccaggaaaaggagagagggggctgggagcccaggctgagaaggagtgaaaccggg

SEQ ID NO: 1452 - DNA, 1163 bp, Artificial sequence
  DNA replication origin
cctctaaatggggagaaatctcccttgcggagaaatcaccagcaattagaatactacctttgtctctgggagtattcaggtattcacagacaaattcgtactcatgatgtgagcagaattggaaaaaaaaaaaaaaaaaaaaaaaaaaaacaagcgacacatggagtgataaacactataaatgccaaatacatatattcagtccttactgagagcgggtgctgtctggttttcacaggaaagacaggcagtgttaaaaggctcagactctggtgtcaggcagatctgggtctaattcccaatttgccaacttatcaggaccccgggggcaagttgcttttagcctttctgcttcagctttccttttctgcaaaacacagacagcaatagtacctagctaagagactgtacccaatccagtgcgaataaaagtgaattattgttagtatctgacaaatggcaccctatgggtgacaagtttcctttgtcagaaggtgacacgtcttccctttctgacttgaggtttcacgggtggggcctggtctctgccttaagaagataggcttagtgccacccttgtcaccttgggaacttccttaataaagaggagggtctctcctccatcagacccgggactccacaaggctggaactgcgtctcttcctcagaggtgggagcagcagtgactccgctagggtcagatggacctagtcgctcccatcaccccgagggcacccagagtgtgtgtggctgactcctctccaggctactcagcgtaggcccgattctctttcattctcttccttaaggcccaggagacgtcagtgaggactgtgccacttcagcagccccccagagcaggaaggagtgggctgaggagccccccggggccctagcctgagaggtcccagaattcgggggctgagaggaagtcttaggagctcttaaggggctgtgaggggacctggggttcagtgggcgagcgtgtgggcgggtgtcccagaagcggtgtgaggagcgttttacccggtggtggggtgggaggtgcgtccgggtaactaatggcaaccgggcggggtgagcccgctctgcaggaactcctcgacggcgaaaaactacgactcccagggtgccccagggcttagcccagctttcccgcccgc

SEQ ID NO: 1453 - DNA, 1814 bp, Artificial sequence
  DNA replication origin
ggagggaggggagtgcgtgtgtgagagcgcgcgagggagtgtgagtgtgtgtgagcgcgggtgtgaggcggtgcgcaggggcgggcggaggcgctgtccggccccggccaggcgccgggcggggagcatgggaaggggctagaactgctcgagccccccagccccctccccgggatccgcgccccccttcccgggagaggggccgccccccccggacggacatgggctcctgaagttgcgccgctgccggtcgggggaagagacctgacaggtacgggtcaccgccgccccctgccctccgcgggcgccgaggcggggaccggctcccgcagccccggtgaacgggccgcccgctctgggccggctccagccctgccggcctgggggcctgagcctacccgcctcggggccccgggtgtcccgagaggggccaggcctcgccggggcggagggcagagtggtccgggggcggggtgggggcggagggtttggtcgggacgcggggggaggctgtgggagtccggggaggctctgcggagggagaggtggaagtcattccatcatgggacttttttgcggagtttttgtttgacatctgatctggcgccggagtcaggaagaaggggcaggtgtaagtgctgggagggcaacgccgacctgacctgccctcttagcttctcgctctctctctttctgtttttctctctctctttctgtgtgtgtgtgtgtgtgtgtgtgtgtgtgtgtgtgtgtgtgtccacagcagatgccttcagtggcccatcctggcaccaaacaactctgccaaggtgtttccaccaggcgactgtagcaccccgtatacaaagggcctctgcttgggaacgggctattcagtacccacttcaaagggtaaataggaagtgaggagatagaagagagactgcgaaccagcaggatccacttcttggactgaaagccgcagtgggacgcccctttgccagattggttgactttgcttggtggcttgggctctctctcctctgcgggtgtactcccagggtttctagaggagaggtacaggggcctgtaactaatgtcttaatagccgaatttgactgttttccccagagttcttttcttctgtgactttctttaacctcctgaagtactggtagagcaacgttatagtttttctctcaagttggtgattttaggagcctggtagggtggctgaagcttccccattcattccaaggatggggtagatgatctgggtaaagtggcagtgaagtcttccctttctaacaaagcctgaaaccgttttgagaagaaactattttgagggcagcttctgactcaaagacgttacgaaatccccacctaggacaccggtatgcccagtggtccctactaagcttttctgtgtcttttagagtcgttgagtggccagcttctgctcactgtactgaaggaactacttaatgctatttctgtcttgagttctggcttattcttccttgtgattcttatatctttagcgggattgaattgaatttttgctgttgagtgtaatagccagatcctctgtaacagaccagggagtaactagttgggctcctttgggccaagtctgagacttactgaggtttcttcattgtaggttgttgtatttcgttggcaggtgggaaatgaccttttccgtcatagtttgtgatcatgctgctttaaggctggagtcctgctctcctttccttttttgacctatatgggagcacttctgttcgagtcttatctcaatttgaaggaacagtgcttttggatcaactctgccg

SEQ ID NO: 1454 - DNA, 974 bp, Artificial sequence
  DNA replication origin
gccgcgaccccgtctgggaggtgaagagcgtctctgcccagccgccccgtctgagaagtgaggagaccctctgcctggcaaccaccccgtctgagaactgaggagcccctctgcccggcagccgccccgtctgagaagtgaggagcctctccgcccggcaaccaccccgtctgggaagtgaggagcccctctgcccggccagccgccccgtccgggaggtgaggggcgcctctgcccggccgcccctactgggaagtgaggagcccctctgcccagccagccgccccgtccaggagggaggtgggggggtcagccccctgcccggccagccgccccgtccgggagggaggtgggggggtcagccccccgcccagccagccgccccgtccgggagggaggtggggggggggtcagccccccgcccggccagccgccccgtccgggaggtgaggggtgcctctgcccggccacccctactgggaagtgaggagcccctctgcctggccaccaccccgtctgggaggtgtacccaacagctcattgagaacgggccaggatgacaatggcggttttgtggaatagaaaggggggaaaggtggggaaaagattgagaaatcggatggttgccgtgtctgtgtagaaagaagtagacatgggagacttttcattttgttctgtactaagaaaaattcttctgccttgggatcctgttgatctgtgaccttacccccaaccctgtgctctctgaaacatgtgctgtgtccactcagggttaaatggattaagggcggtgcaagatgtgctttgttaaacagatgcttgaaggcagcatgctcattaagagtcatcaccactccctaatctcaagtacccagggacacaaacactgcagagggccgcagggtcctctgcctaggaaaaccagagacctttgttcacttgttaatctgctgaccttccctccactattgtca

SEQ ID NO: 1455 - DNA, 1347 bp, Artificial sequence
  DNA replication origin
agaagaatttttcttagtacagaacaaaatgaaaagtctcccatgtctacttctttctacacagacacggcaaccatccgatttctcaatcttttccccacctttcccccctttctattccacaaaaccgccattgtcatcctggcccgttctcaatgagctgttgggtacacctcccagacggggtggtggccaggcagaggggctcctcacttcccagtaggggtggccgggcagaggcacccctcacctcccggacggggcggctggccgggcggggggctgaccccccccccacctccctcccggacggggcggctggctgggcggggggctgacccccccacctccctcccggacggggcggctggccgggcagggggctgacccccccacctccctcctggacggggcggctggctgggcagaggggctcctcacttcccagtaggggcggccgggcagaggcgcccctcacctcccggacggggcggctggccgggcagaggggctcctcacttcccagacggggtggttgccgggcggagaggctcctcacttctcagacggggcggctgccgggcagaggggctcctcagttctcagacggggtggttgccaggcagagggtctcctcacttctcagacggggcggctgggcagagacgctcttcacctcccagacggggtcgcggccgggcagaggcgctcctcacatctcagacgatgggcggccgggcagagacgctcctcacttcctagatgggatggcggccgggcagagacgctcctcactttccagactgggcagccaggcagaggggctcctcacatcccagacgatgggcggccaggcagagacgctcctcacttcccagacgggatggcggccaggcagaggctgcaatctcggcactttgggaggccaaggcaggcggctgggaggtggaggttgtagcaagccgagatcacgccactgcactccagcctgggcaccattgagcactgagtgaacgagactccgtctgcaatcccggcacctcgggaggccgaggctggcggatcactcgcggttaggagctggagaccggcccggccaacacagcgaaaccccgtctccaccaaaaaaatacgaaaaccagtcaggcgtggcggcacgcgcctgcaatcgcaggcactcggcaggctgaggcaggagaatcaggcagggagattgcagtgagccgagatggcagcagtacagtccagcttcggctcggcatcagagagagaccgtggaaagagagggagagggagaccgtggaaagagagggagagggagaccgtggggagagggagagggagacc

SEQ ID NO: 1456 - DNA, 1291 bp, Artificial sequence
  DNA replication origin
tctctccacactgcagggcccaggctgggcaggcagggggtgggaagcaggacagggggcagggagggagggtgggaggcagggaggaaatggcaggtggctggaacacaagaaagcaaaggggacccagctggtccttgggccccagggcccagccccaatactcctgctctcccttctccctggctagagaaaggtcacggagaagagacaggggagcaggtcccagcagcaggagaagcagcagcagctgtttccttcaccaataaatatacttcattaccaagctagaagagaggggtgggaagagggactggggtgggaaggaagggggagaagctgccacctgtgttgctgggattaaagcaatgagatggtgccagaccccccaccactatcctcaccctccacttgtcttcttaaaactgtgaaaaagcttttaacatggccctcctgtctccagggctgctctgaagcctgactgagaggaggcacctggcagagacaggggctgagggagggagcgagggagtggagggagaggagaagggaggctgcttttccccaggggctgcagctggagggctggagccaagtaagcactgaaggggaagcagggagggagagagggggaaggatgaaccaactacctggagcagctggagctaagagccgggggcagaggggaggagaggcctggtgagtggtgggttgatcgctgcatccagtgtaaagcttggggctgctggggagggaggggccgagtaagggactttcccatctgagtggctcaggagacccacccctctcccctcagagcagcaggggacagagaaaagccatcacttctttggtctttgtggcggctcagcatgtgggatgggaaggagggcagaaagggcagagaagggcccttagcaggaagcgccacctcagcagagtaggcctggctgggagctctggcagaaaggtcacagtgaggctgaggagcgcccaagaggagaatggccgtagtgcagaagtgctggcatggatgggtggggtaaggtgcagtgccccaccctctgccagggcccttgggaaaggcagagcctccagaggtggccagtgagagtaggtgcagggccagagctagtagccaggagaggagcgagggtgctccacagcgacctcagcaggtggcctggtcttgcccactccagggctcccatccttcctttgggctccgctctaacactggtggctctggagggagggtgggacccatcctttttcaaaacctttcctgaag

SEQ ID NO: 1457 - DNA, 788 bp, Artificial sequence
  DNA replication origin
ctaggaccctgcctcttaatgtccctcttaacagagggatgttgcctagagactggctgcagcgcaggggcactgaactctggaggaggctgagctagtcctggagctggggaaaagtattcccacagggagcacagaaggcccaggggtgttgaaggacaggaaatagcccacagctaaggctctacgggtataggtgacgaaggggagaaagccagagtaagggcagcaatcctgagggtcaggctgagggccaggctgtcctgggaagtggtgagacttccatctcaggacgtgtctaaaggggactggactggtttagaaatgtatgaatgggcccgagggatggcctggctgtctgctggcaccttccaaaccagaggatgacaaagaaaagtacgtttgaaagttgtgcaacatagggccagagtggccttgtgtggccgcaaggaggcaggagaagaggaggcttccagaagaggctgagcggggactgagacctgggcagggggaggacagcagagacacacagatgggagggcacctggagtgaagtgtggacagcatctggaggtggcaggaagcagcaggaggccaggggccaggatgatgggggctggttacagaggtggaaacttggaaataggtttcaagtggggaagaggccagaggaatgcaggttgagacacagcaggagagatggctggaagtatcagcgtcagggagtcacagctataggaaggacaggagagcagagaaaggaagggaaatttagaaacccgaagacc

SEQ ID NO: 1458 - DNA, 1198 bp, Artificial sequence
  DNA replication origin
ggtcccaagcctgttaacaatgtaggtggcgggaatgttgcttgggtgagtcatgacagccacaccctcccccttcctccagcaagctccgggcctcagtggcagaccctgggcagctgaagatcctgacaggggactggttccaggaagcacgctcccagcggcaccacaatgcccacttcggctctgaccttgtccgagcgtctatgcgcaggaagaagagcaccaggggtgagaggagatcctcggggcagggcaagccatgtgccgtccagggcgctggctgtatgtggacagggagagaggaccactagggctccagtcctggctgcccccagtactgtgtgtctttcagtgggcaatgcccctccgtgggcatggggtgggtgggtatctcccagggcctctcccgagtcacagccaggcttcctgagcatgggggctcacagaacttctcacctgcgcccaggagaccaggctccaggccacgacagggaggctgaggctgctgtgaaagagaaggaagaggggccagagcccaggtgaggaggagtctcaggaagggggagatggtgcccaccagtcaccagggtccctccctctgagagcgtcctctccctactcctaggctcaccattgatgaggcccctcaggagaggctcagggagactgaggtaagtgaatgagccaacatgtgagtacagtgtccctggaggggaggtggaatgtgcagggggcaggggggaaagagccccagcctgggaatggggagaccctggaaatgttccttcctgtgtctgcacctcatcacctcctgggtggaacagtggtgaacggtggggaacggtggtgaatggtggtaaacagtggtgaacggtggtgaacagtgagtggtatatggacccagcctctaagggaacttctgaatctggctattaaggggtgaagtggggccaggcacggtggctcatgcctgtaatcccagcattttgggaggctgatgtgggaggatcgcttgagccgaggagttcaagaccagcctgggcaacatagcaaaatgccccccatgtctataaaaaataaataaaaaaaaaaggccggtcgtggcagctcacgcctataatcccagcactttgggaagccgagatcacctgaggtcaggagctcaagaccagcctgactaacatggagaaacccc

SEQ ID NO: 1459 - DNA, 1058 bp, Artificial sequence
  DNA replication origin
ccgcgggcagcgcggaggcttcagacccgggtcataggtggcaggctggggggctgcagcggtgggtcccgcggcgagggaggggcaggcaggggctacgcatcggaacgggtccaccccccggccgcccgggtcccctccctcccgcctcaccgtggaggagttaaggctggacaccgaggagctgctgctgagcatgcggtcgagagaggggtcgggccccggggcctcctccccattctccaggatctgggacgcggccttggtctgcagagggggcaagtgacggggcgccccttctttccccacccctgccccgagcgccctgggtcgcgggcggctcgcagccctgggcaggagcgctccccgcccggagtccgctccggatgttgagagcagccacgggccactcccgcctacctgggcttgctggggccgcggctcctgctctccccccgacgcgggctccagctccgggtcagcctcctcggcacagacctgttggtctccttggccaggatctggggtggggcacgagatgctaagcgagccctctcctgccctcccctaagcaaatttgtaggaactggtttacaaccccagcgagctgcagattcaggccccggtgctgccctgggatcgtccccacctccgacgcggggtgggagtgggggtgacgagggtgaacacaggtggttggggccccttagagctgcctctgacccgcgaaacctctccgtgctccccaacaggcgctcccactcaccttcctgggcctgggacgcctcctcaggatctgaagcctttagggggacagaaggcgatgggaaatcaggtccctgaaggaagaaaggggtagaggtcacagtacgggggctggtgaggaagaggtcaaaggtcatattggggtcagaggtcatagggctccagccagctaccccagtttcaggtttagggcagccctccgggcagggctggcagccagctgcaggagcggtgagaccagtgcttcacagcccaccccgcagggcttgtgccgcctgactccctactcccat

SEQ ID NO: 1460 - DNA, 1115 bp, Artificial sequence
  DNA replication origin
caccctcggagccggcggggacgtacttgagggacagggcgagtaacccgcggctcggaaggtcgtcgggagagggtgggacctgcgagaggcgggcttatcgtggagcaggggctaatggaaaggggcctcaggagggtggggtctgcagacccggatggggtgcggctagaagagacggcggggcctgcaggggcagaacctaggggtcctagcgccctcggggaaggggccgtggccggccgggcttcgcctggggccatgaggttaagaggttgaggggaggttctgtcgaaggcggggtgtgagggggctgcgggagagcctggtggggtaaatgcaggagacccgggccgcaggtctccccacgcggcctggctgcctcacccggggctgcagggggagccaggtgggctcagagccccagtcccacgtgtccaggggcacttcaacttcgcccagaaagatgttgcgacccaggctttcgcggtgccacacagacaggctcagcacgcggccctgaagctcggcctgcgggacggagtactgaggacaggaggtgagctttagtggagcactgctggtggcccgcgtagatgctgcgcgagttggctgaggcaggtcctaccgcgttcctaccatgatggaattctggggagcccctaagggcattaatggggacctgcactatcaccacgcccaccacgaggctgacaacactggataacgagttaatgggccccctccgccgatcctccgggcaatgacgttactggctgcccttgccacctagccccgcaggaagggggcgtccagttcattaacggggaaccgcatcgtggtcacagcctcacccggagagtctcgttgaaaaccggattcagattccgtttcttcaccgccgtcttgcgcttgctctgcttatccgggaggaggtagcttttgacgtagctggggaggtgagaacccgaggtgaggaggggccctcccagagccttctcccctgcctgtgggctcccccagccaccatcccgaacacgtgccaggcctcgtgctaagcgctttacagggattgtctcgcttaatcgcacgcctcccaataacgctgttgttcc

SEQ ID NO: 1461 - DNA, 1005 bp, Artificial sequence
  DNA replication origin
tttcactctctaacagtgggggcagcacctggaggcacccctagaagtcccctagaagcttacactgaactataagttcccagccaagccccacagcctggcctcccaggttctctatggaaggacccttgcagccctcagcctcagcttttcaacaagtcctataggcgccagtcacgctgaaatgcagctcctcaaaggtgtcctcaacttccctgactccaggcctttgctcaaaccgtccccttcacccctgctcagtggtgaaagcccaggctgcgtgatcaaaggttgattagtaagggtttgtggaggttgggcactccactgcaggcaaaagaatgggaagcccggagggccagcactcctcaccattgtacgtaagtgtccagggatcctgcccgcagcggcaggaggtcccgagcctccttcacccagaagtgcagctccccgctcgggggcagtcctgcgcctgcggagaggctcggctcaggcccgcacacggatggagtccaccgcccccaaacccggggactggagtctcccgcttttcagggcgtgtccagcttggcctctccggctgtcactcaccctcggagccggcggggacgtacttgagggacagggcgagtaacccgcggctcggaaggtcgtcgggagagggtgggacctgcgagaggcgggcttatcgtggagcaggggctaatggaaaggggcctcaggagggtggggtctgcagacccggatggggtgcggctagaagagacggcggggcctgcaggggcagaacctaggggtcctagcgccctcggggaaggggccgtggccggccgggcttcgcctggggccatgaggttaagaggttgaggggaggttctgtcgaaggcggggtgtgagggggctgcgggagagcctggtggggtaaatgcaggagacccgggccgcaggtctccccacgcggcctggctgcctcacccggggctgcagggggagccaggtgggctc

SEQ ID NO: 1462 - DNA, 1155 bp, Artificial sequence
  DNA replication origin
caccatgttggccaggctggtctcgaacttctgacctcaggtgatccacccacctcggcctcccaaagtgctgggattacaggcgtgagcaacctcgcccggccaggagctgtaacttttaaagccaggagacctgagaggaggctggtgcaaaggtcccagggcagtgagggtctaaggccaggcaggcaggagccaggggacatggacatatgtgagagagaatgagtgggacgtggtgactggatgactctagggagtgtgaggggggtcacctgatgccaggccacctcccgcacagcttcgtgctgcctgatgacagccaggccagccgccagcgtacaagggttgtgcgacgcagcctcagccctgtgttcaatcacaccatggtgtacgatggctttgggcctgctgacctgcgccaggcttgtgccgagctctccctctgggaccatggggccctggccaaccgccagctggggggcacacgcctcagcctgggcaccggtaagtgggacagcaccctgagacaggccctgggacaggccctgggagatgggggctcagtgtgtggccctggatacctctctgtcctttcctgagctttgatatctactgagaactgagggtggtaacgggggacagtgcataatctgggaccaggcaggtgtttgggggccccaaggtgtccagtgtgatcatgccctcaacccctgcccacccacatccaggcagcagctatgggctgcaggtgccctggatggattccacacctgaggagaagcagctgtggcaagccctcctggagcagccgtgcgaatgggtggatggccttctacccctcagaaccaacctggcccccaggacgtagccccaccaagcctctctctctggacccccatctcagggcctgcccttggctaaagtcaataaagtctattctaagagcaataaaaggctggtgtctgctggggcagggaggaagaaaggtgattgtaggaaagagccagggaagtaagaggggccagattaaggaacttcagactctgccacaaagacttcagagaaaccaggcacagtggttcacgcctgtaatcccaatgctttgggaggctgaggcagaaggattgctttagcccaagagttcaagaccag

SEQ ID NO: 1463 - DNA, 1076 bp, Artificial sequence
  DNA replication origin
aaccacatcgtgcacagggacataaaagtaagccctggggctggcccgccctcatctgctgagggtggcggggaaggaaacatggtcccagacgcaggctggcagtttagattaagtgagcagacctgttgcaaagggtagggaattcatcagggaggctccttagagaaggaggggaaaggttcagctctgaagccaaaccaattgtcagctcccagaggggcatataagtgggatggcaaggggagagtgttgacagaggcaggaccaggctgggatctccaggagatgggatcccagaaagagggtctacttctgctggcaggggcccagaccagtgtccactaatggctgtcaatcagggggacaatgtgctgatcaacaccttcagtgggctgctcaagatttctgacttcggcacctccaagcggctggcaggcatcacaccttgcactgagaccttcacaggtaacaaggtgtgggggtggtgagtggggatgctgacctggggcagaagatctcttggaactttccagggaagggggtttctcctaggcatggagttagagtcctaatggggaatgaaacccagggtgagtgattgggccagggctgaggtggtggcatctggaactggagcttggagaagtgatgaaattgactttagcacttgaggagtgttgatgcaggccaaggtgggagttggaggaaaaagcaggtgatggagttcagggggacgaggcaatccaggatgtgtgctggagcactactgtgggtgatggagtctgtgaatgtggtggagcccaggatgaatgacggaagccttggcaggcgatggagcccagggtggtgatggaactcaggatagatgtttgatgaccaggataggtgttgaggtatattttggatgataggttcagtatgggtgcagtcggcctgaggatgacggcattcccctccctgctccaaccccatgatgaagcctagatgggcattggtgctcctgtttctgtcctaggaactctgcagtatatggccccagaaatcattgaccagggcccacgcgggtatgggaa

SEQ ID NO: 1464 - DNA, 794 bp, Artificial sequence
  DNA replication origin
tggaggaagtgcctggaggtacctgccctgtgtgggatgggaatgaaaccgaggtgtgaagcatgggaccgaggcaggcaggggtagagagccctagggggaaatgcaccctagtgcgtgtgggtggtgtagcctagaattagctgaggagtggcgctgggtgatggagttgggctacaacatgggtgtgtctgggccttgagcagagagatgtgggctggagccagtgggtgggaagaatgaacttggactgtccccacccaggcagcctgtcctccttgctgcggtcggtgtggggacccctgaaggacaacgagagcaccatcagtttctacacccgccagatcctgcagggacttggctacttgcacgacaaccacatcgtgcacagggacataaaagtaagccctggggctggcccgccctcatctgctgagggtggcggggaaggaaacatggtcccagacgcaggctggcagtttagattaagtgagcagacctgttgcaaagggtagggaattcatcagggaggctccttagagaaggaggggaaaggttcagctctgaagccaaaccaattgtcagctcccagaggggcatataagtgggatggcaaggggagagtgttgacagaggcaggaccaggctgggatctccaggagatgggatcccagaaagagggtctacttctgctggcaggggcccagaccagtgtccactaatggctgtcaatcagggggacaatgtgctgatcaacaccttcagtgggctgctcaagatttctgacttcggca

SEQ ID NO: 1465 - DNA, 1183 bp, Artificial sequence
  DNA replication origin
gggacgacgtccgttggatgctccggcttaggtggggaccaagatgcccctcccgcgggtctgacctcccccaccttcaggttctgcggcctgatccaggcctgggtgacgaacccggattccacggcgcccgcggaggaggcggagggcgcgggggagatgttggaggtgaggacgcgggactgggagctcgcggagggcgaggggccgcgggccctgctgaactcccatctcaccccgcgcccggcagtttgattatgagtacacggagacgggcgagcggctggtgctgggcaagggcacgtatggggtggtgtacgcgggccgcgatcgccacacgagggtgcgcatcgccatcaaggagatcccggagcgggacagcaggtgcggtgcgtggcagcgcgggtggggctgagggctcgcgagggccgagtgagccgggccacgagcggagcggctcctgtgggcggggcctagtgggcgggctcgtaggacctgagagttcgagccctgtggactgggcccgtgggcggaacagccaggaccgtgcgggcgggattgaggtctggagggtcctgtgggcagggtagtaagggtggggaaggtcggagagggcttgtgggcggggcgggtccttggggcggggccaggctggcgtgggatgggcggggcttctctgcccacctcggtccctttcctctctcccttacctcccctcaggttctctcagcccctgcatgaagagatcgctcttcacagacgcctgcgccacaagaacatagtgcgctatctgggctcagctagccagggcggctaccttaagatcttcatggaggaagtgcctggaggtacctgccctgtgtgggatgggaatgaaaccgaggtgtgaagcatgggaccgaggcaggcaggggtagagagccctagggggaaatgcaccctagtgcgtgtgggtggtgtagcctagaattagctgaggagtggcgctgggtgatggagttgggctacaacatgggtgtgtctgggccttgagcagagagatgtgggctggagccagtgggtgggaagaatgaacttggactgtccccacccaggcagcctgtcctccttgctgcggtcggtgtggggacccctgaaggacaacgagagcaccatcagtttctacacccgccagatcctgcag

SEQ ID NO: 1466 - DNA, 1670 bp, Artificial sequence
  DNA replication origin
cccgcacggtcctggctgttccgcccacgggcccagtccacagggctcgaactctcaggtcctacgagcccgcccactaggccccgcccacaggagccgctccgctcgtggcccggctcactcggccctcgcgagccctcagccccacccgcgctgccacgcaccgcacctgctgtcccgctccgggatctccttgatggcgatgcgcaccctcgtgtggcgatcgcggcccgcgtacaccaccccatacgtgcccttgcccagcaccagccgctcgcccgtctccgtgtactcataatcaaactgccgggcgcggggtgagatgggagttcagcagggcccgcggcccctcgccctccgcgagctcccagtcccgcgtcctcacctccaacatctcccccgcgccctccgcctcctccgcgggcgccgtggaatccgggttcgtcacccaggcctggatcaggccgcagaacctgaaggtgggggaggtcagacccgcgggaggggcatcttggtccccacctaagccggagcatccaacggacgtcgtccctttctttcccccactcccccccgggcatcctggccctcagagtaccccgaccatgaaaggctgcgcaccactggcagtgccctacgctggggaagcacagctggacgtcctgagccggggggagtgcatagaggaagcagcagcgctcgtcgcgctttgaggcgctgggaagggatgaagaacccagtaagcgtcaggctgggtggcagcgaccctcacctcccgtctttccagtcaccccaggtcccgcctatcacctgactccgcatatggaggcgactgggaaggtccagctggagggaatgtcctgcaagaagaaatggggtgtgatggggagtgctggtgacaggagaggggtctgaggatgggagaaaggctccacagaaaaggtcctagcaaaggtgagtgaggggcctcagcagcgacttcacctgggtctcaggctccagcaggctcagggtcactgtgcttactgggtcagtaccccgaacctcgagctttgcaggcagcagcaccttgttcatctccaggaccagcacctgcaggcagttggggagtggggtcagtcagaaggggcttacccctttcccgggtccaccacccctacaggcctcaccaagcactggtcgccctgggcacaggctgtcttgaatggttggcaggactgtagcaagaagtggagccagaagtgggcacggcgtggtggccctccagggggctctggcgtgggcctgaagtgctggtagagcaggaaggtctccatcacggacaccaggtacctgcatgcaaagccacatcctcagttcagcccaggcaccaaccagcactgccagggagaggaaactggcctggatatagctagaacgttggcatggggtgccacgggcactggtctaaaagcagccaggtcattggctcagggttcagtctagcatgccaatggacataggtgcaggagctgacagcccaggtcaggccaagaatgcagagggggccacctaccatatgggggcattgagcttatacagctgctctgcagccagcaccacctgggtggggtcattggcgaggatctgggctcccaggtagaaacccacatcccagtaatactgcatct

SEQ ID NO: 1467 - DNA, 966 bp, Artificial sequence
  DNA replication origin
actgatgctgacctttgatgctctcactccccttgtctagccctgtgctgacctctgacctcactgattcctgcctccctcccaccaggattgcgttggcagctacacactgatcccctatgtggtgacggccactggtcgggtgctgtgtggtgatgcaggccttctgcggggcctggctgatgggctggtacaggctggagtggggaccgaggccctgctcactcccctggtgggccggcttgcccgcctgctggaggccacacccacagactcttggtaatgaaggcccccagggagggtgctccaggagggggctggtgagggtatggtgggctggggctgaggtacaggccccaccattctctctccctgcctcccctaccctgggcatcagtggctatttccgggagaccattcggcgggacatccggcaggcgcgggagcggttcagtgggccacagctgcggcaggagctggctcgcctgcagcggagactggacagcgtggagctgctgagccccgacatcatcatgaacttgctgctctcctaccgcgatgtgcaggtgcgtggtgttcagagaggcagtagggcagctggcatttgaggtcagacaaacccaagttcagttcctggctgggccacttgctcactggtggctttgggcaaattatccaatgtctctgagtgttggcctccttatttgttagagaggatgagcatgtcgctgcctcctggggcagttgtggggttgggaacgcccagcatggggcatacagtaggttctccctgtgaggtgtgtccgctgggcctgagggaggcgtgcagaagatggtggctgggtgggatgtcaggagtgggacaggaccctggctcaaggttccttggggcctggaggcccatgatgccagtgcttgccgttccctgatgcaggactactcggccatcattgagctggtggagac

SEQ ID NO: 1468 - DNA, 1549 bp, Artificial sequence
  DNA replication origin
gaacggattccagatcccaagattcctgatctgccggcccaggctcctgccccgcccccggttcccagtgcgcggcgccccgcgcctgagcgcccccgcatggcggggccgtgtccccggtccggggcggagcgcgccggcagctgctggcaggacccgctggccgtggcgctgagccggggccggcagctcgcggcgcccccgggccggggctgcgcgcggagccggccgctcagcgtggtctacgtgctgacccgggagccgcagcccgggctcgagcctcgggagggaaccgaggcggagccgctgcccctgcgctgcctgcgcgaggcttgcgcgcaggtcccccggccgcggccgcccccgcagctgcgcagcctgcccttcgggacgctggagctaggcgacaccgcggctctggatgccttctacaacgcgggtgagagcgctgggggcggggccggatccgggcgggactcagggtcctgggaggggaccaagccgggctcgaaggctcaagggaggggccgagaggggtaccgggtctaggggacttaaagtgagctaaagctgaagggcttgggacagggccgtgaaaaaagtgggatttaggggatctggggcgcggccgggctcgggacgagacagggatccgggcgcggctctagggctcgaggttggggcttaggcacccttcagtcggagcggtgcccagccagcggggcaaggatggggaggggctttggaactctggggcggggcggggagcggcgcggggctgtggtgtctcaggggtggggttggagaactcagcctcaccctcaggagaatgtcacgcggatctcttgaggacaattactgggagaggagcttggacttagggaaaggggccgggaggctggagttcaggagtcctagcatactatttccaaggatcgggctaggagaggcaaaaagagaagcgaaggggcccgacgggactggatactgggtgagggagcttaggttaagtggcctcagcggcccagaaagaatgggcggggaaggggcggggaagtgggcgggaaaggatggctcaggggcggggccagaaggaggctattcccccgcgagtcactcctccctccagccagcccggatgctcggcccccatacttacttgcttatgctagagtccagtagctgtgcttcctggatgtccatgaaatcgtagcctaaaatgaaggctgacccgaccactcggacacaaagatacaattatcgacagacacaaatcgcatacatgttgactcatgcaggccctagcagacgctgtcacacacacagatacagtcagacatagtaagctatacatgtcacagatatacacatacatacatttaggcacagcgttgtctatgcacactgatggtagcccctttcaagagcctgtgctgaagaccaaagggaggggacttctatgtttgcgcaactcccacctcctaaatggcccgtaacagactcaactggtccacagcctcccttcccccatgccaggtgctcacaggct

SEQ ID NO: 1469 - DNA, 928 bp, Artificial sequence
  DNA replication origin
ggaatcttgggatctggaatccgttcggaatcggagaatctcccacgggatctagggatccggaatacggcctgacgtcccgttccaggaatctaaagtccagggagaaatcctagctcggacttgcaaggtcctgaggttctgaaatccgggattgggtcccaggaatctggggcatccggtgatcggcagctcagagccacttgggggatcctgggaatcggctcggaggtgcccgccacctggacttctcaagggagcgcccgccaacgctgccctgccttcacttgtaggctaagcccagccctttcccggccgacccagaaagctccaccctcggccctggggcagagccgctccctagcggcttgagactcagcctctcccctcccttctctcccgccagaactttggagactggcggcttccggaacagcctgtgcccctgtgcacgccaaagactgtggactgctcacagcaagtgcacataaaatgtgtgaggaggccagggctagggaaaaggttcgatatgcaggccctgctctgcaggtatctgttgaatgaatggctctctagagacatcagggtgcgcagagcatgatgaacaatgggtgtcctcccgggcccagtgagcgcaggcagggagggactgggatgggggaaacctacaccctaggccgcttgcccgaaagccttcagtcctggagtgggacttggcatctgagccttaactgtcactagggggctgctttccccaggacccaacctgctgtggacccccgctgacctttgacttctaggcagaacgtggccatgggacctgagaagcacttcctactctaaacaactctaaacatttctttagccaccccttgaaggagtcaaccccagccctttgcactacagcagcttctcagcttcaaatccc

SEQ ID NO: 1470 - DNA, 1714 bp, Artificial sequence
  DNA replication origin
cctaactggccccgccttcacctggctccgccccgaccgacgagccccgccccacctgccgctcccactggccacgcccccacctggccacgccccggttgcccaggtctcgctccgcacacgctcagccgagcccagtctgggagggacgcgcccggcagctgtccaccgatcccggccaccgcccccggccacccccaccccgcgagcccatggaggctccgggaccccgcgccttgcggactgcgctctgtggcggctgttgctgcctcctcctatgtgcccagctggctgtggctggtaactcgcggcagggtctggctaggggctcgacggggacggatggagcttgcacctcagccagccgtctccccaggagcagcctgggcttgaggggagggggctttccggccaagtgcaggcctccaggggtgggagagggggctccagctctgtgtggagccctgtgtgtaaatataggccccaggtgtgggggcctagggagcttcaggtggtctgggggaggtggctccaactgaatctgggaaccccgggtgtatgcaaagggaggggctctgggtgaatgtggggaggctctaggtgtgtgtagacctctgctgtggaagctccaggtgtgcgctggggcttggggatccaggggtgagtgtgagagcccagatgtgtgcagaggggcgagggccaccggagtgttgggtgggagggtgggcgggtgccacagcttggcttcgaggaattctcccttcccactccaccgcactaccaggtaaaggagctcgaggctttgggaggggagccctgatccgcctgaatatctggccggcggtccaaggggcctgcaaacagctggaggtctgtgagcactgcgtggagggagacggagcgcgcaatctctccagctgcgtgtgggagcagtgccggccagaggagccaggtatggagctgagccctccccagattgagtgcccccagctctgaaccccaaggccctggcccctctccccaaacctcccccctgcaccttctctcaccaggacactgtgtggcccaatctgaggtggtcaaggaaggttgctccatctacaaccgctcagaggcatgtccaggtaagggggttcttgcacctaagccaagttgcatgggtctccccagccatagcctgccccccaggaggaaacagcctctctcaggcggtggattttgctcacccatacctgggcccggtatcagttctgcctttagctcactgagaagtcccctcctctctctgcctatttcctcatctgaaaattagtacaggtgtgtggaggggatgggagtgttagctcttcttctagtttaaggcatagcaaggactttggaagttcagagggaatgagagggagtgcttcctggaggaggtggcatcagtaatgagcctggaaggtagagatggagagagagcacatctggtggagggaactgtgtggggcttgcaagtatgttggatgtctagagtagggacagggctgcatctgaatcggaagtttagcggtgagtgggggctggggtcttgatgggagtcagggggtgggaaggctgctttgctatggatcacctgtctcctcagctgctcaccaccaccccacctatgaaccgaagacagtcacaacaggtgagtactccctggagacggggcagtgggaggagcagaggt

SEQ ID NO: 1471 - DNA, 1252 bp, Artificial sequence
  DNA replication origin
tccctaggcccccacacctggggcctatatttacacacagggctccacacagagctggagccccctctcccacccctggaggcctgcacttggccggaaagccccctcccctcaagcccaggctgctcctggggagacggctggctgaggtgcaagctccatccgtccccgtcgagcccctagccagaccctgccgcgagttaccagccacagccagctgggcacataggaggaggcagcaacagccgccacagagcgcagtccgcaaggcgcggggtcccggagcctccatgggctcgcggggtgggggtggccgggggcggtggccgggatcggtggacagctgccgggcgcgtccctcccagactgggctcggctgagcgtgtgcggagcgagacctgggcaaccggggcgtggccaggtgggggcgtggccagtgggagcggcaggtggggcggggctcgtcggtcggggcggagccaggtgaaggcggggccagttaggggcgtggctagtgtgcgcggccaggtgagttcgggggtctggggcggggcttggactaaagcaggtggggtccaggactggtggctggcgtggttactatgtgcctccaagggcagcttcttgaaaattctggaaagtaccgactgctttgatccttacttcacaggtgaggaaactgaggctcagacaagatgagtgactcgttcgaggtcacggagagaggcagtggcaaaaatctggattcgagacgaggtcacttccctgccttcagggctcggtgcaggccccgctttgtacaccctccacccaggccccatgaccgctgggccgggccctagctggcccctgccctctggctgcccaagcttagcttcggtgctccctctccattcactgcacccctccacccgcctcccttctgcccctcatccgctgtgtctgcctctggcctaccacaccctctggccaggtcaggggtgacgccattactaggccaactgggcctctccgcagccttccccacggctaccactcctgccctggcaccagcctcttttggttctcctcaggctccttagggggcacttcctctccttcctcttcctcctcccctcctctcccctccttcccccatctgcttctcctaaccctctcttaatcgatggtggcccaggttagtcccaagccctgttccacactctcctggggtcatcctggacattccactgccatcagtccccacttgaaa

SEQ ID NO: 1472 - DNA, 2131 bp, Artificial sequence
  DNA replication origin
gaatcgcctaaacccagaattcccacctcgaactcgaaccccggccggccactaggagccttccgccggcccagtgccccagcatcctgcgtgcccttcaggacccctggtgcccgcggcggggcccgctactcaccgctcaggaccaggcgcggccgggccgcggggaggctccgctcgggtcctggcggcgcagggcgtgcgtggaccccgagaagcccccgcggccgcgggagaagcggcgtgagtcaccccgccccgcccccggccaccggttcggtgacgtcagcggtccgatcagccaatgggcgcggcgcgctggggcgcagcgcgcgttgcgcggcatagtaataaggcctcgcaccgcccgctcccccattcataaaaagcgaccgtggctgcggccccgccccctcccgagtccgcccgcgctgtccttgacgcggcgccctctgcgggccgggggtttcagaggcgccggtgcgagagccttgaagtctcagagaggctgcagggaacgtggtggaagagtggaaagggggcccggctaggctgtggggtgatgggacccttgggtggcagagaggctgacgagatccaggtgacgaaggaagagcttgtgatggggctggttgggcttccctggtgagaatgacagggtttccaagatgatggggccctgaggtgacgatgacagggagcacgagggagcggggaggtgggtggcagtgacgacattagcatggtgacagaatcttggggtggggggtgatggccgtgggacgctaacggtagaggggaagccctcagggcaaccatggcagtgtcagggtgactatgcagcaggggggagttcagggaccccgggatggcagaggcagcggcctgggaacatggagtgtccaggtgacttcaggtcaccattaccctgtcagaatggctggggtactgaagcgacaatgctaagccatgaggactgtggggccctggaacgaagatagcaggtggctgtggtgagtgggctccagggtgaggggcacagggtagagggtctggactgacagtgaccaggcaggtaagttgctgccagggcaagtcccgtgatgccggggctgggataagagctgggtgacgtcactcatgtcagcccaatagcgccctcacagcaccggaggggtgggcctggcaagatttcaaaacctgaattatttattccagtatctagaaagccagcgtggagggggtgaggggtgcacttccctgaagcaggaggagatggggagccgggaagaacttggaagcagaaagcctggcagctcagtcctcagggcaggcccctctcagcctcctattttaggcatcctgatgggtggagcaaggagaaagagctccctcttccccaacgccatctgcccttagtccaggggaaccactctgggcagacttctccagatgtgacagatgtggccagtcctgcggcagggggactggctgctccttctccctgtgtctcttgccttgatgctccctggaatcatgcaggcctgtgggaggggaagatgaggttaagaggcctgaggatcccaggccccactggacacccccatcacagcaccatcactgcagcccccatggtcagcctccaccaggcaggttttgggtttgagtgtgaggcagcagaaggtcaagtggcagggaacatgggaggaggagggggtcggagctggagaagaggattcatttcaggttggatgtggtgagtttagggggcttagggggtggaagtgtccaatctcagtttctccatttcctagctgggtgactttggagagtttcttcagctctctgtgcctatttcctcatctaaaacacagggataatattagtaccggcctcatggggttgttgagtgggttctacttgccattggccatcaatgttacagctggataatgagggacacctgggaggtgtaggcatgcaggtggcaactgatgttttaggggtaaataatgtcacccaggggcgggagcagagagtgaggagtggcttcaggggctcctcctcctgggctcttgcacctgacccctctgacaacaacccttctcttcatccaggtctctgctcccga

SEQ ID NO: 1473 - DNA, 1522 bp, Artificial sequence
  DNA replication origin
cactcttccaccacgttccctgcagcctctctgagacttcaaggctctcgcaccggcgcctctgaaacccccggcccgcagagggcgccgcgtcaaggacagcgcgggcggactcgggagggggcggggccgcagccacggtcgctttttatgaatgggggagcgggcggtgcgaggccttattactatgccgcgcaacgcgcgctgcgccccagcgcgccgcgcccattggctgatcggaccgctgacgtcaccgaaccggtggccgggggcggggcggggtgactcacgccgcttctcccgcggccgcgggggcttctcggggtccacgcacgccctgcgccgccaggacccgagcggagcctccccgcggcccggccgcgcctggtcctgagcggtgagtagcgggccccgccgcgggcaccaggggtcctgaagggcacgcaggatgctggggcactgggccggcggaaggctcctagtggccggccggggttcgagttcgaggtgggaattctgggtttaggcgattctgggttagcaggcttgggcccaagtgctcgagtgctggggttgagttggatgacccggcgaagggtaagcattcctgcagggacccgaggccctggagggactgatggtcatctgaggttaagccggcaggaggcgtctggggcagggacccaggggtccgaacagcaggaggtgtccaatttaggaatccaggtatccaggcaggaggcagagtcaggcccaaaatccaggtgtccgggcagaaggaggcatctgactcagggatccagtcttccagcaggggggtctgcccagagacctagagattcaggcggaaagaagggtccagccaggaacagaagtctgggagggtggggggtggggggctgagttcccaggtgttaccgcgggagtgcggggtgatggctggcgggagcttcacgcgcattccctgggggcggagtctaaggctggcagtactgaaaatcgtgaggggtctgggagcctcaggcacgagctagcatcatcatctctgatgggagggagcggagctgctcagtctccctgatggggtagatgtttccctaccccaatcttgagccttcgggggcatcccctggatcctatggccctcttccacttatagtaccccttcttctgtctctcctctggtcacacacgtgggaaaaagagacctgcaggacctaggacagggatccccaggaagagacccctgtttagaggcctgggggcattggaggggacagcggtatcctgggaagagccccagggcatgaatgtggggataaggcattgggaccctatcaggtatcctgaggagagactcccaccacgtatcctgagaagcacctcaccccctccagaccccaactcccatcacccagcttggtcagcttctcacaaggcctttctcctgcaggtaccatgatgtggggtgcaggcagccctctggcctggctctcagctggctcaggcaacgtgaatgtaa

SEQ ID NO: 1474 - DNA, 726 bp, Artificial sequence
  DNA replication origin
atcaaggtgtgggcctcttttttgccccttaccacccataagtaaatttataaataaataaatcaatcataaatagacactgtctttgtatatgtgcatatataatctttctctctcctatttaggcaactatgtgactaatctctctgactctttagctcagaaattcaaacataaagtgacatggtcaaggtcaagtttgggggaagagggacatctgggacttggaatggcactgtaaaactcccagcattctggaattgcaacccagctgggctgtgagacatttctgagtagaacactgaccacctgaacattctggaaccgtggagccagctgggcccccatagggatctgaacagaaccttgaaacacccaatgtcctagaactccagaaccagctgggtctggggggtgtggagctgggggtttggaaagaagccctggagagcctaacattctggaattctgtagtaatcagggttgaagggtcatgaagactcagctagacatcactgggggagcgggatcggaaggggatcttggaagaggaacagcagcagcagacagcccacagcactttctgcacatcctggttgcggaaggcgtagatgatagggttgatcatggagttgtaggtggcagggagcaaggtaagataggtgtagagaggtggagagtgggcatcacccagcaggcagtagacagtgaagggcaaccagcagg

SEQ ID NO: 1475 - DNA, 754 bp, Artificial sequence
  DNA replication origin
cccaagtgatatgtctgtctgcctgttagtccatctgtttgtcacagggcttcaataccctctggcagaatacggaagagaagagggcttggtttttggccaagggctattggagagataggggtgggatggggagacagagaaacagaacgaaaggaatttgagacgagaggaaggaggagagaagagcaaggggagggcactggcggcagagctgagaagcccaggctgccctttacctccacctccagcctgggcacaggggcgagctctgagctcagagactctgagtcctgcctcttggggccttggggagaggaccccagggctcctgtagggtctgggcccaacccccaaaccctgggggcagctgggttggagtcctggggtcagtattcggggtgcaggtgtggggtgcagtgaccgaactgccctcatgggaaaaggagggaggggattgcaggtacctagggggcatgaacctgggcatgcgttgacttagtgtgtgtggtctctttgcagcagggttgttgagagtgtgcgtgaggttgcgagtacgctaggactctgtgtggacacctatgaacatacatgacccagtggcagacaagctgggatttcagtggggaggggaaggactgcaggaatgtgtgtctatgaccggcagggagtggttgtctatgtgtggaaggatttgtgtgaacctgccttacatgttcttggggaggctgtatcctgtgtatgtaggcaggtg

SEQ ID NO: 1476 - DNA, 969 bp, Artificial sequence
  DNA replication origin
tgcccacaccacaccctaggcaggcacgtgtttgtgctatgggtacttgtgtgggtgcaggtgggacatgtcagggcccgtggtcctctggggacctgtgcctctccacatgtcgggctcctgcctgcatcagtggtgtcagcgactgcctgccttgggcactgtggtcaatcggtacaagttgagtgtattgtatgtttctctgtgttctttttttctttggagggggggacggagtctcgctctgacacctcccgagtagctgggactacaggcgtgtgccaccacacccggctaattttttgtatttttagtagcaagagggtttcatcatgttagccaggatggtctcgatctcctgacctcaggtgatctgcccgcctcggcctcccaaagtgctgggattacaggcgtgagccaccacacccgaccttctctgtgttcttgtgtgtgcacatggatgactgtgtatgtgggtttctgcctttcattgtgcaggcctgcagatactagcagggatggactctgcattcatgtgggagttgctgatgtcaccatggggggtttctgtttgtgtgtcaatgtgctcgggtgtgtgtctctgtcagaaggtcagtgcctgtttgttctgtgtatggaggtgtatgtaggtgcatctgtgtgtcagtgtttcaattaccatgtttctgtgtgtctgtgtgtctgtcttcctggttgtcattatgtctgcggtacctccgtgcctgtgttgcgtgcctaggtcagtttgattttgcaggtctgtagggccacgtgtccctctgtatgttggtgttttccatgtgggttggaatctgcctctgcttttcctaatctcccaccatttctgtgtggaaggcctcaggcattgtgtgtgtgtgtgtgtgtgtgtgtgtgtgtgtgtatgtgtgtgtgtgttcagcaactttccccagccccacagcctgcaac

SEQ ID NO: 1477 - DNA, 980 bp, Artificial sequence
  DNA replication origin
ccccagcgcacctggcgcccccggcgttcccctaggcgcccgagccgagtgtgcgtgcgtgcccgtgcgcgccgccacctgtgggaggagaggtgcgcgctgcgcccggggctgcccgcctagcgctgcgcggggggagctgttgccatggcgcgcagagcgcggccgcatactaatggggcggccacgggcgctgcccccacagctgcccccctgccggccgggctccctcctccaactccttcctccggctccagccaagtcaccccggggctggcggccctggcccacgcaccccacccggtgggcctgagccccttgcctaaggcctaggggccctcgcctcccctttcccggcagagaagtcccaggccgggcaaagggcggcgctggggccggcgagggcgagggcgacggcgagggcgagggcctgggcgctgcgggggctgcctggcccggactcaggcaccaagcgggcacggcagctgggagcgcaggtgctgccctggaaatggggtggttgtcctgggagggggcgggacaggggaaataaagggggaatttaacccttccttcccccaggcttggctggggaggggagaggccttgaccaagccctgcgccatctgcctccagcgtctctccagtcctggttgtggctgcactgagggtccccatccctcaggacgtgctcctcatcactccaggccctaaagtgactggtgaagttaggggtgtgtgaagtgccccaggactaggtggagggggtggtggcacgtgaagggttaatacgtcctcataccttgattccagtcccggagctgccctgaccccctaccccctcagtcccgctgtgttaattggcgcggaggggtgaggcctatcctggcgtggggggagccagcagagggtttgcaggtagaggcagtgggagggggcctaatggaggggggagccaggcggttgcctagcaaccccac

SEQ ID NO: 1478 - DNA, 996 bp, Artificial sequence
  DNA replication origin
tcgccggccccagcgccgccctttgcccggcctgggacttctctgccgggaaaggggaggcgagggcccctaggccttaggcaaggggctcaggcccaccgggtggggtgcgtgggccagggccgccagccccggggtgacttggctggagccggaggaaggagttggaggagggagcccggccggcaggggggcagctgtgggggcagcgcccgtggccgccccattagtatgcggccgcgctctgcgcgccatggcaacagctccccccgcgcagcgctaggcgggcagccccgggcgcagcgcgcacctctcctcccacaggtggcggcgcgcacgggcacgcacgcacactcggctcgggcgcctaggggaacgccgggggcgccaggtgcgctggggcgtcctgccgcccgtgcagccgcccatgggcgtgtccccaggtgctccagagtgaggcccgagggaggagtgtgtccttgaggacgttctgcccgcgcctgggtgtgcccctcagtgggtccctcggccggcctgctgtgcttttatgtcggtctccgattgtcctggagggtctgtgcctgtctgtgctcatctgcctccttagccccgagtgcctgagtgactgccagttaaccgagcgtacctgtgcctctgtatctgtgtctgtacgagcccaaggggtgtgtgtgtgtccgtgtgcgcgtccatgtctctgggttttccccaggaggaacgccctgggtgtgtcggcgactctggatgtccgtgtgtgccagaatgagtacctgtgtgtgcgcctttgtgtctgtgtgtggcccgtggatatctgtctggcatccctgagtgtttcgggtgtggctgtgtgtggacttttgtacgtctatgtccctgtaagtgccctcaggagcccctctctccatgcatatcactgtgtgttcctgtgagtgccccacgtctcctggagtgtggctgtgtgtccaggggctgctggct

SEQ ID NO: 1479 - DNA, 792 bp, Artificial sequence
  DNA replication origin
gagcaggacagtcaggggccctgcctttgagtgtctaatctgatggaattgacaaatttagtcatgcgtttttccctgtgagtagcaggggttcgagcccctcgagggttgctgagagggggaaagaggggtggacatctgaccctcacaccttaggacggggagagactttctggtgtggctgtgtatgctgggtcttctggccctgtgtggatgagattgagagagggaggcccagggcatgtttctgggcttgaatgagtgtggctggctgtgtggcatgtgtgtaaaggtgtgcatgatttgggcctgtgaaaatgtggacggtggtggtggggagaggaggttttgaatggaggggggctgtgtacaaggtaggcactagcccagtgcgtcacacagatgcgcacatgcatgtacacgtgtccacacacacacagccagctgtgaggaggaggctggcttccagtcccagggccaggagaactctgctttgggtatgtgggggaggcacagctggggctggaaactctagagtgggagggagggagagaggaagggaggctgaggagccgcatccttgatctcttctgtttctgcagttccggacgccgtgctctgggtctctgtgtgcctctgagtctccctctctctaatgtccggatcttggcatctctgtgcctctcttctccgtcttgggctttgaggctgatcacgtgactggatctccacctctccagcctacttggctgtgtctccctccatgtctctgtctctgcctccatgtctgcc

SEQ ID NO: 1480 - DNA, 861 bp, Artificial sequence
  DNA replication origin
ccctccaggctcagctgcccgcagcccgccctatgaaggcaaggtgggtacagggctgctggctgacttcctgggcaggacggaggccgcgtgcctcagtgcccctcacctggctagcccaccagccacgcccaaggccgacaaggagccactggaaatggcccggccccctggcccaccccgtggccctgctgcagccgctgctggctatggctgcccactccttagtgacttgaccctgtcccccgtgccgagggactcgctgctgcccctgcaggacaccgcctacaggtacccaggctttatgccccaggcgcatcctggcctgggtgggggccccaagagcggcttcctggggcccatggcggaacctcaccccgaggacacattcaccgtcacatccctgtagtgccaactgaagtgccgactggaccgcgaggttttgttcctgggtgagtctggggatgtgggcgcagtgggcagaggcctgggggtgggaagaggacatcagagcttaggcaaggacagaggtatggagtgcaggaagcaaatgcaggatttaagggcaaggctggggactgagagcagggtgtagggattcaggattcgctgttgcggacagtctcaggaggagatggggtgcttgggctgggaactcagcagggggcttgaacgttcgggggggtcttgtgaattgaaatggccagaggactacacactggatggggccctgtagtttggtttattaagctttcaattatttgttcatgctatgtcttgggcaggaagtgagtatttcccaggaaatacgctgataagggtgggcatttgtatcgccctgtgtgagacaggtgaagggag

SEQ ID NO: 1481 - DNA, 879 bp, Artificial sequence
  DNA replication origin
gcctcgctgttggcacgccgaaaccccccgccaccaaccggctgattgaactgggtgctgtcggaggatgactcagagaaggtctccgacacagccgtctgctgcttcaccttctgcggtgtgtagttggagatgtccaggatcacgttgggctcgctgacgtggcagtcaaaactgggattgtagagctgactaaaggcctctgaggcccagtccaggcctccatagccctgccggaaaggccactgagaagcccccgcaaactgccgacagttctcgggcgagggctggaaggaggaggaggaggaggaggcggcagaggctgcagaggtggcagaggctgtggtgcccttgggtaccatgtagccaccgggcgagactgtgctggcccggctgtcacagcgcaggggcgtgggggctgaaccagagaagggggccccctcagagctgctgaagaaggaggccttgcttggtggcaggcaggggcccccggtaggcggtggggcatagccggcgctgtgggcgctgctgggtgaggcagggaggctgttgccactgccataggcgaagctgcagtccttgctgttagcgcagtcctggcctgtaaagggcttagttggggcgaatacgctttgtccggccccatagccgccgtactggggcaggtaggtgttggcaggcgggtgggtggtaggtgagcgggccatggctgagggcgggggcaccagcttggggaaggtctcggctgcccggcagtctgaagcggctggagttagcccatagcttgctgctcgtcctggtgggaaggtctggcgcgcggacaggacaggctgaaaggaggggtccgccccagccccgctgctacccactgccactggg

SEQ ID NO: 1482 - DNA, 936 bp, Artificial sequence
  DNA replication origin
cccaaggagccagctgtggtggcggccgaggcagccactgtggcagcggccaccatggccatgccagaggtaaaaaaacgacggcggcggaagcagaagctggcatctccccagccatcctatgcagcagacgccaacgacagcaaggccgagtactcagacgtcctggccaagctggccttcctgaaccgccagagccagtgcgctggacggtgctcaccgccccgctgctggacacccagtgagccggagtcggtgcaccaggcccccgacacccagagcatctcccacttcctgcatcgtgtgcagggcttccggcggcgtgggggcaaagcaggcggttttggtggccggggtgggggccatgcggccaagtcagcccgatgctccttcagtgacttctttgagggcatcggcaagaaaaagaaggtggtggccgtggcagccgctggggtcgggggcccgggccttactgagttggggcacccacgcaaacggggccggggggaggtagacgctgtgactgggaagccaaagcgcaagagacggtcccggaagaatgggactctgttcccagagcaggtgcccagtggcccaggctttggggaggcaggtgctgagtgggccggggataagggtggtggctgggcccctcaccatgggcacccaggcggacaagctggccgaaactgtgggtttcaggggaccgaggcccgggcctttgcctccactgggctggagagtggagcctcaggccgtggcagctactacagcacgggtgcaccctcaggccagaccgagctcagccaggagcgccaaaacctcttcaccggctactttcgctcgctgctcgattcggatgactcctccgatctcttggactttgccctctcagcctctcgcccagagtcccggaaggcatcgggcacctatgca

SEQ ID NO: 1483 - DNA, 921 bp, Artificial sequence
  DNA replication origin
cggtgtgattgctctgacctcaggcatcttcactttttctttgcagctcttatcccactagtaattaagtcatttataatgatctgatcagtgtctgtctgtccagtccttgtccaaagtaggtactttataactaatgagtgtatgaatgaatgatgttacttttatctctgagcctccatttcttcatctgcaaaatggggttattaatagcccctacctcacaggattggtatgaagaattaaatgaaacgatgcctggacagcttccagcccagtacctggcgcgcagtaggtgctcactaaacctgagctgcgatggtcctttccaggcgctgtccacgccccgaggcctgggctcaggccgaagttgctccacagcacccccagctgacagccagcgactggcagagcccccaggcacgggggccctctctcttccaggtcagccgggtgtctgcgctggacagagcgctgagggagccgggggtggtacctggaggaggctgggccggtgggcaggggttgagctgtggccaccagaccatttggggaattcagatctattgcccgtcttgttgcccacagagatctccagtgtgacagcccaggcggcagagccgagggtgagtggtgggggttctcctggagccctttcggggtaagaaggagggaggccgtgcccttgttagaacttcctggccttctccttaagtttgatcaccctgctgatgtgcttccctctcaaaggcaggggtcctgttcttcctgagtgcatagccagattcccaaaggggatgagctgtcaataagtgaaactgggccgggcatggtggctcacgcctgtaatcccagtattttgggaggctgaggcaagtggatcatctgaggtcaggagctccagaccagcctggccaactt

SEQ ID NO: 1484 - DNA, 853 bp, Artificial sequence
  DNA replication origin
taacttaacctctctgtgcctctatttaaatgatgccaaatgagtgacagctgccattattattgccatcattgttatttgtattatgatattgtgcctgggatcaggttgaaagaagatattcaggtgttactgtgtgggcaggtaggcggctgaagggaaggaggtggacagaggtgatgactagtccctgagggacagatcctgagagataaggcccctggaggaaaagggaggtgatgggaaggtctcagagcagcagtaatggcccctttgatgcagtgttttccatttgaggacatcccagggccttcgaaccaggctgggagggaaatggtgggggaggaggagtgtgcaagctggagagagggtcatgaggccggaagtgagagctggggctggcagcctggctcccctggggaggcagtgggtgggggaggggaaggagggctggggaaggggtggggtggtcacagccacagccggggagggtggggctggggactcaaggatgtgggctggcgcttcccggcactgtgcacagcaggttggggcccccagccccctcccaaccagctggtgtccctatgggcaagctcagacacactgacccaacagcagacaggcagacagaagtacccctttgactttgtccacagaccagggctaggtggtacccttgggaggggtccaagagaatggccgccggggtgtggtgaggaggggagccagctgtttccctcagatcctggaggctgcaaaagagagcagtggccagcctcaggaggcctggcaggaggacgtgcccagaggtcttcacgggtgggttgaacagaagccaccaccggagagg

SEQ ID NO: 1485 - DNA, 1214 bp, Artificial sequence
  DNA replication origin
agttcttcagacctgggcggggagcgggggggcgtggaacaaggagctctctggggaaggaggtgggcgggggtgagaggctgcagggaaggcctagtggggctggaggaggggagtcctccgggagacagaaggaaagacaaggacgggagtctggaagggccaagggcaggaggggaggggggcggagcagggcgggaagcttagtccctgggtgacctcggagggaggaagggagggccgccggcagggtgaccctcgggtccagccagagctggcggtggcgcccacacacctggcacccagggcagggggctggcagggggcggttctggggcagacctgcttgccaggtgccctgttccagggaggaagggggtgggcgagggttgcacaaaggagctctgtgtggctgggggtagggtggggtggggtgtgcactgctgtgctgtgctgtgggggggccctgatggccccagggggcggggcagggccagctccccttgggggcatcagtggctccaaggggacacctagtggcgagggagagtagtgcatctagttggatggctgttggtgggaggtggtgactagaagctgagaggaggatagattagaagtcaaaaattagaactgatggttgggactaggaccgttgtaggaggctgcaggggagggcgctgaatctctggacaccaaagaagtttgatttacagaagcccaacctaaattcagacaccagcttaattgaatgagatggctgtttgttcttaagggcataacttaacctctctgtgcctctatttaaatgatgccaaatgagtgacagctgccattattattgccatcattgttatttgtattatgatattgtgcctgggatcaggttgaaagaagatattcaggtgttactgtgtgggcaggtaggcggctgaagggaaggaggtggacagaggtgatgactagtccctgagggacagatcctgagagataaggcccctggaggaaaagggaggtgatgggaaggtctcagagcagcagtaatggcccctttgatgcagtgttttccatttgaggacatcccagggccttcgaaccaggctgggagggaaatggtgggggaggaggagtgtgcaagctggagagagggtcatgaggccggaagtgagagctggggctggcagcctggctcccctggggaggcagtgggtggg

SEQ ID NO: 1486 - DNA, 796 bp, Artificial sequence
  DNA replication origin
gaaatctgggtggccctagagccctccagtgggggtagattggctgccccccattcaggcccccacagctcggctcatcttggccctgttctcctacatatggtggtggtgggtgggaggagtctgcatggggtctgcctggccctgagtgttgggggggaacttcaggagcaaagctgcccttagcccctccacaacctgatactccccagcagataaacgtcaggcccccacccagtgtaaatgaacttccaacagtgcccacacaggctgggggagctgctgggaggcagaggacagtgtggtggggggaacacagcaaggaggggtgcaggggctgggctgggactaaggctcccttcacggtgctccaggcgcaaggcagaatcacatgtttcccattagctgctctggcctccttgttcagggggtgttggctgggggagatttgttctggttgcagacaccagccgagaccacacaagagagagagaggaaaagacagagagagagagcgtgccagagggagagaggaaaagacagagaggaagagggagaaagatacacagggagacacagagacatggggagagaaacagagacagagagacagagaaagacagaaactggaagacgggcacgcacaaacacaaaagcagagacggactggtgatgaggggctcatggaagaagggagatggagaggaaggtagagagaggcgggtgagaccttgtcagaggctgaggggagggggtagctcaggcccagagtgagtctgaggccagtaaggaccaa

SEQ ID NO: 1487 - DNA, 1728 bp, Artificial sequence
  DNA replication origin
ggtgaggcctgactcccctaccccagggcctgtttgcccacgactccaagctcattccatgaagaggggcgagagaggaaggacagaggccactgcccagactgggagggcgggccagacagcaggggctgccagtcttgaagggaggcgaggcactgtcctccacccaacccttaaggagacaggaccctgattccacccatgccctggacaaacattctgtctggtgtcccccggcgctggtgagcaaggggcgggagtcactctagtctttccttgttcctcataactttgagtttgttccaggaactcaaagcactttaaagaagtcagacatgaagcaaggatagtatccctataccatctggggaaactgaggcacagtctgaacttgccatcattttagcaagggaagggacaaatcccaagaatcagtgaggcctgttctctagagagcttcttgggccagtttagctcctggaactatcttctgttcctaccctgggctagtggaaggtagactagatggatggagcccatcccctaaaaccctggaaaggcagactcacactcttgtttcctggtgccacactctctgtaggctcttcaaccttgcaccctccatttcaggttcaaccacataagcccagtggggcttccaggacatctggcccctactaaaaagagggatcctttggggtgactctggagccctgccccctgcaccagctccccaatcttcataggcctgggaaggaaacaacctggtaggaaatagagtaaggagaactgaaaggcccagctctgaaagaaagatatgtatttagaaggacaaagtcagaagaaagacagggggcgggagaaatcaaggcagagattcagatccaggaagagagacagaaagatgaaggacactgaggcaagagaaacagggcagaaagaggcagaaggagaaaaagatctggagggagggggcgagagccagagagggagagagagggcgaccatgccagaggaaggaaaacagcaagaaagagactcaggaagagagagagacaaggagaaagaaaaagacaaaagagagagacaggcaggatgatgcagagacaaagacacacgcacaggggggaagagatggagaaggaacctgaggagtctgcacagacaggcggaggcacagagcaccagcgacccgggagctggagacagacagagggactgacacacccagagccccacagcgacagtcggagggtgagacacactcagatggggtgggaagagggggtgacactactaagtgttagagtgtggggggaacagcagtaggcagaggtgaggagggaggggggtggaggaggaggaggaggagggatgtcattgccagaactggggggggacagaggacagaaatggaatgtgggtctgggcatgaggctcacagatgcatcggctctggtttcagctggggcagttggctgctagggtggggggaagaaggagcagagctgtcgagggaggggggcctgttgccatggaggcgggcacggcaggggcacagtctgctggcacttggagctctgggcatggtagggggctgaggcagaaaggcagggtaaggaagaagcctcgcccctgccctcggggctctaccaggaagaaagtttccagagagccacagagatgctgggagtggagcatggctctaggccctgaccaatcctaggg

SEQ ID NO: 1488 - DNA, 1509 bp, Artificial sequence
  DNA replication origin
ccagctccccgcccacgaagagcgccccggcccggcccggcccgccgcaggctcccacctgaggggcgcagcgagcggagcgccccctcccgggcacccgcgccgcggccgggggaaagggtccggggaagagggcgtgtccgaagccccgaccccgcccctagcgacatcactccaggtgctaccaatctccgggagcccggcccgcgcggcccgccccctcgcgggcaccgctcctggtgttcgggacgcgccgtgggtggagtcggcgggaggtggaggaaaaggcagggccggcctaaggggcggggagaccgttgaaggcctcgcccttccaagtctgggagaggctgaacacgcgagcgacctgagaccgagctgctctgctcccgtgaagctcctcacaagacctctctcctggagtgctccaccttccagcccacctgccccaagatcttgccaagtaccactttctgcaggaagccttcctagaacctaccctgcgatcttttctgattacccgcaccctctaggaccctctgtagttaagggcagtaccagcactactgccagcgctagctgccatccactgagcagtttgctcagtgtacccccacactgctccatggaatggcttaccggctgcatttctgcgggctgtccaccttgtactatcgggcccttctcacccacagggttgggtgtgcctctggtcaggcgttacagacaccggcccgcctcagaatagccaccactgcatccagagtcacacagagcaaggaggtaggagcatcaaagctggaaaccaggtttcccagcttccttcaggcctttggttcaggtgtgtgattaagagcagggagttgcacggagacttgctttaggcctcacctttccccataggaggcctctgcccttccctgtccctccccacaaactggaagagccctaggcctaccttcctctgcaatccacaaatctggacgagaaccccaacttctgtgaagagggagagatgttgggggagctgggagggcttttgcaagccaaaggggcagttctgggctacaaggagtattgtgggcccagtgatttgggggtgcttgtgttggggacataatgatttagcttgcaggtgggaggttccaagttgagcaaagaggagggttaggagccacaagtatgtggggttcagtgcagtgcaagggaggcagggattatgctgggccagcactgcccccaccaatagcctggcctggtggaatgctgggaggccccagggatggggccaggcagccaaggtgtctccggtggcacagaagcagttaagagctgcctcagcctgttccttcagacaattagtgacatctcgcttgacaacaccacactgagccgatgcagacctcagcccccctcccggccccccgacggccgcttcagctgtttattcttgggctttaacaattgggattctgacttggaggagcgggcgccccgcgctgccctctg

SEQ ID NO: 1489 - DNA, 1205 bp, Artificial sequence
  DNA replication origin
tttctggtgcttaggggaggttggctaggtttttggctgggtcagaggatttgagatctagggtacggatcaagctgtgctagacagtagaaagagacctgggcggggacccaggaaacttggttctttgcccagccctgtgcctgactcctcatggcctcagtatccccatttgaagggtttaggccagtggtctctaaaagccctcctgtcctgttagtcagtagccctgggtgagggatgaggggtggggggcgatggtctggaggggtgtgggaagctgccagctcaagggggagtttgcaacgtgatcccagagcgaaaatagcccaggtcattttcagctgcttgggcggaggtatctgatcccggcagggcagcttgggcagggggcagggaggagcattctgtaaagctctctgggaaaccagaccctaggatgggagggtagggaaaggttggcatgcccagctgggcttcctgagacccgctgggggcccaggaatggaaagatgaggaatgcagagggttaacaggaggtgaaggctggactccagccccctttgggtcctggcctggctgaggtgaaaggtcagctccagggagtctaggcacagctggggaaagagtaacccgatccttctccctagccagactcagggcatcacagtgccgcctcccccaggaaaggtgctttgacatccccaggaaggagtttgtttctacttgttctcagcaggggttggggctaggggagggtccaggcctgtcgggtcagggagagagctacaggccaggcgccccaaccaatatggcagtgctttgtcatccgggggtcaggggaggtggaggtgagcctgctggaaaggttagaggtagcctgttctggccctgctgtcacgctgccccatttatgactcctgacggccagcatcagggctggggaagcttagaggtaggagatgttcttcccttctccaaacacactgagtagtgagagaacccgcctggtactagactgtgacagcgaggtatgtttggggtggagaattacacctcaactctgagatagatggctttgctgtctgcagttgtgtgtgtggtggggtgctagggtgtaaggtggtgtgatgggaggctgagatgatgcgacatggaagaacatggggttcaaatccttgcctgtcttaggcaggctattttac

SEQ ID NO: 1490 - DNA, 1951 bp, Artificial sequence
  DNA replication origin
tggaaccgactagttgggaggggaatctgtagtcctagagagtttatgagaactgcccaacagtgcatccaaagacatgagcacctcgcagccctggaatctgggccacataaatttggtgggatccaggctttgccaaaaagagctggtggatgctcattcctgctccacttcctatcccagcgccccagagagctgtctccccaaaccaaaggcaagggaaggttacaaagttccctatacctggccttgaatgcaagttccctctgtggtccagggcatccctgccttttattatttacgtagatctctgccaggaagcctctgcgatgcatgagtaaagaggtgttctgccaggtagtttttatttcaactccattttgcagaaaagcaaactgaggctcacaagaggtagggtaatttgctcaagttcacacagacaacaaatggggccttgagctccttccagtacaccagggtctttcccagtggacatggaaggccaatcaaacaggaaacagggagaactggggataggagaggttgggagttgacacaggcccaggcccaacatcctgggctaaggaggaaccccgaggcatctgaatttgaatctgggtatctggcagtgatggagtgaaaggtcagcaaggagatgagaggaagaggaaagcagaattccaccagcctcacagcctgcctggaccatcccctggggagccagcctggagctctctgccagcccccgccccacccccagtggaaggcaaaaggagcactgtgaggagactagtgtgacagagaccttgggaagtgaaatctcacaggcttggtgcaggggaagggaattcaaatgttttgggggctacctctattcctcaggatggggctggatgtcacacgggtgcccttcatttcccacccttactatgtgcagatgctatgctaactgattgaaatgttgtgtaactttgagccccaccacaaggccatggcctatctagtgttatctagtttttcacgtgaggaaagggaaactcaggagtaaaaggacttgttcaaggtcacacagccagcgagtggcaactgtggcataggtgaagcgtgcctatcccgactgcttttgtttaccatggtgagagtatgctaggtgggggcaggaaacagaactgaacaagggccactggcagggggagaagggtccaccatcagatggggaagatgcctgctgagttgccaaaaggttcatcagtttacagagcaccaaatggtgctggaagggaacaaagttgtgggaaagcgtcccttcccctgcccaacaaagggcagggtagacctctttccttccccaagccatagtgccaagagtgagccctgagaggtcacatacctactcctggattctcagggctcttgtaaaatgaagcccctcccatcccggggcccttctctggactctggggcctgcaaggtgcagaaatgctctcaaagaaagctactgtcgccgtcgggaaaattatccaggattttcccagcacatctgcccccacatcggctccgcagttgggaggcggggcgggggtgctgcatgctgggagaagactgccttgcctccctcctagcagccctcagattcctctggctggagcaagaagctccagtccgcaggcccagcacttctcagggcccgaagagcccgcctccgagttttcccgccgccgccgccgcctctggggctacctggcaggctaagctgcccactgatccctgccacctccgcccccctcccagatgaggccacagagtttctggctcctggaggaggtgacgggcggagagggaaaccaggcggctgggggaggggcgttgcctgcacctggcccttctccgccgcgcaagccgggaggggcgggactggacccccgccagacccgaaaagagaggccgagga

SEQ ID NO: 1491 - DNA, 1486 bp, Artificial sequence
  DNA replication origin
agggggaggggagcagggtggcagctggacccttgagagagcaggagctccacccctccgagccagctgctgccagccttcctggactgactctgtggaaacagggggcccagagacagaaataaactgccaggtttccggggcggagtggggggcctgccagtctttgtgcttccttgcttgggagtggggggagcaggaagcagctccaagccctgtcctaggctgttccccctgtatgccatctcccctcacccccagatgcccctgcccccatggctctgaggctaggctgagtctagaatttgatggattagtgaaacctaggggcccatagtctgggactgacacttgggagcagagagtggtccttaggactctggtcccagcttggtgcccatttctagaatcctgtcctgggggcccctctagctgccgcacggcaggagctgaacagattcagagggctgcagtggggcaaccgaccaggagctgaatgatttgtattggatgcccacgtctgtcattcactggccaaaggcaattttctttcctcatttatgatcctatccccgggtctcaggagggatgactgtgtcctcccatcccttcctcttgggcctaagcttccccatccgttgtgggatttggactgtgagctactggagagggagtgagggacagggacagagtagccaggaagaatgttgagggatgctgtctgaagctgctggctttgtgacaggggcgctgtcaccagtgcaaggtagggtactggtctctgtgttcatgtcatgacggtgggtgctggcgttggggggtgtgggcaggcggtgagcactgggatgcactgtatatatgtgtgtgtgtgaggtgctagactcaggatggccagtgcctagacagggccagggtcacgggtcaccacatgcccaaaagcagcctccactgttgtaagggtgacactggtgtgatccccccatgtccctacgggtagatggaggtgggaatggccccagtggagctgttgagaacagcccctcatgcctggaactgggaccagagcagaaggggtccccagggactgcctgaaagggaggagggaagcagcaatgcttgtcctgcctgtgtcagggtgaacactgtgttcagtggttaacgggttctggaaccagagtttttctgactttaggctctgacattgtgtgacctttggtgggtcacttaaccttcgtgaacttcagctttctcattaacaaaaaggggataatattacctactttatggaggccttataattgagttagcgcatgctaataatgcagggcaggtgccctgtgttagcagtgaccattgggtagtcgctaggcacaaataggtggtcagtgaaaacgcattgttcagatgtccggacgctttccctgcagagggccttttcagaccccttcgttttaataaggaaaacggaggcccccaattgtgacag

SEQ ID NO: 1492 - DNA, 1293 bp, Artificial sequence
  DNA replication origin
ccaggggcccaagcctctctgagctgggcccgaggtagaggagtgcggaagaacccagaaaccctgggtcctttcgtcccacccccagccctcacaggttaaccggcagccggctcagccaatccaggctagagagggatgacctgtctacaggggcctcctgcgttccggcccctccattttgcagatggagcaaccgagtccagaggggtgcaagggtggtcaaggccagccagctggggagccccctccttcctgccccattctgctgtcactcaggctcttctcagcctcagctcagctaagagcagggcctgggggggggagggcgggggatgtttgggaaagtggttgcggctgagaggttgccatggcgatgctgcaggatgccgagctgaagtgggggtcccacagggtctctggggcccccagctccgcacccctgtggtcttctcctccccatctcctgtcccccacccagatgtctgtcaggcggctccggtgacaggctgggtgggtgacaggtggtgcaggtgatgggctgggtgggtgacgagctgggtgggtgacaggtggtgcgggtgcgaggcaggcaggtgacaagctgggtggtgacgggctctgtggatgacaggcagggggtgtggttggcgaggatgctgtctcctggctggtggcctgttgcagccccctaccctcatgcgtgtgcacacacatagactctgggctcagagcttggggctaagatactaatgaggcttattacttgtggaggggcaggtgcctaggctcactaatgagaggcctttaacaaataggggagacagctagggggcttcgaggaattcggctggcccttctgggctgagaccctgggggtcctgacctggctcaaggatgaagctggatcgcctccagccaggtcggggatccctcttcccccttctccctggccactggatttatgttaatactaaccacaattatgatcgctaccattgttcaagcacttattatgtgtcaggcactgtgccaaggcctttgcatgcattttctcatttcaactcaacagtcctaggagagaggcactattaccccattttacagatggggaatctgaggctgagaaaaggcacaggacttcatataacaagttactggtgcagctagggcattaatccgggtctgtatgtccctagaacatgtgctcttaaccaccccaccagtaaaactcaggtcttggtgcagactccagatcctctctcagggactggaaaatgggcatgtggtgga

SEQ ID NO: 1493 - DNA, 1718 bp, Artificial sequence
  DNA replication origin
cagcctggatttgggggtggggggtagtatgtcaatccagcaccttccccatccctctccctgaagccccaggccccatgtccctctcaggtgagccaaggggttgggggagggaggcagtgatttggcaagcacttgaaaaagtgtgggctgggggcaactccccctgtccctctctcccacatacatgccagagccagggcagggctgggtactgagagttcctggctgaaagaccaggatgaccaggtgccaaggggctctgcccccaccccaaagaggccccaaacctttaagcccaggccagggtgcccagagcacagggtcttgggtggggcagctttgaaccagatgtccagcctcactgtccaggaatgaaaggcctggggcggtgaaggggtggagatgcctccccaggcagaggaggctctgggaagagcgggaggcctgggcagcagagagagagagagcgagagcacacaagagtgagcaatgtgtgtgacaggctgaggctgtctaggggaacaaggtgggggagagggtgtgctggaatgtgccaacggtgggagtgagggctgcagaaggattaggcggggtatgtgacagggtgccgtggggtgcaggcggagcacagaatgggtgcagggttgtgactagctgaggctgtctttgtgtacaggtgtggtatcggggtgtttggagaggtgtaggggtgtccctgggcccttaggtggctgaggaaaagtaccggagctgagactgtctgggaagcggtggggccgggccattaggactgcctgtcgaggaggtgccgggatccaggaggcagtgtgcacaagtttcaggaggtattagaagcttcggggcctgatctgttagagatatactagaaccgaagccatgtctgtgtgtttgaggcaaatgttgtggctacagagggtgttcttgtttgagtgggtgtttgaagcagtgagtgtatgtgtgttgtagggggaggctgtatgtttggaaaggtataggggatgataccggtgtttggggaagtgctgagctatagctgggagaaacgttgggggctgtgggcagagtgtgtgtgtctggggaggtgtcagggctttgagggtatgagtcagtgggaaggtagcagggctgtagctgggtcctgggtgtatctggcagtgttggggttggatagggggttgatatgctgagggtgtgatagctgtgtgtgtgtgtgtgtgtgattgtgtgtgtgttggggtgtttagggatgtattggggggtcataaaaatgtgggttttggttaagtactagggctgtgaacatgtgcctggaaaggtgttgtggttggtggaggatgcactgtggttttggggaggagctggggagtgtctctggaaaggttattgggattttaattgggtacctgcaagggtctggggaggcgttagagacctgaggtccctccatacgtgggaagggaagaatgggtctctgatatcagagatgtgccacaggctatcgtccgtgcatgcacaggtatgagggctgtaaccaggttcctggtgtcagggaggtgttgcaggttgtgggtaagcatgtggtggttgtgtgtttgggggtatgtgcatgtgaggtagctggatgtcggggggtatctgtatgtagagtgtgtgtgtggaagtgtgtgggctgggtgttgtaggtggagcagttg

SEQ ID NO: 1494 - DNA, 1690 bp, Artificial sequence
  DNA replication origin
aaaacttgattcaaactgagtagagtcttcatgactacaggcagaatctaatgggtaatgggggaagggagagaaaggaggaggaacctgggtctctttcaccctccccaacgccgaagtctgtctgtcctatagggggccagctagggcaaggtgccaaagcctcatctatttgggatcacttcaggcccaggctttggagctgcagaatctctaatgactttagccactacttttatgagcatctgaccttatatttcccattcaatgaataaatctttgaacccaagtcctaacttgtctgcaaggagaagctgctccaagatgagggcctctccagtcggtcatggcagccccatgatgccaaatcaatagtgtcccgtttagagccctagacctctcctattactgctgcacacaccctctgccaagggccaatagagagtgttccccagatcccctctcttgtcctctgggggtactggactgccatagagaaggagcttggaaggagtgaaggtgtggggaagatagtgaccagggagttgcggttggcaaaatgtcaccagctgcctttgtcacacactggccaacaccctgcaaggccaaaggaagagtcagaaacaggtaggccagagacaaaggcactgctctaggaacttcagacctggagcaagatagacaaggccagcagacacagggtgtggaacatcagacacacagatgaggtggtccagtgaggtgggaccgccgcagggccagtcagggccggcgttggtagacacctaggacacaggacacgacagccactatgcattattcatctccgtgtcccttgcaagccctgcatacctcagttaacatttgttgaagtgccaagaaaggacacacagacacagggagagaaggtcagttacagaaatggagggagtcacaactccttgtcatagcccaggggttaagcttgtggggtttggagttagtcagaccctggttcaaatccagctgggttcagccacttgctaactggagaacctggacctcagtgcccccatctctaaaatggaaataacagcactattttaccgcagcagttcagccatctccgggggcggtaacaaggcccccaagcagcgcacattcccatctgtgggataggctaggcaggggctggagaacacatgtgacctgaagaggaggtaggtgaaagtgctgagcccagcccccggccgcggcaggaggtcagcaccgttcaatctgaatcctgcttcctgacacaacgcaaatgctcagcagaattcggaaaagggtgtgtgtgttctatctgcggattatccaggacttttgagccctcgccgcccttggacatataggaaagctgggagttgcaagggcgaaaccgaggtcggagtttgagaggaggggtcactgagtgaggaagcagcgctggctgggtctcccccgctcccccgccccagcagccctcccgccatatatacttgagctttactcaataagaaaccttttcagaaaaggataacgtccccagattgagagagccggtcctctcctctgccctctccccctcccatttaattgggacgccccagaaagtcgcagcccctttggctaatcccctggttccctattccactcccattccactctcagaccccgccccttcactccc

SEQ ID NO: 1495 - DNA, 674 bp, Artificial sequence
  DNA replication origin
tccctgaaccaaccaactgaagcattgtccagatgggggaactgaggcccagagaagggaagggactaccaagcagtattggccagacggaaaccagaacccaaggatggggtctgccagcccaggatccagctctgtgagcttctggaggaaagcagtccttcaccaagcagcaccccctaatgactgagcaaggcattggccagtttcttgcctcaaggcctcaatttgtggaaacttgatggagtgtttgtgccgcctgaatgccccaccaaggcaccaggactgccctgtgggcagacagggagccatcatcacagggccctgagcagggggtgacagaggctggtctcacttttgtgagaaactctggctgctggtggagcttggatgccaggggccaaggcagagtgaggggtccattagaaggcagtggctgttgtccaggtgagaggtggtggaggccagactaaatcggtggcagtggagtaaagatgaagcagacgattctgaagctgggtaggaggcagaataggcctgacttggtggagaattggctgtgggggtgaagggaaggcaggagtcaatgcccacgtttctgccttgattggttatgccaaggatgaggtccacggaagaccgtgggcctcatgtccacacctttgcctggaatc

SEQ ID NO: 1496 - DNA, 846 bp, Artificial sequence
  DNA replication origin
aacaggagagggagctggcgggaagggggttgaggagaacgacttctggaggacggagaacctggggtgcaattgcgggtccaggaagttcccctcttccgagccggccgaagtcggggtgaagcccacagcccgcagggtaacgttagcggccgcgaccgcggccccgcgaccctctcggcccgcccttgcggtaggttccgggctgcaggggactcctgccgggcgcgcgaggcgtgggtccccgcttcctggggaagtccccgccctcggcagggacaggcctctccgggcgccccctccgcgcccgcggcggtctcggcccgcgctccccgctggatccgggaattgctgccgccccgacggaaatcctgcctttgaccgcgagtgcccgcaggggctgcctccaaggcaacgagagggcgggccgcgctgggccgccgcggggctccgggtgggcgcagccccctttgctctccgccttcgcccccttttggaatcctcggtctggtgggtggggggtgggcttcccgaccgaggtaggaggcgatgccgctgtgttcagggatcctggggtggaggatctgctgtttgagagacctgggttcttagcaagactgggcccttaattgctgtgtgactgtgggcaagttacagggcttctctgggcctcactttcctcatctgaactatggtgagaaatgatccttgtgtccactcttcccccacgagaatcaggtgcagaaagcagtttttgctgagtgtcctgaagggttaagggctatccctgactcagcgagcctccccttcaccttctcaaaaacatgcagaggaggccagcctggg

SEQ ID NO: 1497 - DNA, 1080 bp, Artificial sequence
  DNA replication origin
tgaagtcaactggctgtgagaactcgagtaaggccagtcccgatctggtcctcagtgatggagaaaagcccctcttaacctccaattcaatgatcctaaaagagcaggtgcttcgggggtgctgaaactgcgcttttggagggggcttttgggaaggccgggctggggactcaggtctggagggtgacagagccgacctcccgtaaaccagggaggaggaaggtgggggcgggtgggcctaggatctgggggcgcctcctcgctgcggggagctggcttggggctagggcgtgactgtctccctgccaccatcaccgcccgccggccgtgactgcaataagagaagtccgaggcggcttcctcctccctgcccagcaggggcggcggtcagaggcgggcagcaccccagttctccccgcacgccggcactcgcggctgctggagccccggctggctcaccccggggccgggcagaattgggctccaggtaagcgacagcgtcgggtggggactgggcaggtcaagcagtgccctccccctcgaggctctggagagaggactgggggtacacgggaagagaagcctgaacctgggggtcgggggacacatgagcaaggtgacagccaaagggaccccagcccgaaaaggcctaaggaggaaaacgggcgacctgaaaagcaaggctgataaacctggaggagagggcggaggggagcacgggggaagccgaccaaagggacccccaaaaaggtctagtgggtaaaatggaggggactgataagagtttaggaagggggctgaggtgggggagaaggattaaggggaatccccaggacggtctgggggagaaactgaagggatcgtgagagtgggactttggggagaagccgacgggtctgatgggtccaggagaggggaaatgggtgggggtgctggagggaacaggagagggagctggcgggaagggggttgaggagaacgacttctggaggacggagaacctggggtgcaattgcgggtccaggaagttcccctcttccgagccggccgaagtcggggtgaagcccacagcccgcaggg

SEQ ID NO: 1498 - DNA, 1633 bp, Artificial sequence
  DNA replication origin
gccctggctgcatttcttagagcagttataatgcgcgcaattcacacgggaattattttcaccctttgagggtccgcacccaccggtgccccagtcgcctttcccaggcaaggccactgggcggggcatccggggccgtcggagtgacgtaacagcggggcgcgtccggagccggccctcacttcctgattggcaagcgcggtggccacacccaccgccgcagccgtcggagtagagatggtggcagcgatgggcggagggggaggcccggcgttcgcgcagacggcggtggggcggtggggcggtggggcggtggggcggccgcgccggcttcagggcgtcggggtctcccggggcacgttcatgaagccggcgaggtggagactgggcgccgagcggtttgcgaggctcgcgcggttccggggggcagtgggacggcggagggctcgtgcgctgcggctggaccgctccccgcggcgggccgggcacagggtgtgaccgggcctccgggcgctcgctgcagcgcgtctatttcggtgcctctgacctcagcgaggaaagtcccagaaacacagccccaccctccctctcaccctccttgacacgctcgcctcttccccaccaccccaaactcagacccagaagaactgcgggaaactaggcgcctgcagacctggtttcttagccctaactctgtgtgacccagaacaggagtccatgacttgtggacgttagtccgcttatctgtaaaatgaagcgacacctgcgttagatgatgcgaggtatgaagtaccctgcactaggggtgctggtgctaggtgctccagggttactagtttcttcctgatcctgccgctgatgtgctctgtgtcttagagcaatttcacttaacctccggggccaggcttcccccatcctaggatgagtcaattgcctttctagtcccagggtcctgggggccaggccttcttgaatcatggagtccgtggcaagctaagagcaggcaccgcctcctggtgtcggggctcttgcctttctgagccctcaccctcttctttccccatgctccccaccccccagctcagggccctccagccttgtctcttgacttctctaaggttcctctgacaagtgagttttctcatcctccctgatggctcgaatgaggttgtgcctaagatggctgggctccccagaggctctttgaggtttcagtctgctgagaccttaaagggcatcccaggacaaccttcctgcatgttcctaccaaggttgagtcactcccctgcacaaaaccattcagaggctccgtatggccctcaggccacttggcaagacccacaggccacaataccaaggtctctcttctcagccaagcccccaggcaggctatagccagactcaactttcagctgtctttcctctctcccagtgacacaaacctctgctgggatcacttcttccctgagccatcccctcacaccttttacctggctaactcctcatccctgatcatcatggaagaggatggatcctgacccctaaggtgggtctcagttcagctgaggactggtgagtgactgctgacctcactcagcgcagccactcccctccttgcctccttccctctgcc

SEQ ID NO: 1499 - DNA, 1395 bp, Artificial sequence
  DNA replication origin
gcgctgcagcgagcgcccggaggcccggtcacaccctgtgcccggcccgccgcggggagcggtccagccgcagcgcacgagccctccgccgtcccactgccccccggaaccgcgcgagcctcgcaaaccgctcggcgcccagtctccacctcgccggcttcatgaacgtgccccgggagaccccgacgccctgaagccggcgcggccgccccaccgccccaccgccccaccgccccaccgccgtctgcgcgaacgccgggcctccccctccgcccatcgctgccaccatctctactccgacggctgcggcggtgggtgtggccaccgcgcttgccaatcaggaagtgagggccggctccggacgcgccccgctgttacgtcactccgacggccccggatgccccgcccagtggccttgcctgggaaaggcgactggggcaccggtgggtgcggaccctcaaagggtgaaaataattcccgtgtgaattgcgcgcattataactgctctaagaaatgcagccagggcattttaaaatgtattttttcaatcactcctcttccagccatttatccgtccgtctgtatgtatgtctatccagtcagccaaagtaattgggtgcctcctgagtgccaggcgctgtgctgggttctagctataaagagagatgaaccctctgcttgtcctcagggagctcataatctagggcggaagcctgatggtaacaaatgctcatgccatcgttttcattgcagtcatgattcattctgggacggtgagatacaggctgctgcaataaccaggtgtctaacttggattggggctcaggtccctgtagaagttacatcgagccgactcctgaagcaacaagtgttccaggcagagggaagagcttgtgcaaaggcaatgaggctagcaggctggaaaataagggaaaggaaactgagtgagatgaggctctggaggtttacgggagcgaattatttaagaccttggaggccatagtaaggaaatagaattttcttctaagtgctgtgggcagtcactgggtacttagtgttttaaaatctccctacctctgtgtggagaatagacaggagtggatacgggagtaagagtggacacagggacacctaggaggtgccctccagcatggaaggtagtaagctagatgagagggaggctactgtgggtgggacatgaacagattcaataaataattagaagatacaatcctcaggcaggtgggttgatggattgaatatgggggtgggtgaggcagagggagttaagattaagtcattcattcattggacaattatttattgagcccctctagatgccaggcactgttctacagaggcagactctctgggttcaaatccttgtcctgtcac

SEQ ID NO: 1500 - DNA, 1224 bp, Artificial sequence
  DNA replication origin
tgtcttaaaaatttttttaaagcaaattctatgcgtcaggcactgttcaaagtgccggggatacagcgtggaacagttattaaattaacaagtaccctctgaaatagactctattaataccccaattttagaaataaacaaactgaagcccagagaagcaaagtaccctagtatcctgcccaaggtcacttgggtacaaggccaggaacaaccacagtcatgatattgacatctgcggagcttaccacgtgccaaacaccgtgcgaatccgcacagaatccgcacacccaccggttggggcagggacatctctgccactgatgcggagaggaaacggattcccgaggctcctgagagggatcctgggttccattcaccacacctcgctgctttttactgattcagttggaactggaagggaaaacaacggagctgatgagctccaaaaatgctccggggaccatctccctctcgcccgttcgcaggtctagtgacggagcccgcgcgcggcgccaccatgcggcagaaggcggtatcgcttttcttgtgctacctgctgctcttcacttgcagtggggtggaggcaggtgagaatgcgggtaaggatgcaggtaaggggacaggtaagggtgcaggtaaggatgcaagtaagggtgcaggtaaggatgcgggtaaggatgcaggtaaagatgcgggtaaggatgcaggtaaggatgcgggtaaggatgcaggtaagggtgcaggtaaggatgcgggtaaggatgcaggtaaggatgcgggtaaggatgcaggtaaggatgcaggtaagggtgcgggtaaggatgcgggtaaggatgcaggtaaggatgtgggtaaggatgcaggtaagggtgcaggtaagggaacagataagggtgcaggtaaggggacaagtaaggaggcatataagggtgctgggggatgggaggagtgtgggataaaggagagagtttcagggtccggggtgtagagggtctggcgtgcttctgtagagaccctggcgtccattccaatggacagcgcagggttggtgtcgccagagtcccagattcaaatcccactactctgttcattcctccatcctaccgaaatttactcgatgctagttctgtgccaggctcggcgcctaggggaaagtcccttcccctctgtgaggctctctgagtaggagagtggtggcccccgcctccaggagtggtcctgagc

SEQ ID NO: 1501 - DNA, 1708 bp, Artificial sequence
  DNA replication origin
gggtccgagaacaatccccacggttgctaagcacccggacacgccggccgcgggagcctggaccgggtcccggctcccgcacgtgccccgccggcccccagcggggtgggtgcggctcctcagcctggcgggcctgccacaccctgctccggggaccccgccgggcgtccccacagaatctggagctccgggccgcgcctcctgcgtccccagttcccggccgccgccccagcccgcgcaccttgcacagctgctgcccctgagacagcgcctcgaaggggaagcgctggtggcacttggtgcaggcgtagagcgccgccatgtccggcccgggccgcgctcaccgacccgccggcccggcccgccgatttatctgacagtctgaggcacaacccggcggcggctgcaggctgctggctgcggcaggcgggcgggcgcaggcgggtcggggcggacccgggcgggctggggcgggcacggcgactctagacgcccgctcactggtgggctttgacgtcgatcaagtgggaaggggcggaacacggagctttcgcccactctgattcggtctggcctggagtacgccactgtgacgctccaggccgcgattatgtaaagcgcagtcacgcgggggcgccacctggaggggacaggctcccggccgggacctcggaagagcttaggctccgccctacttgctcagcgttcccgccctcgctccgcctctccacggcctcaggcgcatctgcgcttctcgcgataccttcggggatttgtgatgttttggtttccatggagctgccctctgggagcacgaggggtacaattggaacgaaggcggcgcacagttaactggaactctgcagccgtccaagcccaaagaaggtggggagcttgggaaagaagttcctcataatcggagcaggaggagcccgcccagcctcgctcaaaggaggagacgagactctgagggacaatttagaagtgtgtcctcaatttaagacacctaaatagggaactgtggggctgtgggccttaggagagaaaaggagagccccagagagagcacccctatgctgcggaagagggactaaagagatggcagtccttccaggagggattggacagatattcaggcgtccggtggcctgcaggcccccatcagagtgggctgcaattggcccagacctgcttcctactttgttttctccggtttcacccccagcttctctcgcaagcaaccacctggtgattcctgacgaggcctgacttccggaaggcaagccacgccctccgggctcccctgcctctctttggctccagcttggcatgtataggagctgcccaaggaatgacagacttcttgttcttgaggtgttggcaaagcttcctgcactgctgacctatccaagtcctgccttgtagctgctcttgggcataggttactcttggctctgccaaccacccgtacaggactaattgcagttttacctcaacgtgcgctttttacaattaaaaactgacttaatggcttctatttccctgcctcaacaaaaaaaatttactctctctgaacccaaatctggctgcttccttgtaggatcccccaaagatgtgcattaatcattaggatcagaaagcaaagtttccaaatcactgttccacaactaactacatgaccttggatctatcactgaacttctcacgg

SEQ ID NO: 1502 - DNA, 1145 bp, Artificial sequence
  DNA replication origin
cgaaagctccgtgttccgccccttcccacttgatcgacgtcaaagcccaccagtgagcgggcgtctagagtcgccgtgcccgccccagcccgcccgggtccgccccgacccgcctgcgcccgcccgcctgccgcagccagcagcctgcagccgccgccgggttgtgcctcagactgtcagataaatcggcgggccgggccggcgggtcggtgagcgcggcccgggccggacatggcggcgctctacgcctgcaccaagtgccaccagcgcttccccttcgaggcgctgtctcaggggcagcagctgtgcaaggtgcgcgggctggggcggcggccgggaactggggacgcaggaggcgcggcccggagctccagattctgtggggacgcccggcggggtccccggagcagggtgtggcaggcccgccaggctgaggagccgcacccaccccgctgggggccggcggggcacgtgcgggagccgggacccggtccaggctcccgcggccggcgtgtccgggtgcttagcaaccgtggggattgttctcggaccccgtgaggtcgggggagggacagcgggtcccctgcttgccctgactggtcgccttcgggatccctttgcgctgcctcccccgccgccgcggtctccctggtggggacctcctgcccctcctgggactgaactccaaagttgggtgctgccttggaggaatgtgtcgaactcgggctcctcacgggcacttttcgaccagtttcagaatcggaggtagcaaggcttgattttttttttttttttaagcatctcacttttcggccagtctcagaatcggaggcagcaaggctttatgttttaaaaaagccccacagtcaggctcacagatccgagggatcacttctcagcatccagttggtggtcttcggtcttccctgactagctgctgatcagtttttgctcctgaaggtccaacttctctttttcttttaagttgctttatcccacttttactttttaagtgactagaggtgctgtgaggcaacagttaaaaagtcaccaaactggctgaagaataatgttgaggttatccaataatccagtttgtgtctctgatttggataactcataattgtcacttttgcctcagatgg

SEQ ID NO: 1503 - DNA, 900 bp, Artificial sequence
  DNA replication origin
aagaccagcctggccaacatggtgaaaccccgtctctactaaaaataaaaaattatccgggcgtggtggcatgggcctgtaatcccagctactcaggaggctgaggcaggtgaattgcttgaatccgggaggtggaggttgcagtgagacgagattgtgccactgcactccagcctgggtgacagagcaagactctgtctcaaaaaaaaaagaaagagaaaggaaggaaagagagaggagaaagaaggaagggagggagggaaaaaaggaaggaaggggagggaggaaggaaaggaaagggaagggagagagagagaaggaaggaaagagagggagggaggaaggaaggaaggaaagaaggaaggaaagaaaaggaagaaaaaagaaagggagggagagaaggagggagggagggagaaagacccaaatataggggattttgccaatgttaaattcttccactgctgttaggaaaacaagctgcagttcagcccactgagctgatttgtgtttaccttctttgatcagagcagtaaataggttgtagtccattcactttggaactgctatccacagaccatcagctttttgtcagtcagttgggagttaccatagggcattgtccagtgatgacagaatccagcaactcctcacacagttccagagtcaatcccaggggaaaagaggctccttacttgtagctcctccttgcattcctcagatagcatgatcttgtataaacatttaaattctgtagtccaaagtcccagtggttgtcatcgggaggcactcaacaggcttttgtcacaaggcctagcagtctccacatagggctatcacaccaagaatttgtctatatcagcactccagccttctgctgtactgtttggacttgggcgc

SEQ ID NO: 1504 - DNA, 1266 bp, Artificial sequence
  DNA replication origin
gggggggctgacccccccacctccctcccggatggggcggctggccgggcagaggggctcctcacttcccagtaggggcggccgggcagaggcacccctcacctcccagacggggcggctggccgggcggggcgctgacccccccacctccctcctggacggggcggctggccaggcggggggctgacccccccacctccctcccggacggggcggctggccgggtgggggggctgacccccccatctccctcccggacggggtggctggccgggctgaggggctcctcacttcccagtaggggcggccgggcagaggcgcccctcacctcccggacggggcggctggccgggcggggggctgacccccccacctccctcctggacggcacggctggccgggcgggggggctgaccccccacctccctcccggatgaggcggctggccgggcggggggctgaccccccccacctccctcccagacggggtggctgccgggcggagacgctcctcacttcccagatggggtggctgccgggcggaggggctcctcacttctcagacggggtggttgccaggcagagggtctcctcacttctcagacggggcggccgggcagagacgctcctcacctcccagacggggtctcggccgggcagaggcgctccccacatctcagacgataggcggccgggcagagaggctcctcacttcctagatgtgatggcggctgggaagaggcgctcctcacttcctagatgggatggcggccgggcagagacgctcctcactttccagactgggcagccaggcagaggggctcctcacatcccagacgatgggcggccaggcagagacactcctcacttcccagacggggtggcggccgggcagaggctgcaatctcggcactttgggaggccaaggcaggcggctgggaggtgtaggttgtagtgagccgagatcacgccactgcactccagcctgggcaccattgagcactgagtgaacgagactccgtctgcaatcccggcacctcgggaggccgaggttggcggatcactcgcggttaggggctggagaccggcccggccaacacagcgaaaccccgtctccaccaaaaccagtcaggcgtggcggcgcgtgcctgcaatcgcaggcattcggcagactgaggcaggagaatcaggcagggaggctgcagtgagccgagatggcagcagtacagtccagcttccgctccgcatgagagggagaccgtgggg

SEQ ID NO: 1505 - DNA, 918 bp, Artificial sequence
  DNA replication origin
gaggggcgcctctgcccggccgcccctactgggaagtgaggagcccctctgcccggccagccgccccgtccgggagggaggtgggggggtcggccccccgcccggccagccgccccatccgggagggaggtgggggggtcagccccccgcccggccagctgccctgtccaggagggaggtgggggtgtcagccccacgcccggccagccgcctcgtccgggagggaggtgggggggtcagccccccacccagccagccgccccgtccgggagggaggtggggggggtcagcccccctgcccggccagtggccccgtccgggaggtgaggggcgcctctgcccggccgcccctactgggaagtgaggagcccctctgcccggccagccgccccgtccgggagggaggtgggggtggtcagccccccccgcccggccagccgccccgtccgggaggtgaggggcgcctctgcccagccaccaccccgtctgggaggtgtgcccaacagctcattgagaacgggccaggatgacaatggcggctttgtggaatagaaaggcgggaaaggcggggaaaagattgagaaatcggatggttgccgtgtctgtgtagaaagaagtagacatgggagacttttcattttgttctgcactaagaaaaattcctctgtcttgggatcctgttgatctgtgaccttacccccaaccctgtgctctctgaaacatgtgctgtgtccactcagggttaaatggattaagggcggtgcaagatgtgctttgttaaacagatgcttgaaggcagcatgctcgttaagagtcatcaccaatccctaatctcaagtaatcagggacacaaacactgcggaaggccgcagggtcctctgcctaggaaaaccagagacctttgttcacttgtttatc

SEQ ID NO: 1506 - DNA, 1221 bp, Artificial sequence
  DNA replication origin
gaaagcaaaagccgaggtccaaagaggttgagtgcggccccaaatcacacagcttggccagtggcagtgtcgggatttgaacccaggggcagtttccccggattgctaacgtcttctccgggtctctgcccccgccccacaccaagggagtgctcggaggggttccagcccccgctcaccctcgaagtagacccccgagcagacccgcagcacgcgcgggagggaggcggggtccaaggcgcgcacgaagtcctgcagcggcaccggctccatggtccccgcggctctctgggctcagactgaggggcgggcgggcggtccccgggagccctgcagccccgccccgccgatgccccgccccgcacgccgaagccgccccgccagcccgcgggagccctgcagccccgccccgccgaagccccgccccccgccccctgcagtaccctatggggaaggggcgatgatgaagatgaagaagtcccagacgccccctcagcagtgctcccagttagaaaaaggggacgcggcccgacttgttctgcgtctcataggagggacatgcctctgccctttgggtttgaggagggagatgtagtgtcagggctcccgaatgtccctccaggacactccatggtcctctatcggaaacctcctggtgaaggggatctcattacctctccagaactcccatactctttcgataattattgtctacgttggcctcgaactcctggactcaagtgatcctcccacctcggcctcccaaagtgctgggatcacaggtgtgatccacctgtgagccaccacgccgggcctcaccaattctagttaaaaattcttcctaaggctaaagagaaatctgcttagaagccggaccaaccacttatcctgaccccacaggctcgggataagccttttccatttccctgtccctcaggagtcagaccaacataggttcaaatcccaggtctcctcttgctcgttgtatgacgttaggcaaatcactttgattgtgtgaacctcagtttcttactctctaaaacagggagaagagggccgggcgcaatggctcacgcctataatcccagcactttgggaggccgaggcgggtggatcacctgaggtcaggagtttgagaccagactaacatggtgaaaacccgtttctactaaaaatacaaaaaaacctagccagacgtggtggcacacacctctaatccca

SEQ ID NO: 1507 - DNA, 1111 bp, Artificial sequence
  DNA replication origin
ctcccgcgggctggcggggcggcttcggcgtgcggggcggggcatcggcggggcggggctgcagggctcccggggaccgcccgcccgcccctcagtctgagcccagagagccgcggggaccatggagccggtgccgctgcaggacttcgtgcgcgccttggaccccgcctccctcccgcgcgtgctgcgggtctgctcgggggtctacttcgagggtgagcgggggctggaacccctccgagcactcccttggtgtggggcgggggcagagacccggagaagacgttagcaatccggggaaactgcccctgggttcaaatcccgacactgccactggccaagctgtgtgatttggggccgcactcaacctctttggacctcggcttttgctttcgtggaacggggaccgctgacctgccccgcagggtagtgatgaaaagtcagtgggttgaggcgcgggaggtggatgcagccgggccactcctaggtggccccgcggtgcgcatgggacagagctccgaccgcgccgggacgcagcattaggccgctggtggtcgtggctgcgtcttgattctgaagtgcagggtcagtcttcccgtctgtgtcctcccactcctcccccggccctcctctacactgccttccttcagtccctgcgtccaccttggccttctgtttgaccatgggcagtacttgatttgatcagctcttcagttctcagcttaaatggcgcttcctcccggaagccttcctggctctctgctccttgcacgcccccgtacatctgccgtctgcccgcagcggcctggttcacagggatgggcacacagcaggcgcacagtcactagtcattgcctgaaggagcaagcggtgagggaataacagacagtggagggcagggtaagacagcacagtggatgggtggccagtgctgctctgtgggcagggaggacccgtgggccaccgagtaggggagatggaggtggaggagagagatgctgtgtgggggtgcgggttccttccttagagagcgaactgaggcttgaaggccctgccccatcctgttccctggctgcagaaaaacgctctgtcgcagcagcttccagcagag

SEQ ID NO: 1508 - DNA, 1127 bp, Artificial sequence
  DNA replication origin
ttgcactccagcctgggcgacagagtgaaaccctgttttacacacacacacacacacacacacacacacacacacacaaagccaggcctgtggctcacgcctgtaatcccagcactttgggaggccgagatggcagatcacctaaggtcgggagttcaagaccagcctgaccaacatggagaaaccccgtctctactaaaaatacaaaaaagaaattagccgggcatggtggcgtatccctgtaatcccagctacttgggaggctgaggcaggagaatcgcttgaacccgggaggcggaggttgcagtgagccgagatcgggcaattgcactccagcctgggcaacaagagcgaaactctgtctcaaaaaaaaaaaaaaaaaaaagaaagaaagaaaaagaaaagaagagaaaaagaaaaaaaaggaagggggaaggagttgggggaggaagggggatgggtgggaggaaaggggagggggcaggagggaggtggagaggaggcaaccagggaaatctgtttaattaaaacacgcgatgcgatttctgcccagtgctctgaatgtcaaagtgaagagtaggaggaagaagaaagaagaaagcagggtgcagtggctgacgcctgtaatcccaacactttgggaggccaaggtgggtggatcacttgaggtcaggagttcgagaccagcctgaccagcatggcgaaacccccgtctctactaaaaatacaaaaattagccgggcgtggttgcacgtacctgtaatcccagctactccggaggctgaggcaggaaaatcgcttgaacccgggaggcggaggttgcagtgaggtgagatcgcaccattgcactccagcctgggcaacaagagcaaaactcagtttccgaaaaaaaaaaaaaaaggaaaaagaagagaagaaaaaaacacacagtcctggagcccaaaggccatgtctatcttacttaaccattgaatcccagtggccagcacagggccaggaacaaagaaggcataaacaattctatttttttttttttttttttgagtcgcagtctctctctgccacctaggctggagtgcagtggcagcatcacagctcactgcagcctggacaccccagggccaggt

SEQ ID NO: 1509 - DNA, 900 bp, Artificial sequence
  DNA replication origin
cccagcccagccaagcccgctaggcctgaagaccgactgcccttcgcttcgcaggcttcaaatggcctagttttacctttgaggcgcccggaggcccaagaaagcgagagggcggggagactagagcctggaccagggctgcgatccctcacacctgtattgttgcaaaacaaaacgaaacgcaaaggcacattctaatccctaagtgcgagactttgcaacaacgcgtgcgcctcgatccagggatacccggagagcacggggccgctgggttcacgccagcgatccgagtcgggggagggcgggcgttaggttcctgcaaatgagttaacctcatttccatacggaagggaatagaggccgggcgcggtgactcacgcctgtaatcccaacactttgggaggcccaggcgggcggatcacctgaggtcaggagttcgagaccagcctggcaaacatggcgaaaccccgtctctactaaaaatacaaattagtcgggcgtgttggcgcgcgcctgtagtcccagctaggaggctgaggcaggagaatcgcttgaacccgggaggcagaggttgcagagagccgagatagcgccactgcactccggcctgggcgacagagcgagactccgtctcaaaagaaaagaaaaggaacacaacacagaatcaaacgcatgatgagctttgttttgtgagttaaacataatacgcaaaagaagtatgcttgtaggggggtcttgggtcgtcatttcttttctgtttctggtttgtttttggagagagtctggctttgtcacccaggctggagtgcagtggcgcgatcacggatggctgcagctcctggggcttcgcttcctgattcggttgtcctatttcagttcactcctcaggcgcggaggaaa

SEQ ID NO: 1510 - DNA, 1805 bp, Artificial sequence
  DNA replication origin
tcggcggccgctacctgtgggcggcgctggtgctggcgctgctgggcctggcctccgtggcgctgcagctcttcagctggctctggctgcgcgctgaccctgccggcctgcacgggtcgcagcccccgcgccgctgcctggcgctgctgcatctcctgcagctgggttacctgtacaggtgagtgcttcgccccgggaggggaggagtgtcggagcccagcacctccgtcagctgggtcacctgtacaggtgacacgccatatgccgggaaggggactgggagagggaaccaagtcctgtgggcgcctggcctacaggtgagcgtgcagccctttacggaaagggaatcccggtagactgccttcattctagccctagctttcctggcacaggcgaagaaactgaggcccagggaagaaagggaggcgcatgggctttgaagtcggacctctcagggatccacttctggctttgccccctctcgcctcacttctgcatttctctgagcctcagtttcctcctgcgtagaaaggaggtagtcaccctgagacaggtgtgacgggcaggcctgttgtgaagagtgagcgaaagaatgagaaagtgcctcgcacagtgcctggcctgtaatggcaggggctgcggactcagttcagcatcccatgtttcagcatgggcagggccttgggaagtcactgacctctcagtggggctgtttggttgctgttcccattgggatggggatagcgcctgcccgtttggtgaagatgcagtgaaatgacatctgtccactgccctggctcagagtgagcactcagcaacctcagctggcttcttgacctgggcctccctgggagtttcagcagccctgaccccaccacagcgcttgcccctcacaaaggccgcctctcaccctgtctgcctggttgtattcttccccctgaaacttggcttcccaccccagacccagcaagagggcagagatggcctctgactcatccatgcccatggagccagccagggctgggcataggctgggtcctggaaaatgtgtgtggattctgctcctttttggacctggtggagcctcgtagagatgggaaaacaaacccaaggctcagaggcatgcgacaaagtcagggcagagggtggtgtgggttgggatggggtggccagggccaggatctgctcttgaatccgtttttacaaactcttgagatctggccttgacaaagccacacggagtctccaggagtggaagagaggagctttgaatgtggcagttttgcctgagggattatagagacatcagaaaaccccgggtgggcatgaaggggtgcagttgttaagtcctgggcaggcctccatgagccgtgaatctgtaactaccttatgcatctttgtggccaatatttctgctgagcttgagtcagacagactgtactagctttggctttggaaatgggtctctgttcctgcctgtgaattggccgaggcaggggtccctgctaggtcactggggaccataggcaaaggctcctgctgagggagaaccccagcctgtcctgcctgcctgctcctcagtgtgttcttgtgtccttccaggggaagtgacagtacatgtctggtgaatgagcttgtgatgagtgaacggggttctctcccaataggcaactgagagcaaagttctgggtggagggtccttggtgcatcctccacttactcttcatgccagtgggtaccccagacctgtctgtccaaactctggactctcttaactccgccccaatctccatccttaaccactc

SEQ ID NO: 1511 - DNA, 789 bp, Artificial sequence
  DNA replication origin
ctggaaggcaggccgagccaacagttccggaccttgagccaggcgtcctggagactctgggcaatggaggctggttgatcccggaggtccctcccaggcttgctgtccctcctggagggtggtggctggaggagggctgaggtgaaactgttttggaaccaaggatctgggctggggagcagagttgaggccttgccttttaggtgagcagtttgcatgaaggctaagttcatgtacagaccatgtcctcatatttcagggcactcgaggctcaaaaagcctgtaagggagacaagaagaaatgatcaaactgagcctgtttcttttcttttttttttgttttaaatatgaagatggggtctcactatattgcccaggctggtctcgaactcctgggctcagcaatcctcctgccttggtctcccaaagtgcttggcctgagcctgtttcagtgtccctggcaggacatggggattgggagagtgtgtgcggtgcgtgagtgtggagcagtatggacgcatgaactcgaggaaggagatgagcctggcaggtgtgagtgaggggagactgggcgtgagtgtgcaggtgagtggaggaacacagtgtgagtgggcatcttcgcatgagagtaggcgctgagtgtatgcgagtgtgcaagtgttatgtggtctgagtgtgtctgcctgtgtgtgatggggggctggaggtggaggagggggcagatgcttggctctagttctacatgactgaggcaaatgttaaaagtggtttgttctggccaggcgcggt

SEQ ID NO: 1512 - DNA, 912 bp, Artificial sequence
  DNA replication origin
ttttaagacagagtctcgctctgtgcccaggctggagtgcagtggtgggatctcagctcaccgtaacctccgcttctcgggttcaagtgattctcctgcctcaacctcccaagtagctgggattacaggcacccgccaccatgccgggctaatttttgtgtttttagtagaaacatggtttcaccatgttggccgggctggtctcgaactcccgacctcaggtgatccacctgtgtttttattatcagtgtgctctaagtcctagggccataggaagcagcactgagacagctgggagtgctagcttctcctgtcatgctctttagtgcggctgggacccccggctcagctctgcccttcttgctccactgtgtggcctggctgccagtgcatgagctcgggagggtaagaagtggggatgggattactgacctactgactgaacagtagggcgggtgcatctaggggaaggggagttctgtgatatgtacagatggttgcattgctgtgtgtctgtgtgtgtgtgtgtgtagggaagatatttgtgagaccttgcggagtaggtttgtttgcagtgagtgggtggagggtcttccgggttggggtgtggatctgtcagtgcagttgtgcatgttgtgtgtctgtaaggatgttttcccttgggttaggatctgcatcatgtgaggcaatattgtccgttggtgcccgttcgtgtatgtgtatagggagggtcatgggttgtatctgtggatgatgagggtctgttgtgtgttgtgaagggattctgtgggtgacgaggatgtgttttgtgtggtgtgtgaggaatgctgcgtctgttggtgagtgtgtgtgaatggccctgaggggtgagaggattgtgctgtgtctgtgggcaacaaagacgggccatgt

SEQ ID NO: 1513 - DNA, 1198 bp, Artificial sequence
  DNA replication origin
gaggtgagagaatcgcttgagctcaggagtttgagaccagcctgggcaacatattgagaccctgtctctatttactaaaaaacaaaaaacaaaaacaaaaaaacagaaaacaaaaaaacaaaaaacaaaaaaaactaggtagaatgtgatacatgtgaaaagagatccagctcaagtgccttgggagctcaggggagggtgagattaatctctttttcccaagaatctggaggcaggaaaccaagtcggtttcatctttggaattgtaagcttagacttagaagtctcagagggggacttgggggtcttatccaccctcacccctggcaggattccctgtctagaataaacaataactttaaaatggaaacaaaaaaaggagctctgaaggaaaactgtgaaggaagaggctccgtttgaaatgaatagaaaatgaatttagcttggaggtgctgaggtgttggtagaggcaactttctggcaagaggcgagttgaaggccaggaagtgaatgagatcagggagagtgtctggagggaagaggggcaaaaacaaactggggaagcacccacgttttaggaagtgggtggtgaaagaggagtcagagaaggccagagggagaggtgagcaaagatccagcagaacaccttgttacaaagtttcgaggagggtgggaggggtggaagccaggacgggtagcagaaggaagaaaacttccagcaatagggattgaggttccacacgaagttaccaatgacatttcaaggaatgaaggcttttcctgaggctccacaaataaggtgaattccctgtgtctcgcatctttggagcttccccgaggccagggggagcagggttgtgccctctgacctctaaatatctggggttcagttctataattagcagcaccggataggacgcgagccaaacctctcttaaccctagccagtccctccaggaactgaaaagatgaagaattcatttaggagatttcacactcggctgtttggcctagcccagtgaagtcccttttcatcacgcaaccctaatgactcttagggctgtcactgccgtctggtgttgccagggatctgactaaaccgtcttgcaaaagtttgcagcattcacccgaggcggactacaactcccagaattccgggcgctccccggtgctgattggcggagcccgtgactccagg

SEQ ID NO: 1514 - DNA, 1266 bp, Artificial sequence
  DNA replication origin
aggggccgcgcggccctagctccagcgaggcagcgcccagccgctgctggagcgccccgcggggccggggaatcgcgagcccgcaccgcgccttcctgcctccgggcttcacgtggggccggcgccgcgcgacacgggcgagagcgggcagcgacttaggcccgcgtggaccggcccgtgctccggctgtggccgctccgcttaccgccctctgcccggaccctccgcgcgtcccaggcgagacctaccttggtgcacgtcggccacaaggaactccggcgctccccgccgggccgcgaactgccccagagcatgcgctctgcaggcctctggccccgacccgggtgagaaaggaaaacaaagagcccggcggcccctggcggccatcccaggatctgcatgtggcgcgctcccgggctgggggagcccttggccgggctgggggagcccttggccaggctggctcccctggcccggttccagtgggcgtgtattttggaaaccccaaatcgggacacgtggactaacaaccagaaagactccttgagttcggtctgtttaggaaaatcttgtgcggtagggtctgtacggagaaaaaagatactcatcttccctaccctcaagagggcatggagaaggttgaaaaatcagactatcaacaaccacacaacgctatgacagggatacccagaggggcatctgactcagtccggggcttaagaacagctttccaagttaagtctaggggggcaggacatcctaggagaagcgacgtttgcaatgacagggaaccacgagaacccagggaggttgtgggaaactgccaagtagatgggagtagagggtgcctgtgggagtgacagatcatggatacagggtcttgtgtgtctaaggggtccagcctctatcctgaggcagtagggatatatgggaatttgggcacgggaatggcatgatcagatttttttccccgtgagttaacatcagatgggtatgtgcccatgtcttaacaaggtttgagggaggcacatctcatatgcgtgtgaacacccagtcatcttcttatgagctacaagagcatcctaatatgatcagatcttatagaacaaaatagagaatggacttggggaaaacgggagccaagtggggaggagcaagaggaatgagagagaccagataaaatagaagggtgtgagttggggttgggttagagatggaaaacaggtaccaagaaaaggctgtctcttattaacacccattcttcag

SEQ ID NO: 1515 - DNA, 1249 bp, Artificial sequence
  DNA replication origin
ctcacccgggtcggggccagaggcctgcagagcgcatgctctggggcagttcgcggcccggcggggagcgccggagttccttgtggccgacgtgcaccaaggtaggtctcgcctgggacgcgcggagggtccgggcagagggcggtaagcggagcggccacagccggagcacgggccggtccacgcgggcctaagtcgctgcccgctctcgcccgtgtcgcgcggcgccggccccacgtgaagcccggaggcaggaaggcgcggtgcgggctcgcgattccccggccccgcggggcgctccagcagcggctgggcgctgcctcgctggagctagggccgcgcggcccctccgccgccgcgcctctcacgcccgcaccgcggcgcccgcgcaggcgggagattcaaactgcgcgagcgcggcgggccgggtgcgcgcggccgcccgggcgggggatgggtctctgccgcgaggaggatggttttgtccggcatgcgcttggagaaggcggtttgcagatcggggagggagccctgcccgggagagggtgggtcgtaggagctcgagggtctcccgctgtggacctttgggagccgtgtgtcttgaactccgcagcagctcagtctgtcagcagattatttgctggccatttattgcgtccctctcttgcggggctgggggacagtagtgagaagagcaggcccgtgtcattagcgaactatgcccttgaacccaggcgacggacgctactggcaagtcattcatacgtcacatattgacctaacttcgaccacgtgtgacttgtgtgccctagcagaagttgagtgtgtggggtgttacggggagccctcagggggatcccccaccctgcccaggaggctcagggatggctttccaggtgaagtgactcttgaatggggttttgaaggaacagagtttttcaggcagtctgagggtagtgggattagggtgatacaggcagagggattgcacgtgcaacggcatgaaggtataggtattgtggtcagggataccacaggtcttgaggtgactggaggaggagagtaacaagatgatacagcaggggctgggtcacgaagcgtcttgtgtgcaagactaaggaactctgcggggtggaggaggcagggaagatttcccccaagaagggtatcagagtgaaacctggacagatgaattaggagttcacgaggctcctgtttcaaagacatcccaagagcaggaatcctgttc

SEQ ID NO: 1516 - DNA, 1227 bp, Artificial sequence
  DNA replication origin
ctggcggttctcgcttcgcgggctcgggatggacacgcgcgtagggctggggaggtgacgcgcggacaacgccggggcgagcaaactacaactcccaggcagctgtgcgccacgcgggcggcctactgtcgggtgtggccgcgaggggcggcctatataagctcttgctcgcggcttcagcgccctttctccccgccgcattcccggtgtcgacttactagctgcaagcctctgcctgccttcctgcgcgccgttccccgctagtcgctgctgctggcgcgcactcgccgggtttttcctcccacggcctcgagatggtggtgaatgtggcacggaggagccgggccttccaacccggtgggcccgagctccgaaaggccccctcggcagtgagaggggcgggagcccgcgggggccgcgcccttctctcgcttcggactgcgcaacgctgcgctctgggctgacaggtgagtgttgcaggcaggcggccgggtttacggaaggggtgggggtttgggaaccggtctcctgggggatgcggggatgaatccctgggcctgaagtgtcttaattcagggggaggccgcatgctggtgtcaggatggcctccagttgaatctgtgacatttaccagctaggtgattttgggactggtgactacgcgcgagacctctggaggtcgccctggtagacacggttttcagaaggacgggttttaggcattcagacccttgcgtgcatcccagcttgttgctttcagcctcgctaagtgactaagcgaccttcaggaagtaacttaatcggtctaaacctcttacctgtaataggcggataaaacggtcccatcaagactgagaaaaagcacaccagctattggcacagcgtgggcagtggggcctacaggatgactgacttagtctacagagatcccggcgtacttaagcaggtagtaatgatggacaggtgaggctttaggcggccgccctgggatctgaattgccccttggcccttatcgaagctgcagctgcttccgcatagctgctgtggtcaaaaaggagcccagagtgacagttttccttgacggtcgccgttctgtttgttgtaactgatctgcaacattttgggaaaatacagttccattgtacctgccacctttcagctgtagccagagacctttatcaaaatgggcttgtttccacagaacagcagaacggttgggggtttgc

SEQ ID NO: 1517 - DNA, 1276 bp, Artificial sequence
  DNA replication origin
gcgccttgagtttctactttatgccaagcgctgagttaggccctgaggatacaatcatcagcccctgccctcaaggagcctgcagcctgggagagagactgacatcagagatggtcagaagtgcatgtgggccagacgtggtacaggttcacacctgtaatcccagcatcccagcactttgggagatggaggcgggcggatcacttgaggtcaggagtttgagaccaccttggctaacatggtgaaaccccgtctctactaaaaatacaaaaattagctgggcgtggtggtaggtgcctataatcccagctacttgggaggctgagttgggaggatggcttggacccaggaggtggaggttgcagtgagccgagattgtgccactgcactctagcctgggcgacagagtgagactccatctcaaaaataagtaaataaataaaaacgagactagagagactagagttggctggagcaactggaactccagcctcagtgccctgggtttccagaaggccagcctggaaagggtggagtaaaccttggaggctcatgtgctgcctcaccctagcccctcacccaagcaaaactcaaccagtgtcttagtgcttgtgggacctgctttgtccccttttgtggcatcgaaggggtgatgaaggatgagacaaacctggatgtgagtcccaactctgctgtgtgacctgagacaagccgtgcctctgagcctcagtctcctcagctctaagaggggcactcccatggccctgtcaaagggttgctgtccacaaaacatgaactgaccgttggcctcatacatgttagttgtcgaatccacaggccaactgcactccctttagaactgcagttgtctgtgtctgtcctgcctcctcaaccagactgtgcccaagttccttctggggccctggtgtccaactcagacaggcattagaggaagccgtgggggctgttgaacgttgaacctgaacactgaactagaggccccaggccggggctaatgagggctccaggaaagggcttctgggtggagagggagcatctactaaccactcacttccagagtggccttcccgggtccagcagagggttgggcgccaactagggaacccacagaggaggcggggggtggggcgggggagcggtgtggagcgggtaagggggtggggctggagattaagaaatgagtgaggtggatgcttcagcgctgttagtctcctccccatgcccctcctcacttcatctagtttagtccctttat

SEQ ID NO: 1518 - DNA, 995 bp, Artificial sequence
  DNA replication origin
cccctcctcacttcatctagtttagtccctttatcctgtgaagtaggggtcatcattagcccccttttacagaggagagaattgaggcttcgagagagagaaacttggccaggagtttccactcggtccgacgccctcggtgccccgccgggtacggtggctgggcgcggggagcggggggcggcgccggcggggccccgggcaggggcggggtcggggcgcggacaaaaccgccgcggggcggcggggtggcggacgcggccatggaggccgagggctgccgctaccaatttcgggtcgcgctgctgggggacgcggcggtgggcaagacgtcgctgctgcggagctacgtggcaggcgcgcctggcgccccggagccggagcccgagcccgagcccacggtgggcgccgagtgctaccgccgcgcgctgcagctgcgggccgggccgcgggtcaagctgcaactctgggacaccgcgggccacgagcgcttcaggtgcgggtagccggggcgcgggagggacttctggtggggggctcggtgagcgtgctttaggccacggcaactcccgagaggccaactcagaggtcaggcggagggcgaggtccctgccctgggtcccgcccggtccactggggccagaacctcccctgctcggagtcatttttcccacgaacactgcggggtgggtcgagtcccagagaccaggaacatccctggctttgagctctggactctggagagatgctgagtgatactggccccgggtgctgagagctcaggggaacagagcgggaagtgtcgaggagatgtggaagggagagaggatcagcaggagtttgccaggaagagaacagaggaacgaagacctaggtcagggcagcaccaggccttctccaagaatgagggattcaagtcacgcttgctccctaactggagcacccagacttttttcttttcttttttttttttgagacggagtctctctctgtcg

SEQ ID NO: 1519 - DNA, 1430 bp, Artificial sequence
  DNA replication origin
gaaaaagggagtgggaatgagagcttttgtcattcaattcacagcgcggcaggctctgggtgagcacatcctgtccactgtctcatttgtggtcaccacctcccttcaaggtgggatcttttatgagccccatcgatagatagggacactgaggctcaaggacaggaagttgcacatctggtctctcaggcctttcttttcttttcttttttttttttgaaacagagtctcactctgttgcccaggctggagtgcagtggcgcagtcttggctcactgcaatctctgcctcccaggttcaagcaattctcctgccttagcctctggagtaactgggattacaggcatgcaccaccacgcctggctaatttttgtatttttagtagagacagggtttcaccatgttggccaggctggtctcgaacccctgacctcaggtgatccactgtccttggcctccaaaaatgctaggattacaggcgtgagccaccatgcctggccatcagaactttcttttctgtagaaagcctcgactccaaaatccaggaagcatgactgtgtcaggatactgtttatatgaacccttctgtcatttgtcctccagagagatattaacactccccatcccaccaggtgggctaaggctgggactgctttaaccctttctctcctagagtcaacactggcatgggcctgagtgctgcttcctgctgggggacctggggatttgggtcttgtggatgagccggacacccccccagccctcttctagcttgatgtccccctgctgcagggcctgctggatagcatcagcgagggtgtcaaaggccaggtccacattgcagttgtttttaaccgaggtctccacgaaggccatgcccagggaggcagctagctcctcggcctcctgggctgagacacagcgggtgctctgcaggtcactcttgtggccaaccagcaggaagatgaccttgtccgggccctgagtggccatgacctcctggtgccagtcttggatgtgttcaaaggacttcctgtttgtcacatcaaagaccagcaggacacccaccacattccggtaaaaggacctggtgatgcacctggggaggcagggaggtggaaaggtaagctgggagaggctgatgcctccatgacacccccagaggcaggacctcctccccctgggatccacagaatgcctcacaccccaacagggctcacttcacacggccccgtggttctctgcctcggtgtctgtgtctctcctaacagtctgggtgctggccgggtgcggtggctcacgcctgtaatcccagcactttgggaggccgaggcgggtggatgtggatcacgagatcaggagatccagaccatcctgactaacacggtgaaaccccgtgtctctactgaaaatacaaaaaaattagccgg

SEQ ID NO: 1520 - DNA, 1357 bp, Artificial sequence
  DNA replication origin
ccggaagtgttgaagcccggcctggcggcggcggtggcggtagctgccgtggcggcctctgcgcatgctccgtcgcctgcccgccctggccgctcgccgcccgcccgcccgacggagacggtgaggagggggaggggtgggcgcgcgggcgcggggtggggtgggggcgggggggcgggcgcgggggccgcgcggcggccggcgagggcgggcgggcgcgcagggggcggggggctgctgcctccgcgggcgcctccccacgccctgtgcgtgccgccgccgccgccggggagcgagcggacgtcgcggcgccgcgggggggtggggggacgctgccgctgggtccgcccgagccgccgggccgcccccagcgcagccggccgcgccgccggggctcgggccccagaccagggcggcgggaaccggcgagtccaccactgggggggccccggcgcccccggaccgaggggcccggaagtactcggctcaggggccaggaggggccggagtgactccggactgagagggccaggcgcccaggaccccatcgaggggtccggggagcctggggtatccccaaaggcggggtccggggagcaccgggcccttggatgaggagctggttggaggcctgggtcctgcccagtgggagggggacgataggtgctggaagcccggatgcccgcctgggaggagaccctctcggagccttggcgggagagcaagagtacagagtgggttcttctgaggagagcagagtccagcttatcccgaggggcgcggtagaggcctcggccactcagaacaagggaaaaaagggcaggttttttccaaaggcagggaaggaagaggagctctaaggggaagtgagcaggcccaggtctccccacagatgagcgcgtggtaggaagactcctagagcctcctgaagtacgaaagagcagcgtccaaacctgaggggatggaaggtgtctaggtgcctcttgatgtctaggtggagaacaaagtaacccgctcggtcaggggatggagaaacctatctttttgagagaagcagagatcgttgaggaaagatgcttaaggtgttcccgctttctgaaatgacaggaattggccaggtgttatctaattgaggggcaggagagatgaaggcaaaatctcaacccgagggtctttggaggatgatccacaagacaagagggtgaagtcttgacctagacagcagagcaggcgcagccctggattctctcaagatgagagaaatctcaaaaccacttcctagtagacacagatggggccttgattggtgtctgtttaggccaatcaagacgggttttaggaaaagagactgtcagac

SEQ ID NO: 1521 - DNA, 1281 bp, Artificial sequence
  DNA replication origin
cagctcggcgccggcggagggggccggttccatggctgccggccggctccgccgcgtccctctccaccgtgcgccctgggcgcggggatccgacgcgaggggagcggcaaggcagaggccgcggccccgacgccgccggctgccgcgccccggccgccccgctgtctctgcgcctcgtccgcctgcctcgccgcccgcaccggcccagcccccggcgtccgcccgctctcctcgcccggagcgctgtgagccaggagcagccgcaggctcctcggacgcgcccgccgcgcgcaccacgtggcccggaggcggccgccagtctgcgcccgcgaccgggggcggacgctgcaccaccggctcggagctgggcaggggaggcctcccgccccctccctagggatgctccgccggctcgagtgcgaccccgtcccaacctggactcccctcccacccccttgccactttggtgtcagagggacctgggtgtggatcccgcctcccgcccctgcactaacaggcggagtgaccttgtgtaagtcacttaacctccctcagcttcattctctttgtctgtgagatgaggaaaatcgtaccacctccctcagagggtggttggggagattgaataaaatgattcgaacaaagagcttagagcagtgccctgcggacagttacatgctccgtaaataacctatattatccgtgcctttcttgcaccccattcattcgctcaacaaaaattctgagggtgcctaatagaagagccgggtatttggggggaccctctagtacacaaaaccagatgcagcctctgcttcctggggcttacagcccagtgcaggagagagagcgagcaaccctaaaatgacattaagatataggtacgaattgagaaagtggcagggtctacaaaacccaggggtcaggacagcttccctggggaaacgacacttgaggtgaggtgtgaagtttggggaagaactaacttaaggaagtaacaagggaagaggattccggataaaggaagcagagggactgaaaggaagccaggaagaggagaaggcaggaagtgagggggcgatgaggtggtgggcaggctcttgaagaccaccttaaggagcactctggctgcagtgcgagcagatagaaggggggcacttggctaagtcatccttgccacaccccttccaagacctaaccattccagattagagccatccttcttcttggggtgcctagcctttccagaacattctaccaagcattactttgctccaggca

SEQ ID NO: 1522 - DNA, 1344 bp, Artificial sequence
  DNA replication origin
cagcggggcggccggggcgcggcagccggcggcgtcggggccgcggcctctgccttgccgctcccctcgcgtcggatccccgcgcccagggcgcacggtggagagggacgcggcggagccggccggcagccatggaaccggccccctccgccggcgccgagctgcagcccccgctcttcgccaacgcctcggacgcctaccctagcgcctgccccagcgctggcgccaatgcgtcggggccgccaggcgcgcggagcgcctcgtccctcgccctggcaatcgccatcaccgcgctctactcggccgtgtgcgccgtggggctgctgggcaacgtgcttgtcatgttcggcatcgtccggtgagtccgctgcgggccggcgccgcagggctggagcccggggtgagggtggggatcacgaacttgagaccccaagcccgttccctggactccccgcgcctccgcatttcctgcaggggcacctggggcccagcgagaggcgaggccacttacatcgaggggaacacaggaatgtgtgtcatcgtgtgtatgtgtgtgtgtggtgcgggggggggagtgcgccgcggttgactaaattacatttgatcatctgttggcatccccttgcttctttgtgggacagtttggcgtcagtttgtgtgtctgtcacagtttgtgagtggatggttgtgacagtacaactgtatgtttggacgtcggaaacatgcccatggggtgggcagagctgctctgaggtgccgcgggcctttggggagaccggtgtgagggcaccgtgcaggcagggcggacaggagggtgctgggtgtcagcacctcgccgtggggcccttaccaagtcatatttggtgctcatctgttggtgtgagcttgtccctaacggtcagtttgtgattctgtctgaatgtaacaatgtgactgttgtttcttgtcaagctcttgaaaccccgagggcggcagagcatccggagtggccgtcgtccctgtgtttgtgcagctgtgtgtgcctttgccagtgattcctggataacatgggcgacagctgtgggccgccaaccggttctctgttcccttcgccagtgcccatctggtcaggaattctgaataggattcagagaagactcacgccctcctcacaaatgccctctcccattttctctttgcctcctctaacagtcttttcttctgccagaggcagcagaggttggtctgggcgggagtggattttgagttttcatcccaggaagtgaggtgctcttcttggagtttatggagagtgctgggaccttctcagagagcctaagacgtcagcttgccccagaagtagcc

SEQ ID NO: 1523 - DNA, 1179 bp, Artificial sequence
  DNA replication origin
tgccaggcctgtccagcctcagctctcactgcccagacccacagcttaaacctccatacgccccctggctcctaacacagctatgtcccatgccaccccctggttagttgcaactccacagacaagtgcagctccctggaactatgggagtccagggagtctccagacccagccagaggaggggatgcctgtgcatcatggaggggagcagcagttggctccctggagaggtgtgagtggagcattccagatagagggaaccacaggagcaatgattcaccaattcaccgaggctgagacgagagtgttggggaccagggtggctgtgaggatggagaggctgcagggacaaaagcaggaaaggcgtcgtaagcaggtgtccttcttaccatagtgtcaaaagcacctgctaggtgctgagcttggctgggctcgggagccacccatgattcctgaggagatacacctggtagagtagccccaggtaattggaggcaggtgttctcatggggatggtgagagggagggctgaggagaggcctggaggcaggcccagcatgactgtgtgaggagccagaggccgtgctgaggttctagtctggatgtgggagctgaggctggacaggtcctcaggggtcccatggtaaggttggcgtgctgggaaatgaggaagctttgggtcacaggccatggggagggggattttggagcaatctgtgcagaatggtcttcaagagaatgaatttggtgtgggggtgaggggtggattggatggggaggggctcaatgtggggagactagagagggtggctcagggcaatgaaaagagagccatgtgaccttggatggggccattaaaaccctgtgctcagctgtcccctttctgaaatggagtgctgttggacctaacaagaaggcaggaagctgtgcatggtggtgcatgcctgtaatctcagctattcaagaggctaagatgttgatcagactggacaacatagcaagaccccatttcaaaaaaaaaaggaaggaggcagcaggaggaggctgggctagatgacttctggtgaggctgagcagagagaacaagcagcagccctggctgctgttcctgctgcatctcttggtcttgcctggagcctgcttcttcctgggtcttgggttcattccctggggagtgtg

SEQ ID NO: 1524 - DNA, 1141 bp, Artificial sequence
  DNA replication origin
tgggactcatgtggcctccgggtcactagggaggggcgctctgggggccggatggcctggtcaggcggcagcgccaccgccgggaccatcggacggggtgcaggcggtgacacgctcgcgggccgtggcttcgcgggcgcggctgaagctgctggggtctgggcggccgcagggcttgcggcagagctggcggaagcagcgcttgaagttctcgtcgaggaaagcgtagagcacggggttgaggctgctattggcgtagcccagcgcgatgcacaggtgcagcgcagccaccaccagcgggtcgcgccggtcgatgtccaccagcgtccagacgatgacgaagatgtggatgggcgcccaacacaccacgaaggcgcccacaaccaccagcaccatgcgcgtgatgcgccgcaggctgcggtccttctccttggagcccgacagcaggcgcacactgcgcaggcgcagcagcatgaggccatagcacacggtgatgatgaggatgggcaccacgaaggcgaagaggaacacgcagatcttggtcaccgtgtcccagtaccagctggggctggggaactggagcatgcacaccactgccccgtctgggccgcggaaacaaggaaagacagacggggtgaggggcctgtgtgcctaaggggcccccacctgcttgcccaccctttcaaggcttgggcaagtcccaccacctcctcccagcctttgttcaaggggattcttctgtctggagtgtcctcctcggcttcggtacttggtgaactcttagttatccgtaaagacctagcaggattggccctcatcagggaggtcccctatgttctctcctggccccttttcagcctttgtgtccatgggtggccgtaatgaaatcgtttagctcagcccactgaatgccagtcattgcagtaactcaaagcaccttgacccatttccaaactagctccattggggacaggactgctaagacagacaacatgagctaggagcaggactcaggccctactacatagtgtaaggaaattactaaacctcttggagcttcagtggagtggggctaatgacagtacccacatctccaggattgtcgtaaggattaaataggctaaggcggacaggtgcggta

SEQ ID NO: 1525 - DNA, 2350 bp, Artificial sequence
  DNA replication origin
tgagagtgatctaggtggcttgggaccccaggtcacaatggcttggcaggctggatgtgagtgctgggcatggccccacatctttccaggacccggggtagccatttcccaaaggaggcacatccccgggtctggggctgctgggagcctcaccctgagaagggggctgtgctttgccctctgagagcatcccttccccctaatgtgcccaaagcccctcttggtgcctaagtccccagccccctgcatgctattcagtccctgctggagtgacagcctcccagcttttgttccaaagacatggctgtcaaagggaaaagaagtatattgtttctttttcttttttcttttgtttgagacaaagacgtcaatttctttccatctgtcccaaaaaaggaagaaaattaaatttgtttttacaaggatgtcagcacactgcttcaatagggagtcaggggtgcattactgaggcagtgttggtgagggaggggacagcagcggagggagaggagatgaggcacgggggaggtacagagaacaaggacagacactgatattctgggaagcaaagatccaggagtgcctgaataaaatgccgaaccaatgaaaagaaaaacttctacacccaactccaggtggatatcactctcagcagcgtgaaggggacagctgggctggagcaggtgggggacctggggagcctggggggaaaggcagagggggacacacactgatgccggcattgcagttacaaaagcttctccccccagttccttcaaggtcaggtccccatatgggcagttccagttcactggagtcattgacaccagacacatggatgcagccagatgttgggagaatggaagaggatttcatccaggttcttatcagggcccaggacccagcaccaagtgcgaactgatgcttctcataccccgccccccgccctcaagagtcccaggcaccacttaccatctacgggatctaagtaggtggtcctctgtcctccagtatctgggccagagaaactagggccctggggactcacagaaagcatccaccttccactggaagacctaaccttgaagcaggagcccacctcttcctccacccacccaccaccaccccttggcacggaggtccactccgggtctgggttttcgaactggttttggaagccttctccttcccaagcctctgggcccccattagtactcagttctggggaccctactccaaccaaggtcctgtcttattaccctatcctggagtggctgccccccgctctgctgtcctgtcccaagccccactgtggccaccgattctgagggattcctgcccattccaaggaaatacatgcctgtcaaagagataaaaggtatactgtttctctctcttcctatctcttcttccctcattctccctctctctcctttttgagagacagagtcttactctgtcccccaggctggagtgcagtggcaccaccatagctcactgcagcttcaaactcctgggatcaagtgatcctctcaccttccaaggagctaggcctgcaggtacacaccaccatgcctggctaattttgtattttttgtagcgacagggtctcccatgttgcccagactagtctcgaactcctgggctcatgtccatccacctgcctcggcctcccaaagtgctgggattacaggcttgagccaccacgcctggcccctcagtcttttatattctatttataaaggtgtcaagtcggacctggacctcagcgagccttgccccttgctagaactcagggctgggactgtatcccgtatccaaagatgaggccacaggccctttgcacaggcgccctatctggtgaccaaatcttcagctgtagccacacccagctgtcctgtctctgggtctcccctcacaggaggctcctccctactacacagaggcccagtcttgcagctcagttttcaagcaactgtccccaccactgccctttctgggtcctgggcccggacccccaactccgaaagtccggctccaagttagaaaccgaagctgtctcaaggttgaagccccgccttcctggagatgccctgtttaaggactcagttgtagagccacaggtcccgctcctctcctggagtcactggctttcccgccccacctagagccgtggacggggcacccagaccagaggcactgcgccattgatctgtcctctgcctcgccccaaaccagaggcccaccccatgcccatctagcggcccggtcccgtctccgaaacagaggccccatctggcggtcccaagcctccgaccttctactgccccactccacatcatggctcgcg

SEQ ID NO: 1526 - DNA, 1535 bp, Artificial sequence
  DNA replication origin
gaccggccggacccggacgtgtctagctccggatccgagctcccggaccccctctccagactcccacgcccctccctgcaccctgaactttaagatgcccagactcctttggaccccaagttcggattctggaattcgggaccgctggacccctcagccctggacccttcgaccctggtctcgcctctcccgggacggtccgagcccttgggggtaggttcttctgtccctaaccccgtccctcccggggaccgagggtcgccccccaggtggtccaggctcacctgggctgggtgcggcggggaccgggccgaccgcgttctggctccgcgccgctctcgccctttaagaggttcctgccactttgccccgccggggcctccacctgcactgacagggcaactccatcgtgaggccccgccccgcccgctaggccctctgattggcgcaggcaactgccgatcagcggggcggggagggggaggcccgggcagaggagtgcgagagtcgcagttgggaaggggcgggggctgcaggtgtagcctcgtccggcggggacactgagccgggggctgctttgatagaccccagaggtcaggggagggaagggcagggagttcctggattgactggtgtgacgtcatatgacaaaagtgtgaagcaatttgacacgtggtactgctcctaaggttactaggtagaggggttggtcagaggggatctagggaagtgaccctgaggagactcacctggatcgcctgtcctaccacttcgtccggcgtgaccctgaacaagtcacttctctggatctgaatttcgtcaaccataaatcttacaatgttttcctgagaattagcgatgtaagttaaatgtcaagcataggtctggtacacagtaggcgttccgtaaaagcgagttctggatcctgtcgtgcccgccttgccactcttctcagtgacttttcccctcctgatggtccactccatcaacgcttccatggtcactggccgaagtctcatcccctccctcccatttcaggcctgagctggcttacatatgcccatgtcaggaagctcaccacccggcagaatggcctctttcattttaaaactaaccctgacacttcaaaagctcttcgtcacagaatcataggatcatagaatattccaggccagagcaccgtggaaaactaaccctttctttggacaaatatggcaaactgaggctcgctgaggacaaagccttcctctgaatgtagtgatcttcctactaaatggggtaactagacttcctgtgttccaatccccaacgctgccacttcctaattgagttactttgggtgagctactaactctctccaagccagtttcctcctctgcaaagtggggttaatgaaagtattttcctcaagggttgtggcaagaattgaatgaaagaatccatgtcaagtgctaagaacagtgccagtcccagggtaagcatgcaataagcattagcatttattataattattgatgttattgttatattgatac

SEQ ID NO: 1527 - DNA, 1016 bp, Artificial sequence
  DNA replication origin
tgggtggggaagggatctgcaggaggaggctcaagggacttctgcatgttggggaggagggtggagatagaatgacagacccgcaagtctaaggagcacctactgggaacactccctgccttgaaggctctccggggtgtcagacagacacttcggaaatcactgtaaataaggcgttaaagcaggtgtgaggtgggaattattatttcttcttttttttcttttgagacggagtctcgctctgtcgcccaggctagagtgcagtgtcgcgatctcggcccactgcaagctccgcctcccggattcacgccattctcctgcctcagcctcccgagtagctgggattacaggcgcccgccaccgcgcccggctaattttttgtatttttagtagagacggggattcaccgtgttagccaggatggtctcgatctcctgacctcgtgatccacccacctcggcctcccaaagtgctgggattacaggcgtgagccaccgcgccaggccgggaattattaattctaagccaggagaaactttgcgcaaggaggtaggaggcttgagaagaaagggagccagaagctgaagggagcagagggagggatgaaaggggacatccagtgcccagtaggctctgcacacagcagaactgggttgaatcctgacccttccactttcctgctgtgtgatcctgcatgagtcacttcacctctctgagtcccaggcttgtactttgtcaataatccggaccttgcaggcataagcagcatcaaataggcaatgtgtatgcagaccagaacggtagctggtctgatagcaggccagtagtgtgttttaagaagggaatggagtggggaagtcctgaggtttccgctgtatgtataggagagccaggcaacacctgccaggtctcagcaacatggggcatgggtggagtgcctgggtgtatgggtgatactcattgaggccacactggctgtctcctgattggcccatccctcctagaccagggctggc

SEQ ID NO: 1528 - DNA, 889 bp, Artificial sequence
  DNA replication origin
agggcatctagtgcagggggtgggagagtgcccaggcctcaggactgagaatcctggggcccaaggccaaggcgggcaaggggcaggaggggagccagcttggcagtgggccagcacccctctgaagacttgggcttgtttcttaatcttttccttcctttcttggctagaacgggctgccaggagaggtaaaggggaagcagtgggtggggccaaggagattgaggagtctaaataatgatggcttaattagctcctgtttatgggtgcccaatatatacagacactgggccaggccatttgtggagattatctcattgaagcctccgcccttctctgggaggaaagcctgctgttcccacttcactgaggtggaaactgagatagacagggtatgtgagtgactggaggccacatggcttttcagtggcagggctggcagggcagccaggttattgactcctgagagaggcagccacttgatctggctggggtggtgaagatgaggggagaaggtgggaactcaaggggaggagcagcatgggaaggtcctggttgtctctctgagcagaacaggcagttgtgagggtgcaggaaggagaggggagccagtgacatccccaaaggtctgcctgacgtgggccctacttccctgaccagcctcatctcctgtcactgccagcctttccctttgtgctccagccacaccaacgacagtgctcatctatcctgagcacagtatgcagtcttgagcctttgtacatgccattccctgtacctagaaagttgttcctgccattgcctacctagagagctcttactcatccttcaaagcccaacctagctcttttccccttgatgcccctgagttaaccacctgctcccctgg

SEQ ID NO: 1529 - DNA, 1115 bp, Artificial sequence
  DNA replication origin
ccaatagaaatttactacaatgttgtggcgaactgagggggaggggcgcgggccggcgggcgggctgcgggccgggctggcctcgcctcgcagagggaaggcgggagggcgcgcgccagggtcgctcgctcgctccctccctccgctggtgcgtttagtcagtcagccagcagcagccggcgggcccgcgagccgcagagggcccgagcctcggacgccggcgcctcctcctgccattgttcgtcgggctgcagcagtggcgggcgcaggagcccggccccggagccaccggtgaggcgaggcggcggcggcggcgcgggagccggggcggtgggcgtggagctgtccccgtggggacggtcctggcggccgcggcggcgctgcagcctctttgtctgcaacccccgacaggccccgggccggggcgcgggctctcccgcggaggagcctcgtgtgcacgccgagtcgccagccgggacgcggcccgaggagcgaggggcgggccagagccgctgaggaaaggggaaggggttgcgtcgcgggagtgttggaaagttaggcttgagatgtatttttgacggtcccctcgggtgcgtcaatcacggtgcggtgtgcaggagcctcgggaggaaaccaaatgcggagaatcgcaggtttcagacggtgaaggtgttgcgtgcagccgcggagcgatttcttcctggcgagggagctgggctgtctgcagaagtcaggcggaatctgaggactgcagggagccctggcaagacttcgcaggccttcccgccaccgacgcctgcatcattgaaaaacatgttcccccttagtcttctgggttcccagcgagcagagggttaaatctattctctcagcgtcgtgacctcctttttcagttcgcgcatctgtcggcttggaaatcttcctccgtgctcgctgggctgctgtacctgtggagaggccgggtctgggctcgccctccgagattgaccagcaggccattattcctggggaggttttgccaaaacaggtcatgctccccaagaacaggcattctcttgagaaaaagtgatctcacgtgaaacagattgctgatggactggtttctggccacatga

SEQ ID NO: 1530 - DNA, 1015 bp, Artificial sequence
  DNA replication origin
ccgaagaatgcggggaggtgcggaggagccccgagggccgcgtctctcgcttgggccgccgcctgggccgccgccggcgcccgcgctccccgcccgagcctctgcgggtgcgggcgcggctgcggctgcgctcgccgtcgggggcgttcgcggcgctgggggcgctcgtggtactggtgggtatgggcattgcagtggccggctactggccgcaccgggccggggccccagggtcccgggccgccaatgccagctcgccccagatgagcgagctgcgacgcgagggtcgcggcgggggccgggctcacggcccgcacgagcggctgcggctcctcgggccggtgatcatgggcgtcggcctgttcgtgttcatctgcgccaacacactgctgtatgagaaccgagacttggagacgcgacggctccgccagggggtgctgcgggcccaggcgctccggccccccgacggcccgggctgggactgcgccctccttcccagccccggccctaggagtccccgagccgtaggctgcgcagagccagaaatctgggacccgtccccgcgtcggggtacttcacccgtcccgtcagtgcggagtctgcgttcagagcccgctaatcctcgcttggggttacctgccttgctcaacagctacccgctgaagggccccgggctgcccccaccctggggtccacggacgcagactggccatgtgatcatcaccgtgcagccgtctggctcctgcattgaacattccaagtctctggatctgggccttggggagctcctccttggggccccagcagctcgggactgtgctcaccgaagctggccacggctggaccgcctcagtcttgggggctatgccaaattgggaggaggaggggacttgggggcccgggtctgaagagaggggagacagcctgctctgaggctgcagcatggaccatgctaataggaccaaaggaccaggagtcccaacgtctaatagatgtttcagtcacatcccaggct

SEQ ID NO: 1531 - DNA, 968 bp, Artificial sequence
  DNA replication origin
ctggcagagcccccgcctagtgcggggtcgggcagtctccccggcctccctgggccgtagttgcaatctgtgaaaccaggctttggacgcgggagagtggcggctccctgctaggcccgggccttgagcgctccagtcggaggcagggatgggtgtcctgctttgaggtttggggtgcagatggggcgtgggtcggggagcaaggccgcctccccgaggtttcggctgcgggctccagcgcggtggttctttaggaagcggacgcgagcagtgaggacgaccctggacagctaggccctgagcctcctctcctgcggcctggggcgcctgggcgggggccgcgtcttctccctcgccctccctttcgtgggggccacaccgcacgcagctcggctactcctgctgggcccgggatccaggccacaggccgcaggcagggcgcggccagcaatcgggagggcttaagctgtgcggcccggatcccgaggcgcaggggcggtgctgctctgaccgggccacgggccacggaggcctcgggcggaggaggcgggaaaggaggccaggcggcgggaaagggggatgattcatccggaggagcccgaattggaaacgtcgcaacctgggaacagccttgcccgggccgacgggggagccgggagggcatccgtccggcggggcccagcgcccggcaccggcacccccgcctgctgccgtggccccagcacgaccgctgggggagggagaggcctctcatgcgtggacttgatggaaatcttgggcgaagtcggcgccgcctctcctcctctgcctggctggtcttgatccgagcggtcttcccggtgtctagctcaagtcgctcctgctgcagcttcgctgcgggcggaggaggtctggaaggagggggcgggcagggagaggctggagccggtgacgccccctcctcccgcgctgcggtatgtaaagcacag

SEQ ID NO: 1532 - DNA, 1524 bp, Artificial sequence
  DNA replication origin
aattttgaaacaggatctcactctgtcacccaggctttgcaatcatggttcactatagcctcaaactcctggggtcaagagatcctcctgcctcagtcgcccgagtagctgggactataggcatgcgccacagtacctggctaatttttaaatttttttgtagagacagggtcttgctatgttgcccaggctggtcttgaacgcctaggctccagtgatcctccctcctcagcctctcaaagtgctgggattacaagtgtgagccaccgcacccggccacaggtgaactgttatttaaccttcaaaacaacactgtggggtaggtattatttctccctttttacaaatgaggagcctgagacagagaggagtcctttctttctcctgctgtctgggccagggcacctggcatggagatcaggaaggtattcgggctgaaggagacacaggcctgcacaccctcctctaatggggatggccagctgtgggcagacactgtgctgggcacagggctccagggatgagcaagacagacctagtcctgccccctcagagtcatggccagtggggacacagacaggaaacagactccactcccagtgggttcagtttgcaggtgcacagggaagctgctggtgttgtgagggtgtacaacagagcaggagagcgggtactgacctggtctgggggctgggggaaggcccagggtctgaaggatgtgtagaaggtggcaagggcacgaccagggggtaagtgttcctgccggaaagcaaggaccaaccaagccctgagggagtgtaagaggcccggggccagttcgtggagacaagaagagatttccaactcgatttggggagtcactgatggttttaagcaggtagtggcaggctcagattcagagtggaaacccttgctgcctgtctgcagcgcactaggacacggggaggcaggagaccatgggctccaggaggagcctggacgccggagcaggacagtggccatgggaaagggagaacgtggctggccccagatgaaaagagcagggcccccaaggctctgtgagtgggatgagagggggagaggaaggggccaaggctgaccccgtgcttgggtggacaaagggcccttcacagagctggaggcaggggatgatcgaggggcccagggagtcagactagaagccgggcttattggaggaagagcagtgggctgggagaggcaggcatggagtgggattgagggagcccaggggtgggagggagagctgggaggcggaggtgcgaccgcggtggggtcagtgtgcggggagtggacgaagcggaggattgatgggggcgggggtcccaagcaaagatgctggagggaggcctccgtggagcggaccgagacctcaggagcctccagtcggactggggaggcaagaaggaggccctggcttcgatctcgcacacggcctcgcagggatgaagcccgggagccgaggctcggtcttccccactgtggtccctctggtccgcccgttac

SEQ ID NO: 1533 - DNA, 1040 bp, Artificial sequence
  DNA replication origin
gagggtcgtcagagatcgctgagccctgccagaggtgccggataaaccttagctgcctttattgttattgttattatttctgcttctattaactgagctctgatgttctacctcatatctgtggcctttttcaaattctttttttttttttttaagacagggtcttgctctgtcacccaggctggagtgcagtggtgcaatcacagctcactgctgcctcaacctcctgggctcaagcgattctctgacatcagtcagagtagctaagacctcagccatgtaccaccacacccagctaacttttgtatttttttctagagacaggatctcaccatgttgcccaaactcctggcctccagcgatcctcccacctcagtctcccagagtgttggaattacagatgtgagccaccgctcccagctttttcaaattattgaatgttccagtggactcagcctggatcagacatctatctccagtccaatcagctaaggactagagggagggagagaacagggtcaggaagcctggacaggctggacacgtggattctctcagaagcctgggaggtggtgatgggggtccctgcaagtgactggcagcctagggagtgcgcaggctggaccttgggagttgggtgatccaagggcttgaagtagggctgctggctggaagtgggactgtgggcactcacctgccacccgtgtgtccagcagaagagtgaggctggagggtcctatgaagatctgcttctcacttctccctttgggagggcttataggtcacaggtcacagcaaggcacatggggtaggagaagcctccattgaggaaattacatatatgccctcccccgcaccaccgctgccactgtaaattaagaaaaaagcactgttgtgttggaaggtgtgccttagagggggagcagggcaacagccagccctggctgacaccaagaaatgtgtgtttggctgggcatggtggctcacacctgtactcccagcactttggaaggctgaggcgggtagatagtttgaggcca

SEQ ID NO: 1534 - DNA, 940 bp, Artificial sequence
  DNA replication origin
tgccctcactgggcgttagaggagtacccgggaccttgttggagccgcacctagcagggtaaatttgactcgattcccacgccacgctccgatcgggcttggcgccatgcggtttagccacagcgttttgtgggtccccaccccgaccgctcccaggggttttctttctgtcgcaggccacggactgtttgcaagagggcgcatccttgaatcctgaggcccagaggggaacacgtgagcgcccagggtccccgagtgtggaggcagcggagagccgggcggggtgcctgcttcccttcgctgaacgcggcggggcgcggcctcacggccaggggttggtccgggcctcgggaggagcccattcgccgcctcccgcctccgccgcctgtccttgggcctcgctgcctcccccggccctggagaccggggtcgccccctccacctggggcctgccctgcaggattctcaccgggaatcccagaggtccagcctctgctttccttcccagcgacgcgcagctcagtatctcaccagcagtgcgatttgtcaccaaatggaagagccgtgtccccgtggtgtctgtggcaaagactccgagttgtctcccacatggccacgcaccctacttgagaaaaagggcgtgctggatgagcgttctgggtgtgcattcggtgccttgcaatggtctgcagactcgggagagggaacagcaagtgtcttcaaccaccaaacagggagagtgccacacccgagggagggcagagcaacaggaaggagagggccagggcctccctgcccactcgggacagctactgctccagctgcaagcgaagactaactcccctctctcttgctctagcaagaacccgctctcaaactactctggcagcatgagccaggcccattgttctgtaactggcaatcatcccatttccaacta

SEQ ID NO: 1535 - DNA, 1181 bp, Artificial sequence
  DNA replication origin
ttgcaaacagtccgtggcctgcgacagaaagaaaacccctgggagcggtcggggtggggacccacaaaacgctgtggctaaaccgcatggcgccaagcccgatcggagcgtggcgtgggaatcgagtcaaatttaccctgctaggtgcggctccaacaaggtcccgggtactcctctaacgcccagtgagggcagcactgcctttgtccctgccccacggacaggacacggaggctccgacatacaaaaggacttaacccgaggggaaatgttagagccgggctccaacccaggacttcctgagtctaagcccaatctggccctagacgagctgccacggtgggctgcaccctccacggcaggagcttgcctggccttgcttcttaggtgagtgtccagcccaggcctttagaagtttgcttctttatcaggtcacatgtttttggacatttgtgatcactgctttgccattgcaaagggggacaagaggcccagggagccccctcatttaccagccccttcctgggaggctcagaaagcagccagctgcccccacatgcacggtggcctgtgcatcagtgtagcttggcgggtcattttacagaggaggcgaccaaggaggtggcaggctgcagtcggggtccccaaggtgatacctccatctccagtgtcaaggctctgaggagggagctggggacctcaggaggcagtggcagtggaggagctggtgtggatgaacctgaaaggggcaggaaaggcacttgggcagcctggagcaggcaggagttgtcacccgctctctctaagccagccctgcacaaagccactggccttacctcctgcaggtgaagcaggtacagagctaccttctgcttccagcctcgggggtgaaatgaccccctgctaaagtcacacagagtatggggcagcatcaggactacaggccaaatcatctgactccagagccctctctacacagagctgggaggtaaaggtatgaattattcccattttacaggtgaggaagcaatggcccagagagtttaagtagcttgttcaaggtcacacagcaagaaaatagagacagccataccactcctagaatctccagtgtcctcacctgcactcaactcaatgtgtgaaactcccgactcacgcctggcgtgtgctcggtgcacagt

SEQ ID NO: 1536 - DNA, 1414 bp, Artificial sequence
  DNA replication origin
ggttaccttccgcctcggggaagggcgggggaagtggaagcgcgcgctcgcgagctgcgtgctcgcgtacgtcgccggggttcggctgcgtccgtcccgccgcccgcccgttgccgccgccgccgctgccgccgtgctctcgctttgcccgccgccgcctaaggggggctggggccggggccagccatcactgccgttgccgggatgccgcgggtgtacatcggccgcctgagctaccaggcccgggagcgcgatgtggagcgcttctttaagggctacgggaagatcctggaggtggatctgaagaacgggtgaggagggcgaaagagggtccggccgggcggggacagaccccataggtggtggggaggccgcggggacgggagagggacgcctggtccgcgcggagcggctaccggcctggccaggctccgccatagtggcggcgcctcgggggcgcgggtaggccccggttcccactgcgcctgcgcgggtgggggtggtggaggcataatgggagctgtgctgaggccctgagtgggacggggagaaggaaagcccgagtggggctggtgctccgggcaggggggcacagctccagggcgcccgggagacctgggttttcccttcctaggcccggaactggggccctattcgtttctgggtagacaccaacctttcccgctctgaggactactggaaataaacaggatttcctgctccctttcacctcttgcccggtctcatggatcagacggtcacagcgccgtcttccccgaggactggagccttggagggaggccctttttagccgtgtgccacgcttttttgggcgggagactccagtttgagtagtctagtgacagtttcgaaagtatcgtcttgccgtgctgaaagccttcaccgttccctctgcaagagtaaattaaagtcttaacttcttatctttaagactccgtgcagagtttccacgctgtggtttccgttttccaacttaccgaaaaattgcttggccgttgtagaatttgttaggagaatagtggccaccctggctagtatctgcgtctggttaacgcagacggagacgaaattgttaacttactgcctcccccagagtatgatctattacttgtattcttaatctacttcggcaaaaatagtgccagcatgagctacaggttttagggaaaactgttgaggaatcaggcctggagaaaatactcaacggggaaaactgggaaccagatgttaggtagggcttggaaggcatggatataaaattaaaaggactggggtgacattttagggcactaaaccttgggtgttagagaactcttggcttaaaaaagaaactctactttgcaacagttgtaatatagctaccgtttactccccagggttatactagtaactg

SEQ ID NO: 1537 - DNA, 1148 bp, Artificial sequence
  DNA replication origin
gcgtccagacccagccgcggggcctcatggcggggaggatgcgggagcgggggaggggcgcgccagggctagcgggcggccggacccgctgcagcacccgccgtggccagcagggagcgccgcgagaccgccgaacccgcggccgggcctgacgtcagcgccccgcttgctccggctcgcgctctggactcggcgccagtcccgctccgcgccgcgccgctccgctccggctcgggctccggctcgcctcgggctgggctcgggctccgggggcggcgtcccccgcgccgggccccgggacgggcggcgacgctccaaccatggcccgtgcccaggcgctcgtgctggcactcaccttccagctctgcgcgccggagaccgagactccggcaggtaagcgcgcggcggccggaccgagcctgccccgccgagcctcggggcccgtggcgtagctcggaagaaagtgtgagtgttgagtgaccgggcgttacgagcgtgctccctgtgtgtgtctgagcgtaggatgggcgattgtgtgcccggggtgttgcgtgactgcgaatgttgtgtgtccgtgagttctgtgcgcaagaaaaggtgatgtgtgtcggcgagtatgttgggggtgaatgttgtgtgcatcgaggcattgggtgtgcgctgagtgtcttgtgggtctgccagtgtgtagtgtttgtgtggccaagtgggttgtgtgtgcatctgagtttggttgtgttgcgggagttgtatctgctaatgtgttgcatttgtttgcattttgtatgcctggccgggagtgctgtttgttttgtgtctgcgagtgggttgtgtgtttgtgttatgcctgtggccaagggtgctctctggatcccgcctgagtgtggatccgggaacgcgtgtgtggcgtgtgtgcttttgagatccgtgtacatgtgtgaaggcgtgggaacgggtccggaacgtgtgtgtccgtgcgctgtgtacgtgtggggagtgtctagggtatgtggtgtgtgctgccgggggccgcgtgggtccgagtgaatgccaagtgtgccgggaatgcgtgtgtgggagcgagtctggaacggatgtgagtgtgtgcgaatgtgtccgtgtgtgctggctgcgcgtccaggaatgtt

SEQ ID NO: 1538 - DNA, 786 bp, Artificial sequence
  DNA replication origin
gcgcgtgtgcgtgtgcgcgtgtgtggcgcgctgggccggaacaagttgtcgcggcggcgccccctgggctgcccgggtcgggcagggcccgaggctcaggggaggaccgggccccgcggccgccgcctcgggcatgtcggactgtttgttgtttcgcaagttccgcgcggcgctggcgggcggctgatccgaggcggcgccggggctgcggggcgcccgggccagcgggccccagcgaggggccggcgggcgggcaggggagggccggaccggcgggcgctcctgcggtggccgggccgcggctgcgccccgggcggccgggcgggggctgtccccgggctgggctgcgacgtccgggcgcgggcagggcctggctcgccgccgggggacggcgccccctcccttggcgcgcaggacgcgcgggggacgcccgggcctcccgggacactcccttggtggagcctgcaactttgtgcggcctcccggccggccgggaccgccaggtgtgtgcttgagtgtgagcgtgagtgtgagcgtgtggctccgcgcttgtctgctgtgtggtcgcgttctccgggtgtgtttcggagtctggtgtctttggtgtgcgtgcgcgtgtgtgtgtgcgcgcagctgaatgtatgtatacggagcctgtgtttgtgtgtccgtgtgctcgtcggagtgtggacggtgtgtcggatgtgtgtgcgtgcgcgtgttccacatcccaccctgaggcctgggatcctagaccgcggccccttcccgcggagtttcggggcc

SEQ ID NO: 1539 - DNA, 1053 bp, Artificial sequence
  DNA replication origin
gggggtgcactgattccactgaaggtagagattgaagaaccaggtttccctccaggaatctggaaaattcctggagggtgggggatggtgttatgttgtgaaaaggccatgttgagagtgtcatctgggagctttgagttggggaggttgagtccctggcaagagactgaagggaacgggcctcctgcctgccagcccctcccccaggctctggccccacccctagcagctggcagggcccttccagcccccagtctcaggcttttgtgatggggcctggcagttggtgagacgttgagtctcaacggtctgtgtgagtggctggggaggagggagggagcccgcagggccctgtgttaggagagggagggaagcttcctggaagaccctcccttagtcctcagtcctagatcctagggtgggcgggtggggtcacagcctctgttctcaccgcttgtgcaccggagggaagggaggagaactgcatcccgtggtggccctggcagatggggttggggaggctggctgaggtgtgtgcagatgtgactctagcatctgggcagtcagagtggggggtgtgtagggattgtaactaggggcatggacacatgtgacctgttagggtgtctagccatctggttatcgtgtggtgtggcaggatctgagtttggagtagggaggtaaccagctgctttgacccctggggagcctggtgctaagggtgtctggctatccaagtatcacattcctggagttgggtgcagagctatttggatgggtggtgtctcgctatctaggtgtggacaacccagtaccagcatgtgggaggatcagggtgtgcagacagaggctatcccagcatccctggggctggaggtgggtgtatccatgtgtctgggagtcctcaggttagtgggtatttataagtggggagtgtctctgtgttgtgtccaggtatggggctggccaggtgcctgagtgtctggttgtaggggtccccaagtgtccgggtatctgagggtgggggtatctgtgtatgaaacaacagggacc

SEQ ID NO: 1540 - DNA, 977 bp, Artificial sequence
  DNA replication origin
actaagtggctgcatctcgatgcctctgggtgcacagggaaggcttggaggggtgaatgcaggagctggggttctgcagcacagtcatgggtgggctggctatgcctcctcctctggctctgggttgggggctgccatttcctgcagaatgactgtgggaggacccctgagggggacagctcagaagatgctgcttccagatgacgcaggaggtcttgggcagattcccaagatgcaaaccacaagaccttgtgatgactcagaagggacaaggagaaagggggcttggagggccgctgaggcttgggagtttgagggcagaagctggggagaaagattgagatggggctgttaggaaggggagatgctgaggatatttgacagggcaagattaaagctaggggtggggtgacagctcagcccccgggggctcccagactagtggaaaaaggagacggaaaaccgcagcacactgtcagatgtccactgtggtgggtgacagctgaggcctgggggaccactggcggatagaagatagctggtgggaaagatatacctgggggatgggacagctgacagtgaagggacaggcggtattgggggaacaactgagggttgggggacaggtggatgatagaacaaggagatgtgggtgataagataagaggtggagataagaggtgacaactgggagctatcagaaacctagtggataggacaggtgagtctcagctgagagtgggaaatacattgcttagaatgtgtatgtatgtgtgtttacaggagcgtgcatgtggacttgtggctgggcatgcctgtcaatatgtgtttgtctagcgtgtggtggttaagagcatgggttcagggcccagaccatctgggttctaatcctaagcccaccacttctagctgtgtgatactttggtaagttactgacctctctgggcccttagagttctcatttgtggaatggggat

SEQ ID NO: 1541 - DNA, 742 bp, Artificial sequence
  DNA replication origin
tatacctgggggatgggacagctgacagtgaagggacaggcggtattgggggaacaactgagggttgggggacaggtggatgatagaacaaggagatgtgggtgataagataagaggtggagataagaggtgacaactgggagctatcagaaacctagtggataggacaggtgagtctcagctgagagtgggaaatacattgcttagaatgtgtatgtatgtgtgtttacaggagcgtgcatgtggacttgtggctgggcatgcctgtcaatatgtgtttgtctagcgtgtggtggttaagagcatgggttcagggcccagaccatctgggttctaatcctaagcccaccacttctagctgtgtgatactttggtaagttactgacctctctgggcccttagagttctcatttgtggaatggggataataataggacacactgcatgcgtttgtcatgaggatatgttttatggttatgattatgtaggttagaacaggtcctgcacatagtaagcactgtgtaagtgatcactgttatgatgtgtgtatttgcatgcgtgcggtcatcctgtgtgcccagaaaagtttgttcttggtttctgatgaagtccaggcctgggagggagtaatagtggtggggacgggggtggtggttggggagtgcctagccaggttgattgagtctggctcttctctgacatcctaacctcttgttcatcctacttcctgctcaccctgtcc

SEQ ID NO: 1542 - DNA, 1094 bp, Artificial sequence
  DNA replication origin
cagcctctcaaagtgttgggattataggcgtgagccaccgcgcccagcctttaaatggttttgacaaagtcaggtttgtgtgttttttactgctccaggtctcctgtgggaaacagatgctaggaagtgaagggactcacccagggaggtggagctggggccagaactcagaatccctgactcctggtgggtcccgttgcctggagtcctcctcagtgctccccttgccctggccctgtccctcccctgaggtctcctcatctcctgcctcttcctcctctctttccaggctcctacttgatggtcaacacttcccagcatgccccaggccagcgagcccatgtcatcttccagagcctgagcgagaatgatacccactgtgtgcagttcagctacttcctgtacagccgggacgggcacagcccgggcaccctgggcgtctacgtgcgcgttaatgggggccccctgggcagtgctgtgtggaatatgactggatcccacggccgtcagtggcaccaggctgagctggctgtcagcactttctggcccaatgaatatcaggtgggctgggttcagtcagcggtcagcctgtgcctggaggtggggcagatggatgtcaaattgaggttggagtagatgagtggctgaagttagaatgtgtctgcattcagtatcagaggcaacctgtggtcaaggccaggggtcagtctggggccagtctgggttcagcatctgaggtcattgttcctaggaatagcctctggcccaggtcaagggtgagttggaacagtgctgacctggaaactctgtctggctgcttgagggtaactgtccaggatttgggtggaaactggcctccaccttgttcactatgggcgctgggaccccacccccaactagctggcttgggagggagggtcagtgtgagctgggctgacctctgctagttgaggcagaggaggctgaggccgagctgaaagtgggcacctccccaggcaaggctggaggaatatcagtatgataggggccctcccgcctcccccaggtgctgtttgaggccctcatctccccagaccgcaggggctacatgggcc

SEQ ID NO: 1543 - DNA, 1104 bp, Artificial sequence
  DNA replication origin
tgcgcacagcgtcccggccctcccctagctctgctctgcgctttcttgggtcccccattcccccaggttagagcgcggctccaggaacctatgtccgcgcggtgtagtagggacggctaaatggggcccgggtcagagcgagatcgggacccctcgctccgaggcgcccctgaccccctcactctcttccctgcagcggcagagcggggcgctggtgccggcggcgggcgtgcggcacatcagccaccggcgcttcctggccactttcccgctggctgccgtgagccgcgccgagcaggacctgtaccgctgtgtgtcccaggccccgcgcggcgcgggcgtctctaacttcgcggagctcatcgtcaagggtcagctggtggacgccggggagcgccgggacctcaccctcgaggggcggggccggcgacgggggcgggctctgcccgggggcgtggccgtggggggtggggccggcagggtgtcgctggggcgctatctgaagatgggcctgtggaaatggcagtggcccagccgggatgagatctgatctaggggtcggggctggcttcgagggggacggacagggtcaaggtgagagcctaaagaggggtggggttctggctgtgtgacttctgtgttgatcctagctggcctgcggtccgctccaggaggcgaggatgtgggggattaggaggggcctgagagaggggttgtgggctgatgggcgagggcggggtcagcctttggagccaggtgccccttagggcccgggatttagtgggggtaggagagcgggtctggttgagggcttggtagcagcgtgagaggccctaggaggacggagagggatttgggtgtggtggaactcagagttgggtgctggggtctcacagcagcatcggtccgcctcgcctctcccccatctcctcgcagagcccccaactcccatcgcgcccccacagctgctgcgtgctggccccacctacctcatcatccagctcaacaccaactccatcattggcgacgggccgatcgtgcgcaaggagattgagtaccgcatggcgcgcgggccctgggctgaggtgcacgccgtcagcctgc

SEQ ID NO: 1544 - DNA, 846 bp, Artificial sequence
  DNA replication origin
ggcttggtagcagcgtgagaggccctaggaggacggagagggatttgggtgtggtggaactcagagttgggtgctggggtctcacagcagcatcggtccgcctcgcctctcccccatctcctcgcagagcccccaactcccatcgcgcccccacagctgctgcgtgctggccccacctacctcatcatccagctcaacaccaactccatcattggcgacgggccgatcgtgcgcaaggagattgagtaccgcatggcgcgcgggccctgggctgaggtgcacgccgtcagcctgcagacctacaagctgtggcacctcgaccccgacacagagtatgagatcagcgtgctgctcacgcgtcccggagacggcggcactggccgccctgggccacccctcatcagccgcaccaaatgcgcaggtgggtgcagcagctacccctggcctcagtctctggtgggcccagggctatggaggggcgcattcgagaggtagcgtggcctgtgcttgtaaacctttctaaaacattgtgatttttcctcaacccttgttatggtaaagataatgatagctaatactttactttgtgtcaggcacttaaacatatctgtgtgtagacacacacacaaacccatatttatagatttaaaacttacaacactaccacgatgtaggtgctcttgtcgtacccattttagatgtgactgaggtacagagatgttaagtgactggcccaagagcacacagctagtaagtggcagagatgggattggaactcttgactggctgactccagaatctgtgttcttaattctacatctagataaaataagcaactaaatacca

SEQ ID NO: 1545 - DNA, 1034 bp, Artificial sequence
  DNA replication origin
caattcagccgggtctcctggaggcacagatgggggtctcagcgttgctgaagccccgacctctccctccccagggtgggaacctcagacagcgtttcttgggcctgttcagggctttgtcttgtgctgatggcatcaagggacaccccacccgaaggcaggcctggggggacccttgagagcggggcctagaggggaggcacctgcagtgccttaggaaagggggatgagatcggaggcaaaagagaaacaaacgtcttggggaaatgggcggggcctcgggcatcggggcgaggcctagggccagaggtccagctaggaagtcagaaaccaggcaagaaaccaggcaagaagcagaggagggaggagcctggaggataaggtggggcttcagggaggaggcgggtcctaggccttaacacaggaacgctggaatctgagatggactcctctgggaagagaagcatctaagatagaaggcagggcctcaggaaggggcagagactagactggggacctggatagaaaggaggagcctgagaaagaaggctcaggaagggggtagtgctctgtgggaaggagcctggggtcaggagggctggctatgggaggggtgggaccatgggggaggggctatgggagaagggactatgggacggactctgggaggtggggctgtgggaggcggggccgtgggggtggctctatgggaggtaaggctattggaggtggggcaatgggaggtgggcaaaaggaggcagggctatgggaggggcaaggttatgggggaggaactgtggggccagggctatgggaggtggggctacaggaggtagggctatgggggtgggctgtaggaggaggagctatgggaggtggggctatgggaggtggggctatgggaagtgccgggcctggagtctgcgctgggcctgctccaaggtatctcctgtctgccatccccccacacccaaccacgcccaccatgaccctggccggtccctcacccccttcaggtggcttgctgcctggaa

SEQ ID NO: 1546 - DNA, 774 bp, Artificial sequence
  DNA replication origin
aatgaggaaggtggtgtcctcctgtcctgggctgtggtcagaggggattgatgagcacggtgtctttttgggagaggatgggagtcattttaccgacggagaaactgaggccaagagaaaggaagagcctttcctgggcttcaggcagagctgagactagaaactgaggctcaggatacttagcctggaggatgtgtgtgtgtatttgtacgtgtgtttgtgtgtgttaggtcatagggctgtacctcctctgtccctccacagtctggagtctgggagggggttgtatttaggaccctgactccatggaggggtcctggggcagaagtgggggtactgaactgtgttgcagcatcagggacaccccacctctgtgagctggtgctgaagggcagaggcagtgagagagaaggctggggggaggttctggggtgggtgggagtgatccaggcctattcctggaagcaggcagcctcatgtaggagcgtgtgaaccggttaaggtgtagctttctagctgcacagcagtaggcatcagtgcagtttgcaaagggttcatcttggctgatctgaacgtgtcagtgcagaacgcattggggcaggtgggccttgcagcctgtgggcaactggtggtgattgggggagctgctgaaggtgagtctggagtgagtgggtgggccagggttcgtgggagccacagggcaagtgtggagcccttggggtgggcatggctgtggggtgagccccggccaggctctactcagctctcccctct

SEQ ID NO: 1547 - DNA, 1033 bp, Artificial sequence
  DNA replication origin
agggcaagcacgagcccgagcccaggcccgccctcggggagaagggagaaatgggggtaatgttttaggaccacagggctagaaccaaggcccagtggtggggcccagatatgggagagtgggtgctaaggaacctggcctggcatggaccaggaaggtggaagtggctgggcacgggacacagcccctcaccatggtctccaccatgttgggtttgtagttccggagggttttggcagcaaagaaaacgtccaccaagttgtggcagcggatcatctccaggaccgtggcgcaggcgcagaaggtgccgctgcgtcctcccccgtttctgaatgagagatgcaaaagctgaggggcggggccttggaacctgaaggtaagaaaagggccagggaaccacgagggaggggcagagagcctagaggagagggacggagctagggaatctagaagggtggggcagagagcccagaggtgaggggcggagttagagaacacagaaaggaggggcccgagagcctagaggagaggggcggagctagggaacccagaaggaagaggccaaagagcccagagatgaggggcagagctaggaaacccagaaaggaggggccaaagagtccagaggtgaggggcggggctaggaaactaaggagggccaaagagcccaaggtgaggggcagaactagggaactcagaagggcggggcagaggacccagaggtaaggggcggggctagggaacccagagggaggagcaggaccaggttaagaaggatcagaggctaagacatctcagaagacatattctcaaggcgaaacagactgcggattctgagagaaaggaggccagacacactccaagagaaacacccggagagacaaagacagtgacaaagaagggcggaggagcagcaagcgcgtacccagagagcaaggtggaacaggaatgctgagaagactggtcaccacctggcatcgtgggcacacaggcacaaacgtacccaaaccccaagtcaaacccacagcctccc

SEQ ID NO: 1548 - DNA, 829 bp, Artificial sequence
  DNA replication origin
gggcggctcccaggccccacctccagcctctgactgacccagacctggggccaggtctgcatttactcagccactcaacagggaacatagccagacaccaaccctgtgccaggcgtgtgctgggccctggaaatacccaggaacaggacccatgaggcccctgcccgcctggagctcatggactagtgagagcaacagtgattccagtaaacccccaaggaaagaattacagaaggtgctgagagaaaccagaggaatgccaagaagctggggtgaggggagccaagtctgtggggcagtggggggagaggtcacatttaagctgatgaagatcaaagggaccggccaagtagaggagagcaggaaagggcattgcaggtggagggaactgcgtgggcaaaggccctgtggcagcaaagcgctcgagtgtccatgggagagacagcagggaggggagggagggcgagggctgggccacacaggcctgggagcagcagtggggggtctgcacttgatcctggagggaaggagaagccactgaagggtcaggaggaaagggatgtgaccaatcctcatttcagaagaatcttctgggagcccagggctaagcacagggcctggcatacggttggtgctcaatgaatgcttgctgacaatgacactgcaggagggaagtggggacactccatgtagggcgacactgaccggccctgcacgatgcacctgcactaacacccagctagggagggatccccttgaggacagtgaggagctggtgtttgtggagcagctgccacctgcctggccctgggctcaagcttcttacacg

SEQ ID NO: 1549 - DNA, 1298 bp, Artificial sequence
  DNA replication origin
  misc_feature (1)..(242): n is a, c, g, or t
nnnnnnnnnnnnnnnnnnnnnnnnnnnnnnnnnnnnnnnnnnnnnnnnnnnnnnnnnnnnnnnnnnnnnnnnnnnnnnnnnnnnnnnnnnnnnnnnnnnnnnnnnnnnnnnnnnnnnnnnnnnnnnnnnnnnnnnnnnnnnnnnnnnnnnnnnnnnnnnnnnnnnnnnnnnnnnnnnnnnnnnnnnnnnnnnnnnnnnnnnnnnnnnnnnnnnnnnnnnnnnnnnnnnnnnnnnnnnnnnnnccaccactaccaccaccaccaccaccaccaccgtcaccaccaccaccactaccaccaccaccaccatcaccactaccaccaccactaccaccaccaccaccaccacctcttactgagggcttttgctgtgccaggcactgcctgtgccatctcacttcatcctgaagcagatttcccatttctccaatgaggactctggagtcagagaacaattcgtctgaggctacacagtagtgagctccagaatttgaacctgggctggttggggcagagactcctgtggagcaggtgaaatctgatgtctggcctgaaccctgggtgtaccatgtggtgtatgtcgtattgtgtgtgtggtatgctgtggtgtggcatgttgtgtgtggtgtatgtgctgtggtgtgtgatatgctgtggtatggtgtgttgtgtgtgcatggtatatggtatgatgtgttgtgtgtatggtgtgtgttgtgtggtgtggtgtgggatatgctgtggcatgatgtgttgtgtgtctatgatgtggggtgtgttgtgtggtatggtgtgtgtactgtggcatgtgatatgctgtggtaagtcgtgttgtgtatgtatggtgtgtgttgtgttgtgttgtgtgtggtgtggtgtgtggtatgttgtgggtgtgtgatatggtgtggcatggtgtggtctgttatgtatgtgtggtgtggtgtgtgatatgctgtggtgtggtgtgtggtatgtctgtgctgtgtggtgtggcatgtgatatgctgtcctgtgtgatatgctgtggcatggtgtggcctgttgtgtgtgtgtggtgtggtgtgtggtatgctgtggtgtttgatgtgctgtggagtggtatggtctgttgtgtgcgtgtagtgtggtgtgtggtatgtggtatattttgtgctctgtggtgtgtgctatggtgtggcatggtgtggcctgttgtgtgtatgtgctgtgtgctgtggtgtgtgatatgctgttgtgtggtgtggcctgttgtgtgtgtatgtgtggggtgtgtgtttctctcacacagttgctggg

SEQ ID NO: 1550 - DNA, 823 bp, Artificial sequence
  DNA replication origin
cagcacaagggattacgtggaggattaaatgaaacgatgcctgtaacatgctcagcacagtgcctggtacacggtgggtcctgagtgaatggaggcaggtgatattcattcattctctcactcagcccattgtgaggcctcctatgtcccaggccatgcaccaggcatcagggagagaagaatcaaacctcctgttgcctggggtagctcgtggtctagtggtgagactggaaccagctctgggagagggacatagtggtgtttgcggaaacagagaagggacaagcaaagtcagcacccagggtaatcagaggaagcctcatggaggaggggatgctcaagctgagcctggaatggggcctgggttccaaataggcaggggtggggggtgttccaggagaggacagcagggcaatgtcagggaagcataaagagtaggggtggaggtgccaggggtggtatagctgggcctgaagcctggggactgtggggacaagtggagggaggcagggcagggaaggcaggtgcggcaagaccacagtggacctgagtttggactttgtcaggccgatgctgggagccatggatggttgtggggcaggggagggctgtggtcagagcgtcaggtccttctgcagacagcagccttgagagggagccatgagggagacagtgtccctcctgtcactcctgttgctcagactctacctggggcttcacagagtgagtgtcatctgtgtccctgatgcggcctcaggggctcatagctgcagatgtgtccccaagtctctgagtctcccaggccctgcctcctttcatcgca

SEQ ID NO: 1551 - DNA, 1261 bp, Artificial sequence
  DNA replication origin
gacagaatacttttgttgttttaagccacccagtttgttgtaccctattgcagcagcctgggcaaactaaagcagtgatgatgaccaaaaggtagtaacagatttaagggactgtgcagagatgcagatgggaaggggctgcacaggctggaactatacttcccagctccccttgcatctgggtggcgccacatgaccagttctcactggtgggttggggtaagcaatgtgtgtgtctcttttgagccaaggtcattaagaagcaagtgtgctttctccactctctcttttccctttgccaggggaagcagacggatctgaggccttagaggagggcagagccatgaactgtagatgaaaggagcctggatccctgaatcactgcatggagcaatgccacccactggccagcagtgttggaggagagcatgggggtgggagagggtggggaaagtgggaggcttgatagggcagggacagtgcagtgagtgagtacatgatgggaggatctaacccatactgtggatcaggaaaggcttcgcagaggggctgatgcctgtgcaaggccttgaaaaagtagaaagtgcactaggcacaggaaacagcatgagcagaggccacaggagggaacctggtgcaatgggaaccttgagatggtctgtgatagggagaggcaaggtcagaagtcagagaagtaaatggaagatgggtcttgggtggcctgggtgccatgtgggggagttttggaatcactctgggtggccattaaatgcttttgaacagaagaatcatccggtcatatttgtgcattagagccccctcaagctgctggtgcgggcacgattggggatggagaaattgagaacagtgtggtcaggatggaggctggcccagaggaccaggacagagcgcacagtgcagaactagagcagaaggggaggggagtcaggatttagagttaacaggtcttgactgatttcaggggagagtgagaggagagaagaaaggaagtgcaacacacaagttttcggcctggggtgctggggccatctctgggatgcagacacagaaggaagaggaacaggacttggagagtgtctctgtctggtctgggcctgagtttcctcaattatagttgtgtgtccagaattacatggacataggtgatacataggtcaatagatggattagttgaagggaacagcaagagtaaatgcacaggggcaggggctttagaatgaggtgcagtttttacttgtgg

SEQ ID NO: 1552 - DNA, 1356 bp, Artificial sequence
  DNA replication origin
ctctagggcgggacccgggcccgcacctcctccttgtgggtgttgttgggggtgccgcaccgctcccggccacggcctgaaggtggcggcgcagggccgcactagcgcggctgggcggggccgggaggaggtggggaggggtctgcagagaggaggggagtggggagggaaggagggagggagagaaatgggggaaaggggagtataagggaaggagaggagaggagaggaggagaggggaggggaggggaggagaggggaggggaagagaggggaggggaggagaggggaggggaggggaagagaggggaggggaggggaagagaggggaggggaggggaggggaggggaggggaagagaggggaggggaggggaagagaggggaggggaggagaggggaggggaggggaggggaggggaggcaggagaggagagggaggggaggggaagagaggggaggggaggagggaggggggacgggggagagaaggagggacacagagagggggaaagatgggggtgggagagagagacacagaaggccagagggagggaggaagatagaagccttctcccctccccaccatttgggggatctgaggagcccagatcctcttggaacaccctctccccgatgcttacagaggtcacttcctcctgtagccctccctacgccctctgtggtctgacccaggtggaccccagccccatctttctgcacctccccaccctcctcttcctcctccccaccctgctctggctacgcagagctgcctaccatttccaagggtgccaggctccccctttctctgccagtgccgtgcctgtgcctggctgctgccacccacagtaaccttctcccccctagcgagcgccttcccctggctcccccacttctccttcaggtctcagcgcagacaccacctcctcccagaagtcctccctgtctccatgtccagggccttgcctgcccctagctcgccagcccctcgcgcatcttcccccatcagcagtggccaggctgggctgtgattgattctgtgtctgtttctccagccagactggaggcttcctgaggacagggacacggtcttgtccctctctgcgttcccagtgtggccagcccagtggatgaacagccacaagtggactatacatgatgcctgagggatgaatggatgatcccaggaggggctgggtttgggagatgaggaagaaagggacgtggagcaggagggagaaaacacagcggagaggaggttaattaggagagaggccccagaacaccccagccaccagggttcagggcctgggccccagcactgcaggtttcctgccctcccaaggacctcagt

SEQ ID NO: 1553 - DNA, 1213 bp, Artificial sequence
  DNA replication origin
gagctctgcattggggtatggaggcttggagccacctctgggccctccaactattaaacagggacccaggcacttccttcacctccttgtaccattcctctcctgggaggagagaatggtaggacctgcctcttggagttgttgggggagggttggtaatgaggtcttgtcacacagcccttcactgcacagtgcctgggccacgagcttgattgggagtcggggggagtggagctgtgatgacaatgatgatgatggaggtggtgatgataaacatgatgatggccatggtaatgccagtgatggtggtggtgatggtggtggtggtgatggttgtggtggtgatggtggtggttctgatgatggtggtagtggcgatgattgtggtgatggtggtggtagtgacagtgatggtggtgatggttgtcgtggtgatggtgatgttggtgatgctggtagtggtgatggtggtggtggtggtagtgatggtggtgatgttggtagtggtggtggtggtagtggtgatggtggtgatgttggtagtggtgatggtggtggtggtggtggtggtggtgatggtggtgatggtggtggtgatggtggtggtggtggtagtgatggtggtggtgatggtggtggtggtggtgatggtgatggtggtagtggtgatggtgatggtggtgatggtggtggtggtggtggtggtggtagtggtgatggtggtggtggtggtgatggtggtgatggtggtggtgatggtggtggtggtgatggtggtgttggtggtgatggtggtgatggtggtggtggtgatgttggtggtgatggtggtggtggtgatggtgatgttggtggtggtggtggtgatgttggtggtggtggtggtgatggtggtggtggtgatgttggtagtggtcatggtggtggtggtgatggtggtggtggtgatgatggtggtggtgatggtggtggttgtggtactggtgatggtgatagtggtggtgatggtgatggtggtgtgtgacggtgatggtggtggtggtgatggtggtggtgctggggatggtgataatggtggtggtgggtagtaatggagggtgagtatcaaggcagaaaaccacaagtgacacctgatgcccacccctaattatccatccccataatgcaatagtctcctccttcagtgccctgctcccagctgcaactcccctgc

SEQ ID NO: 1554 - DNA, 1129 bp, Artificial sequence
  DNA replication origin
cttggggaggggtggagggaagggtgggctgagggaggggtggagtggagagtgggatggggcagaggtgaaatgtaaggggggctgtgggggagggggtgaggggagggagagctgtagggagagatgggtgaggggtcggcccgggggaggtggagcctgggctgtgaggaggtcttggtgttcaccatggcctgtgtgacagttctggggaccaaggtgtgggcagccaggatgagagaagggcctggcaccaagctggtgatcatttggctgtgggtggtggagggtggggaggtggggggtgacatggtgcagaccttggggcttggcacgcgggtgggcgctcagtgacatgtaggaatgggggcgtcacttagaggccgagcttccccagtgcagttctctctcaagtgacccagctcatgtcctaacaggtctgacatcagaggaacagccctgggggctgggcaggggcagggccttctgtcctctgggggacgcagcccagagcagctctgcccctccatcccctgacagcttccctccagctttggctgcagatgttcccatcccatgttgtccctgatgtctcacccctccccgctagtctgtcagagtaaggacttgaactcaggtctgtctgtatcagttacaactgtgtttaattgcaagcactagataatctggcaaatggtggcttgaaagcttagaggtttgtttctttcacctgaaaagaggtccaaatgtggacctcttttaaccctccatcggatctgatgacctttacaatggccgaggattggccaccctgggagaataaccacagctgaatccacagggcctcaactatcaggccctgaactaggcaaatcacagagccctgtgaggtaggtgctgttactgtccacagtgtaccaatgaggaaactgaggcacaaagaggttaagtcacttgcccaaggtcacactgctcatatgtcatgtaccaacctcctcacacccaaactccctccccacagctggtgaaaggcccctgtgatgacattgtccttgccttattacgaagaagaggaagctgaggtccagagagggcaagtgacttgtccaaggtcacacagcacatcagt

SEQ ID NO: 1555 - DNA, 1673 bp, Artificial sequence
  DNA replication origin
aaaagaaatcacattggacacagctcagggaaagggaaactcaggcatcctgtggaggttgtgatctccccagctgagacagcccttcggggaatcacatgtggaagggagggatgaatagctgtggggctttccacctccctgccagcaccttctgtctcccactggagtccagcccctatatggggtctgtgcccctcacacatcaaaaccactgacaggatagaccctggaaatgtgctctgtctctgcagcgtgagaggggctgaagagggggaggacaggtgcctagttccccaagggcagcatctcccattttcaagaaagggggccccaagtggtcactaagaatcacccaggagagaggctcatgcagggaggaaggtgcttcctggagaccctgggttcctggccaatgattctacccagcctcaaggccagaaaaccacgtgggcaggggtgggggcattcgagagatggaaaagctcagatcctgctgcatgtgcgtgtgtgtgtgtgagagagtgtgtacgtgtgttgtgaatgtgagtgtgcatgtgtgtgtacgtgtgagggcatgttgtgtgaatgtgagtgcacatttgtgtgttagtatgtatgtgtgaatgtggggggtgggcgtgtgagtgtgcatatgagcatgtgcgtgtgtgggggggaattgtatgtgcatgtgtttgcagggtgggtgtgagagcgagtgtattgtgcgtgtgtctggtttgagtgtatgtgtgactgtgcttgtgtctatacattttagtgtgtgtgtatgtgtgtgagaatacgtgtgtgcatgtgtgtgcatgtgtgtctgtgtgtgaatgtgtgtgcatgtgtatgtgaatgtatatgtgtgtgaattgtgtgcctgtgtgtgcgaatgtatgtgcaggtgtgagaatacgcgagtgtgtgtgcacatgtgtgagtgcctgtgtgtgtatgtgtgtgcatgtatgtgtgtgtccatgggtgtgcctgtgtgtgtatgtgtgtgtgcattggtgtttgagtgcctgtgtgtctctgtgtgcgtgtgtgtgtgtgatgtgagtgtgtgtgcatggggggttgtgagtacatgtatgtgtagtgtgtctgtgcgtgtgtgtgtatgtgtgtgtgcatgggtgtgaatgtgagtgtgagtgcatgtgtgtgtctgtgtgtgcatgtatgtgaatgcgtgtgtgtgcatgggtgtgagtccacgtgtgtgcgcacacatgtgtgtgaatgtgtgagtgtgtgcatggctgtgtgtgtgtccatgagtgtgtgtctgtgtgtatgtgtgtgagtgtgtgtgcatgggtgtgtgtgagtgcatgtgtgtgcgtgtgtgaatgtgtgcgtgcaagtgcgcgtgtgtgcatgtgtgtgaatatgtatgtgtgcgcatgggtgtgagtacgtgtgtgtgtgcgtgtgtgtgaatgtgtatgtgtgtctgtgaatgtgtatgagtgtgcgtgggtgtgtgtgtgtgcatgagtgtgtgtgagtgcctgtgtgtatgtgtttgtgtgtgtgactatgtgtgagagagagaatgatggagacgaaccccagtgcctcagtgacaatgaacaggaggcagcagctcagacacattttgtagccccagcgccagcaatggactttcctgc

SEQ ID NO: 1556 - DNA, 623 bp, Artificial sequence
  DNA replication origin
ttccctatctatagtatgggcatatatagtcacagcacaagggattacatggagaattaaatgaaatgatgcctgtaacatgctcagcacagtgcctggtacacagtgggtcctgagtgaatggaggcaggtaacagtcattcaaccattcgctcacccaccccattgtgaggccttctatgtgccaggcaatgcaccaggcatcagggagagaagaatcaaacctcctattgcctggggtagctcatggtctagtagtgagaccggaaccagctctgggagagggacataggggtatttgtgggaacagagaagggacaagcaaagtcagcatctaggggaatcagaggaggcctcctggaggaggtgacgctcaagctgagcctggaagggggcttgagttccagggggcaggggtggggggtgttccagttgaggacagcagggcaaaggcagggaagcataaagagtgggggtggaggttccaggggtggtttggctgggcctgaagcctggggactgtggggacaagtggagggaggtggggcagggaaggcaggtggggcaagaccacagcggacctgagtttggactttgtcaggctggtgctgggagccatggat

SEQ ID NO: 1557 - DNA, 1022 bp, Artificial sequence
  DNA replication origin
tccctggaacactctggagcagccacacacctctatgagggcaagaccaggtgagaattccaagcccacccccacttacctgggtgcagctgggcatcacagtgagccgagccaggccaggccaggccaggtctgtgcgctcaggtgaaacacaggggtatccctagaacctgcttccttgggctgccttgagaaataatgagacagccccttgtttaggacaacatcttccccgtaggacatcgccagggctgaagtcattgttttctcagcaaatactcactgggcgcctactgggcattcgctgtcccaggcagcgcaggggaaagcccagaaccaattaaggcttctgtgtggggagctcagatctagaaggagacatatgcagagcatcagatgggactgcagggtgcataagagcgctagaggaaaaggaagcaggggagggagcagggagtgctggaggtcacacttgtaaattggggtcagggagggctctcagagcaggtgacattgaggcaaggacgaagggggtggaggtgggagggaacaggacagacatgggagaagttccagctgatgcaagggcagggccagagcctgtagctaggagctgcaagggtcccaggttcaggaaggagctggaggggctggaggggagtagaagaggagatgaagtaggccaacgggggagggggctggagactctgggggcctggggacactgtcatcttggatgtgcccagtgaggcaggagcctgggactttagaagcagaccagagacagctcagccctgagtgtcacagggtcacactggctgctgcatggagagtaagtggagccatgggcctgccaggaggctactgcaccagtccaaacatgatgaccgtgggatcagggtgggagcctggagagggtgaggagatttggaatctgggtttatgttaaggttgaaccaaagggacttaagggttatccactctataaatatgaggcattactagtttttaaaacatcatac

SEQ ID NO: 1558 - DNA, 1740 bp, Artificial sequence
  DNA replication origin
atggtgttggccacacagtgtgaccactgggacacgctgcccctccacactctgccagcctgacattcttcatgcctctgtcaatgtgcactgaagcccctgactttgggccacgcctgaagccagctcctggggctacaggggtgagtgagatgtgcctctgtcctcaggtggctcccagtcagatgggggaggtggtggagaaatgggcggtccatttaggtggtcagttctctgatgagaatggaactgtagggcacagaggaagcccctcttggcattagacagtcaggaagatcctggtcctagttgatcccattcatctcagggtggagacctggaggcccaagggcagggaggtcagtgaggagggaggggctttcaggactgggggaagaggtcctgcaaaggcccaggagaaggcaagtgagcaagatgccagcaggacggcaagtccctgaggctcccgtaggtcatgggaggtgaggggtggccaaggattgagaagataaaaaaggcagcaggggctgcaccccatgggattttaggagccacgaggagggatctgatcttgaccttgagtacagtggggagcctgggggacaggaggccttggggagactctgggatgtgcattttagaaagatcgctatgctgctgcatggagagtaggctgggagcggtggagtggagggagggctaggggaggagtggagtaggggatgggctaggggaacggtggagtggaagggagggggtggggtggagtggagaggagggagagctgggggaagaatggagtgaagggtgggctggaggagggatatagtggagggagggcttggggaggggtgtagtggagggaggctggggagtggtggagtggaggcagggctggggcacgggtggagaggatcaaggggttggggaggggtggagtggagggagggctggggcaggggtggagtggagggagggctggaggaggggtgtagtggagggagggctgggggaggtgtggagtggagggagggcttggggaggggtgtagtggagggagggctggaggagaggtgtagtggagggagggctgggggaggggtggagaggatcaaggggttgagcaggggtggagtgaagggagggctgaagtggagtttgagctgggggagcgctggcactggacccagttgggaggcttccgtgttcatcagggctgtgcatggtacttcccccaggaaggtagcaggcatgggtacacaggccctgttagtgaggaagctgggaggtggtgggtgagcagggattcagcggtcacctggatgttggtgaagagtggatggtgggtcttgatgaacaagattttagtccgggtagctggatagacatttattgacagccagaaacacaaaggaatctctctgagatgctgctattctagcgttcatctctcagcatggcccaggctggtcccaattgatcccattcatctctgggtgggtttcctgtgcagcttcctgtaactgtggcaagcaaccttaaagcctcccaaagtcccccttctggccttgccggaggctcagggatcctcccaggaatgtggggggcagtgctgtcctgcagttcctaagcacagcttcagtcttctgctggagtctggttacaggtgggtcaatgttcttcactttctgtcctgctcagatcaggaaaccctccccggctcaccgccaggctgtctcc

SEQ ID NO: 1559 - DNA, 1402 bp, Artificial sequence
  DNA replication origin
accgctcccggccgcggcctgaaggtggcgctgcaggacctcacaagcgcggctgggcggggccgggaggaggtggggaggggtctgcagagagagggaggggaatggggagggaaggagggagggagagaaatgggggaagggggagtataagcgaaggagaggacaaaagaggagaagtgaggggagaggagggggagaaagacagagagaggggagagtgggtggcatctgagctggttcatctaggtggagtaagagttaaagaggagagagagagagagagagaggaggccagagggagggaggaagatagaagcctcctcccctcctcgctattcaggaggtctgaggagcccagatcctcttggaacacccgctcctccatgcttacagagaggtcacttcctcccatagccctccctatgccctctgtggtctgacccaggtggaccccagccccatctttccacacctccccaccctccccaccctgccctggccaagcagaactgcttgccgtttccaagggcaccaggctccccctctctgccagtgccctgcctgtgctgggctgctgcagtaaccttctccccctgagcctcttcccctggctccccgacttctccttcaggtctcagcatagacaccacctcctctcagaagtcctccccttctccatgtccagggcctggcctgcccctagctccccagcccctcccacatcttcccccatctcagcactggccaggctgggctgtgattgattctgtgtctgttccgccagccagaccggaggctccctgaggacagggacacggccttgtccctctctgcgtccccagggtggccagcccagtggatgaacagccacaagtgggctatagatgctgcctaagggatgaatggatgatctcgggaggggctgggtgtgggagatgaggaaagaagggacatggagcaggagggagaaaacagcggagaggaggttaattaggagagaggccctaggacaccccagccaccagggtgcagggcctgggccccagcaccgcgggattcccgccctcccatggacctcagtgatcttccttctgaggtcagtgcccacctggctctggacccctctgacgatcaggaagttcttcttcctcgtgggaatcagggctgcttgagtcacaagtgacagaatctgctcagctgcagagaagagggggtttggcataaggaccctggtctctcagatgcagccagaactcaggagggacccggaccggagacaggagcaccagccagaatgcagactgactctcttccacccacctcataagacttcaggtcaggtctctacttttcccatttctcacgaatcagaaatgcatgcatcagtagttcacacaac

SEQ ID NO: 1560 - DNA, 610 bp, Artificial sequence
  DNA replication origin
cactgtggtggtgttgagaaattgggactgaccaacttgggaccagtccccctcccctcccctcccatggcccagtcccacatcacagtctcacacattatgtgacaccccaccctgcaggtcgatgctgtatttgtatacctcctcacacacagctgcacgtctggggtcaacagctgggcacaatggcacagagaagaggccatgtgggtcctgggagcaggcagggattctggggctggggtatctggagctagagcagggccccctaaacctgggcccccctcactcagatctcagggtgtgcagggtggatggattgcagggcaggtggggctgaggaacaagtaggagggcgtggggatgtctgggccagagatcaccagttctgagatgggggagagggagggggtaagggagaggggaatcccaggggtgtaaggtgttaaaactggcaggaccggatggtgcccacggtgtggggagagggagagttggggatgcctgcttatttccgactggggtgagcaggggctgtagggcacaaggctgaggagcaatttgatgggaaaatgaaggtttggttttgaatgtgtccagtggaaagagg

SEQ ID NO: 1561 - DNA, 782 bp, Artificial sequence
  DNA replication origin
caaggctggtggtccttctccaggaagcagcagatgccagggtgcagagctgagtgtgctgctgagatagactctgccttgctggactgatggatgaccttaagttgagttgttctgttcagaaacaaagtgtgttgcacaggccccatccaaacagccgaaggcagtagctaattagaagggagagatggagtgtcatttttttctggcagcaagcccagtggcagaagtttttagcaaagagcctcagtgcaacttgagaggtctgcaggctggagataagggtcatctctccagagtggccagagggactccctggaggaaacagaaagaggaaagagaggaaagatggactaaaggaaagaagatggaggtgggagaaagggaagaaggaaaagacaggaggagaactagagaagagaaaagagggtgggaggaggaggagaagaagtgatggaaaagaaggagtgaagaaggggaagaaggtggaaggacagggagaggaggaagagggaagaagagaggagagaaggagatagagaaggtgaaaatgaggaaggagtgaagaaggggaagaagggggaaggacagggagaggaggaagagggaagaagagaggagagaaggagatagagaaggtgaaaatgaggaaggagagaaaggggccaggaatagcagtgagaggaccaagagaaaatgatggacataggaggagtaggggtgggagaaaaagactgtgggaaagagggagggggaggggctgctaccacagccggcatcca

SEQ ID NO: 1562 - DNA, 1424 bp, Artificial sequence
  DNA replication origin
agaattcgatggtgaagaaaactagatgcagacctggtcctcagggaccttagagtctagtggaggagggggaggccattgattaaagaatcccagagctgaattcaaatcacaaacagagatcaactccgaagaggaaaggtgggacctaggggtgcctattgcaaaggatctgggcctagccctggggcaggagtcctccccaggaagatgacaggtcaaccaaaatctgcagtaattagacatttactatctgcaggggtgagaaagaaaattctagatctgcagtgcccctgtggcagaggaacccctgacaccttcttggctgagaagtggctgctatggctggaaagcagaaggcaggcgtgagtggggagggagggtgtggggaagcaggtgccccagggtgtccaggtcacactaaggcttctggattgtactgggagcaggggcagagtggcagggtggtgtttccacactgtccctctggctgctgtgggaaattggcaggggtagacagcaggtggggagggcagggccaggtgggggccaaggcagtggccagaccagaggtaccagtaatggagaggacaggacagattccgagacatgaggagtgcatgggcaggactgaatgtgaggttgggtgagacagcagaggaggtatcaaagggaggaaaatgttccagaaagaaagatcagctcagagatggaaagaagtctcctggctggggtgactgtatggatggtggcaccagacatgggaagaagggacccagagaaggctcatttctggggagcatggagctcatgagtctggacctgtgcacgtccagtctgtgatgcctttgagattccacacctgaagtggagttgggggttgggtctttctctgcggacccctagctgggaggctatgagggtattcagaagagaacggtccagctctgctctcaggggcttacacatggggactccatggaccatcacaggtaaaggttgttgttaagaacagtggacaccctatgctatggggttgtgggatggaggtcaaggtcagctctgagggtcacctctgagctgaatcctagagcatgaacaaaattcaccaggcagagatggggaaggacaccaacggctgaagggcaggttcaagggagactgcggtgttggtgtctgggaggggaagcagtacaggaggccagaagccacaggggtcagagcaggaggggccttgaatgccgggtgcagggtttgctcgttatcctacaggcccattccagtttcagcaggacgacgtgctcagggctgcaaaagtgtgggaaggtaaaatgttgcaggaggaggctctggcagcaaatcaatcagttaagaggcctgtgatggtacaggtgacagactagggcaggacagacactgtggga

SEQ ID NO: 1563 - DNA, 1412 bp, Artificial sequence
  DNA replication origin
tgtcttcactcttgtggttccctcttcctaaataccgatctccatctccttaactcttattctcccaaaatgctgcatgtccttcaatgcaccagcatccatgaaccttgaaagcagagcacagaggaaagagacgggctttcatccctgctccaccccttacccactgagtgggcacagactccttgtttaacctcccaaacctcagtttactcatccagcatgtgcaggcgataaaaacagtcctacaggggtccggggtggattgagtgcagtagttcacaacaaaggcctggtgcacagtgggtgcctaataattgctggctgacgcagtcagtgctagagtgacttatgccagctttgcccccagcacttcacctccagaagggcaggtaggaaccccagggaaaccttacccagcagcctcgctttgggaaaaagaaatagaaaatattctaattccaaagagtaaatgtcagaggcgtgggaaggagtcagaggttctgaaaataaacacagtcactgaaaggagggagggagagaaaggagggggctgaggtggaggactggagtgagaggcagagaggagatgccaagtatgggaaaggcagacagaaggagggagacagagagagccagagacagaagggatgagggagagaaacggagacagaggggagggagagagacagagccagagacagatgggaggagggagagagacaaaaccagagacagaaagaaggagggaaagaaacagagccagagacagaggggatgagggagagagacagagacagaggggaggagagagagagacaggggaggagagagagacagaggggaggagagagagagacagaggggaggaaagagagagacagaggggaggagggagagagagagagccagagacagaggggaggaggaagagagacagagatacagagacagaggggagggggggagagagggggacagagagacgaaagacagagacagaagggaggagagagagagacagaggggatgagagagacagggggaggagggagagagacagagacagatagccagagacagagggaaggagggagagaaatagagccagagacagaagggaggagggagagaaagacagaggggaggagggagagagccagagacagaggggagaagggagggagagagagatggagacagagagacacagagatgaaaagggggagaggggacagggagagagacacagagatcttttcattctggaccagtcttcacttaagtcgcactccccctcaacaaaagtggcctcacctgtaaaatgcagatgttagactaagtcagaggtggcaaactgatggctgcagaatgtatccacctgtgcatatgtttgtttttttctgcgtatt

SEQ ID NO: 1564 - DNA, 1514 bp, Artificial sequence
  DNA replication origin
agatgtggctggggtttctctcacagcagaggcaagtaattgcaactcttctctattattgtacaccttgaaggcgaggttaattaagtcgtgttctggggtttgagggccagaatctaatttttggagctttttctaatgttgggagcagaatgtgtaataaaatgcatattgagaataagacggccttctggcccctctgggtctagggcggtaaagcatctaagggttgttgccaaatgaaccatggactgggctgggtttttatatttaatgaaaaagagcctaaatgctaactgatttgggcaaggtctgatagagaaaaaggagcattaaccttgactatgcctttagctcagccacttctttaaaaggaaattgttgggcaggtgggggagggctagtcgtggaatgaaaccataagctggaccgggtgtgaggaggggaggtgatagaaggattatagggtgggggagcagaggctgaagaagaattgggacctggctcggcctggcgaggagcagcctggggaggaggggagaggtcagatgagtccatagaaaagaaggattcaaaggactcagaacttggggtggagactgaaggaacacaaaggagagaaagaagaaagatttggtatgagtcgcattgggagcagagactagtgagggaccgatgtgtaaaagaatgcctggacatcaggcacctcagagcatttgcccatttttcgacaaaaatcatccacatcttgtaaaatggagaaatcaaaagtgccattttctggctagttggaactattgtcaagtttgtattggggccaagtggtattgcagaagaaaataagacacttaggttttaggtcaggtatgagttgaagaggttttaagtttttgagagcacaggctaagggagaaggaggaatgcagggtggaaggttgcccatagtgaaggaagcaagcccagagaaaagagagggtagaaacatggagaaagtgggtgagggggtggtgagcagccctgggctgcaatgtgggtgagcagccaaagcaggcgtctttgcaattgacttgccaccaagggaacgtgggtgaatgaccaaggcaggcatctcagcggtgatcagacaccaatgaaatgtgggtgaataatcaggcaggcatcaccacagtgattaaacaccaagggaagactgtcttccccgagtccgtgaccagcaccggagtttagttttgggtccagggataaaatgtgtctcctttgtctctactagagaggaaaagaactggaattggaaggacagggagattgaagggtagtgagagagggagattgaagggtagcaagagaggctggagaagagagtgaaaagactgcttacccgaattgaaattggtgagatgttgcttgggctgattggtctgaggacccaaggtcgtaggtggatctcttcacggagtgagggtgaggacagggactggtctcctgaaagagtcctcctgtcccaggtcttcggc

SEQ ID NO: 1565 - DNA, 836 bp, Artificial sequence
  DNA replication origin
gcggcatgctaagtaaagcctcctggagatgccagctccccatcaaattgcaagattcccagcactggcaatggtgtgggggggagatgaggctccccggcctcatcttgcccttcctggaacactctggagcagccgcacacctccacaagggcagggccaggtgggaatcccaagccaaccctcattagctgggggcagctgggcacggcaacgagccaggccaggccaagcctgtgagctcaggtgaaacacaagggtgtccctagaaccagcttccttgggctgccttgagaaataatgagacagtcccttgtttaggacagcatcttacccgtaggacatcgtcagggctgaagtcacttgctttctcagcaaataggcattgggcatttactgtgggcattcgctgtcctaggcagtgggagaaagctcagaaccaaacaaagcccctgtgtggggagctcaggtctagaaggagacagacacggagcatcagacgggggctgcagggtgcataagagcttcggagggaaaggaagcaggagaggggcaggtgatgggtcacacttgtaaatagttggttacggagatgccagctccccaccaaagtagcaagattcctagcactgtcaatggtgtggggagaaggttagggagggctctcagagcaggtgacactgggacaagaacctgaggaggaaagtgagggagtgggtagacatgggagaggttccagctgaggaaagcacagggacggaggctggaggcaggaactgtgaggaccacgggtccaggaaggagcagagggggctataggggagcagaaggagggg

SEQ ID NO: 1566 - DNA, 766 bp, Artificial sequence
  DNA replication origin
catttactgtgggcattcgctgtcctaggcagtgggagaaagctcagaaccaaacaaagcccctgtgtggggagctcaggtctagaaggagacagacacggagcatcagacgggggctgcagggtgcataagagcttcggagggaaaggaagcaggagaggggcaggtgatgggtcacacttgtaaatagttggttacggagatgccagctccccaccaaagtagcaagattcctagcactgtcaatggtgtggggagaaggttagggagggctctcagagcaggtgacactgggacaagaacctgaggaggaaagtgagggagtgggtagacatgggagaggttccagctgaggaaagcacagggacggaggctggaggcaggaactgtgaggaccacgggtccaggaaggagcagagggggctataggggagcagaaggagggggtgagatgggccaagtgggggtgaagctggggactgttgggccggggccactgtcagcttggatgtacccagtgaggcaggagcctggggtgtccagagcagagcagagagggctccaccttgagtctcacagggtcacaggggctgctgtgcggggagtgagtagagccagggacccatcaggaggctactgcaccagtccaagcatgatgaccttgggatctgggtgggagcctggagagggagagaagattggacctggatttacattaagatcaagctaatgggacataagggttattcgctccataaatattagg

SEQ ID NO: 1567 - DNA, 1011 bp, Artificial sequence
  DNA replication origin
cctcaggctatgttggagcccctggctctgcctcacccttctctgaacagcactcctccctccttgtccccctcccaccagtgttcactgggctcctgtgaggggctgggcactgttctaggggctacagctgtgaacaaacaggcgacaccctctacccagagctcacatccctgtggggacacagatggtcaccaaataacttagggacctcccctgggatcagtgccatgaggacatggttcccaggtctctgggaccctgggccagagtctaaccttgtcaggaaggctgggagggcttccctgaggaggtggccctctcaccaagacctgagggatcgggggagaaaactctgggaaacgaggaggaggtgagcttcagggattaggaggagagtgagcaaaggtccctggtgggagggagggaggggaattcagggcctggggtggagacttgaggaaattgaggaacagatgaggctggcgaggatggcacagggccaggcccccagggagcatggtggccatgggggcaggtttgttcttctctttacagtatgaggatgctcccgagaaggctaatcaagggaggcaggagcagatttctgcagtaaacccctttctctggatgcctggtcaagggctgtggggtggcaatagcagcaggaggccaggagaggctgaggaagggtgcagagggaggtgatggggacagaacaggccagggagctggaaggctgggttgcagtgatctgaggagttgaaactggaggtggattccatgtggcgtgcagggaagaggtgggggagggtggggatgctgctgctgagctttcctggtggaggggtgaagacctcagcacagtcagggctgggaagccaggtttcagggacaaagttgtggtcactgtggccgggcttctctggtgtttcccttcctcacctccccaggtagaagaggcctcttctcttattggctccttcctacccccttggccatttcagatca

SEQ ID NO: 1568 - DNA, 1389 bp, Artificial sequence
  DNA replication origin
ccccagtgagtggtgaatcagcagagactccccagacacggctgtgagctcaggttcagctcaggaggggagccagaggcactggagcaggtgagcaggaagggtgctgctgcctcagcttactcactgcgtggccttgggtgcgtgacccaacctccctgggcctcagtttccccatctataatatgggcatatatattcacagcacaagggattacatggaggattaaatgaaacgatgcctgtaacacgctcagcacagtgcctggtaaattgtaggtcctgaatgagtggaagcaggtgatatgcattcattcactcacctagcccattgtgaggcctcctatgtcccaggccatgcaccaggcatcagagagagaagaatcatacctcctgtcacctggggtagctcatggtctagtggtgagaccagaaacagctctaggagggggacatagtggtgtttgtgggaatggaggagggacaagcaaagtcagcatccaggggaatcagaggaggcctcatggaggaggtgatgctcaagctgagactggaatggggcttgaattccagggggcagggttggggggtgttccagctgaggagagcagagcaatggcagggaagcataaagagtggtgggtgggggtaccaggggtggtctggctgggcctgaagcccggggactgtgaggacaagtggagggaggtggggcagggaaggctggtggggtggggcaagatcacagtggacctgagtttggactttgtcaggctgatgctgggagccatggatggttgtgatggcagcagtggcccatctagagtggctgctgccaaggtatcagctgcagtggggaggagtggtgaaggctataacactccatggagcaggcaggagccccaccctccccgagtgctaccacagccaccctgcaggggctctggatctgggcgtatctgtgctcttggaggcccaggaaatccccactgttcctggcaggcttggaagtgcctgctcctatggcctggcttcttctgatattggcacctgctctgatcttgggggtgtggccagagctgcatgcttcacagagccagtgggagacagttggggggtgaaaatgagagcctgtctcttctgagttggtggggtgggagctccctgggtgcagctgcagccaccttcccaggtgtaggacccccagcatctctgcagtctgcacccttggaggcctgggaaggcccctctgtccccactggcttgggggtgtctgctcccactgcctggcctctcctcactcttggcacctgctctgattttggagcagagttggggctgaacctgggcactgtcacagcccagctagatgtgcacacacttggggca

SEQ ID NO: 1569 - DNA, 841 bp, Artificial sequence
  DNA replication origin
gtgggcaccaagaggggcttgttgttcttttactcacttactccttcaaaagtctgcactgagctcccactacattacggtctgggttctagcagctgcagcatcaagcgagtcagataaagtctctgtcccaaagatcctattaaacaaattacacaagttagtgtgtaattatcgctcgcttaagtgctcagaaggaaaggaaatggatttgagaaagaaccttaggagggagaacctaatttagattgggggatggtggccagagaaggttctctgaggaggggaattttaaatagaaaaacttgaaggagaaagaggagacaacccagccaggatgggggagtgcactgaccggtaggggccaggccagcccagtcctcatggccttgaagggtgggggcctgatttgagagcagaggagggcccgatgggttctgagccaggaaaccataggacagtgtttgcattttgaggcgatgactgctgagggatggggattgggtgagaacaggcatagaagtggagaggctgtgagaggccatgggggtctcataggagggagcctgagctgtggctggagtcagggaggtggagaagtggggaggctggatgtcaccctgagctgtggttggagtcagggaggtggagaagtggggaggctggaggtcaccctgagctgtggttggagtcagggaggtggagaagttggggaggctggaggtcaccctgagctgtggttggagtcagggaggtggagaagttggggaggctggaggtcaccctgagctgtggttggagtcagggaggtggagaagtggggaggctggaggtcaccctg

SEQ ID NO: 1570 - DNA, 1003 bp, Artificial sequence
  DNA replication origin
ggggaactcagagctgggatatctgtagttggaaagtcctgggcatggtcacgaaacacccagaagcttggtcaggctgcagcaggatgaggagggcgtaggaggtccgagagatggtggacagatcaggtaaaggccttggaggcctcaggagggcccttagattccatgtgggtgtgagggtgagaagaaagcaaggtgacctgagggttgaggaggagtgaggtgacctgaggatggagggggagtgaggtgaccctggggttgagggggagtgaggtgacatggggattgaaggagactgaggtgacctggggatggagggggagtgaggtgacctgggggtggaggggcgtgaggtgacctggggattgaaggagagtgaagtgacctggggattgaaggagagtgaggtgacctaggggtggagggggagtgaggtgacctgggggtggagggggagtgaggtgacctggggttggagggggctgaggtgacctggggattgaaggagagtgaggtgacctgggggtggagggggagtgaggtgacctgggggttgggggtagtgaggtggcctgagaattgagtggagagtgagttaatctgagggtggtgggagagtgaggtgacctgtagctttgtcttgggagtaaggagtcctaaagtttgaggtgtaaaggacaggacagctattgggaccacctctcaagaccccattacaggttctcacagttgcacccaagaggtgtattcgctgttcctgaccacattttctatcctcctgtcttcagaacgccctccctatgtgtcagggttggtgactttcttcctatggggaccttcttgggttgtcttccctctcccacgcgccaccttttgcagtgggccccacagtcattctgagcatctctgtgcatcgcagccacaggttggagtttggaattcgaactttaacaggtaaactttaacaggtgctcatgatagagctcgcttttgtgcc

SEQ ID NO: 1571 - DNA, 1522 bp, Artificial sequence
  DNA replication origin
tatggatcctcgtttgtggtcacggaattttaaactctgcttttcccactgaatggcttctacttgttcgatcaaataaaaatggacacagccgagccagatcagagaaaaatcaataagtaataaaagttaacatgagaggaaatgcatcatctcaatcacagcaggggccaagaaggcggctgaggtgtgagatgcaccaagcccagggacacggctgcatggggtggcctgtagggagctggtgtaggggaggggtggagtatcaggtgcgctgggggaggagtggagggaagggagggctgggggaggggtggagggaagggagggctggggaaggagtggagggaagggtgggctggggaaggggtggagggaagggtgggctaggggagaggtggagggaggggtgagctgggggaggggtggagggaagagtgggctgggggaggggtgaggaagggtgggctaggggagaggtggacggaggggtgggctgggggaggggtggagggaagggtggacttgggaaggggtggagtgtcaggtgggctggggcagaggtagaatgtaggggttgctgtagcgggagaggttgagaggaaggagagctgtagggagagttgggtgaggggtcagctgtggggaggtggagcctgggctgtgaggcggtcttggtgttcaccatggcttgtgtgactgagggttccagggaccaaggtgggggcagccaggatgagggaagggcctggcaccaagctggtgatcatttggctgtgggtggtggagggtggggaggtggagggtgacatggtgcagaccttggggctcagcactcgggtgggcgctcagtgacatgtaggaatgggggcgtcacttagaggctgagcttccccgatactgttctctctcaatcgacccagctcgtgtcctaacaggtctgacaccagaggaccaaccctgggggccgggcaggggcagggccttctgtcctctggaggacacagcccagagaagcccctccatcccctgacagcttccctccagctctggctgccggtgttcccatcccacgttgtccctgctgtcccatccctccccacaaatcctccatcggatctgacaacctttacaatggcagaggaccagccaccctgggagaataaccacagctgcccccacagggactcaactatcaggccttgaactaagcacgttacacagccctgtgaggaaggtgctgttactgtccccattgtacagatgaggaaactgaggcacaaagaagttaaatcacttgcctaagttcacactgctcatatgtcatggaccaacctacccacacccaagactctccccataattggtgaaaaggcccttgtgatgaacttgtccttgcctgattatgaagaagaggaaagtgaggtccagagagggcaagccaattgtccgagatcacacagcacattagtggccaagccaggcctctagattcctgcctatgtcctcacttgcaggccgc

SEQ ID NO: 1572 - DNA, 730 bp, Artificial sequence
  DNA replication origin
cttgtcaggggataaacaccccaaccttcctctcctcctccttccttgatctcctgctggggctccctgttaaccaaactcaccttgaagccagaggatgaggagccccttgatgtagccgataagggctgccacccagaagcacagagtagaggggacaagggtgaagcgagggtgggaagggacacccctgtgcagggggaagggtgaccttagcacagtgctcagggaagatgatttggaggagacaatgttgaaattgacagctgaggctgagaaggaaccagcatgagaaaagccaggggagggagctcctgggagagggaactgtagggccaaatgattgagaggcaggtgaggccagatcccatggccgtgagggctgggtgagaagcttgggttttattccaagtttagccggaggcaatggctgacttttaagcagaggagcaacatgattccacctgtgaaccaggcagggatgggggcaggggatgtcagggaggctgtagctgtgggcaggccagatgagaggcctggactgggcagtgggcagagatgaagggacatgaccggagtgggatgcattttggaaggagtatctcaaagagctgcaggatggatcagatgcagagggcagagggcagaggacaggagtgatcaaggggactccagggcttgtggtcagtgtggggtggggtgaagctgtgccctgggctgggtaaggtgg

SEQ ID NO: 1573 - DNA, 1462 bp, Artificial sequence
  DNA replication origin
ctttcatgtctgagcgacagattaatctcccagacacatctctgtttcctctttgctccctccacgttttgttggcgtgtttcctccccttcccaacattgctgggatttgaatggttccctggcacctggtcactggagatagacacacagtcctgactctatagccccacatctgtgattgataaatgatcctcctggggcagaggagaaggaactgcccgcgggaatgccagccccaggtggggagagaagaggggtctctgctgctgatggggagcagtgggggcccatcagtaggactgggaaggtctcctgtgatgcaaggaccctcccgggaagacacactcttggtgcagccattgtgggtgcccagtgagggcaagatcagcagggacgccctggactgacttcacatgactgtgaagtgcaggctcagctcaggggaagagcgagaggcatcagatggagccagggccacagcctcaggggcgacgtgagaaacatggaggaggcccatcaggtggagaaggttcatggcaaggttcatggagaaggttcatagcaaggacctgtgggttcttgtcagctgtggggagcagtttcacttccatcctgggagcaatggggagctcataaagggtctaagcaagggaggcatgagcagataactgctctctctggctgctgatcaggaagggactgtggggcaggagctggagcaggaggctgaaaagaagctgcaaaagggtccagatggaggtgatggggaaggaaaaggctgggagttggagagaaaggatggattgcagcaatcctgctgcctccctgaacatttattttatttattttctatgtcccataattgctaaaagtgaaagaaggcacaatcattctgtagactagtcagaggtgagcaggctggcagaacgtgatcaggcaagtaggaggaaggcaggcagggagaaggtgggagcaggtgaacgggcagggaggaggaaggtagacagggaggaggtgagcaggcagggaggaggtgagcaggcagggaggagctgggcaggcagagaggaggtgggcaggtaaggaggaggtaggaggaagtgggcagacagggaggaggtgagcaggcagggaggagaaaagcaggcagggaggaggtgggcctgctaataggaaatgagcaagctctaggagatacacaggctcttgtaggctgtgagccaggtgtaggaatgtgggtaggctgataggaggtgagccagctggtagaaggtgtgtagcatgattgtaagtgagctgtctggcaggaaatgggcagggtggccggggagtcctggacctcacggccgtccaatgaaaggatcctgtggagtggttgtgctggtcatgccagtggggtggaaaccttcccatgtcgcttgggggccttgtgagtgtctgtgtgttccaggatcagctgt

SEQ ID NO: 1574 - DNA, 2131 bp, Artificial sequence
  DNA replication origin
atgcatggaaggatgtcaatgtgtttcactgaggcctggcacagtgagtgctcagccaggcttgggcccagattctgcccagggctgtgcctggctcactctatttcttcagaccctgcttggagcatctttttctgctcttgacagatgagaaagcttcaccactggactggcgccagccttaaagagtgtctgagctgctacctgctgtgcactatcactgagccacgggtctttctctctcttacacacacacacacacacacactctctctctctctctctcacacacacgcacacacactcacacacggtagctgggtgttaagcagtggtcccttcccagcttctctgcctggtgtaccttgcatggtttccctgcctggagggcaggtgtaatcagtggccaggaacctggagggtccctaaacaccctcccaccaagatccacaaacctctgtctgcaaatggacaatgctgccctgagggaccaggtgcctgcccctcccccacatcagccaattaggctgcagtgagaggggatttccagggcctttcctgagagggcttttggtggagatgggcagagagcccaggggctggacttcaagggcaaagggaatgtactggaagggagggaggagtggctaagatccacctatgcccaccctctgctgcctcaacacaactgctgtgatctgttaggtgccctttggtctccattcatcaatgggctcttcgcccccagcggatgtctctggggtctccctttatcctgggctggggatcactgtgaccctcttcttgttcttccctctcccacatgaactcagagggtatctggctcaggtttgtcaactcagggagattttgctgcccaggggacagctggcaaagcctggagacattttcagttgtcacagctggagatgagcaggcagaggaggtgggcaggcagtgaggaggtgatcaggcagggaggaggtgatcaggcagggaggaggtgggcaggcagggaggaggtgatcaggcagggaggaggtgatcaggcagggaggaggtgggcaggcagggaggaggtgatcaggcagggaggaggtgggcaggtaaggaggaggtaggagggagtgggcaggcagggaggaggtgggcaggcagggaggaggtgggcaggcagggaggaggtgatcaggcagggaggaggtgagcaggcagggaggaggtgggcgggtaaggaggaggtaggaggaggtgggcaggcagggagaaggtgggcgggtaaggaggaggtaggagggagtgggcaggcagggaggaggtgatcaggcagggaggaggtgagcaggcagggagaaggtgggcgggtaaggaggaggtaggagggagtgggcaggcagggaggaggtgggcgggtaaggaggaggtaggagggagtgggcaggcagggaggaggtgggcgggtaaggaggaggtaggaggaagtgggcaggcagggaggaggtgggcaggcagggaggagaaaagccggcagggaggaggtggtgggtccttctctaagggtagaagccagagctgctgctgagcatcccatagcacacagggtggtcctccatgagaaagaattatccagcccccagaagtccataatgctgctgtggagaagtcccacaggacatatggaaaatgagagtcagagggggcagtgatccgctccaagtcgcacagcttgttggcggcaggtccaagactataacctgggtttcctgactctgctgatctgtctgtggggccggcgtcagtgctgtgggtctgggtgccaagtggcctctttgtctccagcctggtttttgtttctttctaaatcatttcgatttcgggaacatttttatctgtgttttcattctcccttgtttttcattgtgcttctctctgggtaatcctaggcttgcaggcggctaagtacgacgtgtacatttcaatgaaatgcaataaaatataattgaacatatttctttcatgtctgagcgacagattaatctcccagacacatctctgtttcctctttgctccctccacgttttgttggcgtgtttcctccccttcccaacattgctgggatttgaatggttcc

SEQ ID NO: 1575 - DNA, 2442 bp, Artificial sequence
  DNA replication origin
atgagagacagcctcccctccccagcctgtatgctcaggcctgtaggcaaagaggagcagcctctgagggttgtggggtcctgaggtcacgtagcccaggtggtagccccagtctcctcgtccagaccacccaagagggaaaggccccccagagatggcatccaactgaattccaaagccccaggcccaaatccagcttctccacttccagctgcgcttacctgggcaggtcactttctgactcagagtctcagtgttcttttctgtagaaatggggacaatgtcagatcctgcctgatgaggtggttgagaacaaacaggtaggcaaggagctcagtgccatgccccacacacccagcaagtgtttcctctcagatatcactagaggctggagaccatggaccctcatctcacctccctggacatgtggggtttccaggaaggcaaggcatgtggagacaggagatgactcacccgaggtcacaggtaggttcagagtgaagccagggctcctcctacaccttcatcccagactctgatcatcagcgctttcagagaaggggacaaggcctcctccccacccaccaccacatggaaggagctagaaccctcgtcgtcagcaaggaaggggaacatagtcacggaggctggggcagaggagagtggcattgtcgcccagagagggtggaagtgcagcacctgcaagaattagcacagcgcaatttgttctattttagtcggaatctccacgtctactatcttagtggctcctgccactcgggagaaatgggcacggtaaacatctgcctgctttctagctggggaaaccaaggctcagcaaggggaaacaattgacttacaactgaagagacaatgagtcacagacatgggatttggactcagtcctcaacttgaacccagactctcccacagcaccattcacccagtgcatcaaaggggcactagactgggagatggggtgcctgggtcaagcccagctggtcacgagctagcaggcaaactcagcggtttcccaaaggcgcacctctcctaacctttgcactaggtgtttatccagggtgttctcccaccaagggcttcagagcttgactctggagttacacagagccaggttcaaattctgcagctccctactgtgttcaacctctctgactccagagtcctcattggtgaaatgggaaatctgcctcaggatgaagtgagatggcacaggcagtgcctggcacagcagaagccctcagtaagtggtggtggtgatggtggtggtggtggtagtgatgcttgtggtagtggtggtggtgatggtggtggtgatggtggtggtggtggtggtggtgatggtggtggtggtggtggtggtggtggtggtggtggtggtgatggtggtggtggtggtggtggtggtgacagtggtgactgtggtggtggtggtggtgatggtggtggtggtggtggtggtgatggtggtggtggtggtggtggtgacagtggtgactgtggtggtggtgacggtggtgacggtggtggtggtggtggtggtgacggtggtgatggtggtggtggtggtggtggtggtggtggtggtgacggtggtggtggtggtggtggtgacggtggtggtgacagtggtggtggtggtggtgacggtggtggtggtggtggtggtgacggtggtggtggtgacggtggtggtgatggtggtggtggtggtggtgatggtggtggtgacggtggtggtggtggtggtgatggtggtggtgatggtggtgatggtggtggtgacagtggtagtgatggtggtggtggcggtggtggtggtggtgttacaattctgcaccagttctttatccttcaaaacacagctctagcatgtgctctgggatggctgctgcctgcacattctagggggcgcccttcacagcatgtccatgtgtgagttgtgcagtacacagcctgtgcagcagcatgctgaggccctgaattctagaaagccttcctcactggccaggtttggtcaggggcccctctctcctctgtcacccctggtccacaccagactgtgagttccttgagggtaggggctttgtcctgcccacccctgtgtccccaagcccagctcagtacctggcccacaacagggcagacatcagcaaccattccttcagctcatgggcagctgagcagatatttacatctatgtttagtctccaaagctcttaactgaggtccaaagatcttaagtgactgaagtagttaaacgtaccctactgacatttgcaaagccagagatctgaagtggccagttagatgcagcctcgtgtcaaaatacacaagccccacgtctcattgccaagtcacatgcctgacgacccccatgtccccgcccctcccggcttagcaccggctgagactttgaggaga

SEQ ID NO: 1576 - DNA, 1434 bp, Artificial sequence
  DNA replication origin
actgggttcaggtgtccaccccggtccaattagctgtggcgggggcgtggccacacatcatatgcaggtgcccggggccgtcctagggtccagagagggcgggcgttgtggggcggcgtcccagggactgtcagggactggaagcccagggccgggggagggggcggtgtcgggggctgtgggtgacgtagggcgggtggcgggcggggcgtcgctgtgctaggacgcagaggggacgcggccctgccggtcgccgcgcggtggcatctctctccgctgtcacctggagcagaaggagctttcccggaggagcctcgctctcctcacagcgccctctttccttctccgctttgctcatcacgctggtgctggtttaattcatttgtcgggttcctcgacggtcgtccttgttcccactggaaagtcagttcccggggaagggggcccccgtctgtctctttcccagccaagaggctgctgggcccgggaggcgcccaccgtgggggaagtcggaagttatttaatattattaacagctgttaacattaattgagcacccagtgtgtgtgggccccgtgctgagagcctctcacccgctgtcgcatttgatccccacaacagcccctggcagaggtgacagtgctgtcaccttgttacagatgagggatctgagacccttagaagcaaagcgccagaccacatgggtagcaaagccaggacttgagcccagcctgtctgactccaggttcatcctcagaaccatgcaccatgctgccctgctgtgtgccaggccttgtgctgggaacacagatggaggatgcactgtccaagtggggcccatggtgagtcaaggagttgagctcttcacagtgggtaatgaaaggtgttggtgtttggctgactcccctgtctggacctcactcaacggatgggaaaactgaggcccagattgaggcaggggcttgcctgatgtgacagagcccaagtcctccaggtgggacgtgagagatgaaggggggtggtcagaagctgtaggtccctctggtggtgtttgttctccaaggatgcagagctgaggggctcagacccttggccgtccagggcccagcacagtcttgggtggggtgcgaggcttactgtgtgggctccaggggaattaagtgagcagccagccatgtgtgggtggatggagcagagatgggagggaaagggctactcccttgaattcaggtcatgtggacatgatgtcagggcaggtggttggaaaaaacaaaacaaaaaacaaaacaaaacaagaccaaacaaacaaacaaacaaacaaacaaacaaactaactataggaaactacagaaacaacaacccaaccttacagagtattattcaacatatttggtgggtactgaagaccgagaactttctaaagttgaaatgttg

SEQ ID NO: 1577 - DNA, 993 bp, Artificial sequence
  DNA replication origin
ctgcttggattagggtagagtcggggtggagtggggagttgacatcctaagtgtgacagttgcatgtagggtatgagtggggaggcatatgagcagatttgggtctgaaagtccctctgaccaccatgtaggtgaggataggactgagacaggggaaggagtcagtcaggacatagaggctgcaatgcaggctggaggacatggggctctgactaggatagtgactgcggggctgggagaaatgggcagtttggagatatttgggggtttcagtcttagcctcagtgatgagtgatgggaaagtggaggggggctcccaggtttctgacttgggctgcctgggggaccctcacttcctcatatagagaagcaggtttggggttgggtgagatgctagatgtggctgcatcagtgcatgccccgtgggtgtccagggggcaggagaagcaggtcctgagctgcaggtgaaggtttggggtcattggcaaatatgtagatgactgaagttgcagggagtgatgagcccccaggagaagaagttgagaggagggtcaggggagagggcctggaacagagccccaggacccctacacttcaggaacagcaagagggaccagcaagggagcccgaggagtggccgggggataagaggaaaatgaggacggggtcccagggaccaagaggagagaggaggaggagaagcaggcacaggctgagtgttgcccaggggctaagcatgggccgagggtgcccactgcctggtccttccagcaggtaaatgtggccttacaagggcagcatcttggggacagcatggggactgaggtgggcagagtgtgtgtggagatcaaccaggaaggatggctggttcaggaagttgggcagtgaagggaaagtgagagagtgagagggtgacagctcaggggagacatcaggttcaggtttgttgtgggatgacagacttgaatatgattcagtgctgaagagatgggg

SEQ ID NO: 1578 - DNA, 2077 bp, Artificial sequence
  DNA replication origin
acagcgtgcaggacgtgtctgcgcgggcccgggccagcggcgtcgagctgttcgccatcggagtgggcagcgtggacaaggccacgctgcggcagatcgccagcgagccgcaggacgaacacgtcgattacgtggagagctacagcgtcatcgagaagctgtccaggaagttccaggaggccttctgcggtgcgcgggcaggcgggggcggagccagggcaggggcggagaaggggagagcggcggggcggggccagggctggaggcgggaccgaggctgaggcgcagacggagccagcgccggcgcagggcaggggcggggccggggggggggcagaggcggagacgggagagagatagaatgtcagtgccggggcggggccggggaggagccgggggcggaggcggagacggagagagtcagcgccggggcggggcaagggtggggccagggcaggggcggagacggagagagcggcggggcggggccagagcaggcagggggcggggccagggcaggggcgaagacggagacagtcagtgccagggcgggaccggggcggaggcggagagagtcggctccaggggcagggccagggctgagcgggacgaggccgtggcaggcgcagagactgagagtccgcgctgaggcgggccaaggctaggggcggagccagcgctaaagtgaagacagaaaaagtcagcgtcggggggcggggccacatcagagggcggggcctggctggggcggtagcctataaaacggcgggaactgagttacacggcaacatcagggcggggccagggctagggacacggcttaggtggattgggggtggaacctggattagactgaggtggtgccagcaccaggggtggggccgtagctggggcggagcctgataacggaggagggtctccagccccaggttaagggagttggggagaggcgatgttaagagtccttttatggccgggcgcggtggctcacgcctgtaatcccagcactttgagaggccgaggcgggcggatcacgaagtcaggagatcgagaccatcctggccaacatggtgaaaccggtctctactaaaaatacaaaaaattagccgggcgttgttgcgggcgcctgtagtcccagctactcgggaggctgcgccaggaaaacggcgtgaacccgggaagcggagcttgcagtgagccgagatcgtgccactgcactccagcctgggcgacagagcgagacgactccgtctcaaaaaaaaaacaaaacaaaaaaaaaaaccgcacacacaaaaaacaacagagcccttttatgtggcagaatcctggcagggaccaaggagggcccagagctcaggaaggagagctcccagaaaacctacacatgtttctgtgtcgtgagttttgggtgccagagttttctgtgatgcgggagagtctgagaggcctgggcactggcaggagaaggttcagagcccttctcggaggggaggtgtgtgtgtgggtctttgggatgtgacccgcaggggcagggtgtccagtaggacaggatcagggttagggcagggactttacccatttgtaaaatgggtctaagaagagcatgcacgttattgagaggatccagtgagataatgcaaaatgtaaccctcattatatggtatttgacagataggtgctgtgttcattgtatgctgttctagacacttgggtgtcttgatacagcagtgaactaaacagactaaaggccctaacccttggcctttacctttttagtgagacttttcattcttatcatcagcattataaccttcttcagggatctaggcactggtgcaatgattccagacgtgggctgagagtcgggggcctgggccccagtatgttggagatcttagtttccctgagtctggatggggcctggtatccacagtcagggagggacaacctgtctgtagtgcccaaggcactatgactgtgagatctgagctacttattgtccccgcagtggtgtcagacctgtgcgccacaggggaccatgactgtgagcaggtgtgcatcagctcccccggttcct

SEQ ID NO: 1579 - DNA, 1708 bp, Artificial sequence
  DNA replication origin
cgctgtcctggggcctcccgtctgtcaccacgatgaccacctgcgacacgcggggcggtgtgacaccgggctcccggaagcccacgggactgtccaggagaggaggctgaggcccggagaggcgggaggactgccgggtcgcacagccaggcggcacccgggggaagaggacccggctggccgaagaggagacccgtttcctctgactgagagacgtggctggggggctttccatctgcttcgcctccctcgggcaggcagctctgagatgcccggagggatgtgatgccccatcgccaaattggggtctctaaggtcagggccatgccttcccctcagactgaggcggctgagggcagggtcctcaggctgatggctgtgggagtcgtgccacgcccctcgtgcccccgggaggcccggccggggctgggtggggggatccggtggttccacatggtgcagttctgcgctttggccaccagatggcagccgaagctaagggatggggctgccgtctcccgtcttgctgtccttgtcccggtaagaccggggaccctggaccagggaaccgacggagggccactcccatgtggatgcccaagggaccaacccaagaaagatgccgcccttatcctcctccactccccggtatgatacatgcccctgccagagagggaaagaatctgcctgctcccctcccactaggctcctctggtctgtaccctggaaagaaagaggtggcggactctgtcactgagatccggcttcgtgaccccctgtctgcacccgccctgaggctagggcgctcccagctctgcccagtctgggttaggcatccagtcccgctttgctgcttctctgcttctgacttgggtctgtttctgattcctgggtcccatccttagccccaggtcctgacaccctgtcctgatgacaggcagttgagacaggccgtgtttagaaatgcagctccacaagctacaggtcaccttcctgagcctcagtgtcttcaactgtaaaaagggttgtggtgaggttgagtgagatgactcctggttagaagccagaaggggcaactattatttttaccatcattaccctgggctacctggggagtgactttgtacaatctcttcctctccaggggcctgggctcctggctctgaaaatctagctgtgactattcgctgccatcccgaggcccactgcctcctcgagtccctactcccctccctgcaacccagctttcagattgtccaccttgctgggtcctcccacaggtgaactccaggctgaacacctggagtctggtgccagctcccccagcgccgctgtgtcacctgctggaggagctctctcctcacttgcccaccccacgccaccacccccatctccttcaccctctccaccacctcaaccatcagcttcatctacagcaccccgtgctgaaacttgtagttggccccaagaccgacaggctgcctgatacgtcatttctctaaggggtggtaatggctgggattatatgctgttgtctctgtgaatgcttttcccacttattggctgagcaagttgcttaagcttcttatgcctcagtttcaccatctgtaaaatggggataccacctccgagcagaatcatgttcatttatccactgtgtgctagagagtggggtatggaggagggataagaaagaacctcccctgag

SEQ ID NO: 1580 - DNA, 1919 bp, Artificial sequence
  DNA replication origin
ttttttccttctggctcataccggacacactgttctcaattttgagtcctggggaaaaatgtttcacatttaaaaaacacaaatattgattttctttccttaatgtatatgctgaacttttagatctcctctccaccaccgcccccaggccttgcccctgttatagaatgccaaagctgccttttttttttttctggtggtgttcggggggggacccatctctgttcctgaaaagttacctgtagtgtatttctgcagctctgctaatgagcggagaagtgacacagagaaggcgcctgtgttcttccgaggagcccatagaactgccattcagaggtggagctgaaagggctgtttcatgggccagctgctgcccagctaacggagccttgtgccctgagccctggacacagccctggccgtcaggggggttggggtggggggagcagttggtgaggagaccccagctcacgttctcctcgttcacctccagcatggcacgaggacagcattgcgtttctcaccgctggtcaccgtggatggcccttgtgtgaccctgggtggtttatagggaaatggaacaggttcgtagttagttttcattcattccttcatttgcttaccagagatcctgtgccaggcaccatgctgggtcccagggattcagtggtgactgagacgggcaagccccctgctcggagggagctcacgtccttggggagacaggtaacaccttaattacaccattttgggaagggagaggcaccaccatcatcacaccttgcagcatctctggagaagaattcgacttcaaagttgtagcagaaaaaggaatcagcagcttcaagtggtttttggaattggggagggcagtgaattaggcacacatgaaatataaggggaaaaagtcagaaggcaatgctcttaacctcctccttctctaacactggtgcaaaggggagtgaggcctgagctttaggcttggctctgcccctaaactggctggtggcttcgggtaagtcagtgaacctctctgggcctcagtttctccatctgacaaatgggccaagagactcaaatctgctgacttcacaggtttgttgggtgagcaaatgagatagagtgatagaatgagtaactgccatgtcaagggtggaagggattgttataattattgctaaagagtgtggtagcggtgagttgggtctgctgcacccagcagtcgctttttgtctgtacatttccttttattgaggtataatttacacagagtgaagtgcataggtcccaagtcttaggattctgcctcctggagcaatgacaatcctttaactccatttccacttctgtccccctcttgcccctcacatggggcaggcagatcaagaacgaccattcccactgcaccatggcaagctgaggctcagagaggttaagtcaccagctccaggtcacacagccagttaggagcagaagtggctttgaacctggatctctcaggtagccaagcccatgctctttctgctctatctcatgaactacttgacccaaatgcaaagaaggggatcgttcctgctgatgttactttgtttagaaggctttatctttgccttctctgtgctgggcctgatgcagagttgaatccactggctgacaggtgaggtgggccaagcagggacccacagggggaagagatgggcagggagaagccacctacatcaagctacactgagacagcagcatggctgagagccgggcctggggctctatcctggcaataacacttcttagctgtgtaacttcagacaagttattttacctctctgttctttaacagtagctgctttaaaaagttgtcaagaggattaactgagaaacctcatctaactcctttgctccttgaatcaaccctaggaggc

SEQ ID NO: 1581 - DNA, 795 bp, Artificial sequence
  DNA replication origin
gcagacatcatgtgcaaaagccacaggcctggtggtgcaggtgtgtttcagtcccttcagggaaactcagaaggcacgggagtgtctcttccctgagaggaggatgttaccagcggggaaatatggcccagagagagacagcgaccagcccaaggtcacacaccaaaactgtcgcagggtcaaaatcagctctgtcctcctgcctccaagccaggctcaggctgcggtcccagccatgctcagccacccttcccacccccactctcctttcccgcttttcacctcttcttctgcccatctttggtttcagttcttattcccgtctgcacgcagcctttctttcttaatgacaaacacagcttccccaagctggccagttggggaagtggccaggggcagggggatttgtttcttttcctggtggctctgaggagcaagcaacaggttgagctaaaagaatgggggcaggggctggaggatggaaatcagggaagatggggacaatggggtcagtattgaacatggctgggcaataaggatggcggtaccagaggggatgcggtgaaaacagtgcaccaggtgtcacctgggaggcactggccatggtgaccatgtgaggcggggagtggctgttgggatgttgttggagttggcgtggtgatgacagtgatgatcagagatgctgttggtgatgttggtgacagtgatgggggtgacggcaatggggacatcaggataggatggtgataaggaatatcatgtggatggtggtgatgacacaagaacccccgattc

SEQ ID NO: 1582 - DNA, 1463 bp, Artificial sequence
  DNA replication origin
cgcagccctaaactccccagccctagaccctcctccttctgctctgcacagcagcactccctgccttcttggacacgctatgtccttttgtgccttggccttgtacatgctgttccctctgcttggaacatctcctcccaccacctgcctggcagactcacgtagccttcaacactcagctcagcgcattcatccgctgactcagccaacatttctggagcccctcctgtgtgccaggcatgatctatgtgctggcattgaacaaaaaaggtatagtcccccttctcagggagctgcctgcttgtggggaggccaccagctggggatgcatgagctgaaggacattaagctgggggaagagatggggagtattgtgaggagcactttttggggttctctgatccagtgatattttgaggtgagggagtgggcctcgcaggtctggcccaggcagaggtaacagcaaacgcgcaggccctgagctgggagccagcttggaatgtttgagaaccggcaatgagatcccagcggttggagtgaggggcgaagggcaggggaagaggttcaagaggtcacagccgagggctggggggcagctgcacacttgctggccttttaccctgagttgggggtcactggggagggcaggacgggagcgttttgaagcagggacaagggcagaagttgggaggttgaggtggcagcaacaggagccatggaagtggtcggatcctgggtctgcaggcgtggggtgtcggagagacagggtcgaggataagcaagggggcatcatcacccacagagttgggggtgccgtgaaagcaggtctggggcaggggccgccagggctgggtttgggcctgtggatttcgagatgccgtcactcagctgcgtgaactcctggaagtgagcatggacacaggagtcccgtgctctggggaaaggctggggctggaggtgtgggtcagggagagagaaggtggtggaagccagagactgcgtgggtcacgtaaggagggagtgagggtggggcacaggaccagagcctcccaggaggtcagggaggccaggaggcaccggcagaggagccaggaagcaggaggaaaaccagagcgaagctgctgaggactggagaggagacccagcctccctgtgttaggtgctgccgccgcctacacccagaggcacttggctatttggtcctgccacaggcaggccatgggtgatcctgagaagacatatgaggatgaaagcccagttgaagcagagagggaagtgggggactggagagtgtggcagaggggtcaggagtcagggggcatctctacagcaaagccctaatgaaaggggggagtcagggatgtggatgccttggaggaaagttctaccggcagagtgaacagctggggcaaagtccccaaccatgagtggggcagcctgtgtttggagaactagcagaaggc

SEQ ID NO: 1583 - DNA, 947 bp, Artificial sequence
  DNA replication origin
gtgacctcaggcaagtcatttcacctggccgtgcttccatttgtcttagtaaaatggggataggcatgctgcctgcctccagggttattgagaaaactgaaaatcaggcaggtaaagtcttagcacggtacccagcacatagtaagccctcagtgatgacagctattaggatattattgaggagttttcaaagtctgatggggagaggggacggctaatcaaataattgtcatacaataggatcactgctaacgccagcgcaaaccaggcattgggggcacacaggggaaggagtaactaggcctgccaggggaaatcagggaaggctttcaggaggaggtgccacttgaaagctaagtagaattttaccatgacgatgagaggaagagctttcctggcagggggcacagcggttagttacagaagctcagagactcttggaggcacaaggagatgcttactgattgtgtctggggaagtttcaggacacagagctgggaaggtgggtgggagatgatggcaaaccaccttgctggcctatctggggggattgggacccccactctggggcagcagagaggaggagagagacaagatccaatttgcctttgggaaagatgacccaggtggaaggtccgggagggtggcacaggggcaggacaggaggcagagactgaggaggctgcacctgataggggacccagggcaaaggttgggggcagtcttcagactatgttcccaagaccctggccaggaaggaggtgctggggcaggctggggtggggtggagtgcgggtgaccgtgacctcagtcagccgggaccagaactgaggcgggggtgggaagggggctgccggcacactgagtcacttgacttattggatttctgagagattgctcccctcccccttgcctcggcagccaaggctactccattaaagcttcac

SEQ ID NO: 1584 - DNA, 1951 bp, Artificial sequence
  DNA replication origin
aataatacaacgcattgtaagtagagtgttgagatagagggtgatgggtggggacgatgttcttaaagaggatgagtgctcagggacaatctctctgagcaaatgacacacaaggatgagagagccgcataatgggaagagccagctacgagagggaagagagacccaggcagggacaaaggccttgaggtgggaatgggtttggtgtgtcctcagaggcagaagggtcagaggagctttgaggtggtgagtgagggggagagaggcctgggacgagccagagaggcaggcaggggcccgatcacgcagagcctcgtgggctgggatagggggcatggtttattctaagggcagtggaaaccatcagagggtgctaggcaggagagtgagttgacctcacatgtgagaagcagctccctctggatgctgtatggggatcgggtagcagaggggcatgacggggccaggaggacatgcagttgtcccggttggagatggtgctggccatggccggggagggaagcttccgagcttgactggtttggacacagtgtagacagacttcgctgagggacttgtaagtagcgggtgggaaacaagaaggcagaaaggatagctcctcttttctgccttgagcgaccaggtgggtgatgatgttgcttactgggatggggagactcagatggtgctgggggtgggatgctagacaactggctttttcaggggagaagatccagagcttgctttgggatgtgttgtgtccaagatgcctgggagcagatacaaatttggttattgacagtgtagacatgacaactaaagccatggggcttggtgagatcaaaggaggaagtgtagacagagatgggaggataagaggaagggaaaggaggggtggaagagcagctgggaggagaaaagaggaaaaggaaaagagaagaaaggagaggagaggaggggaggagggctgttggagccaggaacacacctgtgcttacctttttctggtgtgggccatgcttcaggcacctggaacacaccctgagtccaggagcaccagccttggaggtgagggcaacagcaggaactttgccagtttggccattagaacctgtgtggggacgttaggccaggggtcagaagagggtgcttcgaggggtccaaggaggaacagccccactggactgagggtggaggccaaggcctgacagatgagttccccataaaaagggaggagagagaagaagagggtagaggtcatggggtgtgggatttggatggtaagcaatgtgcaggaagcaggtgaaggggggtgtcgagagatgaaagaagcagacatttggggacaggcggatgtggatgcaggctgtggcccagagcgggaggcaagaggcagcttccttccctgtccccatcctcatcctggtaggaccctgggcttcctggagacagcctgggggcttataccaagcccttgtcttagctgagctgcctgactgaccttgtaaccacatggcccccgagggaaacagcacatgtgggtccgtgcaggtgcatcaggggcatgggtatgtctctgaaggtgactgggacagcttggagccttgaatgtcctggacttggagacacttatgagctgtgggcattgggcaaggcacaacaactggcttcatggagccttagggtctcacctggggaaaggtaataataacatgtgaaatatgccctgccagtccccaagctctgcccgagtgtgagatattattagtgctgcctaggctatgaaactccgtgtgaggggtgaccctagttttgatcaaagagagagacagaggcagagacagaaagagtgagacagagaaaggaaaacaaggtgggggtgggcaggtagcgacagagacagagcaagacagagaacaagaacaagaaagatagatacggaggccaggtg

SEQ ID NO: 1585 - DNA, 1074 bp, Artificial sequence
  DNA replication origin
gctctggcacacacacaggccgagggcttgagatcccgagaggcccgggctggcctttccctggttggcctcaccagacctttgttcttgttgacttgttgcccagtcaagggaaaggcaggacggtctgggctttggggaagggaaggggacagatttagagaacaattgggcatgagcttccataatgccagcaggggaggttagacagctggagggacttccagaaaactacaaaggcataggcactgggccgagtgaatgaaaagggcagttggactttgctctacccacccctctgtctgtccatccatcaacacaacacattgatgcccatcagtgccaggttctgggcttggcgatggctcagtcccctgagcgcctggaatcacagcccagtctgggaggcaggcacacaaatcctgggtttcaatgggattccagaagaaggcaaaactcaccctgccaggtggggtgcttgactcaggcagggaagctttgtggaggagggggtctttgagctggtgtttgggaggatggccaaaagcttgtttggatcagcctgggcagggcacaatgacagacccatctggaaggatcaggggtggttggaaggtccaggaatgtgaatacctgcatgagggagtttgcacttgaactcaggggcagtttgcagccacccagggatcagagcaagggagaagtgtggtcaaagtggttttcgtgcagtcatgccggtgacagaatcttggctgtcttgctcaatgctgcaccccagcccagggtagagtgccaggcccacagtgagtgttcacacacttgtcgaagaaaagcgtgaactgaaggggagaggttctgatggatgagggctgaaatgatgaggtcgtcttcatgtggtggtggaagggagaggaaaagggatgggttcaagaaaggtaaaggacaggtagaagtgatgggccctactggtttactggaggttgtgggggtgatggagaggaatctgcttggggtaacacctatgtttctggcttgagcaactaaaggttgggggagagggaatacgggtggggt

SEQ ID NO: 1586 - DNA, 764 bp, Artificial sequence
  DNA replication origin
gcaggggtggaggtggactcatctttgcgtctgcagagcccaggtgcacctggatgctggagggtgctcattgctgtttgcagggtgtatggatgagtgtgtggttccaggttgtgggggcggggtggtcttggcaagggactgtgggccaggttgagggagagggccgaatgggcgtctttacaggaattctgatgcctgggccagcaggagctcagctttccccttctggcctgagtagggggtctatggggctcagtcggaggggaggggtccctgggccccatcatagtctggaaagaggagtggacgcggctctcccgcccggagcttcctccgaacatccctctgcaacgccggcctgggctgtcatagcaacagcccgccccggcgggggcgccggccaatggcagccggtgctggtgaggtaatgtcccggtctggaagcccattggctccatttttgtccacttctgggtccgggcctgcggtgggagccgcgagggggaggacagagcatgcgcagggagcccagctgtctacaccggcggcgcgattcctctccctgcgctccccgctctccctctcagttctgggctggctacctctgtccttctcctctctctctgcgtgccgtacctgtccctggttgtgtcggtcgtttggtgcgtctgtctccctgactctcttggggtctcggtggccccttcttcttgcccctgtctctgccccggggtctctgactctgagtgcgcctcctcgtc

SEQ ID NO: 1587 - DNA, 834 bp, Artificial sequence
  DNA replication origin
gatgtcatgcagggggtgagggcagctgcggggcacagatgtatgaatttagccctggacaagcaatgggtctgggggtggctcaggaatgtccaggacaagggtttcagagacagaggcctcatgcctggattctaacccctgcctcagttcctgcatctgtggaatggggatgataaaaccctgggcagttgtgatgcttaaaggaggctgcataaataacatgctcccagcacctggcctggggcaggccctcagcagcagcaggcagaggtctctagagtgccctgggaacgctcagcggctcccctgggacctgatgctcaggccttcatgggccgcttgcggagcctctgctgggtgtcccctcccgagatcagtggtggccggaagcagaaggttcagtgcttccaccgggcacgctcgctgtgtgtggggggtgcagccgagaggaaaggttgtatccgagttgtgaggttcatgtctgagtcagaggatgcacctgccgagggtgatgtctaggagcgatgtgtgtttagggaacatacgtggccatggcggtgggtccgtgttgtgggccttggtgaggtgagtgtggtgcgtggggtcaggagaatgtgctgaggtttctcgggggcatccgtggggtgtgtggtgaggagaggagtgtgtgtgtgtgtctgtgagtaccctagggcatgtgtacaggcagctaggggtgaagtagatgggtgagtgtgtgctggtgtgggctgggctgtattgcctataggctgtggtgagtatacagattggtgtgggcaaacattgcacttaatagtgtgtgtgtgtatc

SEQ ID NO: 1588 - DNA, 744 bp, Artificial sequence
  DNA replication origin
ggatggggtgggagggatgcactggccttcctgaacgtgtcccctgcactcagagtgagtgatgagtgggtgggtagaggtagccgtgaaagtgaggagacttagctgacatccagctcatttggaccctcacccatcacagccctgatggggtgctcctgggagggagggggctgggcaacctgggaggtggcacctccttgcccctggcccaggggagcctccccagctgctgctctaaaactctaggagaggatcggtgggagtggatgtggagtgagggggcctgtgggtcactgctgggcctggtcccttctgggctgggagcctgaggtgcctctgtggagtgaggctgtgggttacttcaggaaggtgtggtgactaggggactgtgaggaaaaatggaagcagggggcatcagtccactaggaagggtgccacatttcatcccgatgtgtgtgtgcacttgtgtgtacccggaaggaaagtgcgtgtttgcgcgcatgtgtgtgtggagggaactgagatgcaggtattgtggacctgttaatggcatgtgaggcgggatgtatgtctgctggggcaggttcagggagggacaagtaggctgcgcacatgtggaggcagggtgttgggagtgcctggtgtgttgggtcccgtgctcagccccttctcctgcaatgctatgagctgcatagtcttatcaccatcgtgtgctggcgcgtgggtgtggatgttgggtgg

SEQ ID NO: 1589 - DNA, 1295 bp, Artificial sequence
  DNA replication origin
gtcttctgatgatcaatatgtgcattttcctacatccttcaatattccttgtagcaagtaaaaaaaagccttctatgacacatttatgtcttttaataacctcattagacagtgtagatttgtgagaactcaattgttgatagctgcgtaatattccatgttatggttgtaccctcatttatttaactcgtcccctgtcgttcagtatgtgggttatttccattttttccctctcgtaaattacattgtcctggatctccttgacctaaggatcaaattcttgggagtccagagtgtcagaatcagaaaggcccttagaccaccatgcttggttttccattttgcaaatggggcaaaggaaaggcagagaagggggaagaggatttgtccacggtcttggaggctgtgggcgcctgagccagggctgctacctgctctcctgttggggctggggtggggatgtgggtggaggcaggtgccacagtgggaaaaagggcatcctggggggatggtgggaacacagggctgggtagagggcagactggaggtgacaggagagatacaggcttggggtagggagggctctgctgccatgatatctttgcagaggagttgactgggatgggacaggcccaaagggaacatttcctgccctctgagctgcctttgtagatgggagtagggggtggggataggtttggtttgtgagaggcttgagtgtgtgagttggggcgagtgggagggtgtgtgtctgggcttggtggatttttcttggggggggtctgtggtgtttcagcttggccttctctgccctccccattccactcctccccgggcttctgctctctgggacttgggctccatagccccttccccagcaggtgcagtcctcgtgcccctcatctccagccacaagtgggtgtgggactgccggcttcctggccagggcagctgtggctgggtgggggtggggactgagacatccccctcctggtcccggctcccaattgtgcagcccccttggctgtcttgctgcccggagcttggccccagcccacattcctgcggtgatgctctgggtctccggggtggatctggtgagcgtgaggggcactgagttctcacaggactgagggctttttggggacggagcctgcagggatccagagggccatgctgagacaccctccctccctgcctcgaggagctagtagttacgtcgctgtgtgtctttgggcaaatcactttacctctctgaatgcttcgtggcagactaaccccgccccctcctttcg

SEQ ID NO: 1590 - DNA, 778 bp, Artificial sequence
  DNA replication origin
taaatggctacagtgtccagaacagtcccgctggtggaaaatcgtcctgcccaggtaccaatagtgttgcttttgacaaatgtttggtcatgagacatggtggggggggggggggctcctggtgggtggggtgggtatggaccatggcacagtggtgagactgtctttgtcatgctgtgggagggaggaacattccacactgcctggggcaccgtggaggtgcacagagattgcatgggccgattcccctgaccctgcaccttccccaccctcagcacttccctcccttttgcctttccatgtttacagggatgtgtgtcccgtgttgtgtctaaggggatggccgtgataaatggtggaaagagggcgtttgggcatcagcccaacttggctgttgggctggcctttccctggtggagctccctataggggagggggccacgctgctgtgactcggtccctaatggcagcagctggcctctgatcctgccgggggaggctcaggggaggatgaatcagctgagacttgacatggacttggacttggactttgacctctgcatgtcagctgggtgaacttgggcaggtcactatacttgtgtcgtcctctgagcctgtgttgtcctctatgaagctggagggtgaccatggtgctacagggtgttgcaagagctagggcttacttggcgcagagtccagcacactgctctgctcacaggctgctactagtcatggtaaatgttgggggagtggccatgagagcccaccatcaccacag

SEQ ID NO: 1591 - DNA, 1371 bp, Artificial sequence
  DNA replication origin
cagatgaccagctgcccctctggcctgggctcctagaccctgggattaagagtcaggattaaggacagacatattttcgtagctcagagccccagcagtgtgtgtgtgtgagagagagtgtgtgattgtgagtgtgcgtgtgtgtgagtgggtgtgggggtaagagtgcgtgtgtgtgcatgagagtgtgtgtgtgagtgtgtggggacgacagcgtgtgtgtggatgagtatgtgtgtgtgtgggtgagtgtgtgtgggggagtgagagagtgtgtgggggtgtgtgtgcatgagtgtgtggatgagtgtgtgtggggtgtgtggatgagtgtgtgtgagtgtgtgtgtgggtgagagtgtgagtgtgtgggggagtgagaatgtgtgtgtgggggtgagtgtgtgcattgagtgtgtggatgagtgtgggggggtggatgagtgtgtgggggggtgtggatgaatgtggggggtgagtatgagtgggtgagagtgtgagtgggtgagagtgtgcgtggatgagtgtgtgtgggtgagagtgtgtgggtgtatgtgtgggctacgtgtgtgtgggtgtgtgtggatgagtgtgagtgtgggtgagagtgtgtgggtgtgtgtggggtgtgtgtgggtgagtgtgtgtggatgactgtgagtgtgtgggtgagagtgtgtgggtgtgtgtggggagtgtgtgtgtgtatgtgtgaatgtgtgggcgtacacaggcatgcacatgcacacatccaagcacattcaggggtatttctgggcgtgtgtgtctgtctaggtgcatccatgtgtgtatgcctagggctgtctcgagtggcttagatgcctgtgtgggtctgagtgtgtccatgttagcgtggagggctgtgtctctgagtggtacctgtgcacatggcagtgtatgtgtgtccctgtctctgtctctacacgtgtgcacaggacaagggtatttgcacaggtccatgttcctccatttgtaagcatgcatctgagcctcccaaggtagagagcatctcccaacttccttaatccacagtgttgcgggtaagcccctggagctgaggcagggggagggacagcagttgggggactcctgatccccctggcataggctacaaacactttttcctacaaagacaccagggccccatgcatcagcacagacacacaacaacatgccatcacacatgttgcaggtacacgcaaacccctaacccaaactaacgtcctaaacagaaacatggccttagctccacgtggaaaaaggattacctggcctcacttgcagccttgcagaccatccctcaagacacagctgagctccctctggatctgagattgtccccacaagccc

SEQ ID NO: 1592 - DNA, 1267 bp, Artificial sequence
  DNA replication origin
cttcagccccggggaagctgttccacttctcactgctgagtgaccctcaacagccacacttcatctctgggttcagtctcctcatctgaacagcaaggccagggctgattcctggctctttgccccaaaactccatttcaggagggacggatgcagggaactgtgagttctggggccgggagggcaaggaactaaagaagaatcaagaatccctctagccttggtcctaactaccccctcagccctcaagacccctgtccccaaggggagccctcaggttctggccctggtgggtcacagccagggacatgggaggttccaaccagccagggagcaagataagggcctctagggaagcagagcagggggaggaagcgagtaagaggaggagggtgggaggagggagggagggaggggggctgagcagagacggaggaggagatggagaggagggaggttggagaggagaaggtctcctcaaaaccgagcctgagcctccgagcccacagtctgtccaccctccagaaagacggagccaaacaggctccagtgcacctctccccgcctgcacctccatagctcactgggtgcccactgctccctgctgccaggctccactttcctcttctcccagtcttgggggtcacatgagctgggggctggggagaaaggaccaaatgtgacaacaggggagaactaggagtgaaacagattgaggacgtgtgaaagcagggaaaagaaacaaagtagcaatgtcagaatttggggaaatgtaacaaagtaccatgtgtgagggttggaggggagatgatgtaatggggaattagcagctgcaacaatgtatccaagtgagagctccaaggtggtaacaatgtaaccctgaggggaaccagacactacgaagtgaaataacataattgggcttggcaaagaatcctaacaggtagaagaggcacctaggaacctagaagagggaggcaggagtgagggggctgaggagtggcttactgtgcttgggggctggtaggaggggtcattattggattcccagaggaggagacatctgtgctgggttttagaggatgtgtaggagttcactgaagaataaaggaacagtccatgaagagggaacagcatctgggtaggcatgaaggaaaaagagacaatggtatgctctgtgctcaggagggctggtagaagcgtgggatgtacagactgggcttacatttgggagcattttgggctcagcattttgggaggctgaggt

SEQ ID NO: 1593 - DNA, 1557 bp, Artificial sequence
  DNA replication origin
accgctgctgctgctgctgctggcggggcgcgccgcgggggtgagtgacacgcgcccggatccccgccacggctccccggggccgccccccgcgcggggtgccggtccccgcccgcgaccccccctccgggaccccgctccctcccccccggctgcttcccccggggccgcggtccctgccacccctcgaccctcccccgagcgcccctttctgcaccctgctcccccccctccggaatctccccctagctggcatccgcggggagaggccgcccccgccgctggtcatcttcggggggcgcatctctccttccttttgggacccctccccagagggaatcccgggagggaacccgatcgcgggtcctcagccctgttcccccacctcccagtggctccgggaactgtctccccggggacgaagcgggacccctgcgctggcctgggaggcgcgagaaggacccggcggcgggctgggggtcgccgtcccggctgggtgtgtcttggggtgggagtgagcctggcttttgcctcgtgggtgtgcccagaccatggccactttttgggaatcggatcggttccccttccgaggggagggtgtgcatttggttcttcccagggtcgcggcagccggccagggcagtgggcccgggaaggggaggtggaggtggagggtgacttggtgaaggtgacctgaggggggagtgagggtaaccctgtgtgtgggcgtgtgtgggcgtgtgtggccaactcagtgaggggtgcggggacctgtggggcgtgtgcaggtgaaggatgtgtctgccacatgggtggatgccagcgtgccctcccgtccgtggtcgtgggagggtgacccattgtgcatgatgtgtgcctgtgcctggctgggccactgttggctatggccgtgtgtggctgcagtgggtgagggtgtgtgtgtgaaagacctctggtgggcgtgtgcttggacccatgaatgtgtgtgagtgcacatagcagcgtgtgcatgcaggtgcatgggggaccctggacataggacgaggacccctgaggggaaccaagcatgtgcaggtggaggtgatggtatgtatgaggtgacccttgagtgtccctttgagtgaccgtagcagccatgcttggtcccagctccgtcagggatggcagagaaaggaaggacctcatccccctttgagggatccaggccccagatgagttcttgttggacaagtgtccaggttctggctcaggcgggctggggatttctaggtccagcctcccaggttggttccaggagctatgctgtcctgcatcccccaggctgaaaaggacccaggcctctcaagcaacactgggtgcccagccgccctctgcaagttccttccctttcccagcctcagtgggccagtcagtaagacaggaggaggacaggcaggggctccaagcttgcttcttggatggacaggcccctcctcagccttccccatctagggggctgtcagctggagggaggggaagtgttgagggctgacctgtgtgaagtgcctgctggccagg

SEQ ID NO: 1594 - DNA, 1495 bp, Artificial sequence
  DNA replication origin
ccggccccggcgccggccccgtgggcggccccggcacggtgcggcggccccggcttcatggcggcggcgcgggcgcgggcggcgggcggcgggcgggcgcctttgttcccgaggcgcggcgcgcggggcggctgcttggcggcggcgcggcccggcggctggaccgacgcgctctaggctcgcgggctcccggctcggccgcccggctccgcctcgcagctccgcgcccacagcggccgcgcccgcaggaagcgtgcgccgccgccgccgccgccgggccgcccccagcgcgggcggaacggaggaggggcccggggcggggcgggccccagtgcgccccccgcggggctccgcgccctctgaccccagtcccagcccccgcccccacccagagggagccccgcgctgccgagtgggcacccggacacctgagtgagcagccggcctcgccgatcccggggctggaggtcgcggagcccgccggacgcacctccgcggccgccgtgctaggtagaagggaagggtcccgcgtgggataccagggcccgggcctggctccctgaagtcgccgagcggaggggtcgcatgggcgttttcatctacagcctccccctgtggctccacgcacgtgtctcttcctggactcccatcgtcaccctcacacactcagccagtccacccagtgggccagaggtcatccaagaccacgggctttcatgcctccaggacacccaggggctgtgtgacctcagatcagggcccggccctctctgggcctcggtctccccaggggaccatgggggtggtcacttctgggccctgtcactgtggatctgcagaggaaaagccacgcagacctgagcgcagctgcttccacaccagctgtgcgcctccagcaaggcccccagttctctgagactcagaccccccatggttgaatgggaccaccccctccagtgcaggatggcgagaaaagtacatctctgagtggcagtctctagcgctggtggtctttctaccctgtgtggtcacggtgccttttcccccttcaccttcatccccagcggcataccccatgctgttcttacttctccaagtctccaatggcgtgttagctccagcgggggcagggttttgtgtctgtcttgttcactgctatgtccccagcaccagcacagagctcggcatgacatcgatgctcaatccaaatttgctgaatcaatgaatgtgtttcccatttactggggctcaaaaccaagtgttttggggcaagataggggagagtgaaacatttctggaaccctgaccacatgccaggtgcccagcgctttcatgtgttatatcatttctcaggaaccccataaggtcggtctgtcaatatcttcacttcttaggtggggaagctgagagccagcaagaagaggttatttgctgatgacagctggctggacgtctctaccctcagttactctcctctctggcccctgtgtcccag

SEQ ID NO: 1595 - DNA, 973 bp, Artificial sequence
  DNA replication origin
cggccgggccctgggcggggcagggcgaggctggatcttcggaacgagtccgtgaaggatcgggcgcgggcgcgggcgcggggccggaggtggggacgaggggagttgggaaggggctgggggtgtgggggttgggggtgtgggggtctggcgggacttatctgggggaggctaaagtgggtgctggaggcgggacccgagtcccgggagaggcgggcggggagtcgccgctagagcggggcccttttgggggctggagacccggaagcttagagggccccctggccccggagagggggagggcgcagggcaggaatggaggcgaggcctggcctcaggagccgggggcggcgggttcagggcgcgatcctctctgggggaatccgcgggtggcccgggagaggccgggagggggcgcagagggcggcgccggggccacgtggagtctgcgcgccccacccgctttgggccgcgctccacccgctttgggccgcgccccactatccctgagcgccgcactgttggccccgccacacgtctgtcctgagaacccgcaggtcccaggctgtgcggcaccccgccgagccctggagcaagtccttccctgcgtgggtcttgtttccgcttctgtgaaatgacgatggcccttcttgttttgcagggccctgggagagtgggttgagagaatggaagtgaagaggaaggcttcaccatcaccttaactaacatgtgtttcctaccgttaaataaacattataggaggccactgttttggactaagtttctgcaccaggccccagccgaccagactaaaaatcaaaagagtcacccatgctaaagttccacattaccaaatggaaactgagttgccatctaacctggggagaaatcaagagacaacagccaatttcccaaacaggccggtttaaatcctcaatcaacatcacatttccctgctttaatcctacgcaaa

SEQ ID NO: 1596 - DNA, 1396 bp, Artificial sequence
  DNA replication origin
acggggtggctggccaggcggggggctgacccccccacctccttcccggacggggcggctggccgggcagaggggctcctcacttcccagtaggggcggccgggcagaggcgcccctcacctcccggacggggcggctggccgggcggggggctgacccccccacctccctcccggacggggtggctggccgggcggggggctgacacccccacctctctcccggacggggcggctggccgggcagaggggctcctcacttcccagtaggggcggccgggcagaggcgcccctcacctcccggacagggcggctggccgggcggtgggctgacccccccacctccctcccagatggggcggctggccgggcagggggctgacccccccacctccctcccggacggggcggctggccgggaggggggctgacacccccacctccctcccggacggggtggctgccgggcggagacgctcctcacttcccagacggggtgttagccgggcggaggggctcctcacttctcagacggggcggttgccaggcggagggtctcctctcttctcagacggggcggccgggcagagacgctcctcgcctcccagatggggtcgcggccgggcagaggcgcttctcacatcccagacggggcagcggggctgaggcgctccccacatctcagacgatgggcggccgggcagagacgctcctcacttcctagatgggatggcggccgggcagagacctcttcactttccagactgggcagccaggcagaggggctcctcacatcccagacgatgggcggccaggcagagacgctcctcacttcccagacagggtggcggccgggcagaggctgcaatctcggcactttgggaggccaaggcaggcggctgggagatggaggctgcagcgagccgagatcacgccactgcactccagcctgggcaccattgagcactgagtgaacgagactctgtctgcaatcccggcacctcgggaggccgaggctggcggatcactcgcggttaggagctggagaccagcccggccaacacagcgaaaccccgtctccaccaaaaaaatacgaaaaccagtcaggcgtggcggcgcgcatctgcaatcgcaggcactcggcaggctgaggcaggcgaatcaggcagggaggctgcagtgagccgagatggcggcagtacagtccagcttcagctgggcatgagagggagaccgtggaaagagagggagaggggagaccgtggaaaggggagaggcagacggagagggagacggagagggagagggagagtccaatgcacctctttttcttttttcttttttttttgagatgagagacagggtcttgctctatcacccaggctggagtgcagtag

SEQ ID NO: 1597 - DNA, 1008 bp, Artificial sequence
  DNA replication origin
cccgtccgggagggaggtgggggggtcagccccctgcccggccagccgccccatctgggagggaggtgggggggtcagcccaccgcccggccagccgccctgtccgggaggtgaggggcgcctctgcccggccgcccctactgggaagtgaggagcccctctgcccggccagccgccccgtccgggagagaggtgggggtgtcagccccccgcccggccagccaccccgtccgggagggaggtgggggggtcagccccccgcccggccagccgccccgtccgggaggtgaggggcgcctctgcccggccgcccctactgggaagtgaggagcccctctgcccggccagccgccccgtccgggaaggaggtgggggggtcagccccccgcctggccagccaccccgtccgggaggtgaggggcacctctgcctggccgcccctactgggaagtgaggagcccctctgcccggcggccaccccgtctgggaggtgtgcccagcagctcattgagaacgggccatgatggcaatggcggttttgtggaatagaaaagggggaaaggtggggaaaagattgagaaatcggatggttgctgtgtctgtgtggaaagaagtagacatgggagacttttcattttgttctgtactaagaaaaattcttctgccttgggatcctgttgatctatgaccttacccccaaccctgtgctctctgaaacatgtgctgtgtccactcagggttaaatggattaagagcggtgcaagatgtgctttgtttaacagatgcttgaaggcagcatgctcgttaagagtcatcaccactccctaatctcaagtacccagggacacaaacactctgcctaggaaaaccagagacctttgttcacttgtttatctgctgaccttccctctactattgtcctatgaccctgccaaatccccctctgcgagaaacacccaagaatgatcaatttaaaaaaaaaaaaaagaaaaagaaaaatagaaatag

SEQ ID NO: 1598 - DNA, 1010 bp, Artificial sequence
  DNA replication origin
agagctggtgagtgagtgtggtgggatgggatgggtctgatgtcctgctgtttttggacaggggggcaggatgctgggtgaagagtgaaagggagaggctggagaagagaggaaggccccagctcacgccaaggctgagattaaaaacaaacaaacaaaaaacaaaaaacccgtggtgcccctcccccgccccgccccactcctccgaagtccgggctgcgaagagccaagctcaaatccaagtccaagtccaagtccacgtccaagtccgcatctccagatgcagacgcggggttgggcacaggctgcagtgagcgcgcgggccaccagggggacacgcctgcgccttggcccgagctcgcggcagctgcggtcagcccagggcgaggcgccggggtgggcgcggggcagaggctaccccgacctgcgggaaacaaaggcaggttagggagagtggatcccaaaagtatgggggcggagagacccggttgccctgcccactcctccatcccctccttttcgcaaccccgacgcccaggcctccccaagccagcagggggccgtgacccacgtgtacagaggctgcagctgtaaatgcgacgtcttctggggcgcctggtatccgtaggagtcaaagccgccgatgaagtcaactgcggaagaggggcggcgcatgttagggatcggcggcgggggcgaggagagggagactgggtcctgaaggggaagaatctgagggcaggactcccaccctaggaagcggagccagagaagccatgaggaggggaggggcgagggtcagaccccgtgcagggcctggggcggggcttcggctggaccctgagggatgggcctctgggggtctggaggcggcgaggccgggccagctgagggtcaggccccagtccttaaggcttgggcctgggaggccgggcagtcctatgggagagaaggctctcaggggcggggctagagcctctaaacgggacaagacctctgatggggtgggg

SEQ ID NO: 1599 - DNA, 1086 bp, Artificial sequence
  DNA replication origin
gtctaaggcctatggtgacatggctggaattttggccaggaaagtagttgacttgccaaattggctggcaagggtggggcacgagagacttctgatgggttcaatggccctgagcctgggccctacgctaccttctctcccagccagcttcctggagctagggtgggcccatctgcattattcagcccttgtccctcactccccaccttgtgtgggctcctggggttggcgtctagacagacaagagcatcctactgagaacagaggcagccctgactcggggctgaaggttcctatggcaacggcatcccccttcagctggcagctacctgataaataaataattaggggtgggggcggggagcgaagggcagggggaagggcagcagggagcctcagggaggccccactctggagagcagaagggccagttaggtttgaagtagggtggagggcaggggggttggcattgctaggtgaaagaaagtggacggaaaaaagtggccagatatgagagatttggaagatcccagagagccagggcttgaggatgggctgcggcgagtgggggacgtggaacaagtggggagcatgagggagactgaaacctaaagtttaggttcctagctcaagcggctggacacatcgtggggcccaaaacactggacatggaccaggtttgggcatatggagttcacaatgagctgttcactgagtcattggttagaatgcagctgggggctgcacgtgagcaggtagtcactgaagcttgggtgggcatgcgtttcctgggataagtgtggcatgaagagggcctgggatgtagctttggggcactctaatagttaggggcctgctgctctagaatggggtagtagccaaggaaggtggagaatttggttttagcacctggagtgtgccaagcactggtctcaccactgaaaatacggcagtgaaccacacaagcagaaattcctgccctcacaaagcttgccatccactgcaggagacagaccataactaaatagtgtgtaaaagagtgtgtttgccaatgataagcacaggccagcgtggtggcacatgcct

SEQ ID NO: 1600 - DNA, 1037 bp, Artificial sequence
  DNA replication origin
gccgacgagagcccgggcgactgccccagctgggcagtgctgctctgcgctgcgccgcgctcggggctcgctctccttgctccgcgctccccgccagccgccccggggcaggaggcgcgcctgacggacggcccgctagacaaaggaggcgcggctcggcggggccagcgcgcggacggacggaccatggactcggagcgcgggcggccggccccagccttggggaccggacactcccgggcccggccctaggcgcccggccccgccgcccggcgcgcccagcggggaggacgtggagcccgcgcggcgcgagcaggcggcggccgcggagcaagaagggcgccgcggcgtgcggcccgcgcagcccccggagccatgggcaagtgcagcgggcgctgcacgctggtcgccttctgctgcctgcagctggtaagcgtcgcgtgcccaggcagtcggggcagggtggggcgcggcggggcgcggtcccagggcgtgcgggtggggttgcgtgtgtctctgtgtgtgtgtctggtgcgtgtgcccgggcggggggtggtctggagtctcggagcggtcgggcggagcctgctcccgctggccgggctgtctctttgtgtgcgcttctcgctgctgtgcccggcgctcctccggtccccaagtgcgtcctgtgcgcgagtccccggcccgcccgcactgtacaagtggcctcctgttgggggatgcgctgtgggacggtggcttgctgggactgggggtgtgtctgaggctgatctgtggatccgttgaggtcctgctgtgtgtttccctctagatccctcgtttgcatgggtctctcccttcctctgggtctctgcctctgatcaccacccctgtgtgagcgtttctcacaaagtctctgctccggcgtgtgtctctcagggtttctctttggtgtgtctctaaatcgctgaccatttctggcccatgttcatctgtgttctgggatcttagactccaagaaccctccaatcctttgtgttgtttctgcctcccttcac

SEQ ID NO: 1601 - DNA, 1326 bp, Artificial sequence
  DNA replication origin
cagcgcccgctgcacttgcccatggctccgggggctgcgcgggccgcacgccgcggcgcccttcttgctccgcggccgccgcctgctcgcgccgcgcgggctccacgtcctccccgctgggcgcgccgggcggcggggccgggcgcctagggccgggcccgggagtgtccggtccccaaggctggggccggccgcccgcgctccgagtccatggtccgtccgtccgcgcgctggccccgccgagccgcgcctcctttgtctagcgggccgtccgtcaggcgcgcctcctgccccggggcggctggcggggagcgcggagcaaggagagcgagccccgagcgcggcgcagcgcagagcagcactgcccagctggggcagtcgcccgggctctcgtcggccgcggcttcccggccccaccacgtggctccgccgccgccaccgacagggagggagttggggggaacggcagaggggtggggcgggggagccgccggaggggaggggagagggatagggaggtggagggttggagaggcagggagtgaagtggaagagtgcgtgcgggcttaggggacaacagccctgagtcaaatccagactttgctgctcactcgctgtgtgaccttgggcaaatcacgtcacctctctggacctgttttctcatgaacaaagtaggaataattatgcctctttagtgtagatatgaagatgaaatgcagtcatgtgaataaagcgcttagccctgtgcctggcctcctggcttggaacacttttttgtccaccctgtctctagggctccagggttccaacttggacttctagttctatttacgttcccagatctgctcctcaccccagcctctcccctgagtgtctggccacatttttcgccttccttctttccgtctactggcatttattgagccctgactgcatacacacccctgggggccctgcgagccagagatgagacctgcaacactgttccaaatcccgtagagctgcaccgcccagggaacagataggctcccaagagcacgccagtgagatgggtgatggcagagatctgcccaggtggaggtagggagcccctaccctgggctgcagtagggacagagtcagaagtttcccagcagaagattgccttctccaagccacccccaaaagccctcgaactggacacatctcaaatccacataatcattcctgtcccactcctaacttcctatattcaccttggcaattagcatcacccaagtggaatttcctaggtcatcctccaggcttccctacaattacatctgatctgtcactacattctataaa

SEQ ID NO: 1602 - DNA, 1001 bp, Artificial sequence
  DNA replication origin
gaaagggagaaggtcctaccagcctggggtagggactcgggggccaggcactggcgctgacgcaggctagcagggcgccactggctggtccccacccacctcggtgggttgggggatgggcgcaccagcccctcctgggtgagccctagcctggggcttcctatttcgggagccgggggcgtgggccacgtctcctcatgtgatgcgagggctatttaaagcggcagcccgggcagggagccgccgtcggagcccttgcacgcctgctctcttgtagcttctctcagcctagcccagcatcactatggtggacgctttcctgggcacctggaagctagtggacagcaagaatttcgatgactacatgaagtcactcggtgagcaagccgcggggctcaggatgttggcttggggactggctggtggcgtgcctagccccacgcagcactcctgccgcatccctcctggttaagactggggaataggggagcgcggagatggcagcctggcctagagcaggtggggcctgttcagagggggctttggtggtccaaatctggttagagaccacggtagggaggtggtggaaggaggcagctgtgtgggaggctctttccaggaagagggatatgtgatttggaggtaggaggagggtttggataaagaacactgatcacaggaaagggagtgtagccaggggagaaaaagaacaggggcatgggtagtttagaaattggaggagactgaacccagaaagggaatggggcagccagggagtgtacaatgatgtaaacaagtaggaaatacctaggaggaaaaagattagtggggaaaaaactgtggatcagtgaatcagatatgagaaggacgtaagacaggaacctgcagtaagcagcaatccccatctctgcttggttagggaagagaattcttgctggagaatgccctttctcaccagccagtctgaccttgtcctgcagtctatgtatccaggccttcat

SEQ ID NO: 1603 - DNA, 904 bp, Artificial sequence
  DNA replication origin
cgtcacagtactccagcctgggagacacagcgagagactttgtctctaaaaaataataataaaataaaaagttcaatgaaacaatacacccaaagccctcagcatgcaataaatagcaagacaaggcaggtcttatttttactgaaagtgcttagtaaactatacagtgacaaaccaccgcacaacaggctctcgaaaggaggcagcaaattacccaaaagtgcaggcggcttgctagtgtgcacaggccaaagaaagggcggcaggtggggaaggcagccatgggccttgaagagctgaccgaattggcagaatttctgcaggaggggagctgggaacgacctgagctaaagctcggagctgtgcgaagaaaccggaaaagcccagagcacttgcaggggcgggtggggagctagatggtggggtggggtggggacggaggagggccagcaggagacattccgcagggaggggcaagcacgtgtgaggcgggcggggcgcgaagggtcaggcttttgctcaaaacaggcagaggacaaggtcagctcagccgcagaccgagccgctggtgactgtctccgccaccaggcagtgagagtgaagggagagcgcgagctctgaagcccgctagactaagcttgcaatctgagctccattcaccccctcctatttcttgagaccttgtcagttcccctgtgagcctcggactcctcacttgtaaaacgaggacagatgcccgtgccagaagtcaaccagagctttccccggcgtgggcaccagcccaagggcgttttgcttttctagtctcatctctgctctgacgctaagctcaaagagggactgggggacgggaagatatccaccatggcatgcgccctagctctcgggctggtgttggctgctt

SEQ ID NO: 1604 - DNA, 1743 bp, Artificial sequence
  DNA replication origin
gctcttggtttaatgatctgctgtcatcatcttgaaattctttttttttcttttttttttttttgagagggaatcttgctctgtagcccaggctggagtgcagtggcgtgatctcggttcactgcaagctccgcctcccgggttcaagcgattctcctgcctcagcctcctgagtagctacgattacacgtgcaccgctatgcccggctaatctgtataattttagtagagacagggtttctccatgttggccaggctggtcttgaactcctgacctcaagtgatccacctaccttggcctcccaaagtgctgggattataggtgtgggccttatcttgaaattcttaataattgttgaacaggggctcacattttcactttgcactggatcctgccaattttgtagccttctgtgtaggggctgtgtgtgtatggtccaccatgggccagctgcaggcctctgccctagtctctgatgccacgtatgtggtgaggatatgtgggtgaggtcgtccatgtggatgtgtctggatgtgtgggtgagatcatctgcatggatgtgtctgggggtgtggatgaggtcgtctgtgtggacgtgtctggggatgtgggtgaggtcgtccgtgtggatgtgtctcggggtgtgggtgaggtcatctgtgtggatgtgtctgggggtgtggatggtgaggtcatccgtggggatgtgtctgggtgtggatggtgaggtcatccgtggggatgtgtctgggtgtggatggtgaggtcgtctgtgtggatgtgtctgggtgtggatggtgaggtcctctgtggggacgtgtctgggtgtggatggtgaggtcctctgtggggatgtgtctgggtgtggatggtgaggtcctctgtggggatgtgtctgggtgtggatggtgaggtcgtctgtgtggatgtgtctgggtgtggatagtgaggtctgtggggatgtgtctgcgtgtggatggtgaggtcctctgtggggatatgtctgagtgtggatggtgaggtcatctgtgtggatgtgtctgggggtatcgatggtgtggtcatctgtgtggatgtgtctgggggtgtcgatggtgtggtcatctgtgtggatgtgtctgggggtgtcgatggtgtggtcatctgtgtggatgtgtctgggggtgtgggtgaggtcgtctgtgtggttgtgcctgggggtgtgggtgaggtcgtctgtgtggatgtgtctgggggtgtggatggtgaggtcatctgtgtggatgggcctgggggtgtgggtgatgtcatctgtgtggaagtgtctgggggtgtgggtgaggtcgtccgtggggatgtgtctgggtgtggatggtgaggtcctctgtgtggatgtgtctgggggtgtggatggtgaggtcgtctgtgtggatgtgtctgggtgtggatggtgaggtcctctgtgtggatgtgtctgggggtgtcgatggtgtggtcatctgtgtagatgtgtctgggggtgtcgatggtgtggtcatctgtgtggatgtgtctgggggtgtgggtgaggtcgtctgtgtggttgtgcctaggggtgtgggtgaggtcatctgtgtggatatgtcttgggttgtggatggtgaggtcatctgtgtggatgggcctgggggtgtgggtgatgtcatctgtgtggatgtgtctgggagtgtggatggtgaagttgtctgtgtggatgtgcctgggtatgtgcatatctgggatgt

SEQ ID NO: 1605 - DNA, 1523 bp, Artificial sequence
  DNA replication origin
gacttctcagggctgttgtggggctcaaatggtaccacgggggaaagttgggcatgtgctcgggttgtttgtgaggccataagggaggcccatattgtttggaggcttgggggaatcaggaggatgttcattcctaatggaaccaggtagtgggttgggggtgagggtggtggctctcttcactgagaggtatggcatgtgagcaagcttcaaaggggagaaagagggataaggagaaggacctttaagaggagggcatctgccaggtgcagtgcctcacatctgtaataccagcactttgggaggccaaggcaggaggattgcttaagcccaggagttcgagactagcctggacaacataaggagacctcatctctacacaaaatttttaaaaaattagctgggtgtggtagtacacactggtggtcacagctacttgggaggctgaggtgggaggatcacttgggtccaggaggttgaagctgcagtgagccatgattgggccactgtgttccagcctgggtgacagagtgagaccctgtctcaaaaaaaaaaaaaaaaaaaaaaaaaaagaggagggcattgtgtgggcaaaagtgcggaggaggaaaagtatagggtgtgtttgtggaacagtcctggtgcaattaatggctaagcctggcgcccagtgaatcagccaaggatgcagtcaaccagctctttggccctggggccagcttcgaggcacagagacttctttccctaacattatcttgtccagaggtggctgaggacagggctaagggtgaagggagactaattacagagccctacttctgggtctctcacacctacccctggaaagccatctgtcaggaatgtggccgcccctccccaccttctgacctccttagctagggaccagtttgggcatccctagggagtgataagccaccaagcaggggtggctgtagggagtgtgtagctcccagcaggctgttgggagtcagtggagtttgaagaacagatggagagaagggaggatgggtttagagtgagaggctggggtcttagaagaagcagtaggtgggcatggtggcatgcacctgtagtcccagctactcaggagcctgaagcaggaggatcacttgagcccaggaggtcgaggctgcagtgagctatgtttgcaccactgcactccagcctgggtgacagagcaagaccctgtctcttaaaaaggaagaagaaaacagtgacgatgggggcttacatttgtcaagcacctaccatgtgttgtaaccaccctgtgaggtatgtatcctcactttacagaccgggaaactgaggctcatagaggtgcagtgacttgccgaagtttctttatccagtcattcagcattcaacctcagcatctacgtattgagcagaggccctgcgccaagcactgaggagtcagcggtgaccacctcttggcttctgttcccaagggtgacagtgtcctggggtcacacgggctcaaaccgaggtcgatttccgaacgc

SEQ ID NO: 1606 - DNA, 1060 bp, Artificial sequence
  DNA replication origin
atctccacccccaggccagcccagcagggcctgtgcctcaccaggtgcaaccgatggaaatcaggtccactgtggaagctctgcctccctcaccaggaagcaaacccttgttggcagagacctggcccaaaccttgaattctttgggctgggagggatttcaggcaccagcttgattcctcctcctgcacacgcacatgcacacgcacacacacacacgaaaaatggaggcctaatgaggcgagaggctctcttgcctctctgtgctgtctatgctgatctcattctcagaaaaaggctgtaaagtaaatctctagaccctcagctctcccctacaccccctcctctctctctctctctctctcacacacacacacacacacacacacacacacacaacccgtcagggacaaaggaaagcgagtcccgagattcagcagccgctgcagccccttctccctctcagggcctctttgtgtggggccagagggggagggggctgcctgaatgaacctcagatttaatgaggggaagaggaaaggagaggggggctggggaaagggaagggagaacgggcctcccagccggggtcttgctggagcccctcccctctgcggctgcagctacagaacagaggttggcctccccacaggtcccgaacccgcgaccgggcactccccgcgcacacccgaacctccctcgattcctgctctcccaacccagagttccgcccggtggtccgtgacgacccgcacccgcctcactcgagggcagctaagaaagtccggggctccctccgctcccatcccagtctccgcgctggggcccagatgatccggggcgagctggggaagtgcctgagaggcagcgcgagccagactgaggacggtaaagggaccgcagagagactgagggacggacgggcggacgggcagacggacagaagacagcagacggacaaagacagtcggacgaacgacggacacagacaggaaccagacaaatacgaacggacaggcggagcccgagcgacaggaacaggcggactggcaggcggccag

SEQ ID NO: 1607 - DNA, 849 bp, Artificial sequence
  DNA replication origin
cggtccctttaccgtcctcagtctggctcgcgctgcctctcaggcacttccccagctcgccccggatcatctgggccccagcgcggagactgggatgggagcggagggagccccggactttcttagctgccctcgagtgaggcgggtgcgggtcgtcacggaccaccgggcggaactctgggttgggagagcaggaatcgagggaggttcgggtgtgcgcggggagtgcccggtcgcgggttcgggacctgtggggaggccaacctctgttctgtagctgcagccgcagaggggaggggctccagcaagaccccggctgggaggcccgttctcccttccctttccccagcccccctctcctttcctcttcccctcattaaatctgaggttcattcaggcagccccctccccctctggccccacacaaagaggccctgagagggagaaggggctgcagcggctgctgaatctcgggactcgctttcctttgtccctgacgggttgtgtgtgtgtgtgtgtgtgtgtgtgtgtgtgtgagagagagagagagagagaggagggggtgtaggggagagctgagggtctagagatttactttacagcctttttctgagaatgagatcagcatagacagcacagagaggcaagagagcctctcgcctcattaggcctccatttttcgtgtgtgtgtgtgcgtgtgcatgtgcgtgtgcaggaggaggaatcaagctggtgcctgaaatccctcccagcccaaagaattcaaggtttgggccaggtctctgccaacaagggtttgcttcctggtgagggaggcagagcttccacagtggacctgatttccatcgg

SEQ ID NO: 1608 - DNA, 744 bp, Artificial sequence
  DNA replication origin
tatgatctcagcttactgcaaccaaccttcgcctcccaggttcaagcaattctcctgcctcagcctcccgagtagctgggattacaggcacccgccaccacacccagctaatttttgtatttttagtagagacagggtcttgcgatgttggccaggctggtcttgaacttctgacttcaaaccatctgcccgcctcagcctcccaaagcgctgggattacaggcatgagccgccatgcctagctgcctgtgctcttaatcacagagttcaggttcatgtttttatgtgcatgtgtggtgaggggtggggaaggacaggcaacaggggactaggcccagtgaggtgattttgggtaatattgcaatgtggaacatgaaagagggtgtgggctgaaaggtgggtggctggcaggtgcagggctgccgtagttcaggttcccagggctccgcaggagtcctgtctgaatactgaagaggcgctgcctgtgcggagatgctgggaaggaacttgtcagagggagggcacagcgacggcaaaggccttgtggtgggagaggctgggcagactctccagacggagagcagggaggagggggacagtgggccaggtggagatgaaggaattcagtgtgatgagatggggtttcagcaggggaggagggcaagtaatctgaggggtgttaagagaaagaagaattaggactcagcctttggttagtgaggtgggtggtaggtggcctgcttg

SEQ ID NO: 1609 - DNA, 979 bp, Artificial sequence
  DNA replication origin
tcctgagtcactgagactacaggtgcataccaccatgcctggctacttaaaaaaacattttttttttttttgtagagacactatgttgcccaggatggccttgaactcctggcccaagcaatcctcctacctcagcctgccaaagtgtttggattacaggagtgcaccactcctggcctgattaccttcattttacagatagggaaactgacagccggggaggaggccatgagcacatggtggccggtggccaaggagcttggaactctttccctgcccctggttctctgtcccttcccctccccgacctggcacagctgtttttcctgctgcttccacacccacagctccctggcacatgcactgctgagagcccaggggcacaggtctgttcttagcatggttcttacagcacaggcagcaaagaagcatatgcaacccatgagggccaggaccacccaatctgggctcccatgcatgagatatccatatggtatttggtagatagggtggagagggtggagagggtgaatagggtggatagggtggatagggtggacagggtggacagggtggatagggtggatagggtggatagggtggatagggtggatagggtggatagggtggacagggtggacagggtggatagggtggatagggtggatagggtggttagggtggatagggtggttagggtggttagggtggttagggtggatagggtggatagggtggatagggtggatagggtggatagggtggatagggtggacagggtggacagggtggacagggtggacagggtggacagggtggacagggtggacagggtggttagggtggacagggtggacagggtggatagggtggttagggtggatagggtggacagggtggacagggtggacagggtggatagggtggatagggtggatagggtggttagagtggagagagtggacagggtggagagggt

SEQ ID NO: 1610 - DNA, 905 bp, Artificial sequence
  DNA replication origin
gcctggaattgttaccaccgttggtacctgccctgaccagtcaagccccaggcctcggggtgctgtggggaggagcatgtgctcttgagtcagccaggctggcccagatccctccgtaccacggcagccgcggggctgctgtccggctccggatgggtccttctcttctctgggccctggttcctcattcattcaatgggaacaatgccacccctcctaggctgttgtgaggatcagaggaagcagcccatgcaatctgcctggcacagcgagttcttgagaaataacatcagcccccatctcacaagggcagagagatgtgagggagactgacaggctcctggctagggccccaaggcctggtcttgttacgatgatggactgcaggccattcatcccttccatttgtggggataaaaaataggtatgaaggtgctggggatgggtgctggggacacagcctgtctctaaggctctcctgggttctggggtgagtgactagtggggctgcacggggacctgtggggtcaccgaggaggcaggacaggcatctggaggatgtgtaggagtcagctgggccaagaggagccacagcactgagggcagggggacaacacaggagtcggagggtgtggggttcaaggaccagggagaagccaagatggccagggcacagagaggggtggggtggcgaggttagtatgagcttggagacatgggccagaccaaatcacacaggcccttgagagtcatggtggggagaccagacctaatcctgctggtagtggggagccatggagggttttagagcaggggagaagtggtgaaggtgtgggctgaccatggaaaggccctacatgatttcgagcccagcaggggcatgtcattttaagattgccatttta

SEQ ID NO: 1611 - DNA, 1552 bp, Artificial sequence
  DNA replication origin
catccatccatgcatccatccatccatccatccatccatccatgtatccatttatccaaccatgcatctatccatccatccatgcattcatccatccatccctccatgcatccacccatccatccatgaatccatccatcatccatccatccatccatccatccgtccatccatgcatgcatctattcatccatccatccatctactcaataaaagtgtgaggtcctagtcttcctggcactgctccagacacaggtaacacatggtgaacaagatgggtgagaacccacacgtgtgcaatttaccttccagttgggagaagacggcataaaaaaacatataaagaaacgatgaagtggaagcattggtgctgtgaagagaaattaaacaggatgaagggatagtgaatggtagagggcggggctactttaggtagaggggtcagggaggcttctctgaggagaagagacttgaagggaagagggaggggctgtgcggttggctgggtcgcagctacaggcattgaaacagcaagttccaaggctggaatggagactgtaccaaaaaaagggggggcgtcaaggagtcctgagtgggtgagcagagtgagtcagagggaagtgtaaggagatgaggcaggagaagggtccccactgctcctgtcaagccttgttgtgtcgggacttgaactttattctaagcaggtgaatgcggtgcatgcaagagagacagagagaatgtggcaggaccaaggaggaggctatgccacttatgtcactcctggcaaaaataagggggcatggagtaggctgtttgtggtgcagatggtgagagcagtcaggtccagcacagattttaaaggttggacccagagaatttgctgcagaatcagatgtggggtgtaaggcagagaggagtcaagggcaacttcaggatttggggccggaactgccattagacagacagggacactgagggagaagcaggttaggtgggattaaaatcaagagttcaagttaagtttgagcagcctgttagacctccagcgagggccagatagaagaatctggtttccagggagaggtcaggatgagagatacacacgtgggaatgattggcattgggtggactttatattctctgggtcagtgagacagctgggaagtgaccacggatagagaagagacaaagtcacagaaaccaagagaggtaatgttgcaaggacggaacactcaactctcaaatgctgctgagacgtgggctgagggctgagaatggaattgggaagaaccgaggtcactggtgatcctgagggtttcagtggcaagggcaggtggactgcagtggggcccggtggggatgggtggagcatgggcccctctcccggagagttgcactgtaaacgagggcagacatatgggagtgcagctagagggagggaacgtagggtcaagggagagtttattctgaatgagagagatcacagcttgtttttaggctgacgggcatgatccatagaggggaaagtaattaagatgcagaagagaggccg

SEQ ID NO: 1612 - DNA, 1796 bp, Artificial sequence
  DNA replication origin
atacaaaaattagccaggtgtggtggtgcacctgtagtcccagctacttgagaggctgaggtgggagggtcacttgaacccaggagtcggaggttacagtgagccctgatgggccactgcactccaacctgggcaacggagcaagaccctgtctaaaaaaaaaaaaaaaagaatacaggagtggggtggggtagtggggctggagacttgaggtgtcctggctttggtagtcttgagtgggggcgccagaggcctgggatctgcagctgtgctcttcccaggccaggccctgccccgtccccactgggaggtctgggggctccgccagtctcgcctgcccgcggctcccaggcggggcgctgcgtcagcggaacccgcgccgggattagcgccctggcgcccgcctgcgccccgggctctgtcgggcgaggctggggtcaccgccccattggggcctcttccgccggcccttagcctggatcccaggccggaccccgcgtggtgcccgcagcctcagtgatgacccatgtcctccatgcccacgcggccccagacgcccagcacgaagctctcgatgtcgcactcattgacgccgcgcacgatgcggaagtggcccctctcgccccaggctgggccccaggagttggccgcagtctgggaataaggaggggtggtgagaaggggaatgggagtggggcgaggggaagagggggcggggaaagggtcagcggcctcacccagtatttgagcgtccttccatctggcagcgtctcctctccccatctgtgggcagagcagaggagggggaagggagctgggtctacctgctctcaggagctccaatcccggaaacctgccccatccagcccccagttgcctttggagggttgggtacacccttagggctcaggcaggtctctgtacctctctgcatctccctcactctcacatctgtaagtcggtgcacccaggcccagcatgggagggggtggggcaccaaggggacaagtggaggcaaggtgagcagaagaggagggaacctgggtcctccagagacccacctcctaggggccagttctatgggaccacacatccacctgccctccctcacttggggatccagggaggggtaggtgccaagggccagaaggaagacactctgagaatatgggtatcttagagaccgccaattcccaccgtaaagcacatttcaccgagttcattgaagtcagtgatcctaacatctatattccctaaatcggatagggaaactgaggccaggggagcgacctcccaggtcactcggtgggtcaggcagagctgggacaggtgctgaggtggggagaggttgagaaactcttgaggctctcttcatattggagttattttatcccaatgtaaggaaggaacagttcctaaaaaagccttcagaggctcccaaccttcaattcgacccagggcaagtcctttctctttctgagtctcagttttctccctattgaaatgatgagagcagtcctggctttttagagaggttgtaagaacccaaggcaggctccagagcccctagcacaaaccctgctgtcccaaaccccctctgcccacacgcccctcaccctgtgatcttgactgagtgggtcccatgccggcggtatctctctggcctcccaaggctcactggcgtgtggctgtagatgcctcccttgtataggaagaagtcctcatgcacctccatgagggctgtgggcagatgtcaaggtagggtccactcagcccgttggcacaggcactggagc

SEQ ID NO: 1613 - DNA, 1533 bp, Artificial sequence
  DNA replication origin
gatctggacccctttctggcatcaacacgggtccgcagcgccagggcgggcggagctggagccggagccttagcctcagccttgagacccggcgggccgcgcccgaccgtccccgccccccagagcttccttggaaggtacccgtagaaaattccagcctcgcggggccaccgagctgcctccgaaccgggttttaccggcggggcgggtcccggggccactgagcgggtgcgaaggggccgccgccccttcggggctccccgccggccttggctccctggggaccggcgggcgggccgctggagccgggctctggacgtcctggcaaacaggaagcgagacaaaggcggccacttatccggcgcccgcattcctttcaggtgatgcccgtgaggcccgggggacgcggcgatcctgaggggctgccaggggcccccggggacctccctgccgcagtccctcggcgactgagggtgcccctgcctccccactggctggaggtggcggcggggaggattccttgcgctcggggatccccctcccaggcacaggcccttgggctcccagaaaggaaggagcaccagcctggcgtctgtgcccggggggacgcagtggaggcttgggaggggcctggaggtgaaagaatgggccatatccactcagtcattccatacattggagggccaccctataccagggtttcggtgtgggtaccaggacccactaatgaaacagaccatccctgccctctaggaacttccagcataatgcggaagttcaatagatcccagatacctgaaatattgggtgaagggcagagtgcagatgatttgagggagggtctaacccacgccggatggggatggggtggcctgggctccttgcacagcctctggcacttcagtgaccttcacaggcactgtctggaagaaggaaccttggagcgggacaaggggtgggtggcatggaagggcatctggcccggagagcagcgtgagcgaatgtctggcagtctgcatgtgtaccgggcatttgagaggcagcaaggagctggtgacgaggttgggcgggtgggttctgatggccttggagccaggctgaggcctggcttattgtgctggcactgggaatctgaggaggtggggtgggaagcaggctcagcttggcccaagagcaggccgaggagaggccccccttgcctggatggcttggagagactgatctacagagacagaggctccagcttctgagggctgtgccccccttgcctgctgggcactggcaccggttcagctgataggagtgcagggctcccccttcaggcggcagctgactcagcgtctgaaaggtggttcccacggttcaggtttctctctagggccaaaggccatgccatccatgcccctcccccaagtgggtcagtgcccagggcattgacaattagggctgaatggaagttaggatttccagtccccccacccctgccaaccagcaacacctcaggcagtcctttctgctgtctaaccactgcca

SEQ ID NO: 1614 - DNA, 733 bp, Artificial sequence
  DNA replication origin
aggcttcctggagcagggacatctccatggagacctgaagaataagaaggtagcctgcaagggggattgtggtattcgaggagaggcattcaaggtcaggaaacagcaggtgcaaaggtttgaaggttggggattctggaaatcacaggtaggtgaagggtgactgcctgagcatcatgcagtcaccttggccatcccctagctcagcataggacattcctaacatgtcaccctctgaaactcacactgtttccctcctgggaggtgactcctgggatgcaaccaccatctttcccattgcagccaaagcccttttcaaaggctctgaagatgcgccgttaggcataggaggtgtgggagaggaactggagcagcataagggagggggccagtgaccttaacctctgcagaacaggaggatggactgaagctaaacccaaggcagaactttgtccttgggcaggtatggcatctgcatggtgtgtgatgtcttgtcttccctaggtgctggccgaggtaggagaatgagtgaagggactcagaagaggggctgctgtgtgtgtgtgtgtgtgtgtgcgtgtgtgcatgtgtgaatgtgtgggtgtgtgcatgtctgcatatgtgtgcatgagtgtgtgtttgtgtttgagtcttgaattcaagtaagggctgtggtgtgtgtctagggaatccagtgtgtttgagtctgactgtgcatatgagcagggggtgg

SEQ ID NO: 1615 - DNA, 1292 bp, Artificial sequence
  DNA replication origin
cgccggcaggcccgctccgtccgcgggaccttcctgcacctcgggggctggcggggctccgggaaggcgcgggggagcgagggcactcggagcctgcctagaggagagcagcgctggccgaggagccagtctcccagcacccaggttaccccccgagactcttggctcctcccatccctcgccgcgggtcctttggaacccccatcccaggcctgggggtcccccacaccccgcacctgttggctccgggacccgggcgttctcggctgctggtccccggacctggcaccggggacttcgccttcctgcgaggaaggccgagcctctaggggccgggactgcaggagggggccggggcagccccctccctaggctgcgctgcctcggctcgcggggctcagcacgatccgcggcaactgcgcgggctgtggctcggcgcgggctccgccgggctgcgcgctgcggggagggagggccggcgggaggggcagggcggggtgggagcccccagacggtcttggctccctgtcttccagccccgagacccgcagggcggagggagacgctcgttccttctagcctcccacttcaagcttccatcccacctccattcatgcgtccatccgttcattcattccatcctcattcattcaacatttatgcccctggccaccccgcattctgggcgcacttagtgtgtgccggcgggcctggcagcttcagagggccacagtgcagaggtggagcccagccccgcctctccttgctgcctcacctaactgaggaggaggatggcacaggtgggtcacaggggtgagacagagaggatgcctgcaccgcctccagcctagctccggatgctgctgtaacagctagctcccaacgatgccagagaagcctgttctcccatctcccagccccccatcctatctgcccccagtttctctttttgttatacctactgttccccccaaaaatcaaggacgccggtggggacagaagtgggggttcgttaattccacaaataacgatttattaagctgtgtgctaggcagtgagttctaataatacagctaccgtttggataatgcatatgatgcctgctctcatttaatcttcatatcaacctggtgaggtggtcgttattgtccccattttacagataaggacactggatccacatggcgcaatgacttgcccaaggtcgcacagcagaggcagagctgggctttgagcctctgcccctctcaggcctctagcctctctcaccagacacagtctccctcccctgc

SEQ ID NO: 1616 - DNA, 1148 bp, Artificial sequence
  DNA replication origin
gggatgggggttccaaaggacccgcggcgagggatgggaggagccaagagtctcggggggtaacctgggtgctgggagactggctcctcggccagcgctgctctcctctaggcaggctccgagtgccctcgctcccccgcgccttcccggagccccgccagcccccgaggtgcaggaaggtcccgcggacggagcgggcctgccggcgttcagtggggtatgaaggcgtcccctccccttccccaggggtctccagggatccgcaaccctccggcacctggccggggtcgtcctagcccagccgggggaaggaggggctgagtgcgggaggaggggaggggcggggagctgggctggctggatttatgaatggagagcgacccgcgcgccggaacagcggctcctggcggccgtcggggagcgtcgcggccctggggacccaaaggggcctcttagggggcctggatgctccccttgctcgcaaggggtcgtcagtccctccgcgcaccacccccactgtgtgtgtgttgtatgtgtgcgtgtccgcgagtgcccaccggagggtctggcaggtatggcgggtggggcttgggtctctaacacctcccttggcccgttttcccaacccaaagttaaagcctctgaactggctcaagaaatatttgcaatcgggatggcttctcctcccaaatctacggtgtttggtgggttcgaacagacctggcttaagagctttgtgaccttgagcaagagactcaatctctctgagcttcggtctcatctgcaaagcagggtaccctaataatggtaaccggaaacgtccccgaaactaccttctcgtaccaggttcttggtgaagcacttggcacgcatcggagctcattactcctcatcgtggtcctgtaaggtatgtagggctgtcaccccattagacagatggggaaaccaaggctgaaagaggccaggtaagctacccaaggcaactggtgtggaattgggatgcaacccaggtctgtcttcctccaccaatttcatgactgtgagaattaagagggaacttatacgcaaagcgcctggcacaatccctaatgtttccttccttctctcttttcccactccctcctttccttcctcccttcaggaagttt

SEQ ID NO: 1617 - DNA, 986 bp, Artificial sequence
  DNA replication origin
attatagacccccagtggaccccagctccccagagccaccctccagagccaaggcctgccaggccccacgttgagcacaggagttgggctgtgaccagatgaggacactggggcccccagagtgacaaagctgagactcacccaggctcctgaagctagtgagtgaggtagtggtggaacctgggcttgaacacacatctatctggtgacaaacctcacaaacctcagatctaggatcagccaaactgggactgcagccttacagattcaccagtttcagtgaggccccagtgggattcagcaaactccatcaggcatttactcagtaatagatatttctcaggggcctgtggggtgccaggctcccctctgaggatgtctccatgaacagagcgcagttgccctcttgccctgccgtgggggagggagctgccagatgaataaacaagtgcctaggaacgatgaggactgggactcatggaggaaatgggacaggggaaggggctggagaggtgtttgggcaccatcgaagcggaggggcaggaaggcctctctgagcaggtggcatatgagctgagagctgactagcaggagggagggatccctgtggctgtctgtactggggaattccagagggagaggctgggtggggcactgcaggaacagcttccagccatcagatgatttggcaagggttcaggggacctaggaaggggggaagggggcattctaggtagaagagaaagctgtgctaagggtgcaaaggcctgggggtgtgagggtatagagtgtgtcagagaacagcagtctgactgagcaaggcggaagatgagaaggagagagggaggagaagtgggaaggggtggctggtgccagatcacaggctgcctcaaagaccagcgttggtggaaagtgtgcgccccactcagaggcagagggagccgcataaggtgtttgagcaagagagtgacataatcagagctatg

SEQ ID NO: 1618 - DNA, 782 bp, Artificial sequence
  DNA replication origin
agggagcagggtagagaccctcctcccaagtgcgtggcacccatgatgtggctgccgcccaagcctcggtggtcagctttttccaattcctctgcctaacattcccagtcagtctgtccctaggtctgtctgtactgggaggaggagggtgggaaccccctccctcctccgtgctaaattaaccccctctgctctggcctgactcccagagaagtgagactgagggagtccccttattcctccttactccatgaggttggaagggctcaaatccctggcccctgctctggctttgcggttccaaatgtgctgtgtaaccatactccgttttctcatctggaagatgggatcgtgagagtatatgcctcatagacctttgctgtaagcaggaaatgggccaaaggctgtaagcgcttagcacacggtctggcacatgagaggagctcagtaaatatttgctgctattatcgttattactgtgatccctggcaggggacgggactggatttcaagcctttacaccagcactggggagggacctgctttatattcacggtccaaggacgcaagaggaattgagctgggctgaaagattggagctctgaggaggaaggagccggtaatgttccgagttctgcccagaggcagggccgttgaccaaggtggaatccccaccaagggtctcctcccgctgtagaccgaaagcaaatttattggcaccaaggctgaggatccacaaagtaggttcaagaggccatgagatgctgggctgaagagggaga

SEQ ID NO: 1619 - DNA, 757 bp, Artificial sequence
  DNA replication origin
gtgagctgcatgtgcagtgcctgtggggcatcagacagggagaggtgccctgttgcccccagaaagagagatgtggctgggttggggaggatacacgtgtgtgtggtaaaggcaggagaaggtgccggggcagagtgtgagtgcctagtattacagaagccagggtaggcagcggagagaaagcaggtagggagaggagaggaaaaccaggagagtgaatgccatgggcccatggtggtgagcatgcccacaggcctgggagatccagatggtggtcctagtatcaccttcgaaggcctgggagcaattcccttcacctccctgggtctcagtttccctatctgtaacctgggaaagttggccttggcttcatgggtctccctgtgctgacattttaagactctcaggcctctttcttgagtagcactgggtacagtacagcttactggggccttgaaagtggtctgggacaaggagggccaggagaggcatgagggagcagagaggccagggaggcagcgcctggtttggcaggaaaaggggcagtgtgaggtcaaaggaaggtttctgaaagcctgaatacctgtgtttgcaggacaagtggaaggttccaaggggaggggtagctatggctggcagagagaatggggcaagatggggaaggatgcagggtgggctctagggcacagagaatgagcactggctctgattccatgtgggcatctgggcctgtcatgttggaagtccgcaccatgcc

SEQ ID NO: 1620 - DNA, 1020 bp, Artificial sequence
  DNA replication origin
cccaggaggccaaggataagcataagggacagttgcgggtaccccgggctatcagcttccacagtaagggctgcccagatggggcctggggcaccctggtcggggcctcgatcctcccggtctgcacagtgaggagaagccaagggcctggcaggtgtggtgggcacacacaggcgggagaggcccagccccacctctcggcgcaggaagcagtgcacagcagtgatgacaaagccctgcgcggagttgaagacagcaaagagggcctggaagaggacggaacggcggtctgtcatagccaggacggcagacatccaggtgagcgccagcaggggcagcaccacgcaggagctccagagtgaggccctgaggggacagtggcagagcccatcagagtgacactccgggggacaggatggcttgagcctaggcctccactcagctggagctcttcagctgcccaagactgggagggccccaaaccccagggcctcagtaatgtccccaagcagagaggggctgaggagccagagccagagaaacagaacagagaccgaaagcagcgaactacggggtcagagcagggaccaggaaggtggggaaggacacgcagacacagtgggaccgagccacagacagtggaaagggacggggagagagaagaggaggcagacagatgcacagaatcacctgaggagctttttaaaaatgcacggggccgggacggcatccccagagcctaactgggtaggctggggagggggactggaagagggacaaagcaacaacaaccacagtgagagaacgcatgcgacagagacacccagacagaaagattaaacaggcagagcacgcgggggacatccagagcacgaatcctcagggagaagacagggggccaggaccagtgaagcagaactccccccacacacagagaagacgccaggctcccacggactgctcagagccttgggcagaaggctcagagctggggctaaaagctggggtcgggccaggcct

SEQ ID NO: 1621 - DNA, 722 bp, Artificial sequence
  DNA replication origin
gtagatgaggggacagggcacccctgcagctcccccctcccaggaacccatctgactgtctgcccatcttccccagaccctggagctggcgggctccccctcggtccccctggtgatcggctgtgcagtgtcgtgcatggcgctgctcaccctgctcgccatctatgccgccttttggaggtaggtctgacacctggctcttgtggctgggggagggggggcaggcgcagaaggtggccagccacaccaggtcggatggggcagccagcgcctctgtccctgcctgctgtgccccggcaggttcataaaatctgaacgctccatcatcttgctgaacttctgcctgtccatcttggcatccaacatcctgatcctcgtgggccagtcccgggtgctgagcaaggcaggtgcagacttccagggctgccaggggtgtgagtggggtggaggggtgagggtggagagcgcagtgtgtgtgtttgcttgtacgtccattagtggtggtgtatgtgtgccccatgttgggattagagtgtgtatgaaatagtgtgtgagaccatatgtgaggacattggagagggggtgtgtactcaagtgaggaacttctgtgaacatcagtaaatgtgtgtgtgagctgagcgctgggtgtgtgttgggcaggtggcattgggcctccttgtgtctgtgagcgtgtggaagcctgagtgaggcctccttttgcc

SEQ ID NO: 1622 - DNA, 1034 bp, Artificial sequence
  DNA replication origin
tggttcccctcctgttggtcctggcccccttgtccaggcgtccacaggggctgtcctatgtgaattaggaccggaagcctgtgtcttgcacatcccttcaaagggtcgcgccttggtggggccctgggagatccccctggcaacagatcccggggcagagccaatgaggagcagccgcagagctgcggagctcctgattggtgggcggatgggcaggcgccggtggtgggcggggccatggtgccgcccagccaccggccacgtgcttccttgcagtgcacggcgtgtgggaggagtgggggtcctggagcctgtgctcccgcagctgcgggcgggggtcccggagccggatgcggacctgcgtgcccccccagcacggcggcaaggcctgcgagggtcctgagctgcagactaagctctgcagtatggctgcctgcccgggtcagtagcacccgtgggcttccatgagggcgctgcccagcccggtggggggtcgggagacctggggaggcagtcaggtccagtgacctgcccctgggggccccttaaactttgaccaagcatggggagactggagaagtatgcctgcctgtgtgcgaggtgaccccctagccctgacttgacccctagccctgacatgagttagtaccctgtgacgccatcaagaggggacagctctttctccaagccctgggctgcccttgcattttggtgcatggccagctggactgtgagaggacacaaagctgggctgaagtgctggcaaagatcagaagacacccctgcagccccttcccttagccagaagtgagttgtgccttgtgctaagaggagaggtgtcctgtatttctggagctggtggcaggcaggcagcatgaggcccaggcaccacctgctcactccagccttcctcataaccccctcccctccccactccagtgggtctggcctggctcaaatctgaatgcctagcaggctctgggtcttcctgtggttctccacaccaccagccctcacacatcctgctcaacagc

SEQ ID NO: 1623 - DNA, 1161 bp, Artificial sequence
  DNA replication origin
tggccagagcggagtgggtaaaaacacgagccttggttaccaggatgcaggcactgggggaatgatgtgcccagaaccgggcccagtagcatgggccctggtctgatccatctgtgcccccagtgccctgcaccgggctggcatggtacgcagagttgggcatggtgtggggaacagccacatttgttgaatgaaaggaggaggcaaccaaccattttggagattaatctgcccaagtcccaggcaggacctaaccctgcaggcaggtggggtggggaggaggatgggcctacctgggcaggtggctgaattgttgcagggcctggtctcccgcaggggcccgctgcacagggtcccatagggggaggacacacaggagcgggtccgcacctgcagaccctgcccacacgtcagggaacacacgctccacggggaccactcctcagccgccgggtcgcctacgagagagggacagcgtcggcggcagggggcacctcccaagcactcagtctcatagggatagggggagtggcagtaaggtgggggcaggcatcagagggctcctcctaccctgaccccaagtaacaggctcttcaggaggccacccagcccttcccacaagcttcatgtggcacagacgcgactgaactgcaggacagagacagacaggcacacaccaagcacacacaccaccagacgcacacagtcgggcccccgccgcagaggaagggaggcgggcccgagttacctgtctgcgccatgtatagcccaggctcatctgcagacctcggccactgggttttcactttcggttcctcttccggctcctcacctggaacacggaggtggtggcaggggctcagcaaaggccagctaggttctgttacagtggcacagtgaaggcagccttccttgccctccgcctgagggcctggaaccaactgcatgatgctctctcaggatcacattctgccctctgccccaccaccactatttcacagacaaggaaactgaggttcagaaggctacacaggactaggccctgacctcacagtcatcttttccacctcttgcctcagccagatgtgggggagatttaaggggcatggctgcccatatgaaagagctctgggaatgcttctgtgccaagtgcggcccata

SEQ ID NO: 1624 - DNA, 924 bp, Artificial sequence
  DNA replication origin
gtccctttggtgcaggctggcatatcaaatctgaatgctggtgctgtgggacggagctgatactttgcatggggagtcaagattacaaatgaccattcctcgtgagccccattgtgggggaagctgggaacaatgtattcattggtgcttatttcttggtatttcgctgggctgagttttgtgctggcattccctgggggtcaaggagaggactcacagccttccctcaacgggcttatggtagagagttgggggtatttctgacagtcagaagatggacccatctgtgatgaaagggcacatagaagagggggtggccaactctgcctggggagttgacaatatggaagtttccatagatgagaggtcatttgaggtgggttttgaaggtcaagtaggagttttctaggcaaagagggtggggaaacaagcaagtagagatttgagagtagatggtgggcttcttggacatgctgaatttgatggtcaggagaactgctcaggaggcaggaggatatccaggaatggagcacaggagaggcagggcctggggatgatgatttgggagcattggttcagagggggttaattaagcctggtggggagcacgtgcagtgaaaacaggacaaagcatggactcctgatatgggaaacagcaggaaaatagacccctcaaggagatggggacagagtagctagagaggtgggaaaccaggagagtgcttcaagggaggacgagtcagcaggaccaaatgctgctgaggggtcaagtgagaccaggtctgcaaagtatccacaggatttagcaacaaggaggacactgatgactttatcaagagcacgttcagcagagagatgtgggcagaagccagactgcagtggattaacaggggaggtgatatttgagccaggaagtgagtgtca

SEQ ID NO: 1625 - DNA, 869 bp, Artificial sequence
  DNA replication origin
ttcaaacccatgtgtgttggtgtgtatgtgaggggaggttccctgagctgctgtaagtgggggaggggaggccggttataatgagcccctacctcccctccactgagccgcagccatggcctgaattttgcggcttaaaaataattgggggcagcagggggattggatgtcactcatcatcagccgctggcttggctagtgccgcagcaggtggggcgagctgagcagtgtgggacaggcatgatgtagggtgggaaagaccaggggtctgatccctttttcagctctgaggaggagggtgggtggttggggggagaggcacagcctgtctggcttccgccgaataactccatgtgggtcttgggaggagggtggggtggctcctctgcagtgagtaggtctgcctggagctactccaccatctcccccagcccctgtatggctgggaggggaagatgcttgcttgggcctggcttggaggtgcagcatgaagggatgtgggatctggagcagtggggagctccatggatgctgcacagggactggaaagttggggttctaaattctgtcccccctctgcctgctgtttagactcctgaagacccaaggggaagtctgttccctgggagcaactgtgtcttgggagaatctagtcatacctgtgaattgtcctgtgtttctgattcagtccccagagctaatagctggtccatctggcctgaagcctgagcagcaagcctagggaaggagcagaggctactggtggagggagacaggcctgggctgggcctcagatcctgggcttgcgtcctctgtggccacctttgtgtgatctggagcgggttgtctcccttttcctagccccatct

SEQ ID NO: 1626 - DNA, 929 bp, Artificial sequence
  DNA replication origin
gtacctcagcaggcaagagggcagcgtttatgaggtcctgaaaagacagagaggagacagggctgtgagctaggctctgtgctgggaacttgttgggaggctgatgaggtgtctgccatccccagggcaaggctcatggtctgcattgcacagagagggaaacaggctcaggggggttaatcatgactaagagccacttgggctgcctgtgaggcaaggatcatccttctaggtccccttcccgggtggctcagggagaggcctctgggtcatcagtgcccccaggaggacaggcctggctatacacaggcaggagggtcttcaatgaaccagtggctgtctgtgacccagcttggaattgggtctttgccttattttgaatggtgggaagtaatataaaaaggcgccccaaaaggtcttatgtcatagccggcacagtgagggttacgcatgtccaggacgaaatcccagaatgagcgtgaaggtgtctgaaggagactgaggggaggaggggggttggattgggttaaaagtgactccattctggagaagccagcctgtggctctgaaggatgtggaccttgtgcttcttgatggggcggggctgtggagtagggagcagcagcctaggagcagggtaggggagggagatccagcttcagacatgcaaaggaagaccccgcagaggatcctgcctgacacttagctgtcatatgctgagcctcagagggccagatactcatgtgtgttctcagtcgagaatgcgtgtgcacctctgtgcatgtgtacaagtgtaagcctctacacccctgtgtgtgcgtgttaactcctgagtgtgtgtgacagcatgaatctgtgggtttcacctgtgtgcatgtccgtgtacatatgtatccattcatatgcagaactcctgtgaacatctgtgc

SEQ ID NO: 1627 - DNA, 1170 bp, Artificial sequence
  DNA replication origin
gcccgcgttttcctccttaaggaggaaccccctcccctaagagagcgaccctctctggcagtcggagcgggaggactgcacagagggggtcgctccctcccctcggcccagtccccagctccggaggcaggatggagggtgtgcgtcccccagggcgacagagctctaggagagcggctcctgaggaccctgtccttgggtccgagcgctggcagaggacccaaagccaccgagtgggggtcaccgcctgcgtggcggcctgggcaggtcgggcggcgagcgccggggaggcggagggtgagtgacgggcgggcgaattggagctgccaggtggataaacgcgacggatgtgcgcgtcgccgcgccccttcccccggcccgcccctcccccgccacccagcgtgaatgggagtcatcctgggaatcccggaccggccctgggcctgagacacccctctcccgctgctctgccccttaccccacagtcttgccttggccctttcagctgctgaaagctttgaattcctttattggtgcagaagggaagctggggagccctgaggggtggaaagaaaggggacttgagtgtgtttgggcagagtgagattcttgggtttgctggggtcaggggcatgtggtgaaggcagcccccagccccctagaggaggggccttggtagggttaaaagtgagagggagactacttcagccagctccgcacccatctctgaggcaggaggccttttgatcctcctctctatcagccacctctggcccaggaagttcttcctcagagctgactttagtacctctcctatctaactcttgtgcagggatgggtctgtggtcttcctgggtttggaggtagccagccacttatggttcaacccaaagagccttcccagaggcagtgccctgtacctcagcaggcaagagggcagcgtttatgaggtcctgaaaagacagagaggagacagggctgtgagctaggctctgtgctgggaacttgttgggaggctgatgaggtgtctgccatccccagggcaaggctcatggtctgcattgcacagagagggaaacaggctcaggggggttaatcatgactaagagccacttgggctgcctgtgaggcaaggatcatccttctaggtccccttcccgggtggctcag

SEQ ID NO: 1628 - DNA, 1417 bp, Artificial sequence
  DNA replication origin
gaaggggcgcggcgacgcgcacatccgtcgcgtttatccacctggcagctccaattcgcccgcccgtcactcaccctccgcctccccggcgctcgccgcccgacctgcccaggccgccacgcaggcggtgacccccactcggtggctttgggtcctctgccagcgctcggacccaaggacagggtcctcaggagccgctctcctagagctctgtcgccctgggggacgcacaccctccatcctgcctccggagctggggactgggccgaggggagggagcgaccccctctgtgcagtcctcccgctccgactgccagagagggtcgctctcttaggggagggggttcctccttaaggaggaaaacgcgggcagaactggaagggggacaaggggcagccctcggcccctgggggcggtgccgcgcgggcggcgggggagggggcggtgactcagccgccctccgcccgcctccccggaactttgcagcagctggagccgccgttgctacaggaaccgaatgcttttgttccccaatgtcagggctgccggggcaggcgggtgatgaggaggctgccactccccggtgggacccaggtccggccacactacccagaggacttccagccatcacaggttcgagtccccttcctccgtgccaccttccctgcccccaagctactcaggccaaagccaggtttcttcaaactcctcaggccctcaggcccggtggccctgctaactctgacccaaggcaaagggccctgggaaattcctgatggtgtctgacctcctggggtcagtagaggctcttctgtggctgagtgatttcccacctgggctccccctaacaggctgcctgccttcggggactctgactggggtttcttctctgtacttctcccacctctgcagcctctacacttgaaccaagaccccagagaccatggcctggctttcactaacatccctctggccagagctgatcccagagaaatatagtgggaagttgcaggaccaaggaggagatgagggaaactgacagtcactggctccccctgcacccatactttgggggaaaagtggagactgggggctaaaggtgtttctgtctttattatactgggggttggagtgaaggcactggaacctgtttttcatttttctcctttgggattaggagtggagtggagaggggcctgaccttggccttgaacagaaacagccccacacccctatcaatattgagcattgctaggtgccagacactctatacaaacaacctaacttcattctcccaacagctatatgaggcagtgatcactgacccattttatagagggtcaactgaggctcagaaagattaagtagcttgcccatgtcacacagcttttgaacgtaggtcgtctgaccgaaagc

SEQ ID NO: 1629 - DNA, 1164 bp, Artificial sequence
  DNA replication origin
cccctcagcttggaattggggccgtgtcccccgtgtctgctccgcgccccctcccctccagctgagatcccgactggacccgcatccctgactcccgtgtccatctttggccggagtctatctgtccatcccccatccctatcctcccacccctggtcatagagctgggcaccagacgcaccctcccgcagccccagggccggcatgatccggagggggttgtaggctgtgaagttggcggccactcccgcagtcagcttggtccgagggcacagccgggggaagtcctccgcgccgcggcccgtgcagagcaggcgacgggtctgttgcccgccggggggaggggcgcccgggccgagagatgccgcctgcctgcccgcctcgccagctgccggccgggctcctgggcgtcctctggcgccccctgcccgaagcctgggacccgccaccccttctcccgcgggcaaccccgggtttccgcagccagagcatcagcggtggctgcaggactgacgctgggaaatccctggggagaggagattggtgggccaggccaggtgcctcctcgtgctagccatgcccaaacactcctggttgtcaggccatatgttctgggggtgggatgggttggggtggggtggagggctcaccccagcagcaagtcaagagtcctttgagccttcacgtacagaccagcaggattggccgcgggctccaggacgcctggttgggcttgtttgtgcttggtcaggtgttgccagagagcctctaccccatggcatttcccatgaggtgagggctgggggcaaaggtgggctctgcctggcttgcgcatggagtcggttgtgggggaatccacctgaccctgggacagagcaagcacctggggagtatcctctgcactgctactggggtgaggggcagtgtggactctgcgcaggatatgtcctggtgatggtagtggggaggttagggagggtcttctctggaccaagattgagagaagagatcttcccctcttcttccctctctcctccttccgctctctcttctgccccctttctgtatcactcttcaaaaggacatgtctagtctggggtgtgcgtgcgtggtctgcatttctgtaacacaaagtgaggttccatctggtatctgcccccatcc

SEQ ID NO: 1630 - DNA, 1190 bp, Artificial sequence
  DNA replication origin
ctgctggggtgagccctccaccccaccccaacccatcccacccccagaacatatggcctgacaaccaggagtgtttgggcatggctagcacgaggaggcacctggcctggcccaccaatctcctctccccagggatttcccagcgtcagtcctgcagccaccgctgatgctctggctgcggaaacccggggttgcccgcgggagaaggggtggcgggtcccaggcttcgggcagggggcgccagaggacgcccaggagcccggccggcagctggcgaggcgggcaggcaggcggcatctctcggcccgggcgcccctccccccggcgggcaacagacccgtcgcctgctctgcacgggccgcggcgcggaggacttcccccggctgtgccctcggaccaagctgactgcgggagtggccgccaacttcacagcctacaaccccctccggatcatgccggccctggggctgcgggagggtgcgtctggtgcccagctctatgaccaggggtgggaggatagggatgggggatggacagatagactccggccaaagatggacacgggagtcagggatgcgggtccagtcgggatctcagctggaggggagggggcgcggagcagacacgggggacacggccccaattccaagctgaggggaggggacttgcagcaagattggcgagggaaggcgggactccggtcagatagatatgggggagggggcgctaggggcagaaatagagaagaagcatggtcggggtacaggcgcgggggagggtagaaactatgggcagacatggatggggacaggaaagactccgggcagtgatgaagtggaggagaggagcagggtccggcattcagaccgtgacgggaaatagagggggagacacagttgagctgcaggttaatgggggggctctaataaaggtggggggcacactgcccggatccaggccgagatagggaaagactcgagacagcaagcacggtctgtgtcagaattctggagggggagactttagcatagatgggtaagagggtcggtccaggctgggggagggggggggccgagattagagattcaccagcgattaagggggcctcggccctaggtttgggagttccccagaagatgggggtgggcgaacgctgaacgaactcagttcgggctgggggagaattcagc

SEQ ID NO: 1631 - DNA, 1277 bp, Artificial sequence
  DNA replication origin
gtgacggccgaggcgggacgcggcgcctgcgcgggccgggcccgggagggggcgcgcgccgggccgggcgcgaggagccgcgggagaaggggcgggggcgacgcgcgccgcctcctgttaaagggggaacagcgccagccgagccgatcgtgccccccacctccccgccttgggccccaggcgccggcgcgggagaagccctgggtaagcccccgcccagcccgctgcttcttggaccgcagaatgaggcgatccgcgacgcccctccagctatacccatgccggaggcttgtcgcgccgccagggtgtcccgggccctgcaggctgaagcatttgctcaccttcccatgtgcattgcatattgcatgtccctgtgcatgcaggtgccagtcatgtgcgctgaactttgcatatgcatacaggtgccctaagtgtgcactgccatgttgcctgggtaggtgcatgcaagtgccacacacatgcacggtgtattaacatgtgcccaagtcctgaatgcatgttgcttgttcctgtgcgcagggatgttatatgtatgcaagcttacaggtgccacatgtgtgctgaggactgtgggtaactcatgtagcagccacatatgtatactgcaatgtgacatgtttgatgcatactgtaaactgcaatgttgcacgtccttaggcacggggatgctacacgtgtgcagtgtgttacatgttttcctgagtccctgtctattcccacaagtgcctttccctgtgccaggggcgcccccatgttgcatctgtttgtgtagaagcagcagagatgtacagacccaccccttccccatcttggcactaagcccagaaacagttgggtggggcctgagccctcatggttcaggcggtacacagggagatgcccatggttcagggctctggtcaggcagtttgtggcctgggcatgttgccatcagtaaggtaggccgaccagggacgcaccattgcagccaacacaagtaggttaatcccatggctttggtcagaggagaaaccagcagggggcagctttgcaataagggtgggatggtttcagctttgcgatgagggtgggatggtttcaggaccatactttttgaaggttcactagccaggaagggccaaattttcagtgcaaagaagtcctcatttcagcaaataccaaccccacctctccactgatgccccttaagttgtggcaccctcaagatggggcaagaagagaaaagcctacctcttcccaggggcagtaccaggaag

SEQ ID NO: 1632 - DNA, 1307 bp, Artificial sequence
  DNA replication origin
ttttgaaacaatttatttcgggattagagttgatcttccaaagaagaccagctccctcggggtgagagatttggtcggtgggggtctgactcccagggctcgacacctgctagaagaggctgaggctggacacctaggttttgggggaggcaaccagagttgctgagggtgctgagaaggacaaaatgcaggaccagtgacacctacatgcctccttggttggcacaaccacacttcttacaggaccacacgatgacacaccccaggaggacatctgtccctcttgctggagagaaacgtacactaactcatgctggcaataaagcaatcactgcagggttgtgggggttgcttctggcttaccaccaaccctggcacaactctgacctcagagggtcccaggcttgggggtgaagcctgtggatggggtgggggtaggggtgtaagattcccgagccttgtggttagagggaagggccctggagcacctcgccaagtgagtgttctgtgtgtcagagtgggagtgagtggggctgagctccggtacacgtgtgggtggttgtgtgcgtcaatgtgtagggggagagtctgtgtgtgtatatggtgtgcctgtgtgcaggtttcgtgtgtgtctgcctaggctttgtacgtcagaagcctggacctggctctgggatctctgctgcgtgtgcgtgtgtgtgcctttgtttgcagggtatgtggtgtattcatgcatttctttctgtgtctgtgcgtgtgtgtggtgtagaatgcatacacacctacgatgctggggtttggcatccactcagtgtctgggcgaatgtgaggtgtattgacagggcagtgtttgcgtgtcattggagtttgtgtgcagccagagtgtgatgtttcctggggttcagtgtgtgcctgaacccgtgtgtgtgtgtgtgtgtgtgtgtgtgtgtgtgtggaaagtgtttgcaggcctgtgtgtgtctgtgcctttggttagtcagggtgcctggcatttgcaggcccaagtgtgactgcgtctgcatgtcagtggtatgtgtctgtgccagcctgtggtgcgtgtctctgtgtgtgcctggcaatgctggcaggccctcgacttccagtgaggtctgtgtgtgatactgttgggtatgtgtctctgggtgtcctatatctgtgtctggatgaggggtttggatccactgtggtgcatgtctgcagatctgtacctgtggccttgggattcttgtctttggagactttgggaactaatccttccctggaagccccccaccccctcctattcc

SEQ ID NO: 1633 - DNA, 947 bp, Artificial sequence
  DNA replication origin
cccttacaacaagattggccagcttggagcctgactttccactggaggtcccgctcctgagggaaccctgaggctgcacagccaccggatcaaggtcacatatggggggacagaggctcccactcctatggtgcccttaccccttaccctcacaaagggccccaccgccggaagccgcccgcgctcccacaccttgtgcaggtctcccctgaaatgaattttaatttccgctgagggcaggcggcgtcgtgagtcctgagcccgtggcggcggcggcggcgcgggtgtggggccgcgcggccgggagcgggcggaagagagcgcgaatttgaatttcaaaggcatctggaacccaagtgcttctgcgttgcccgattgtgtgtgtggcgcttttgtgtgtccgcgaatgcgcgcgtgcgtgtgtggcgtgtgtctgggtgttttatgactgtcctccgtgaggccgtgtgtgagcccttgcgtgggccgtgagtgcggcagggagcgcggtgtccgggggccgcctgtcggtgtgtctgtgcgtgcttgtgcgctagcctttgcctctgcgagtgcgtatttttaggaccgagtctgtctatatgagcctgtgtctgtgtgtgtgcgctcccggccctgcgtgtgtctgtgagcgtctgccggggcgcgtgtgtgctcggaaccccgcggtggtgtgcgggtgtgtccgtgtgtctgtgcacgtgcaggcgagcgttcccatctgtgtgtgtgcatctgagtctgggctatgtgtgactcagggaccagtctatgagcctgcctgtgcctttgagccgatacctgtgtgtgactcagggacgagtctatgagccgatacctgtgtgtgcttgggtgtctgtgtcgtggtgtgtccctgcaagcgtttgtgcctgcaggtgctggagtgtgtagctgtgggaatgagt

SEQ ID NO: 1634 - DNA, 1680 bp, Artificial sequence
  DNA replication origin
ggtggtggtggcggcgcgatcggccgggctgtaaccgtcgtctgtccgggagcggctggagcggcagcggcggccgggcacggcgcgaggtgacgccacagggcagcggcggcagcggaggcagcggcggcagcaggagacgcagcggcggccgcagcagcagcagcaagacggactcgtggagacgcgccgccgccgccgccgccgggccgggccgggtgtcgcgcgccgaggctgggggggagtcgtcgccgccgccgccaccgctaccgccgccgccgccgccgccgaggtgactgaggagagaggcgcctcctcgctcccgccaccgccggacttcaatgcccagtccccagctcgccagcgtgagtgcgcccctcccgggcggcccccgcgccggcgccgggggcctcggggaaggggagggcgggaggcgccgcagccattagtgcaggccggagacacgtccccggaaggagggccgggccgggccggggcgggggagcgagggtgggtgagcgaggggcgggctcgtgtgtgtggaagggagagagctgtgcgagcgtgggggagagtgagttggtgaagggagggcgtgtgagtgggggacagggctgagtgtccgtgcgaggaggtggggggagtgggagcgcgtcgggaggcagtgtcgatgttgggggaatgtgggtgagggcaggggagggtatgggtgtgtggggagcgtgtgggcatgaggggtggtggtagaatgagtgagtaaatgggggaggagagagttgagagtgtggtaaagagcgggtgagtgtggggggagaacatggtgtgtgtcggtgagaaggtgcgtggcagaggcaggagtgtggtagggtgtgccggcgtgtgtccagtgtgtgagcaggcatcctagaggcccttccccttggtctttgtgtgtggcgatagtgaaccctggtgtgttgggttggggagttctttccgggagcatcttgtccgtgggtcttcaggttcaagtatgaggaaagggggtataagtctcctccagcggcactatgatcttctggctctgggattttaatttttttcccccagaaaggatgtgatgtgtttttttgttgttgttctatacatttttttctcccacgtttcatgacttcaaagtaaattttcaaatttgtcaatgatgccatcctatcctagtctggggcccctgagagctaacgaaaagaagtttgtctgttgcccaaaatcctacactctggcctgtagagtgttcaggagcataaacttttgtaaagtactgctagtttttcaggtgaagagtattttattgttaggtaaattgaactgtagtctggtttattatttcctggaatttgtcaagaaattagcagtgactagcaattctagtgtcactgtaggcattcagcaaatgtttgtctgtccggagtcgccaaactacattacactgctgagttggaatatggtacttgctgtcatgctctgtaagagagagtagtttcagagggaagtgagtgaagttatgccttgctgagtgtgcaaaaggagattaaggatacagaatgacacattatcagggcttcagaatcacttgccagcacaccattgtattggtgaagatggtgagaagttgtttgctggtattctgatcttggcattttt

SEQ ID NO: 1635 - DNA, 1660 bp, Artificial sequence
  DNA replication origin
tcccggcgctgcatctgggaggatgtgcgatccaaggagcgagaaagcgacgcggcagcgacggaggcccgagcggcggttggcgggggtggcagagcgggagcggtagcgaccgaagccgacccgagcgacccagcgagagagagcaccggaaatgaggcggcgcgcgtgcgcagccagccaccggcaccgcccttgggtttctccgcggagaacaaagtccccagtccggccacggcgcctgcgcaccgccgcggcgtccgagaagtcgcctcccgactctggctttccctccgctcccgccaggccagagcttgatgcgcatgcgcgggaggcagtgggctccgttcgtttcgttttccacgtgactcggcgctagcggaacacgtgtctcctcccctttctggcgtggagggggcgggagctgtggaatgtctttgtctgcgcgcgggcccgcggagtgtggggcgggagacctgttactcgcggggccacgccctctccaacggctgagcagtggagggaggctgtggggagtggggtggggggcggtcaccgaagtaaggaagtaaaagactgccgagagggtcacggaaaggggagggagagagaattgagaccgcctggggaggaagacaggagtgagacagactgcacagggagaaaggaaggctgagggagagtctgatgcagggggaaagttggggaagggaaacctggagggagaaattgaggaaggacggcttggtggaaacactgaaggcgattggagtacttgaactaagagggatggttcagatcagagatctgaagtctagcaaagaaaagggtcccagacatcagggaacacaagaagttgtttccagtatatatatttccagtattacatatattccagtcggttctaaaacggttgacattgttggtacgggaaatcttaagcagcattttagctctttttacatattttactgctttttctgaattgtgtttgttttgtttcgccgtcattattgccaattaagtgtttcttccttcaaaaagtgaggtagagaccagatccttaatccacgttggttgcatcattaggatggcttcttctaccactccagacttgctcaaagagacccttgccactactctcaaaggcaaggtacatagtggacagtcgcctacgacgttctccacatcctggtgtgctatatgcaagtggagccttaggtccctacttgtcccataagccatcaaaagcctggtgccctctctaactttcccttccctccgcagattattttcttcttccatttaaagcactcactcccatctcttttccttctggattagttctcctaatgagcccacacttttcaaaagtctttggggaccggtgcggtggcttatgcctgtaatcccagcactttgggaggcctaggtgggaggattacttgaggctaggagttcgagagcagcctggacaatataatgagacctcatctctacaataaaaaaagtttccgcccggcttggtggctcatgcctgtgatcccaacactttgggaggccgaggtgggcaaatcacctgaggccaggagttcgagaccaacttggccaacatgatgaaaccccatctttactaaaaatataaaaattagccgggtgt

SEQ ID NO: 1636 - DNA, 1088 bp, Artificial sequence
  DNA replication origin
tgagagaagacacgcacgggaagagcaggaggtgggttccgttcccctccctcttgagtctcttcaccagcagctgcaggaagggcgtgggggaccgagagacaaagagcgcgcaggcaccgcctccgtccgggcggcccctttaagaagcgcgcgccagcttccagcccgccttgtatgcaaatgtagcggcgcggcgggagcgcgcggctgatacccgggactgggctgcggcggttagtcctctcccggccgccgtcgcctccgacatattgcccgcaggagctgcggcggcgaagcggagagcaccggggggaggagatgggtgagcagagcggctcaggctcggcctggcaacgagcgggcgcacgggttaggatggccaggctgctaattgctgctccacgcggacaggagcccggtgacgggagggggaggggatgcgagcgcagacgggatcccgccccctcctgtcgttttgcggggtggggcctctgttgtgggggcgggacattggacggtgggcggggcttctaagacgaagccctgtgggggcttgggctttcgtgaggaccagctcgtcggggctagaaaggggggcgggacttaccagtgggcgtggcttcagcgctaagggtggagattctgggcagggggcgctagtgcagtcggcgtttctgggttggaggggttacactgggggcggtggagcggggagacttccgactgagggagcccattctggagtggggcttctgggctgagagggcttttattggcttgtgggcggggtttctgggctgacagttgtgtgtaggcggagcttctgggctgaggggctttatgtgggtgcagagcttctaaagagaggagagtgggtgtgggcagagcttctggactggactaagggtgtttgtgtgggattttctaagccaagtataacagcgtatgaacagagcttctggtctgggggtttatggagggcagagctcttcgccaggtactttttagagacttgtggaggtttataattttgggcatacatccaagcccaaaattggctccgaagtgtgggaaacgcttccgag

SEQ ID NO: 1637 - DNA, 1193 bp, Artificial sequence
  DNA replication origin
aagagagcatgccgactgggttcggtggtgcatgcctataatcctagcatttggggaggccaaggcaggaggattgcttgagcccaggagttcgagatcagactgggcaacatagtgagacctcatctctacaaaaaaataatcagctgggcatgatggtgtgcacctttagtctcagctactggggaggttgaggtgggaagattgcttgagcccaggaggtctaaggggattgcgccactgcacttcagcctgggagaggaagggagaccctgtctcaagagagagagagaaagagagagagagagagaaagagagagagagagagaaagagagagagagagagagagagagagcgagagagcgcacgcatttcaaagcagggagaaccacaagtacaaaggcattaagtaagaaaatagcatggggtgtttgggaaaggcaagaatagttcagaacacaggctgtgtgtgtgggggtgtgtgggggtgcctgtgtgtgggtgtttgtgtgtgtgtgagtgtgggtgtgtgggggtatctatggaggggatgcctgtgtgtgtgtgtaaggtgagtgtgtggatgtgtgcatgggtgtgggtgagtgtgtggaggtgcctgtgtgtgtgtatgaatgtgtgttggggaggggagaatgtgtgtgtgtggggtgagtgcgtgtgtgtgggggtgaatgcgtgtgtgtgtgtatgtgggtgtgactgtgtgggtgtgtggacgagtgtgtgtgttcctgggtgtgggagcctgtgtgtgtagggggagtatgtatagggtgtgtgcatgaatgtgtgtgtgggtacgtgtgtgagagtgggtgcctgtgtgtggggggtgagtgtgtgtgtgggggggcacttgtggagggtgagtgtatgtgtttactgagtgtgagtgtgggtgcctgtgtgtgggagggtgagtctgtgtgtgagtgtgtgggggagtacctgtgaggggtgagtgtgtgtgtttatgtgaaagtgtgtgtgtgtggatgcctctgtggaggtgggatagggggtgcctctgtgtgtgtgtgtgagagtgtgtgtgtgtagggtgtgtatatgtatagggtgtgtgtgagtgtgtgtgtgtgagagagtgtgtgtgtggcagaatagactgcggaggtggatttcatcttgatatgaaaggtctggaatg

SEQ ID NO: 1638 - DNA, 1188 bp, Artificial sequence
  DNA replication origin
gcgaacgaaggccgtcggctgtcgtcggatcttcctccgtggccctcaagccttcaccgccaccccaggcctactccctgctccaggatccctagatctgctcctacccacccccacgacgggtccccacttacggttcgggctccaggctgttcgctttggccacaaaattgaaggggatgaagccttcctggcccgtggtcagggactgcgccttccaccactcgccgctcctgcgccacggaggtgggtcagtgtggctcgctcagccgtcgacctgagaccctccctcaaagacccctccaccccttaagccagcctcccccaaccctggctcagcaatactgagcctcgaattttgtcccaagggcggccaccccgagctggtcaagggccgcaggagggctgcgggtcgcggagatcgccgctccctcacggactccgccagagcaaggtggagagggactcactgctccaggatgcggagctgttcccccttctcaaagcccagatctccgtcgtgagagggctcatagctgtgcagagcgataaccaggttgtctgtaaagacaaggggcatcagggagaaccgagctgggatcggcaggaagcctggagttacagggtgggggacaaggaaggcaagaccggggagaaagtaggtgggggagaggtggaagccaacagccagggatccgcaggccttgtctttcaggccctgctgcctggggtcaccttgcagtggggaagccggcggattggagccttcgtaggtaaccagtgggtcccgcacctcagagccatttcggatgagcagctgtggagtgggggatgagggtggggtcagaaagcagaagattgggtcagaccctggcccccttcccccctgctctgctctcagcctctccagcctggttagatgttatccctgagtttaccaactactttctgtgtgatcttaggagattcccttcccctctctgggcctcttttcctttctgtatttcaggggagagggccactctattctttcaagggcctgtagtgctggtcatttctttctcctgggttgcattctctacccaactccctcaccaaggcccctgtctcgcctcttaccgtgcccttgccatccagtgggactatgggataatggcagttctcacacacatcgatgttttccatcca

SEQ ID NO: 1639 - DNA, 1415 bp, Artificial sequence
  DNA replication origin
cacctccgtggcgcaggagcggcgagtggtggaaggcgcagtccctgaccacgggccaggaaggcttcatccccttcaattttgtggccaaagcgaacagcctggagcccgaaccgtaagtggggacccgtcgtgggggtgggtaggagcagatctagggatcctggagcagggagtaggcctggggtggcggtgaaggcttgagggccacggaggaagatccgacgacagccgacggccttcgttcgcttccgccctgcacagctggttcttcaagaacctgagccgcaaggacgcggagcggcagctcctggcgcccgggaacactcacggctccttcctcatccgggagagcgagagcaccgcgggtgagcgggcggcggtctcgaccgggcgcgggggtgccccggggtgtgcccgagggggggcgcagggtgagcccgaggtggagacacggggtgagtcggagggggacgcgggatgagcccgaggtgggggcgcgggatgacccggagttgggggtgctgggtgagcccaaggtgggggcgcggtggcgggccagactcactgcgttctttcgtcgctttgtccatccattcattcattcaggatcgttttcactgtcggtccgggacttcgaccagaaccagggagaggtggtgaaacattacaagatccgtaatctggacaacggtggcttctacatctcccctcgaatcacttttcccggcctgcatgaactggtccgccattacaccagtgagcccgacgggacccctcccccgtgccctatcagcctatctcccctcagtccccctcaggtgtcccccatccatctttcaatgccctactccattccccgcagtgggtgaggtgtggaacctgaccctacggccccaagtgtttgggtgacagccccacacccccttgctagtccacttcacctagatgggggcttggagaagtgggggaggtggtgtcaatacgaggcctgccctattgacagccttcacccctccctcgtcctcgcagatgcttcagatgggctgtgcacacggttgagccgcccctgccagacccagaagccccagaagccgtggtgggaggacgagtgggaggttcccagggagacgctgaagctggtggagcggctgggggctggacagttcggggaggtgtggatgggtgagtgtggcctccaggactgcctgggaagaggggaacgggaggggccgctgaggtgatgagagtcccaggacagctgcctggcgactttcccactccttcccttccccgacccagggtactacaacgggcacacgaaggtggcggtgaagagcctgaagcagggcagcatgtccccggacgccttcctggccgaggccaacctcatgaagcagctgcaacaccagcgg

SEQ ID NO: 1640 - DNA, 1265 bp, Artificial sequence
  DNA replication origin
cacgacgaagtgggactgttaagtttacagagctgctttcctcccccgggactgatggtacggtccccgggcggctccccacccatctgtcgcagaccttggtacaggcccagggggccctcggcggcctctccgggctgcccttgccccctgccgagttccgggcccgtgtctgcgcaagctgattggctggagcggtgcccgggctgcgcggctataggtgagcccaggaggggacgggcggggcgggccggaggcccgccccctcccccctgggtcggacgctgagcggagccgcgggcgggagggcggacggaccgactgacggtagggacgggaggcgagcaagatggcgcagacgcagggcacccggaggaaagtctgttactactacgacggtgagcaccgtcctcgcggcgggggcggggccaggccgggccggaccgggaacctggaggctgaggctggagcgccgatgggaggctgcgggaggctgaggcgctggggagaggctcggagaggaggctgcgagggggaagtcgaggctgagggaggaggctgcgaggaagggagatcgaggctgagaccaagaggggatcgcgtgggggaagcgtgaggtaatcttgatgggaagattctgaggaagtctgatgtggagagtttgagtgggactcctagaggggagggtgcgtcggagcggggaggctgaatctgatggagacggctgcaaggatacattttcttgccgagaacccaaagctcttccctgccccgtcccttcctcatcttttctgggggaagagtcctgcacgactggttgcccgcctcccctcccccagcctctgagcggggcctgcggttgctactgcgacgtggggcgccaggggttgcaaggagaaggatgcaacctgttaaaacagacttctcacttaatctctcaagcaggttactgtgttcgaggaagtgttgaggggctggggccgtggggttgatcgggtcacccttcccagtgaccgaagttctctccgtgtcagagctcagagtgttaggggagcacagagaagaggcaccgaactccacctgaggagtcagcgaaggaggggacatcttagttaggacctgaagaacaggagttcttagccaggcacagggaaggcaaagataacagcaagtttcagaggcaagagagaggacaggacctttgaaaaacaggcatttggccgggcgtggtggctcacgcctgtaatcccagcactttgggaggc

SEQ ID NO: 1641 - DNA, 1335 bp, Artificial sequence
  DNA replication origin
gcccgtgaggggcgagagggaggtgtttgacgggatcctgggtgtgggtgaggctgaagccagactttcgggttgcagtagaatcgaatcgaggaccccttcctctagaagggatcagaagcgggctgggggagggggagcccctgccctcattgctattccctctgccctgcaggagaatggccacgtgaaaagcaatggagacttatcccccaagggtgaaggggagtcgccccctgtgaacggaacagatgaggcagccggggccactggcgatgccatcgagccagcaccccctagccagggtgctgaggccaagggggaggtcccccccaaggagacccccaagaagaagaagaaattctctttcaagaagcctttcaaattgagcggcctgtccttcaagagaaatcggaaggagggtgggggtgattcttctgcctcctcacccacagaggaagagcaggagcagggggagatcggtgcctgcagcgacgagggcactgctcaggaagggaaggccgcagccacccctgagagccaggaaccccaggccaagggggcagaggctagtgcagcctcagaagaagaggcagggccccaggctacagagccatccactccctcggggccggagagtggccctacaccagccagcgctgagcagaatgagtagctaggtaggggcaggtgggtgatctctaagctgcaaaaactgtgctgtccttgtgaggtcactgcctggacctggtgccctggctgccttcctgtgcccagaaaggaaggggctattgcctcctcccagccacgttccctttcctcctctccctcctgtggattctcccatcagccatctggttctcctcttaaggccagttgaagatggtcccttacagcttcccaagttaggttagtgatgtgaaatgctcctgtccctggccctacctccttccctgtccccacccctgcataaggcagttgttggttttcttccccaattcttttccaagtaggttttgtttaccctactccccaaatccctgagccagaagtggggtgcttatactcccaaaccttgagtgtccagccttcccctgttgtttttagtctcttgtgctgtgcctagtggcacctgggctggggaggacactgccccgtctaggtttttataaatgtcttactcaagttcaaacctccagcctgtgaatcaactgtgtctcttttttgacttggtaagcaagtattaggctttggggtggggggaggtctgtaatgtgaaacaacttcttgtctttttttctcccactgttgtaaataacttttaatggccaaacc

SEQ ID NO: 1642 - DNA, 780 bp, Artificial sequence
  DNA replication origin
tctttgttcgcggccccggtccccggcgctgccccccggccgccccgagtgccgcgcggggaacaaaggcgctgctgggccacgccaagggggcgcccaggggccgcggagctggggcccggcggggagcgcactccacccgccgacccgacctcggtggcccacggtctttttttttttaagggggagccgagatgcgggagagcctggggtgggtgggggccacttacacaaagcgggaggctgggaaaataggccgtccaggtgcagagagacagcgccccggggcggcttcccgcccaatgtcgcctagagcggctcgcccgcctgcccgggatccgcacagcagatccggagcggttccgcgcggaatagagagcgcgccccgggggacgggggtgggggccacgggaccccagcgcctcctgccggtcgcgccctctgcgcgctcgctccccgcgcgcccgtgaggggcgagagggaggtgtttgacgggatcctgggtgtgggtgaggctgaagccagactttcgggttgcagtagaatcgaatcgaggaccccttcctctagaagggatcagaagcgggctgggggagggggagcccctgccctcattgctattccctctgccctgcaggagaatggccacgtgaaaagcaatggagacttatcccccaagggtgaaggggagtcgccccctgtgaacggaacagatgaggcagccggggccactggcgatgccatcgagccagcaccccctagccagggtgctgaggccaa

SEQ ID NO: 1643 - DNA, 963 bp, Artificial sequence
  DNA replication origin
gccacctcagccctccccgcccctctgtggtcagatctctggggagttcccaatttctcaggccctggggtgtctccacacttcacagcctcaggcctcccaggaggcttcaccgtaggagggaggggagggacttgctgagctggctgggacacagccttgcatttgcaacactttgcttccttccagcccccatccctttcctcctgggggctgagggctggcagccggacacagacatccggggccggccaggattctggggttcccaccagcctatccaggccagcagaaggagaggtggcagaggaccaaagctagggagtctccagcccggagcacctccgggctcccttgctctcaggcagggtgggaagctgggctgggcagctttgagggctgtcctcaaggggctgtcccttgaagggacccttggtagcatcctatccctccccttcagaaactggggtgttttgaggtttgttgagtccccagctggggttcctctgccggcctggggcaccctgatgtaggggagcagagttgtgtgtggaggtaaagaggaaggaccagagccaagtcagacaggttgtcaatgcctctgagccttggcctttcaatggggatggagatgcccttcaaggtcacaaagtcccccacgtgggactttgcagtgggtccaggctgagggcaggaggggctcaaggcgaatctgtctgtccccactcagaatgactggccaccaagggactgaaaggaggaatgagggaaaggcctcactagtccgaccagagtgaccccgaggcaaggcagagccctccgctccccggctggccatggcaggcaggcagggacgtgggtgggacctctgaccgctctccaggccggagcgggtgccgagcccagcgcaggggccctgcagcttctatgaccacatttctagagtataattcaggaccagcc

SEQ ID NO: 1644 - DNA, 1245 bp, Artificial sequence
  DNA replication origin
cttctccacagcttgccactaagggaaggatgtcatgacctgctctctgtctcagccacaatagggaacccacaatgctgccaggcgctgcccgcaccagctggctgggctcagagggacggagggtgtgtgagtcttgcacgggttggggtcagaggttaagagcagaacctaaggcttctgatccccaggcactgcctggcggggatgagaggcaaatcttcccaaggatcccaggaggggcatcgaagagcatcagggtaaaagaccccaagtccccagagccccagagggagcctggtccccaggggatgccctgtatccccaccagacatcccaggaggctggggagggggcgcctgggagcctgatccctcagcaaatccaggtcccagcagaatctgacttctggaagaggcaagaggtttaggatgcttcagggtgggggtgggaggttacagcagccccatggcctcctcggtccacactgcagctccttcctccccagctgctgccaacccagacaatgcgcccattgttctgcgtctccgggagccagtgtgcaactgcgtgtatctgtttctctctgtgtgtgactgtgtgtattgctctgtgtctgtgtgtgtgagactttctggctgtgtgtgtgtgtgcgcgtgtgcccaggtgtgcacatttgtggttgcgtgcgtctggatctttgtttggccctgtatattcaagggtgaaggagagagcctggtgatcctggtaactgagacttgctgggtttgtgcctgcccttccttgagactgttggtgactgtgtctgactgggtgtgaaactgagtgtgtggctgtatgagagaatatcgatgggccgggcgtggtggcttctcgcctgtcatcccggtgctttgggaggctggggcgggaagactgcttaagcccagagttcgggaatatctgaatgtgtggagcaaagagcggctcctttatgtctgggtgagtgttcctgtggcggtggggagctgtgtgtgcctcagtgtgtcactgaggctgtggctgtggtggttagaacctttgagatgtgggcgtttgccaggatggagtgacagggaaaggaggaatgaggacagggtgacgctgggatggatgggggaatggaaggtgcagagaccagagaccccacgttcatacaactcctcatctgtcccagttctcctagtaagggctctggccctggccctggcctgagatgctccc

SEQ ID NO: 1645 - DNA, 1422 bp, Artificial sequence
  DNA replication origin
caggagtgaccccggcccgtgccctgcctcgtccgatcggaggcaacttcctcctccccgcctgtcgtgttctcctggggtgaccgctgtcccatctcccccgcaggcggccccaggccacggccccgcaccgcctggaccaggagttgtgtttctggggcagccggggcccggtcttgccggcgcccgccgcccgccgcagcctgggcgactactggctgagcccgcagcgccgccaccctccgggtgccgcctggcactggcccgcacgcaacctgttactgctgcccccggccaccggcctggccgacgtaccctcggcgcgctggcccagctgctacggcgcgcgcccgagactcacgtgagtgcgccgggaggggcggggcgagggcccggggagtagacggggtgaccggggcctatgcgaaggggcgaggtctaaggaaggggcggatccagagccgaggatccgggcctgggggcgaggggagggggcggaactgggtgggaagggcggggtctgagggcgaccgggagcggaaggaaggggcggggctaggcggagtgggcgcagacccggagggaagggacacttgccccaatcccgtcttcccgatttcccttccctccaggtggaagcaccggtggcagaatattaactactattttctgggcaaaaggaagcgacatctagttcccttgcgcccgtgagagccggtgaggggcgtggccacagggggcgctgtaggtgggcgggggctcgcggaggggcaggtcttgggcggggcctagctagaggcgtgggggaggggcgaggcccgagcacgaggttggcctgctgcagtcgcggcctgcgaggctccaggaccctgtgcagatgagccgcagtcagaggggccccgagtgcagggcgtggtctttgcagggttatttttccccgctcttcttgggctgacacaaacatacttttaaaaagattgacaaatttgactatgttgaaatttctgtttgtcaggagacatccccaaaaaagtagaggagccccaaataggactcctcaaacataataccagctctgtgcccagtgcagggagtcggggaccaggaaagtggtgcactcgggtgggcaccaactgggtcagagcaaaggtgactccagccctgggcctagaggcgaagctgaatgaccaagggaagggaagctcggggtcagtttgaagggccctgtcgtggtgatcatcctgtgtgtctgtgttcacatttcggtgcatctctgaaagtctgtaccacctctgagtgtggttctgtttctgtgtgttctatctctgatctatgtgtctatttagtcaacgaatatttatcaagggcttggccaggtgtggtggctcacgcctgtaatcccagcactttgggaggcttagg

SEQ ID NO: 1646 - DNA, 1028 bp, Artificial sequence
  DNA replication origin
gagtggctgggattacaggtgcgtaccaccacacccagctaatttttgtatttttagtagagacggggtttcgccatgttggccaggctggtctcgaactcctgaccttgtgatccacctgcctcggtctcccaaagtgctgggattacaggcgtgagccaccgcgcctggcaagccaccatttttcaaatggcctcttccccaatctttttatgatcacttcagtcctgggagaaaccaaggctcaggatggactggggcagctccaaacccttccaataaggaaggtcccaggcacctagggccacaaagagcaagtcgcagaactttgtcgcagaacttctcgctcgagaggattaaaatgggtctggtcgggtgcctgtagtcccagctacttgggaggctgaggcaggagaattgtttgaacctgggaggcagaggttgcagtgaacagagatcatgccactgcagtccagcctgggaaacagagcgagactccatctcatagatagatagatagatagatagatagatagatagatagatagatagatgatagatagataagatagatagatagcctggtgtgggtggcctatggctgtattctatgttacttgtcggtccacctcttcctcctgttccccgcttctgtgggttgccagggtccagcacagtgatgtgaatttcaccggagaatcaccagagggttagagagatggaccagggcagggcccaagggaaaggctgcccaggaggggtcaggaccagcaagatacgagaggagtgaagtggcgtaggttgaaaggcggaagggcgggcccctaaggctgggtccaaacgaggaggctgcggaagggaaagtgttattggactgggcagagcagctggtgggcccgacggatagacatacactgccagcccggagtggaaagaacagtttgtgctgtgctttattaaaatgtgcatcattcttttattttaaaatgtgcatcattgtctcgtgctcggcgcatgcgacctcagcg

SEQ ID NO: 1647 - DNA, 1904 bp, Artificial sequence
  DNA replication origin
cctgggcgctcatgtccaagccccggggcgctctgcgcggggagtggcggtcaggcctctcccgggtcgccgggcgccgccgcctcgcgcccgccccctgggccgtcgctcacctcccggcggttgagaccggtcccaggctagaagcagctgccggagccctggccgcgggagaacgctccggtccaggcggagccgggcaggtctctgtggcgtgcccgggcccgggcgtcgaggagggcagcattgtgacccgggccgcggcgcgctgacctcacagagcacgttcctcccactggagaacccccaacggtgccccctgccgcccctggcactcagcgcgggccagaatcggggactggaggcctctggccatggcgcctggagacggggtcgcgcagaccccggacacccgaggggggcgcagcaggccagggcaacccgccgcgaggcggcgtccacgccgaggagccgcgcattcccggtccacacagacgcggcggagcgccctcccaggcgggactacaactcaatgcctggcacgggggcgggctcggcggtgacttaatccgggctgagtttggtggtggtagtgagggcaggtaggggcactgcccattttggccaagggtcacacagcatctacatcacaattgcaccggagtttaaaaatgtctggccctgtccctccccaccacccgccgctgtgtccagacagagaatgttctaacgctgggggcggctgcggatgaagtccttggggagaaaaggagcaggccaagggcgatggtggagtagagctgcctctcagaggcagcatgagctgagagggtgataggaaggcggcgctagacagcatggaggactttctgctctccaatgggtaccagctgggcaagaccattggggaagggacctactcaaaagtcaaagaagcattttccaaaaaacaccaaagaaaagtggcaattaaagttatagacaagatgggagggccagaaggtgagccggggcccctttggagggaaggagggaggactggctgaggtgggtgggtgcttcctcctgtttgttagaacgatcattcgatcattccctgctcccgctggcctggaaccaagcaagcccgatggcagctctggagtgggtcagtggggaacagaggggttctgggagtccaggaacattacacccccccagaatgcaagatgaaagtggcatgaggtgaaggatcctcagaggcaaaacctgagccaggctttcctttccggcaggggaacagagactggcagaggccacaaccagggctggtagagaacaggggctggtgccaaggcccgtggagatgggaaaaaggaagacagggctcatggaaagaattgtggggtcaggggacagtggcgggaggagctggctcaccaccctgtggacaaatcaggccttataatttgtgattctgtggctttgtctaaaagtccctaaagcaccttgatatccagtctcacagactgctcacaacagtccacaaggctggtggggagtgcttcttttgaatgatatactaacgacaaaaataatagaagtgaacattctttgcaatgtccaagcagctagacacacttaagaccattaagaaagccaagaaataagacccagacaaggtgggcagaagttggaaggcaggagacaggtgtgaggaggtgggcctttctgatctgccagcccatctctcctccccttacttcctcagagtttatccagagattcctccctcgggagctccaaatcgtccgtaccctggaccacaagaacatcatccaggtgtatgagatgctggagtctgccgacgggaaaatctgcctggtgatggagctcgctgagggaggggatgtctttgactgcgt

SEQ ID NO: 1648 - DNA, 1149 bp, Artificial sequence
  DNA replication origin
gccccggccctgccctgccctccccgcgcgcccccgcggcggccgcccgtctttgctccgcgcagcccgagcccctccagagtccgcggcgcccgacggctccagacacgcccggcgccgtccccgccgccttcccgccgccgcctccaggaggctccgcgcgccttcccgcctttccccgggccgggccgggcggcgaggcgggcgcgggcggcgacggcgcggccattgtcccgcagcccctcccgggcgcctcccgccgcgctcccggcccggggacgtctgggggaggcgcgcccggggcccgcatcccagcactgccgccgcccgggccgtcagagcccgcggccaggctcgcggcgggtcccgggcagccccgacgcccgcccgccctccgccggcgccgcgtgcagccacttaccgcgggccgcggcgcaccggccggtcgcgcgcgcgggccgagggaagattcctggttctcggctggggaaggaccccctttcgaggccgttcctttgcgccctaaaacaagtagccccaacgtgagagaaacaaaaggtatttgctgacgtgggcgttggacagaaacgcccgagggctggggacacaattaaaggggcaacgcacagatttcaggcaccaaccagcagcttcgcccactccccctgcccttgcccacactcgctgcacgctccagagacaccggggtgcccagattctctagcagttgactgcggatcatgattttagtcaggagctgaaatttaaaattgtactttacgttgggaaaggcgcctccggagggcagaagggctggatttctaggatctggggatttggtttaggaaagagggagggacttaggcgtgcccacaattactgtataagtacatgtgacattattgtacttaagtttagcaacgtcaaatgcaaaagatttccacagaattttcccttgtactgaagcagttattttagttgaggataaccttttctaaacctgtacaggtcagaagcatttcatttgaataggaaaacccagagaggctgagataagagaacataattcttagttaagtccagagaaatataaaattagtaaaaatagcaagttgcgtcttttccaatgcaagcattcatcgtacacca

SEQ ID NO: 1649 - DNA, 894 bp, Artificial sequence
  DNA replication origin
tcttccctcggcccgcgcgcgcgaccggccggtgcgccgcggcccgcggtaagtggctgcacgcggcgccggcggagggcgggcgggcgtcggggctgcccgggacccgccgcgagcctggccgcgggctctgacggcccgggcggcggcagtgctgggatgcgggccccgggcgcgcctcccccagacgtccccgggccgggagcgcggcgggaggcgcccgggaggggctgcgggacaatggccgcgccgtcgccgcccgcgcccgcctcgccgcccggcccggcccggggaaaggcgggaaggcgcgcggagcctcctggaggcggcggcgggaaggcggcggggacggcgccgggcgtgtctggagccgtcgggcgccgcggactctggaggggctcgggctgcgcggagcaaagacgggcggccgccgcgggggcgcgcggggagggcagggcagggccggggccggagtctctgcgggcgcggccaggggcgctgccggggaacctggctcccagggcagtagcccgagtttctcggtgcagcctccatccttggttttatgtcaagatgcgacatctgggcttagaaccgagggcgaactcaccgcgcctaaccaatgttgagctcccaactatttgcttctggacggaaccttacatgctcatctctacccatgcggaccgcctcttttgtgagttagtcagcggcttgttcccttccccttcagatgcgcttatgtatccccgattgttccaatggccctactccacatcattctaagacgcgtttggaagcggtagattcacacacacctggtgggcttctaaccacacacgtcaatatcacctctatgcttgataaacctttatagttgcacaactttaaatg

SEQ ID NO: 1650 - DNA, 1343 bp, Artificial sequence
  DNA replication origin
cacctcggcgtcccaaagtgctgggattacaggcgtgagccaccgcgccgggcccacaatatacttctatctatctaacaaatttctactcatccttcaagccctgctcaaacttcatctcttccgtaaagtatctcccagacagccccatgtgtgttctcagggcactctgtatgcagcacatcttcacacttattgctccagttacagaagtacatgtgtctgtctccctgatagtgagtttcctaaggacaagcagagttctcattctgctctatatcctagggtggggctctgtaagggcagacaggcagaaaccagatgaactccaaggaggaaatctgcccaaggtcgaatggcaaagctggaagtaaaacccaggcctcctgacctccaagctgtgctgttagcacacatcgtgctgcctccaccaccccacccatggtgccaggcctctgctgggtgctgccctcacacagccgcctcttttaaacagagagaggagggaaagaagcagatgacaggaggctcagaggagaggaagccagcttagttggggcccctgacctcgggcttccttgggccctgggcagcctgcctctgccactctgtccctgtccccagagaaccgcagagctctccaaccctgttcagggatgtggctgggagtccatgtgacattgtgcaggcaagagtccgtgtgtctgactgtagctgtaggtgtggacagcagtatgggtgagtgtgtgtgtgtaagaccgctcagctttgtgcccctgtgtgacagtgaaggggtgtcgggagctatgtatttgcaccctcacctcttggtacactgggaagtcccagagccacagtatgacctgggacagaaatacacctcaccccaaacccctcagccacaggtcccttcccccaataatcagccgtgccctgccaggagggatagtggggagggcccctggacccttcccccacccatcccaggccagacgggagagaacaagccctgacagactcttaacttcaagctggcagatgcccagccttgcaccaagtggcttccacacagccacttcagcaggggaggcctctgtctccaactgacatttgcagggaggaatgaaggctagcgagaagtgtctttggctgctatgggccaaatggcacttgagcggtggatgcccactcgcctggaagggttaattttcatgtagtcccgggagggggaggggtattataaaaagccacagacaaacggaggtgccaggaccccgggacggcccgactccccgatgtcccctcacgaggcggctccagtgccccaccccggctggaccact

SEQ ID NO: 1651 - DNA, 781 bp, Artificial sequence
  DNA replication origin
cggccggccccgggccgggcgcgcccacttggccggggctcctgccgggggaggagggagcggccgcgcggacctgggggcggggagaggctgcccctcccggaccagcctggggcgggggtgggaacgggggcctggagctgtctttccaaacctcccagccccctcgtcttcccgaaccttctctccacccttcctttcgtgaggtcccgttgcagggggagtcagaaggggggtctgaagccccagggagcaccttccctgtccagcctgggagggtggaggcagggttgggcgggctgctcaaagggagccagcacccctctcccgcgagtgtttgggggtgtccgctgccgctcagcgccctctggtccccacccaagaggggaagggccgcagccaccctctgggcactccgggctgtccccggcagctgtcgtgaagggcggggcagggcgcggccggggaggagggttcacggccacaccccgcgcgtttggggacagcctggagcctgggggcgggctgggtggctggggttagagagaactgcggaggagtttacgcctatcacattgagtccatatttaaccccactttctgccccaccctttgaggcttcctggggtctctctcctgctccacctgtcaccccactcagcccacttctgtcaacttcaagacatacctccccccacgtcctcagcccactagtgtgagggtcaaaccagcactgacgtctttctccccaagagagaagctgctgggccccttcccagac

SEQ ID NO: 1652 - DNA, 890 bp, Artificial sequence
  DNA replication origin
gctcagcgccctctggtccccacccaagaggggaagggccgcagccaccctctgggcactccgggctgtccccggcagctgtcgtgaagggcggggcagggcgcggccggggaggagggttcacggccacaccccgcgcgtttggggacagcctggagcctgggggcgggctgggtggctggggttagagagaactgcggaggagtttacgcctatcacattgagtccatatttaaccccactttctgccccaccctttgaggcttcctggggtctctctcctgctccacctgtcaccccactcagcccacttctgtcaacttcaagacatacctccccccacgtcctcagcccactagtgtgagggtcaaaccagcactgacgtctttctccccaagagagaagctgctgggccccttcccagacctgggcttcaggcgttcttccttcggattcctttttccacttagctaccctgtctggggaggtctttgactcaatcgcagaagaatgctggcaccataacaagccccaggggctggggtgcctgggaggccggtgggggaagcatgccgtggtgttgaatgtgtgtgggcttgtgtgcccctgtgtgactctgcggtgattgtggggtacatgtctgtgtgtgagcatgtggatgtgtgattgtgtgatctcagggtgaatgtgtgtggtgattgtgccatggtggagtgtctttgtggggctggcggttttgactctgtgtggggggcatgcatatggtcccgcttgtgactctgactgtgtgcttgtgcgtgactgggggttgataaatgttcattcatcctcgcgtctgagtgtgctgcctgtggctgtatatttatatttctctgtctaatgcaaggggg

SEQ ID NO: 1653 - DNA, 1144 bp, Artificial sequence
  DNA replication origin
tccctcactgcctgggtgtccttctgtttccggcctttatgggtggccctgcctgacccccctgacccatggccaggcctgaggggccgggtgggtggtggaaggagggtgcacagtggaactcttgtgcagggtatcagggtggggccagtccctgctctgtgttccagcctggcttgagtcctggcaggccagagggtgagctgctgctctgcccacagcatcatctcaacatctgttccactgaatgggtctggagctgctgtggaagctgcccaagaaagcccttggctgggctctccttccaggctattattgatccctttgcctctggctcctccatctctcagcctgtgccctgggccatgacatgacaaggatgtggctggtatggctatggcatgtgaacacaatgctggttcagggctgcagttcaaaatgcttcatctgggaactggaggttaataccaataaggcttgatgagggagatggggaatcagcgtggggacagggctagctgaggggaccagactgagtgaggggattggggctgagtgagaggatggggactcagtgaggagatggggacctagtgaggggatggggcttagtgaggggatggggctgagtgaggagatggggacctagtgagaggatgaggacctagtgaggggatgggactcagtgaggggatgggactcagtgaggagttggaggttcagtgcggagttggaggctgagtgaagagatggggctcagtgaggcaatgggggttcagtgtggagttggaggctcagtgaggggataggggtttggtgaggggatggggctcagtgaggggttcgggctcagtgaggggatggggctcagtgaggggttggggctcagtgaaagcttgaattagagaaggggtagacaagcctctggaactcattaccttaatgatctcttcccaccccagctctggtcctggagcctacccctggtctatattcagcttgaccctagagggacatggctgtgcaccttggtatcagtgacctgtatctgggaccaagacaggcaacaccaaacagtcctgagtggcaaactgtgaggccttaggggttagggggccagggctgggagggagccacggaaacc

SEQ ID NO: 1654 - DNA, 1737 bp, Artificial sequence
  DNA replication origin
ctaggctcaagcaatcctcccaccttggccttccaaagtgttgggattacagacatgagccactgtggcaggccttgaaattcttaataagttttttttttttttttttttttttttttttgagacagagtctcgctctgtcacccaggctggagtgcaatggtgcaattttggctcactgcaacctccgcctaccgggttcaagcaattcgcctgccttagtctcccaagtagctgggactacaggcatgcaccaccacacccagctaagtttttgtatttagtagagaccgggtttcaccatgttggtctggctggtcttaaactcctgacctcaggtgatccatttgcctgggcctcccaaagtgctgggaatacaggcctgagccaccatgcctggcacctgtaacacttttctcttgaaaactgcattctctacattccctttcctcaccaactaacagaggaagaggctgggttcttaggagtgctaggctgggccaagagcacccagagtacagggctggttcctgatccagaatgggtgctctgggattgtgggctggatctgaatgaatggtggttagacaagaaactgaggcccagcatggacactgggtggtctgccccagggcccccaggtgggagagtgtcaatgatgtcccaggttcaccacagctgagcccctggggacatgcagggggctaaggcaggttagggagatcccactgcactctagtaatcctgcaatgttatggtgagtgctatctacagtgcgccggggctgactgggctgggtggcccagacaaatgggcccctgccctcgtggagaccaggaccaagagaaagccgtgtgaccagagtcagattgggtgattctggccaccccactggtatggacatcacaaggcccttctggggactgacggaggaggttcaagggtgctgaacccacagctggtccccagcgcaatttctagtccttagggtttgaagccttggaccagcctgagacaaaacccagatgaccatcttggctcctctcccgctgaccacctctgtccccttctggcctccatttccgttgtcgtgggatcagatgatataaaagggcttggtcagctgtaatagacccagaggcctgtaggcaatgagtacagcaatttcaggattcttaatgtttcctttcctaccagcctcccagtcacacctctcacctgcccagagttcaaccctaattagtgttgagcatctcagtgggaactcctggtccaggcaggagtgccctggggcctcaaatcctagtccaagggtaaacggaggaagggctatcctcatcttgccaccaaagggtgaggcaggaacacagtggacctgggcccccgctgcacaccgaagatggttggagcctggaaggtgtggtaaagagcgaggaggcgaccccagtcagcagatgggagggaaatgcccactgcgggtcacaggtcttggacgtgtctgaagcctctattcctggcgcaagcgccccaacactgtcggggcttggaaggaattctccaaattcccttattccaggaaaaaatattccagaatcccctgtctattcccagcccaaacttgggataccaagtctcctggggtccaaccccagcctctcgctcctcctttcctgcgcccttcccctttccgtccccaccccataccaccctcttccgaacagatctcccgcggtgccc

SEQ ID NO: 1655 - DNA, 2258 bp, Artificial sequence
  DNA replication origin
gcgctcccgccctgcggccgctcccgccccgctccttccctccccgccggcctgcgccccgcccgccgctcggccggcccctcccgcgccgctcccgccgtccgctctccgcgcccgctcggcctccgccgcccaaacttttctccgggcgcgcgtccccggcggccgcccccggcatgggcaccgcgccgcagggggcctgacccgccgcccgctccgcccccgcctgccatggcggcccgcgcgccccccgccgcacctgcggccgaggagccggggaacccgggcggccccccgcgcaggaagaagtcccgctccggcgcgtccggcctccgccgcgccttcagctggctgcggggcaagcggcgcaagaagaaggcggcgggggccgagggcgccgaaccggccgccccccgggccaagaaggcggaggacaaggccaagagggccaagggcaaaggccgaggtaaggcggtcggcacctgggctgagcgcgggggggcgtcgagggtgcggccgagggggctctgccgggggtccgcgcgcggcgtgttggaggggggtgacccccaggagctggtgctggaaagcgaagaggccagggctgagtccgaacacttccaccctgcgctgccttccgcagtttccagacccagtcctgccccgctgtgaggggaggggacccccggctggggcagggatcccctggcagagcaggaagtgctggtagcccgactccagggcggtgaggcgattccccctcccccaggctcaccgaggttctgccctctgctgagtcagggggtcagagacttaacgctggcctgtggccaatgggagagacaggtggccttgggtctctggtggggaccctctgggtctggaaggtcaaccgcactcacaaagagtttcagctccagctggatctggatttccagccccacaaaggacctcacatggagcacagtgtgccctgccttagcttcttaacagtgctggcttttcccacctggcctccctcaacgctcacctgggccaggccacaaacatcacctcctggggtagtgagctcaccaaggtgaaccaacccgcccctccctatcactccttcttccagccctggagaaacatgccagtgtcggaagtgtgcttacagatgggggaaactgaggcccaagctcagtggagaggctgtacctgggctggggtgggtacttaaaattcaacagctaattctcagtctttctgaatttgagtccctgggctcctcctctggcctggacgggcagcctgaaaggcggggaagccgacctggcccatccctgctggggtcattttcagttcctttcttgggccttccctcattttccagtttctgtcttccttttgatggggagggcttgagtctttgcaagagggtggagctcccttggggcttgctgtcctgggaagtccacctttcctagactgctgctgcagtgctggaggtgaggaaatggctgggtgtgcgggcccatcccattctgcctgtgtttaccctcccagtgtcctttaaccacctcttctgggagagttagaaggaacactttaggggtcaggaagagggtggaaagcctcatgtgtgattgtatccggcttgatcttccttttggataagggccctgcttccctgcggcacagccacacatagaagtgagggtgctggggctggggtgactgggccaaaccctgagggaggactggatttgggtgaggggtgtttccaaagcctctgcagtcctaacaggacatggagtctgtcccagggctgccccactgggattcagtctgaagtcatccccgtctcattcaagagggcattgcagcaggatgtattgtggtcagactgtcaggattggcaggcagaaggctagtggactagcagtgtatactccagggcaatggacctttttcctctgggagaccagcctggaaggcagggggctggaaaagctgagcctgtaggtcactgctccaacagcctgggtttgggttcattgggtcagtggccaggcctccctcttgccttgtgtttggtatcaggtggctctgggctttctgggcagcatgtcggcctgatttgagcccacgtgcatgggtaacacctccttgcccctggctgttgtttctccaggtctggaggtggccctgggtatgactggaggaagtcctgttcccttttactccagcctcctattattgcaactgtttccttgtca

SEQ ID NO: 1656 - DNA, 1045 bp, Artificial sequence
  DNA replication origin
acctggactggccaggccttcccctgtgcgccctaggctgggcggctcagccggtctcccaggtcccgggaggggcggagccgacgggatgcgcgccaggccccgcccctcctccgggcccgcccccggcctggccattggccgcagagctcgggggcgtggtcgagctggggctgggggcgcccgcggtgcccgcccgcgagtctcgctgcctccctcccggggctgcgggcccggcggccgggctggctgggccgcgcttgggttcccgcgccggctcccgcacccgcaatggggaactcacaccacaagaggaaggcccccagcggtccccgggtccgcagcttctggcggttcgggcggtcggcgaagcggccggcaggtaggggccggggtgggggcggggcaggcagggaggagggtccctactgcggtcgtcgccaccgctgctgccccctcccggggcttggagggtgtgagtgtgggggggtcgggaatccccgcgcagaccccacccctcacaggcacacggagacacacgtacacggtaatacctacgggcgggcacacgtacatgttcgcagtttacacagtcacacgcacaacacccactcaaatgtacggacacgcagacacaggatcacatacaccatcacacccacactctcgtaccatcgcagtaggacgcacacagcctgagacataggtacatgtatacctatgcatgcggtttacacagccacacgaactacacccacgcgcagatccagacacacaggcacacagtcgttcacacacatcggtcatgtgggtacagttgcccagcgtcttaggcacacagatgtacacacaggttcataactgcacaaccaaccggactcgcattcaggctcacagcagaccctaaggcactcggacacacacgcttatttcccagatcttagcccccaacaggctgaaggctgaaagtttgtaggagggaggggagacaaaggtggaagggagaagctggaaacccggggctggagtctggggaccgcctcca

SEQ ID NO: 1657 - DNA, 1001 bp, Artificial sequence
  DNA replication origin
gtggatcacctgaggtcaggagtttgagaccagcccagccaacatggtgaaaccccgtctctactaaaaatacaaaaactagccaggcgtggtggtgggcacctgtaatcccagctacttttgaggctgaggcaggagaatcacttgaacccaggaggtggaggttgcagcgagccgagattgcgccactgcactccagcctgggtgacaagaactcgactccatttcaaaaacaaaaaacaaatggagttgagactgagcatggaggtgggagggaaaagtagctgagggtcctcttgaggttccattgtgaatgtaaacctcggtacctttggttttacttgtgctgaggatcctaagtcatcctcggcctcagcctctgctgtgacaagcccagatggggactggagcttgagtataagtactcaagtgccagtataagtactcatttcattagtctgtgagaagaggaaggagagaatacaaggcagggagagaggtctggagtctgcaggccacagggagccagtgaaggtgtttgagcaagggaggagtctacaaaagtggggtgttaggaagatggctctagggtgggggcaggtgcaggcaggacaggttgaggggtggggtggtgagagtggaggctcagagactgttgcagtaatccaggggagaggtgatgaggtgagggctggggacagggtgggggttgtgggagtggagaggagtggcagctgcagagacacttcggaggaagtggctgaattgataagacctgggattaaccagatgttgagagtaagggccagagggagctgtgtgggcttctgtgcttgaggctgcttggctgggagatggtagcagagataaaaataagtccctatgctgtccctttacatcagttaattcatttgtcctttgtcctccaacagtcccacaagccacaggctattctcccattttagagatgaggaagctgagttcggagaagtgaagtcact

SEQ ID NO: 1658 - DNA, 903 bp, Artificial sequence
  DNA replication origin
ccagagggagctgtgtgggcttctgtgcttgaggctgcttggctgggagatggtagcagagataaaaataagtccctatgctgtccctttacatcagttaattcatttgtcctttgtcctccaacagtcccacaagccacaggctattctcccattttagagatgaggaagctgagttcggagaagtgaagtcactttctcaaggccacacagcaaggagatggctgaatctggattaaaactcaagcctgtcacattacaaagcctgtgcccttaatcagtttaggaatagaagggtgtcatcttatgacaccctgcacgtcctctgggcagagaaagcctgcggccccggccccgggggatttggactatgtaaagaggactagtggaggaagcactgtggggagggttaggggttgaggactaagcattaaagcctccaagcgcttagagaggaagcaagtgggaaggggaaatcaagactcaaggaagcgttgatcccgcagatcaaatgcccttgtaaggtagagaagggtgaaggtgtatgaggtgaggcctcctgactgctggaaagatactgtaacctgccgggattgtttggtcttggcactcagggatccacccaactctccccttcccaggctagctgagcactcggtcctgggtaggttggggaatggtggtggatgtgaattggtaacccaggaagacccgccctcttccttttcccatgcgttgcactgtcaagctcacacacatggccctccttctggttggatttattgttcccattgtgcacatggggagactgagggaagggactgctggagtcagaccatctggaattcttttcatccttccccctgcctgtagacctggaggtttaacttcttggagtctggg

SEQ ID NO: 1659 - DNA, 942 bp, Artificial sequence
  DNA replication origin
ggccgatggccccagtgctggggtgggagcccctcctggagcacccacggagcgcagccgcaccatctgcaggagcgagggcgtgaccaggggcgcacctacgtcctccctgggaggcccaccacccttgctacagcccaccggttccttctgagggagcttggccacatgccctggggcggaactagcaggagctggggctggcggagctggaggagggtctgggctacccgggggctgaatctgcaaagcagtagctgaggaggacgaagcagccggggagctgacaagctctggggagcctgaagggcctgcaggctcagggctggccacagagaaaaaagcctcctctggtggggggaagtcagccatggacaggtcctgctcctcaggggcagggggtgggggagggggccagttgggatcttggaggggctcctcagcagtctctgaggcagatggtgcctccacaaccacctctggcttcttagtgggtggtgggggtggatgataagatgggggtggggaaggtgggggtgactggtctttggagatgacaggagactcctgcagtggagtcaaggttgtctggggagtgggaggggactgaggactggcgtcagtggtagaaacaggcccaggaaccacagcaggggcggctagagcaggggcagctgggttagggctcctgggcttggagggaggtggggagaagggggcaggcaccttggggtgaggaggtatgacaaacctgtcacccaggggggtcaatatctgtggcccagagcggtctgagggggctgggtcagaggaggaggaacataaagacgtgagggaagaggagacggaggccccaggggagcgaagagacgtgacacgctctggtttagggggctgggccttgcctggggaagcagggggacctgccaggcccttgggagg

SEQ ID NO: 1660 - DNA, 575 bp, Artificial sequence
  DNA replication origin
gaggagcccctccgcctggcagccgccccgtctgggaagtgaggagcgtctccgcccggcagccgccccgtccgggaggtggggggcagccgccgcccggccagccgccctgtccaggagggaggtggggggcaacccccgcccggccagccaccccgtccgggagggaggttgggggtgcctctgaccggccgccccgtctgggaagtgaggagcccctctgcccggcggccaccccgtctgggaggagtacccaacagctcgttgagaacgggccatgatgacgatggcggttttgtcgaatagaaaagggggaaatgtggggaaaagaaagagagatcagattgttactgtgtctgtgtggaaagaggtagacatgggagactccattttgttctgtactaagaaaaattcttctgccttgggatgctgttaatctataaccttacccccaaccccgtgctctctgaaacatgtgctgtgtccactcagggttaaatggataaagggcggtgcaagatgtgctttgttaaacagatgcttgaaggcagcatgctcgttaagagtcatcacca

SEQ ID NO: 1661 - DNA, 1167 bp, Artificial sequence
  DNA replication origin
accctgagtggacacagcacatgtttcagagagcacggggttgggggtaaggttatagattaacagcatcccaaggcagaagaatttttcttagtacagaacaaaatggagtctcccatgtctacctctttccacacagacacagtaacaatctgatctctctttcttttccccacatttcccccttttctattcgacaaaaccgccatcgtcatcatggcccgttctcaacgagctgttgggtactcctcccagacggggtggccgccgggcagaggggctcctcacttcccagacggggcggccggtcagaggcacccccaacctccctcccggacggggtggctggccgggcgggggttgccccccacctccctcctggacagggcggctggccgggcggcggctgccccccacctcccggacggggcggctgccgggcggagacgctcctcacttcccagacggggcggctgccaggcggaggggctcctcacttctcagacggggcggctgggcaaagacgctcctcacctcccagacggggtggcggtcgggcagagacactcctcagttcccagaccgggtcgcggccggacagaggcgctcctcacatcccagacggggcggcggggcagaggtgctccccacatctgagacgatgggcagccgggcagagacgctcctcacttcccagacgtgatggcggccgggaagatgcgctcctcacttccaagactgggcggccgggcagaggggctcctcacatcccagacgatgggcggccaggcagagacgctcctcacttcccagatggggtggcagccaggcagaggctgcaatctcggcactttgggaggccaaggcaggcggctgggaggtggaggttgtagcgagctgagatcacgccactgcactccagcctgggcaacattgagcactgagtgagcgagactccgtctgcaatcccggcacctcgggacgccgaggcgggtagatcactcgcggtcaggagctggagaccagcccggccaacacagcgaaaccccgtctccaccaaaaaatacaaattgcaggcgtggcggcacgcgcctgcaatcccaggcactcggcaggctgaggcaggagaatcaggcagggaggttgcagtgagccaagatggcggca

SEQ ID NO: 1662 - DNA, 1726 bp, Artificial sequence
  DNA replication origin
cgttccagactccctctgagcaggaggattctgcagtctgggctccatgcctagtttgtttcaagattagcttctgtgatttctttttttccaacttttattttagattcaaggggtgcatgtgcaggtttgttacatgtcacaggagtttggtgtacagacaattttgtcacccaggtaatcagcacaatacccaataggtagtttttgaatcctcaccctcctctctgaaatttcttaagcaagaacataattaaataagcatgcattgccagaagggagggaaagaagaagaaagttggtgattaaaatatatttttaaaaccgagatccctggttacactaaggttagggaagtaaattaatgtgctttagatttcctaggaaactgaggcctaggcccaggtttacagctgtcccctcttcctttcctcttcagagagtacacactagatgtgtacagactctcctccgtggtcacacagcacgattccaagaaggctggagctgaggtggtaaagcaggtggagcaccctttgctgagtggcctcttataccccggactgcaggtacttaagggggatggagtggcccgatgaccttttctgctctggtttgatgacaggcatatcttattgcactttgctttactgcactacgcagatattgtgttttttacaaattgaaggtgtgtggcaaccctgtgtacagcaagtccaccagcaccatttttccaacagcatgtgctcacttcgtgtctctgtgctacattttggtaattctcacagtatttcaagctttttcattattatcatatctgcatggtgatatgcgatctgttacctttgatgttaaatattgtaattgttttggggcaccacaaactgtgcccgtataagacaacgaacttaataagtattgtgtgtgttctgactactctaccatccagccatttcctcactctcctggcctcctcatttcctaaaacacaacaatattgaaattaggctaattaataaccctacaatggcctctaagtgttgaaagggagagtcacacatagctcactttatttatttatttatttttgagacggaatctcgctgtgtcgcccaggctggagtgcagtggcgaaatctcggctcactgcaacctccgcctcccgggttcaagcaattctctgcctcagcctcccgagtagctgggattacaggcgcctgccaccatgcccggctgattttttttgtatttttagtagagatggggtttcaccatcttggccaggctggtcttgaactcttgacctcatgatccacccaccttggcctcccacagtgctgggattatagacgtgagctaccgtgcccggccgcacatctgtcactttaaatctacacctagaaatgattaagcttagtgaagaaggaatgtcaaaagcggaggcaggcggaaagctcggcctcttgcaccaaatagccaggttgtgaatccatagggaaagttcttgaaggaaattcaaagtgctactccagtgaacacctgaaaaatagaaacagacataagtttcacttatgctgatatagagaagattgtagtgctctggatagaagatgaaaccagccacaatgttaccttaatctaaagcctactctagagaaaggccctgtcttcagttttatgaaggctgagagattggttcatgacatttaaagggaaaaaagccatc

SEQ ID NO: 1663 - DNA, 1417 bp, Artificial sequence
  DNA replication origin
atctcccttgccccaagttcctatttcctttctatttctccatcaccaccactgccacactcctacccccatctgccactactgtcttgatgtgtccttccctcctaaggacagtggagcattacctgctgggagatggcaaatccgatgacaacctcatcctccagaacatcccagctcaccactgcagagttggccttgaggtgcctgacggtgacgttcactggggctgagggactgtctgggggacggggaggcacctaagcctgagcatcccctattgtgaggcccagacccactgtctcataagtaagaaggggaaacctggggaaggccatgcaggaggggaaggaagaaactaaggcctcaagtggggtccagtgacatggctctcagctcttcagtgggttgaagaaccaagcccaagaggccccaggctcctcatgactgggacggaagcccctgctggccacaggccggccccatgaggggtccaaggctcaaagtgatgggcctgggccggggccctatctaagggatgggtggttagagttgtggagagagttatgtaggggacataggtggacagaaactgaaggttagctgatgaaaagcagacaaaaggactccccagtccagtgctcttttgacaatactgccctgtccaatgagtgaccttgcgcgaaggagaaagacccagagatcgagaagtgtcaggctggggtgagccctggactgggagtgaggagaacagaagtatcctcagagctgtggtggcccaggcagaataaagcctgcggaagagtctgtgtgagcctcttatccatgctcttccagccccaagatgcaggtggggaggtggcaggggaagatggggtcactcagagcagggcccctccatggcgagtggagaggagagaacaggtaggggaagaggatgaatgaggaatcactccagaagagacaggagggaagtgggggtgagagtgatagggatagtgggggtcagtgaggaaaaccgtccaggagaggggcagtgcagtcacataaggctcagtatcttccaaggggcaggtgcagcacggggcagagctgcgcctgagcagcacccctcaccccacagagagtgaacttgagacccagggggctgggcctgggacctgagggagacagagccagacatggagggggaggtggagagacaggacacagacaggtggtggcagacacagaaccagaggacagagaagtggggcatctgagaaagacagctgcgagagagcgctccccgagccacggagggagagatgagccgggcagcggcagccaggagggacaaagacagagtggcaggagaggctgggcaaggacgggccggccccatggggcaggccagacactgtaccagatcaggggt

SEQ ID NO: 1664 - DNA, 799 bp, Artificial sequence
  DNA replication origin
cttccaaggggcaggtgcagcacggggcagagctgcgcctgagcagcacccctcaccccacagagagtgaacttgagacccagggggctgggcctgggacctgagggagacagagccagacatggagggggaggtggagagacaggacacagacaggtggtggcagacacagaaccagaggacagagaagtggggcatctgagaaagacagctgcgagagagcgctccccgagccacggagggagagatgagccgggcagcggcagccaggagggacaaagacagagtggcaggagaggctgggcaaggacgggccggccccatggggcaggccagacactgtaccagatcaggggtgccggggcccaccccacgccctgcgccctcaggtgccagcccccatccccttcacacgtgctcctgcacagcgggaccccatctgcccctgcagagttggcttgcagggctttgagaggtcctggggacacagagagaggcccaggtgggggaactggtgtcctcagctgctccctgggtcaaagaagggagctagggaagctgaggcaaagacctggggttaggggaatgggattaggggactggggaccacaagaccctaggaaacccagggctgaggtgacaggggagatttggaaactgaaggacaggtctgggggtcaaggaggtaggaagacgctgggggctgggttaggggagcagtgtttgggccgagacaggagtccctagggggcagagaaaggaccaggggactcccaggtagctgggctcgagaggagcc

SEQ ID NO: 1665 - DNA, 1864 bp, Artificial sequence
  DNA replication origin
actggctgccagattccaggcaccagggctttccccagaattaaggcccaagcaccccatgcatcatgaggactgagaaggctgtacccccacagtcacaactctccaaatcctccaagccccctccttcagccgccttctctctcaagccctcaggcactgccatctcctccctcccaatgccctacatctatctaggttttacccaaagaggccagcagatggcgccaaggttcccctttccccagcgctggactggaggccaagaccccaccaggaccctccctccttttctcccctgcagggacgggagtagattctgtgtcctctaactgaaccctctccttcctgctggttcctgtgctggaggcctgaagaggctccagttgctcctgcgggcctcctggttgtcttcctgtctgatggatggggggtggggggtccctaggggctaagctgcagctggtggggcggggccgggtggggtggggcaggcagcagctgcggggagaaagagagagaagataataaggggagagaaagagaaagagagcaaagagaaaagagagagagaggtgctctggctccggggctcttctcccaaacgggtcgaggtcccagctgaggctctcccaggacaaggtatgtggcgggggaaatgatagggctgggcagtgtcaccctgccgagtggggcaggtctgggggcactgaggggatgggcaggaaaattctgctgctcaacaagagcccctaagctcgcttccatctcaccccttccaaggtgaccaaggaggaacacagggccagcgaaggagtcctgggtgggcataaggagaggagggttgtctatcgctcctcttgacccactgtgtgaatctgcaccaagctcttcccatcggtagacctcacttccttaatgtaaaaccagggggatggagaggaagaccctgaagacgtttctgtggcagaactttgcaagacgtctcctttccaaagaaaattagcccttccagggcttctggaaaacctttaagacccaaaggaatgccccgctagtagtggaatttcggatagtcgtgggagggggctcaggggttcttgctgagacaaaaggccctgagccctggtccatgcctctctcctccaccttgtttctctggctgagatgagggaagggggctggagccactccccttctcagagatgctcttagagattgctgcagactgttttctggctggggaggagctggccccggccaattctagagtctcacgaatctccggatgggtgaagtcactctgggtggggagacagttcagttaagcacagctttgggagtcagatcagcctgtgttcaaatcctggctctgctgcgggtccctggacaagtcaagtagcctgtccaagctgcaggctcctcctgtgcaaagtgtgcagagtatgactttacagggttgccctgagaattaagccacataatgcaaagaaagctcagcatagtatctggcccctggtagacgctcattactgccctcactatggggatgaaaatgaaggaaaaggactggcctggggtcacagagctggactctccagtgagacagagcagcctcttcccaaccccactggaaacacggagccctagtgtccacttagcactctctgctcaccccagccttactgtgatctctcccctctgctcccgtctgccccagccgcaaggcctcgggtctaccgtggaatgaggggatccctaggcccagggaagggaggcgcgcttaggggtgggggcacaaacgggcatctcggtggcacttgtcctctctctaccctgggaaagggcagaaagcggcagccaa

SEQ ID NO: 1666 - DNA, 893 bp, Artificial sequence
  DNA replication origin
gatgggatgtgatttgcattttaaaaggctcactttgcccgctccagtgtgcaggctggatggcagagaacaggagtggggggccaggtgccctgtgaggaagcaaggagggtgctgcggtctcacggccagaaaggatgcagtgttggcctgggtggtggcaggggacagagagagaagtcgatggaggatttgggatgttttttttttgtttgtttttgtttttttttttgcaggaggagctgatggatcagacatataggaggagatgaaaaggaagcagggcagaggtcagccctccaaagtccagattctgaagccagaaacccctggctgggtgacatagggccaagtaactctagctttctgagcctaaaatgcctcctctggtcaggggtggagaagaggaagagagaaagaaagaggtaggaggacgggggcggggggtgggggggatggggagggaggaggacggggaggggggaagggagaaggaggagcggcagaatagagccttctaatcgggtaaaggagacctcctcaaatctcttcagttcttcagagtctacacaggaaggctcccatccaacagcactcagagaggttgagaatctcacccagtatcacaaagccagtcagtggcagctccaggcctcaaagcctggaccctggctttgcctttggagacagattctcagctgcacaccagtcacccagattcctcagaaacagtggggccagaggccccattttagaggctcagagtggaaggcagtggaagaggtggaggcagctaggggaagatgagagaggggtagaaggacaaaagcctgggagtgaagactgcctttacgttcactcctcagctcagccccagactgccggagtgacct

SEQ ID NO: 1667 - DNA, 1695 bp, Artificial sequence
  DNA replication origin
agcagcccaagatggggataaactgagtcccccaaggataaagaggaggatccagaccactcaggagagagaggaaggggtgatgggggagggggctgaggaggtgagggagggtgggaccgtctccccgaccccagcacagctggccccccaggcctggtggggaaatgggagggagcttgccactggagggccctggggtgggggctgagcagcgagtctctcccagcccccaggtcctcacgcaggaggcagctgggaaccacccacgctcatctggtgtctctcacgcctccactgggggtcccaacatcagagccaaggcacacagtgaagccggtgttccggagagcccagctgtccccaccccaccccggctcctcagttcctccagccgagacctccccacctgcctccaagcaggagggactaaggctagactctgaggacttgagaggctcagtctgggagcctggaggcggagccctggggtgccaggaggggctgagctgccgatgctgaagaaactctgggctgggaagggccctctgggcagatggcaaatgctgccggctttacctgcgaagtaaatccagaaaccagacccaccccggccatctctcagcctgaaatggccccttctcccaccttgcccccaactcctcaaagtctcttcttgacataataacccaaggaagctgtccacatggaggtcacaccctctcactctgctcaaagccccccaggacttcccatctcatctggaataaaaagcctaaagtcattgtcataggccccaaggccctggatggccccaatggcagttaccattctaactgccacacccaaatcccaacgtttaaaaacacatgtctaatatcgacatgtatattgtgtccattgtttattgtctgcgcctgtagtcccactatctagacagaacaatgctggccgcagaactagtgttttatatgtatttgtggaatgaatggatgagggcgcacacactggaaaaatcacttaacccctttgagcccatttcttcatggggacaataaggaccaacccctagaaatggaaaaaggacaaaatctcagcccagcatgcggagaatgttgctgaggctgggggcaggaggagctgggctaggggtcatcgactctggagaggagctgtgcggtcggcaggcagtgggtaggtgccacaggatccccaggcagatgttctgccctcctgtcatggcctgcacaatcagaggctggggagggaggaagggagggggtttccttgattggaagggggagtgggaggagcagctgacaccaaagttgggaggtgggattaattctgagaggggggtcggggtgaggtctggagtggtgggtttgacatgggggccggctcgccaaggtggaggtggggaagggggcgtgtctggtcccctaccccgaagacctcagtagctggaggaatgggcgctccacgctcccagctccgttagttgggagttgaggcgcaggagcagggagggtgcccagggtgccaattcggccctcgaagcgacgtgcggctcagagcccaggtgggtatggggaaggaagcggggcggagtggcctgggatcgcccccggctcaggagagagacctcttggcactaccgtgtccctccattccggccaccagagccgaggtgcc

SEQ ID NO: 1668 - DNA, 1150 bp, Artificial sequence
  DNA replication origin
ggggaccggggaactgagggcgtccccttctctccggggcgggggtggggggcggagcccagcgcgccgctccccagcccccagggctggcggggacccccccaggggaggggctccgggtgagcgctgcggggcgtctccctcgcagtcccgcccgcccctcctgccgcccctgccgcgcgcgccgcagcagcgccgccttccctgcgcagtcggtgtctccgcgtcgctgggtgagtgggggcagctccagccggggccgggggatgagggcagggggttcccggagctgggggcccacgtccagggcttcccaacaccgccgctcccgggcttcccgggaatccttgccccgggtggcgggggcgctggggactgggaagcgcgcggtgctctccagggtcctgaccgccgagtggccggcccctaggaaccgcgttcgaccgccctggagcgccccctccaggaggggccacgcgccgggcgctgtcctagtgctgagcggatggaggcgggggctgggggacagagctgagggaggtttggagcgggtccccggggctggcttctcaggtcgagctgagggggttcttcccatatgggggactggaggtctttgcgggcagctgaatcttcttgcaaccgggaggggcaactccgagggtggcagggcccagggggcactggaggagctctcttgctccgcgcatctctctgcccccaccccggtgacccagttccttggaccttgaggagggcagtgcgggacatgccccagcccttctcatttccttagccctttcccactcacttgtccggtgggtccttagcctgggccataagaggctggtctagaaaggaggggcaccaacttacagaaacatgcatgtgacacaccgccgaggacacacacgggtcctccaaatggccacacgggctcattccctcacgctgtgacgggtgcatacctgatcacatgcacatctgaggcacatgcagggacatagatggaaagacacggcaggcaaatgcaatgcaaaaaccagcggcacacatcatgcatgagcacatgcactcacaacacacccattcacatgtgtgcagagcttcatgcacatgtatgcacaaggaggcccctccttgccctaag

SEQ ID NO: 1669 - DNA, 1479 bp, Artificial sequence
  DNA replication origin
cgcccccgggctctctgacgtttgctgcccccgcctgggcaaggtggagtggggaatcacggaggcgtggggagccgagggcttcgggaaggcgtgtccgggaaggcctcccagaagagagggctatcgggcgggccctgccgcgctcccttggagggctgggtgggaaaggagcaaaggcgccgcaggtggaagctccgagcgggcgcaggggtcaggagagatgttggaggacaccggggcccgacagtggagggcctggagcggcgggctcaggagcgcgtgccccggggcacgcgcgtcgggggtaagtaccgggctggcacccgggcccagggcggcccgcgctcggtggtcgaaagggggcgccgggccaagggggcggcactgcgctgcggggccgtctgctgccggcagggggcgcggcgcgggctggagggccagaggcagctgggcccagaggggcggggaacagtatgcaaatgaatgcaaatgagcatctgcagcgggcagggaccgccaggcttggctaggctgggctgggcagagggcggcagccgccacgtgcagtagctcccgaggcgacgtgaaagagagttcttgcgctaaatgtacagagcacgtagggcttggcctgtagcctgggtcgcagtgccttggagctcaaggaccgaacctgtctcctcaatcttccagctttacccgaccgacacttcctccaagaagcctcccttctcccatcccataaacttctgctgcctcagatccagcttcagcctccacactggtctcttccagcctctgtccctcgggtctgtcccccatgctgcctctgaaagctctttccgaacacagatctccactgttacgtccccagcctgcacaccaccccctcactcccgtcacacacaggcctcctcttaggcccgccttgcacccagctcctgctgctgcttcccacttctccttggggctcagtttacaagctgttttcttagcgaggtcttctccaacccaggctgggtcagggtgcatatgggcccagagcctggcggacttttcctttgcagacatctctccagaagtaattatgtctttgcagggttgttcctgcaaacatggacgtctagctaatgcccatatccccagaacctgggaccaggcagggacttccctatttaaaagccattggcacttcccactgccctctgtaccaagttcaaaccattcagcccttgggatttaagacgctttacaatctgtccactgctgaccctcctccatcaggtctcccctggctgggtgattctgccaacagccaaacacccctggcccttcagattctccagcatttacagtctttgcctggaataacgatactaagtaccacttatcaggggcccgctctgtgccaagtacttcacatgcactatttctaaacctcacgcaagccctgaaaaacaggtatcatgatcccca

SEQ ID NO: 1670 - DNA, 1154 bp, Artificial sequence
  DNA replication origin
ttccgcccaagagccacacccaagtcacggtaaccacagctacgccggcaacccccaacttgccgcgggcccgcgcggggcggctcctcagagcctcagtttccctttctagagcgggcccgccgccgccggtgggctgagggagggcggctcggcgccgggcgggccgggcggggcggcgcctgactcagcgggcgggccatgggctgctcagccggtccgaccggccgggaggggcacgagccgcgggggcgctgcggggccgggcggcccggggggtgacgggaagggaggccggtccggcgccgcccagccccgggctccgggcgggaagtgggcgagcgcgacggtgcggggcgcgcgggcgacgggccagcgggatgggagcagggtcccccggcggcccgcagcctcgggagccgcgctgaagccgggggcgggaccagcgcggagccgacatgtgtctgcgcctcggtgagcgactgggggcgcgcgggaggccccgaaccaccccaaccctcccacaggagcggagcactgagcccggaacccgagcccccagggggccaggccacctgctctgcctctaacttactacgaggccggggtcgggtcactttcctctctgggcctcagtttccccagcagtgaaatggaggggaggagcgctgcgggtgtcttctcgatgtggctgtagcgtctcttaccctcgccctctcttgcctttcctgcggaggcgcacgactgccctcggggacccccgggtgggcggcagaggagacgctggagagagcagccccatcttacccagaagggaccccggggccaggcctcagcttccccacccttacaaggggctcccacttacatactctccactctcccgaggccaggaaggaaagccgtgggcaaaaaggatcagcagcgggggagcgggactaatgtgccccctccttccactgcctgggcacggtgatgctgcttgtgggcagcagagtcctggggcatccccgctgtctagccgagagaccttgtgagcctcagtttctttgtctgtaagagggggacagtagttcccacctcctaggactactatgaggatgagggcagcttctaagagtaaagcgcttagcaccttgccggctgcgctgcta

SEQ ID NO: 1671 - DNA, 919 bp, Artificial sequence
  DNA replication origin
tcgggttccgggctcagtgctccgctcctgtgggagggttggggtggttcggggcctcccgcgcgcccccagtcgctcaccgaggcgcagacacatgtcggctccgcgctggtcccgcccccggcttcagcgcggctcccgaggctgcgggccgccgggggaccctgctcccatcccgctggcccgtcgcccgcgcgccccgcaccgtcgcgctcgcccacttcccgcccggagcccggggctgggcggcgccggaccggcctcccttcccgtcaccccccgggccgcccggccccgcagcgcccccgcggctcgtgcccctcccggccggtcggaccggctgagcagcccatggcccgcccgctgagtcaggcgccgccccgcccggcccgcccggcgccgagccgccctccctcagcccaccggcggcggcgggcccgctctagaaagggaaactgaggctctgaggagccgccccgcgcgggcccgcggcaagttgggggttgccggcgtagctgtggttaccgtgacttgggtgtggctcttgggcggaaagcccccgggcccaaggctgggacggagaggggcagcaggggcagtgaaagagctgctggggattggggtctgcccctgcctgctgtgtgacctcaggcaaatcgcctcccctctctgcgcttgcctttagcgcccgcgagtcttgtcttccacgctgaaaaaggcgctttaagtctccttcttagtcgggagggccttcagttccgtccttggaaaatcagggataattcctgtccccgaaggtcgtggtgagacaaaataggatacaaaaattaggtaagaaagcgctttcggccgggcgcggcggctcatgcctgtaatctcagcactttggaaggcctaggcaagcagatcacctgaggtc

SEQ ID NO: 1672 - DNA, 1424 bp, Artificial sequence
  DNA replication origin
cttgggcggaaagcccccgggcccaaggctgggacggagaggggcagcaggggcagtgaaagagctgctggggattggggtctgcccctgcctgctgtgtgacctcaggcaaatcgcctcccctctctgcgcttgcctttagcgcccgcgagtcttgtcttccacgctgaaaaaggcgctttaagtctccttcttagtcgggagggccttcagttccgtccttggaaaatcagggataattcctgtccccgaaggtcgtggtgagacaaaataggatacaaaaattaggtaagaaagcgctttcggccgggcgcggcggctcatgcctgtaatctcagcactttggaaggcctaggcaagcagatcacctgaggtcaggagttcgagacctgcctggccatcatggtgaaacacccccgcacccccccccccgccccgtctctactaaaaatacaaaaattagccggatgtggtggggcaagcctgtaatcccagctactctggaggctgaggcaggagaatcgcttgaacccgggaggcagaggttacagtgagctgagatctcgccactccatctcaaaacaacaaaacaacaacaacacgctttggaaactctccagactgtctgtatggacaaagtgtagacctagcaagagcacatagtaggagctttattagtactgctctgggttgctgagccctttaatgtgtcaggatggaccccagtgaggtcccttgttagtctcagcatccctttggcataggtaccattcctgcacctttgggctcagagaccacagaccactcacccaagaccaccagctggaagtggtggagtaggcaggagcctggaatccccttgggtctctgtgcccaagttctgtagagtggccacaccgtggccacctccctgggctctttcggtccttggaggcacttactatgggaactgggcaacatctgttcacagcttgccccacttaccccactgggcagtgtcccagaggtcaggggctggctggctgtctctgggtgcttggttggagcctgtcctgggggctgtccactgtctgtgtgtctttctgcacacctgtgctgacacctgcggcgctgtgtgtgttgggcagttgggtcagatgtagagcctctggagtttggagaacgcattaacaccatgggaggaagtggagccatttctcctaggaagccccccggggcatcccatctggtaaccccccagcagagctgcttccctgtcacctgctgtctgaagggggataatgtgcagggaattccgggtggggagacatatttgtcaggtggaagggaagatgggggcagtttatgaagacatcgggctggcatcggaatgttgatgtcctcagacaatcttttagtagggcaatttgggtagtacttactca

SEQ ID NO: 1673 - DNA, 968 bp, Artificial sequence
  DNA replication origin
ttcggcggggtggtaaccatcaggcaagcccagactagtggtgtgaacgcacccgacaccccgccccctgccccagggctcgaggtggctgctaagcattcggtgaggggaagggagctgtccaagttaggagacagggagaggcggtttttttgttgggggaatgccctctgtccggaggtgaggacagtatctttttttttttttctttttttttttggagacggagtctcgccctgccgcccaggctggagtgcaatggcgcgatctcggctcactgcaacctccgcctctcaggttcaagcgattctcctgcctcagcctcccgagtagctgggattacaggcgcccgccaccacacccggctaatttctttgtatttttagtagagatggggtttcaccatgttggctaggctggtctcgaactcctgacctcaggtgatcctcctgcctcggcctcccaaagtgctgggattacaggcgtgagccaccgctcccggccaaggtggggagtatctcttaatgagagtggggaggggatatttggccaaggagggaatgagaatattctgagggggcagcgcgtcggaggggtgtgtccacttggctagggacagacttagcattgcagaagaaggcgtgttctccctgacaaccaccgctgaaagttgggatggaggtgactggggaataggctctcgggtaccctgagcactatgtgttctgtgccacgctatcgggaggcactctgtcgttcttaccttgctgccttgggtagggtgaggggtagacagatatgttctttgtccagagtctcaatgggggcactgagaagaatgcccagaggttggtgtgataggagaaattgtgtttctgaacccctttgatcttgagttcttgatgacagtctttttaatgcaccatgtaggctgaattttaaagggcagtaaattaaaatatgcaata

SEQ ID NO: 1674 - DNA, 932 bp, Artificial sequence
  DNA replication origin
gccagccgccccgtccgggaggtgaggggcgcctctgcccggccgcccctactgggaagtgaggagcccctctgcccggccagccgccccgtccgggagggaggtgggggggtcagccccccgcctggccagccgccccgtccgggaggtgaggggcgcctctgcccggctgcccctattgggaagtgaggagcccttttgcccggccagccgccccgtccgggagggaggcgggggggggggttggccagccgccccgtccgggagggaggtgggggggtcagccccccgcccggccagccgccctatccaggaggtgaggggcgcctctgcccggccgcccctactgggaagtgaggagcccctctgcctggccagccgccccgtccgggagggtggtgggggggtcagccccccgcccggccagacgccccatccgggaggtgaggggcgcttctgcccggccgcccctactgggaagtgaggagcccctctgcccggccacgaccccgtctgggaggtgtgcccagcggctcattggagatgggccatggtgacaatggcggttttgtggaatagaaaggcgggaagggtggggaaaaaattgagaaatcggatgggtgccgggtctgtgtggatagaagtagacatgggagacttttcattttgttctgtactaagaaaaattcttctgccttgggatcctgttgatctgtgaccttatccccaaccctgtgctctctgaaacatgtgctgtgtccactcagggttaaatggattaagggcggtgcaagatgtgctttgttaaaccgatgcttgaaggcagcatgctcgttaagagtcatcaccactccctaatcttaagtacccagggacacaaacactgcggaaggccgcagggtcctctacctaggaaaaccagagacctttgt

SEQ ID NO: 1675 - DNA, 1806 bp, Artificial sequence
  DNA replication origin
ggctgaccccccacctccctcccggactgggcggctggccgggcggggggctgacccccccacctccctcccggacggggcggctggccgggcagaggggtcctcacttcccagtaggggcggccgggcagaggcgcccctcacctcccggacggggcggctggccaggcggggggctgatccccccacctccctcccggacggggagcctggccgggcagggggctgaccccccctcccccctcccggacggggcggctggctgggcggggggctgaccccccacctctctcccggactgggcggctggccgggcggggggctgacccccccacctccctcctggacggggcgactggctgggcagaggggctcctcacttcccagtaggggcggccgggcacaggagcccctcacctcccggacggggcggctggccgggcggggggctgacccccccccacctccctcccggacggggtggctgccgggcggagacgctcctcacttcccagacggggtggctgccggacggaggggctcctcacttctcagacggggcggttgccaggcagagggtttcctcacttctcagacggggcggccgggcagagacgctcctcacctcccagacggggtgcggcccagcagaggcgctcctcacgtcccagacagggcgtcggggcagaggcgctccccactcagacgatgggcgggtcaggcagagatgctcctcacttcctagatgggatggcggccgggcagagacgctcctcactttccagactgggcagccaggcagaggggctcctcacctcccagacgataggcggccaggcagagacgctcctcacttcccagacggggtggcggccgggcagaggctgcattctcggcactttgggaggccaaggcaggcggctgggaggtgtaggttgtagagagctgagatcacaccactgcactccagcctgggcaccattgagcactgagtgaaccagactccgtctgcaatcccggcacctcgggaggccgaggctggcggatcactcgcggttaggagctggagaccagcccggccaacacagcgaaaccccgtctccaccaaaaaaaaacgaaaaccagtcaggcgtggcggcgcgcgcctgcaatcacaggcactcggcaggctgaggcaggagaatcagaccgggaggttgcagtgagccgagatggcagcagtaccgtccagctttggctccgcatcagagggagaccgtggaaggagaccgtggagagggagagggagagggagagggagagggagaggggtttttgttttatttttaaagaggtttttttttttgagcgggagggtttcaatagattctgccccgcaagcttcccagccacctttctcatacctacagctcatggtgtgtcgccctgccttaaaccccacactggctccccgtgcccgatgagagagcatttagatccttcataactaagactcaccttcaccctcaccagtcccaccgcctccttgcacgggagaccccatccctctggacccggggcccttccagggatagccatcacttgcatacttgcgactgctcttgctgtagggtcccctttccccctttgtgaacctagcgaattcctagaccctacttaattataataaagcaacagagggtagaaactggcactaaaatgccgcttagcaaaggtcacaaaggtgaaagcctgcagaagtcaagcaggagagagaaatacggctggtgtatcaggggcataagaaaaacctgtcttgccgggcgc

SEQ ID NO: 1676 - DNA, 896 bp, Artificial sequence
  DNA replication origin
tcctcactttccagactgggcagccaggcagaggggctcctcacatcccagacgatgggcggccaggcagagacactcctcacttcccagacggggtggcggccgggcagaggctgcaatctcggcactttgggaggccaaggcaggcggctgctccttgccctcgggccccgcggggcccgtccgctcctccagccgctgcctcccgggcggcgctcgccggcgcggcggcaaagactgagacagctccgctgcccgctgaactccatcctcccggcggtcgggcggcggcggctgcggtcggtcacggcagcggctccgcttcatatctgcagctggggcccgcgggcgtcagcgccgcgactgtcccggctccgcactgccccgggccgcagcgcagccgcgccaaccaccacccgcggccaccatggccggacgggctccctaagccaccgaccccagcccgcggcgccttcgagccttctggggcctccggcgccgcgacctcctctgctagtctttttaaatgttaatgctctccctattcttcctttagtaatagagcctctacctgttggctaggcatatgtctgtccagaataaaagctatgtttcccagtaccccggctgctagtcgtggcattgtaactaagttccggtcagtgcaatgagaatgaaagtaacaggtgcaattccaggttatgcctttagagggaaggggggcatcccccactgccccattactccttcctgctggctgaaatgcagaagtgatggtaggagctggagctgcccttttggaccacaggaaggaagccgcatgttgatgtcaaaccaaggagacagaaaaagccagggttccctgatggtagagccaccatatccactgccccttg

SEQ ID NO: 1677 - DNA, 861 bp, Artificial sequence
  DNA replication origin
ccagccgccccgtccgggagggaggtgggggggtcggccccccgcccggccagccgccccgtccgggaggtgaggggcgcctctgcccggccgcccctactgggagtgaggagcccctctgcccggccagccgccccgtccgggagggaggtgggggggtcagccccccgcccggccagccgccccgtccgggagggaggtggggggggtcagcccccccgcccagccagccgccctgtccgggaggtgaggggcgcctctgcccggccgcccctactgggaagtgaggagcccctctgcccggccagccgccccgtccgggagggaggtgggggggtcggccccccgcccggccagccgccccgtccgggagggaggtgggggggggtcggcccccctgtctggccagccgccccgtccgggaggtgaggggcgcctctgcccggccgcccctactggaaagtgaggagcccctctgcccggccaccaccccgtctgggaggtgtgcccaacagctcattgagaacgggccaggatgacaatggcggctttgtggaatagaaaggcgggaaaggtggggaaaagattgagaaatccgatggttgccgtgtctgtgtagaaagaagtagacatgggagacttttcattttgttctgcactaagaaaaattcctctgccttgggatcctgttgatctgtgaccttacccccaaccctgtgctctctgaaacatgtgctgtgtccactcagggttaaatggattaagggcggtgcaagatgtgctttgttaaacagatgcttgaaggcagcatgctcgttaagagtcatcaccaatccctaatctcaagtaatcagggacaca

SEQ ID NO: 1678 - DNA, 1530 bp, Artificial sequence
  DNA replication origin
tctgttgtcttagagcaaggcccactgttatgggcctccctatgcatagctatgactttgccctcatctgtgcttccttgggctccgtgggctagcaggccctggtgcctccttacaaccacctttggggccccataggcagagatggagttggtccagcatattggaatccctgccagtaagatcatctgcgccaacccctgtaagcaaattgcacagatcaaatatgctgccaagcatgggatccagctgctgagctttgacaatgagatggagctggcaaaggtggtaaagagccaccccagtgccaagtaagctgagaaccactcatggggaggctgggctgtggggagcctgggctgtggggagcctgggctgtggggaggctgggctgtggggaggctgggctgagggaaggctgggcttcagagtgaaggggggggtggggtgagggggtggagctggggcaggtcaccctgtcctggacccagccacagttgcaggaggttggggcaggtactcctggactgaacccaggatgctagggtctagctagaacaaaggcagaaataactggttaaagccctaggcagagtgagacccatgtgttatggaggccaaagtcacaggcttgagagagtcgagggagtggtcaggaaggctccacggaggaagtggcatttgaagcaggccttgaggaatgaatagaatttggagggggcataaatagtgaactgcgtaagcaaatgcattgaggttggaaacagcatgggacattcaagcgtaagcagaaacttagtgtggctgacgcatgctatgtgtagggggtgaaggagatcctggtcgggggcggggagccgatgcaaatggactttcgaaggggtcagggctggacgttttgctctggctgtgccttttacatgattactggacacccttggacttcccaggaggggccttggggtgaagggggtggccaggtgatgggccactccagtccatccaaagcagcttccatcgtattaatgggttctccttaaggctttgtttaaaaatggttcctctcatacacgacaagtttgaaagctctaactggtgtggagactgatttggagggactggagctgccccaggagagttggtgaggtctggaccagggcgcaggggctgcaggaatgggtcagggacatttagagaatggattggacaggacttgaaggttgattggctgtgtagggagagggaggggtcagggagcctgtggggttgggtggctctgagccatgtagctcacagcccttgattgagagatgtggctggggtggggcgacagggtttgtccagcagaggggcactgcgtgtctcatcaggatggttctgtgcattgctaccgatgactcccactccctgagctgcctgagcctaaagtttggagtgtcactgaaatcctgcagacacctgcttgaaaatgcgaagaagcaccatgtggaggtggtgggtgtgaggtgagcactgggaacccctgccatc

SEQ ID NO: 1679 - DNA, 893 bp, Artificial sequence
  DNA replication origin
aaaaagactggggaccatctgtcgattcatgatgataataacaataaacagacaggaatcaagtacttactaagtgttacaggatcattattacaaacaaataatttaatctgcatagctaccctgggagagaaatgcaactatccttgttttacagatgaggaaactggggctctgagaggggagtgcattgctctgggtcacacagctaggcaaggaatgtgccgggactcaaaatgactggattcagattagcagggggcggggagagcagcccaggatggggagaaggcaggagcaaggcaggctgctcctggtgtccttgggacaatgggctgcctggcctggctgaggaggcagtttgtgcctgggagttgggggatttagaccaggtaggtaagaaggtcacagttggaggagagcttcctaatgttaggctgggggtgggatagaggggtgggaggtgggggagggtggaagtgccagagcaggggagtgacaggtgctggatggggttctcaggtgacccaataggaagcctgagctggaggggaggggcaggcaggaagctgctagaatccatgggctaggtccctgggggcacccctcccatctggacataaagggctttggtgctggcagaggagccagactgacttcacaggccccacagacaaagaaaggggcccagccaaccaggctgctgctctctgaactccccaggggcctctgctctgggcaggatgttggagcacagtctgttcctccctcagctcctctctggcaggcagctttctctagagcagtggttctcaactgggccaattttgcttcccagggacatctggcaaagtccagagacatttttggttgttacaactgagtggggtggc

SEQ ID NO: 1680 - DNA, 1296 bp, Artificial sequence
  DNA replication origin
cgactgccccgagtgccggcgcacgttcgccgagcccgcgctggcgcccagcctcaagctggccaacatcgtggagcgctacagctccttcccgctggacgccatcctcaacgcgcgccgcgccgcgcgaccctgccaggcgcacgacaaggtcaagctcttctgcctcacggaccgcgcgcttctctgcttcttctgcgacgagcctgcactgcacgagcagcatcaggtcaccggcatcgacgacgccttcgacgagctgcaggtgcgctacccggcctgcctggggaaggggcggggccgggctggaggtggggccgggcggggggtggggtcagggctggaccgcgggccaggcccagtcagaatggtcctggggcggggccgccagcaaggtcagggccctatcaggagtaacgcggggcagggaggggcggggccgccgcatggcggggccgtgggggcggggccttgggcagtccggaccctgagggatctgagacagacctggagtaccggctggtccgcggttagggagaagtcggggatgcggatgggatggcggaaacaagtgagatcagaactggaccagatactgggctggggcagggttgtggacgaaccggaatcagagttgggcaaaggcagggccactgtcagactgagggcgaggtcgcgaggatgggtctgtattaaaccgggtagctgagctctggcaggctgggggttctgtgggggcggagaccggatcagatgtgcatcaggactaagaggagtacgggggctagaatgtgctggacaggtgagggtgaaacctaatagagtggtataagttagggtgccaaagtgctgagagggcaggtttgagtaccgagggttaggccaaggtgtatgaggggttaagactgagatcaggtccggatactctacaacaagtttagatttaagccagagtagaggccaggttgagtggggccaggacttaaaggtaaagatttggagaataaggcccagatgtaaggtgattcaagaagggaggggctagacctctaggagtctctagaggtttttgatgacctctttggctctgtcccccacatcaggacttttgaagactaagtgaaacggtacatgcagagtgacctgagcatagttggcatagaactctaatcggtctcccttaagacttcctgtcttcactgacaaactcctactcaacttttattgagccttgctcaaatatcctctccgtgaagccttctccaagttccactggtcaaacaaacaaacaaacaa

SEQ ID NO: 1681 - DNA, 937 bp, Artificial sequence
  DNA replication origin
gatgctgctcgtgcagtgcaggctcgtcgcagaagaagcagagaagcgcgcggtccgtgaggcagaagagcttgaccttgtcgtgcgcctggcagggtcgcgcggcgcggcgcgcgttgaggatggcgtccagcgggaaggagctgtagcgctccacgatgttggccagcttgaggctgggcgccagcgcgggctcggcgaacgtgcgccggcactcggggcagtcgcgggcgccctgcgcctcctgccgcacccagtgctccgtgatgcagcggcggcagaagtaatgctcgcagcccaggctcaccgggtcctggtagatgctcaggcagatggagcacagcagctcgtccttgaggctgcacgccatggcgccaggggcagcagagaggggggcccgaggggcaggggggcggctgagagagcgcggcgctgtcggaggcagcaccgagggctgggcgcggggacgaggcccgcacaggcaggggtaggagctaccggagaagggagggggtgctgtccggaaggagggtaacgcgaggaaggggtgcgcggctgagactccgtgggacgccagcccgggagggcagtctagaggtagtgggcagctcaaggcgatgggcgctgggaggaggctgtgagcggctgagggacggagatcctgacggggaggttctagggggcggggcagtcctaagggataggagctgggagaaggggatcccggagcggggtggagcccttaagggggtcgaaatcccggggtgggggcggtgcggggagggcgagaagctggggatggggaatcctgggggagggggcagccaggccgagccgtacattggctgtgaccggcagagaagaggaggggtgccggcccgctcagctgccggatcccggccccaaaccctggcccagcgcgaccccttacccccgc

SEQ ID NO: 1682 - DNA, 1428 bp, Artificial sequence
  DNA replication origin
tctcaacccggaaccagccgaatccgagctgccggtggccgcggctgcctccccgcccccgtgggcgggacccaagcaactccgcccccgcagcgggcgggggaggggcggggccaccagccggttgaccccgccccacccccaccatcctccagctcccagggaagcgaagcccagctgttccttcggggtgtgtacttggaactgcatccaggtctcgcttagggtccccgcggcgaggcggagcagctaatttgagagcacaacaaataaacaaggagcatctttctggatcatcgatttgaagatgtagaaaaaatcatattttgtattaaaacgaacaagaatatatttggaatacaacttctgcataaaatataaagataaaactcttgaaatgccctgcttgcttagagcgagttcaaggccctcacactcctaagccctggggtcccatttcctcttcactttcttaaggagtgcttggggagaagtttggaaagccctggctaacatctggccccggaggctgcctccattggcaaacaattctggagtgctgtatttgtgtgtgtgtgtgtgtgtgtgtgtgtgtgtgtgtaaggcggtgaggggtggagcaggagagagggagaaaaagtaataggagaacttgtcttgtgtgccagatggagaggggataagggatttctaggcagaggagacagcctgtgcaaaagcatagaggcgtgaaaggggagggcgcagtgaaggaagtgctagtaattctgtactgttgggggtggggtggagaaggagcctgggtgggctggagggcattgtgggtcatggtaaagaatttcttgaaggcatggggctttcaggcaagggaatgacctggtccgattgggtttcaggaagtcttggagataatcattataccatctgcaaggtgaagaagacagggagcttttccaatgtgtctgcggatgcacagcactcagcacacagtaaaggtgtgtagctgaataaccgcatcaacgccctgggttgcaggaggaaggaaagactgggcacccctaaggtgctgttgtcatcgtgcctgcaggaggtgagacccgaactggggcctcagcagtgggtaaggagagaagactagggtattgcaagtacagacacggtgacatttggtgatggttggatacgggggtgagggaaatgagccatagagggtggctaccagtttctgcctcctccagaaatatcttcattggtgttaaactttattgaggtacagtttatgaaaaagctctcagtttagttctctatggttaacactttctccatcacaccctcatctggcccagaatctccatcattgcgagaaaaatagttggttgctcatgcaacagcagtttctcaacattttcttatgggcagagccctgat

SEQ ID NO: 1683 - DNA, 796 bp, Artificial sequence
  DNA replication origin
gggccgggcggggggcgggggcgggccgcgcgctggggcccccactcgggccccggggcctcgtctcgcgctcgccgtcgccgccgccgccgccgccgccaccgcctggcaaagttgcgctgcgccccccgcccgcgccgcgccggaggcagagccacaaaggaactcctcgcccccctccgcccgcctgagccgcgcggggagggcaccggcgcccggccctaggacagccccttccccagcgcgggggctcccggggccccggcggccgtggccattgtcctgcccaggcccggcggccgcctcgccaccccactcctgggtgatggcaggctggggacttgggcctggcgggccacggccctgaccaggccgagcccgcgcggtgccaggctgcccctgggggtctccctcgaagacggccgcctggaggggacccccaggatggaccctcacccctgataacgacctgctcaaaatccaggccgattttttttttaagacgaggacataggggtggggagtagaagtttgcacaggcccagccacccctccctagccctaggccggatccccgacggatggggcggcccgaagctggcagtggctcctctcgcagagtctatcagaggtggcaccggctgtcccccggctccagacctcagagccatctgtgtgactcctcctcccgcctcaccctccccagccaatcagtcaccaagtcctcctgattcggcctcccgagctgtgtcagcttccaaacttacacttctacctgaggaggcagccggttcca

SEQ ID NO: 1684 - DNA, 748 bp, Artificial sequence
  DNA replication origin
gcccgacgcggcccccccggagccgggcgcctggcgcgggggctcgccgagcgcactgggggccgcgcggcgctgcagacccagcctcccgccgccgccgccgccgccgcctcggcgcttgcagaacccagaagtgaacagcaggcgacccggaaggtttgcgcgcggctccgcagcgagccagagccggagcccgagcccggagcctgtgccggagccccagcccggccctgctcgggccgccgggcgcggggctgcggccgcgtcccggaggcgccgccagcacagccaggtccgtgcgggcccggggcgcgcggggagcgggcccagcggcggcgggcgcctgcccgcgggaaagttgcgccgagttgcgggcgggggccgggccggggcgcgggcgctgtcagcgcgggccggggcgctccgagggcccggggccgcctgcgcctcgggcccggcccagagcggcggcggcggcggcggcagcggggcgcgcggggtaggaagtgtctcccgcggcgtgtctggggctggtctccgagtgtgtgtgcgtgtgtgtgtgtgcgcgcgcgtgtgtgtgtgttttcttaagccgggctattcaaaccctgctgcaattctccggtaaacaatgattcatggggcataatgcaaataaacggattgcaaacggcgcggttcgcgcactttgcagccggcccggtggagcagccagtgccggatttctccctttttttgcagatctgca

SEQ ID NO: 1685 - DNA, 1477 bp, Artificial sequence
  DNA replication origin
cgggggccgggccggggcgcgggcgctgtcagcgcgggccggggcgctccgagggcccggggccgcctgcgcctcgggcccggcccagagcggcggcggcggcggcggcagcggggcgcgcggggtaggaagtgtctcccgcggcgtgtctggggctggtctccgagtgtgtgtgcgtgtgtgtgtgtgcgcgcgcgtgtgtgtgtgttttcttaagccgggctattcaaaccctgctgcaattctccggtaaacaatgattcatggggcataatgcaaataaacggattgcaaacggcgcggttcgcgcactttgcagccggcccggtggagcagccagtgccggatttctccctttttttgcagatctgcagaatatggcgtccctgtcctgttttaaaaataagccaggctgccatttttgtttttcttttgtctgaaaattttaataaaactgtctgagaatgtgggagaggcggctggaagcagagggggcacccgaagggttggcttttttccttttctttggcgagagccgcgagcctttcggggaggtgagacacaatgcaattgcactttaaagaaaaaaaaaaagggaagctgccgggcgatttgaggggggagggctgggaatttaaagttaactccgaaagtttgctttgctttgcttctctttctttctttctttctttttttttttttttggaaggcggtgaaatgccgcgaaaggatctcgaggcccatttctcccccagccagctgcctttgcaggatttttgggaaaagttaactgccggtttcctcagagctgcgcgggatgggggtgggggggcggatgtggagggttgaggatgggagttttgggggaactgggaaacatttatttggaaggggctctataaacatggcattgtaaggagctagatcctcagatctgggggagagggccggcaagaggggctcagaatgggtccaggatttccagcaaagacccctggcatgaggaaataatcctgctgtcccaccaccctgccctcgagcagtgtggaaccttcgggagctgtgtgtgtggcagtgggcctgtctccttcatgggtggccaggaccccccgtgtaggctggaatctcgcccaagccctggggtgacccttggaccctgaggcaagtgagcttggccctttgcagttggagagccccctccccaacctggtggtcctcctgcccccagaggtggcagctggtggtaatgtcttccccgaccccaccctatgatgaacttttggttgggtgcaggcctgcggcccagtgggtcccgtctgagggaaggggcaggaaaggtagtctggtttgctagacctcctcggtgtgagcctcacccctgtagtatgctcttattcctttctgccactcctgccctacgcccgggaggtagaagcactttggacttcggttaagttcctgaagtatcttgctggac

SEQ ID NO: 1686 - DNA, 1177 bp, Artificial sequence
  DNA replication origin
tcattttggtctttcctgtcaaaataaacaatttcatttaagcaataataccagttaggcaagtgatttctgtaagagagagatacgagaaacttgacagggagcaagacttaatggaaaccctctgtgaggcatggtccctgtaagtcacttcttgacttactctagggtagcaggaagacaaaccttctggaagactgagatagccctgaaggcccatccttcatactgccctggttgaaaaggccttctaaccgcacaggcctgccatggaacttgccagaggtgagggccaccagacagtttgtcacacacttttaccaaagagccgcagactgccctagcttcagcctcttcagccccctccataaccacagcattctcatccacgtcgttgtaggtcagatgttgcacgtgacattgaacaaccacacgtggcctgtttcttgaagataactttccagaagtacaatttcttgagtcaaagggcaataatcatttgggtcactgtaaattgtcctgccaaactgcccctcagaaaggctatatctggtgacctcatgttgccccctgattttgagaaggatgtccgtactcaaggggtcagggggcagaagagcagggatcagggatgggcatttacaaatttgctgcagtcctccccagtttgtctctggacttggggggccttctgtatggaacctacggggttggcacagcagcctggggccctcctgggggatggagattggttggccagcactggggtgataggggtgggagctggttgagagtactctggtctggatgtgacctttgccctatggggcccactaagggggggtggtgggggtgtcactgaattccaggtttttcagcctggagatgtggcttcctggcctggtgggaggcctgctgtgctgtgaggctgggggacccacggggacatggatcccagacactggccctgacttgagtgggcgcagctgaggggtgctcgccccaggccttggggagggctctcttcccggtgacagtcgctctcttcccgcaggatggccgagcctcgatttaacaacccctacttctggccccctcctcccaccatgcccagccaggtaagactgacgtcgcccctccggctgccctaccctccttggcgctgcttcgcttcccc

SEQ ID NO: 1687 - DNA, 1099 bp, Artificial sequence
  DNA replication origin
gctgccctaccctccttggcgctgcttcgcttcccctgggttttggctgtggcctgcggggagcggggtgaggagcgaggggctcgcgggtggaccagcgggcctgggcaaggggcgggaggtggtccagacctcctcagcccgtcctcttcttcccgcagctggacaacctggttctgattaacaagatcaaggagcagctgatggccgagaagatcaggccgcctcacctgccgcccacgtcggcctcgtcgcagcagccgttgctagtgccgccggcacccgccgagagcagccaggccgtcatgtcgctgcccaagctgcagcaggtgccggggctgcatccacaggcggtgccgcagcccgacgtggcgctgcacgcacggccggccaccagcaccgtcacaggtaggccgagcgggcggggccggcggggccggtgaggactgggcaggagggggcgggcgtagcgggggacttggtgaggatgggacccggctaggtaagagcagggcgggcagggcctaggggtagggcataaagcttggagtggcggggttggccacgacgagccacagcaccggacttccaacgacccagtactggaaggacccttctccccccagtggacacgacaggagccggtcactgccccatggggctcaccaggaaagttaggttcacatagagaactttggaaatcacgagattctttgggaatccagagaacgaccctgaccagatttagggggtaagagaagacttccttggaggagccaaaaggcgaggaaaggttggcagcaaaccagggaaatgggacaggaagagggaaccgcacaggcggagggagtatgtgtgtaggaagcaagagtaggacagaccgtctggggtggggaggcccggaagatggtggtgatgacagctagctccagtcgagcgcctgtgtctgttcaccagtgttcattgtactcccagcagcctgtgaggtgtgtgctgttggtattaggtggaacactggaccgttttgacttagaaaaacagcagtttcatgcagttcaccttaatgtctctattcaacagatgaggaaactgaggcaga

SEQ ID NO: 1688 - DNA, 970 bp, Artificial sequence
  DNA replication origin
gggacaggaagagggaaccgcacaggcggagggagtatgtgtgtaggaagcaagagtaggacagaccgtctggggtggggaggcccggaagatggtggtgatgacagctagctccagtcgagcgcctgtgtctgttcaccagtgttcattgtactcccagcagcctgtgaggtgtgtgctgttggtattaggtggaacactggaccgttttgacttagaaaaacagcagtttcatgcagttcaccttaatgtctctattcaacagatgaggaaactgaggcagagaaaggtaaagccacgtgcaaccacggtttacagctagtaagaggcagaggccggcagtgtggctccagagcctgtatcttcactctgttttgatgctgagttctgctgaggcttcgaggaagcagggaccagattaaaaagggccctgtaggccacacagtggtttggacttgacccttgggcagtggggaaccactgaaggtttttaagtaggggaggaaacactcagatacgggttgagaaaaccgagtctggctgctaggtggagacccggttgtcagggggtaagcatggaagcagggagaccttcaggagtgtggtggcctgggcaatgccgtggtagtgggaatggagagaagtggacagatatgagatacattgtgggagaagagaggacaggatgtaggagcatgaggggagggaggaggtgagggagactcccagggcaccgcccttgtgatggaatccccggagaaagaacagggttggggaaagatgtgagctcagtcttggataggttgaggctggggtgccaggcggacatcctgggataatgtcaaggggctggagccaccggaggcctcctcggagcttggtggataggctttcttgggagacctcagtggttgggcctttgttcctcccctgtcgcccctgctgctaggcaggtgcttctgcctctctc

SEQ ID NO: 1689 - DNA, 1087 bp, Artificial sequence
  DNA replication origin
cagcacttcagcggcacttttgggcccgaggcgctggccgagtcggtggcgcagctgcactcctggcactaccactggccgtcgtggctgctgcccttcgaacgcgacgcgcattcggccgccgcgatggcgtggggccagggcgacttctataaccacgcggcggtgttcgggggcagcgtggcggcgctgcgcgggctgacggcgcactgtgcggggggcctggactgggaccgcgcgcgcggcctggaggcgcgctggcacgacgagagccacctcaacaagttcttctggctgcacaagcccgccaaggtgctgtcgcccgagttctgctggagcccggacatcggcccgcgggccgagatccgccgcccgcgactgctgtgggcgcccaaggggtaccggctgctgcggaactagcgccgccgccggttcccggccctccggcttctccgccggcccagccggcccggcctcactcccgctccgggcgtcttcggccccgggaaggtgtggagtgggagtcactagaggaagagatcctgaaaccgggcggggcccttctggacgctgatggcgctctggagagcagagagatactggatacaaaagccctacccgcttcgtgtgcgccagtccgtgggagtgggagtaggagggagagctcctcgcctttggggagctcctcacttcaagagaaaaatccccttcccttagcttagcagtgagcgaggctcaactgcagtagagccccgagctatcagcctatagacctttcacccctgagcctgcagaatgcagctggtgtctctggagatgttttagtcccacctgcaaccccttttttaaatgaggagactgagatacaaaagaggaaacataactgcccaaggacacagagggtccgagtcactgtgatgtcagcggctggagaggcgtggctggcccctcgggatgtctctgggcaggagccacaggaagaaacacagggggcaccccgtcattcgctctgcccttttacctcccctgctcataagcatggtttgtacatatttcagtaatattatgataaattattcctgtgctg

SEQ ID NO: 1690 - DNA, 972 bp, Artificial sequence
  DNA replication origin
ttgttaaacagatgcttgaaggcagcatgctcgttaagagtcatcaccgctccctaatctcaagtacccagggacacaaacagtgcagaaggccgcagggtcctctgcctaggaaaaccagagacccttgttcacatgtttatctgctgaccttccctccactattgtcctatgaccctgccaaatccccctctctgagaaacacccaagaatgatcaataaatactaaaaaaaaaaaaaaaaaaaaaaaaaaaaaacaactttgacatgacaaaaaaataataataataattctgtggagggccaggcgtagtagctcacacctgtaatcccagcactttgggaggcccgagacgggaggatcacctgaggtcagagttcgagaccagcctggccaacacggtgaaaccccatctctactaaaaatacaaaaaaattggccgggcgtggtggtggccacttgtaatcccagctacttggagcctgaggcaggagaatcgcttgaagccgggaggcagaggttgtagtgagctgagatagcgccactgtactccagcctgggccacaggagcgaaacgctatctcaaaaataataattctgtgtgtcagtaattcagacagggctcagcaggaagggctcctcttctcatgctctcaaatgtctgcgtctcagctgggagaccaactgctgaagactggtgggggccagcttaggcttcctcactcatggcagcacccaagttctgggacttcttatatggaggcttagagctctaaagagagaaacgctgccagtcgtccaaagggccagtatgaggcaggagtggcaggcaatttgcaagcatcttcagtccaacctgccctgccccatctaagttgaaagatgctagggctagagggtccggagttccaaggccgggtgtggggaggaccaggcagcactggtggggtgggggtaaggttgcggtgggg

SEQ ID NO: 1691 - DNA, 900 bp, Artificial sequence
  DNA replication origin
cggccgcccatcgtctgagatgtggggagcgcctctgccccgccgccctttctgggatgtgaggagtgcctctgcctggccgtgacccccgtctgggaactgaggagcgtctctgcccgaccgccaccccgtctgggaggtgaggagtgtctctgcccggccgccccgtctgagaagtgaggagcccctccgcccggcagccgccccacctgggaagtgaggagcgtctccacccagcagccgccccatccaggaggtggggggcagcccccgcccggccagccgccccatccgggagggacgtgggggacagcccccgcctggccagccgccccgtccgggagggaggtggggggcagcccccgcccggccagccccccgtctgggaggtgggggggcgcctctgcccagccaccccgtctgggaagtgaggagcccctctgcctggccgccaccccgtctgggaggtgtacccaacagctcattgagaacaggccatgatgatggtggtggttttgtcgaatagaaaagggggaaatgtggggaaaagaaagagaaatcagattgttactgtgtctgtgtagaaagaagtagacataggatactccattttgttctgtactaagaaaaattcttctgccttgggatgctgttaatctataaccttacccccaaccccgtgctctctgaaacatgtgctgtgtccactcagggttaaatggattaagggcggtgcaagatgtgctttgttaaacagatgcttgaaggcagcatgctcgttaagagtcatcaccgctccctaatctcaagtacccagggacacaaacagtgcagaaggccgcagggtcctctgcctaggaaaaccagagacccttgttcacatgtttatctgctgacctt

SEQ ID NO: 1692 - DNA, 1218 bp, Artificial sequence
  DNA replication origin
tttcagagagcacggggttgggggtaaggttatagattaacagcatcccaaggcagaagaatttttcttagtacagaacaaaatggagtatcctatgtctacttctttctacacagacacagtaacaatctgatttctctttcttttccccacatttcccccttttctattcgacaaaaccaccaccatcatcatggcctgttctcaatgagctgttgggtacacctcccagacggggtggcggccaggcagaggggctcctcacttcccagacggggtggctgggcagaggcgcccccccacctcccagacggggggctggccgggcgggggctgccccccacctccctcccggacggggcggctggccaggcgggggctgtcccccacgtccctcccggatggggcggctggccgggcgggggctgccccccacctcctggatggggcggctgctgggtggagacgctcctcacttcccaggtggggcggctgccgggcggaggggctcctcacttctcagacggggcggccgggcagagacactcctcacctcccagacggggtggcggtcgggcagagacgctcctcagttcccagacgggggtcacggccaggcagaggcactcctcacatcccagaaagggcggcggggcagaggcgctccccacatctcagacgatgggcggccgggcagagacgctcctcacttcctagacgggatggcggccgggaagaggcgctcctcacttcccagactgggcggccgggcagaggggctcctcacatcccagacgatggacggccaggcagagacgctcctcacttcccagatggggaggcggccgggcagaggctgcaatctcggcactttggtaggccaaggcaggcagctggtaggtggaggttgtagcgaactgagatcacgccactgcactccagcctgggcaacattgagcactgagtgagcgagactccgtctgcaatcccggcacctcgggaggccgaggcgggcagatcactcgcagtcaggagctggagaccagcccggccaacacggcgaaactccgactccaccaaaaaatacaaaaaccagtcaggcatggcggcgcgcgcctgcaatcccaggcactcggcaggctgaggcaggagaatcagtcagggaggttgcagtgagccgagatggcggcagtacagtccagcctcggctcggcatca

SEQ ID NO: 1693 - DNA, 1194 bp, Artificial sequence
  DNA replication origin
aaagtatgttaaatctaactgaatgaaaccagaactgctttgctgtgctggttatcttaaggttcaagacagcctcttgcccgataaccaacacagtcaggtactttatttctgttctaaagtcaaaacgatgggaagccctacatcccttgtgacctaaacctaaatcctaatcaatagggtctgccacaggtctgttgccctgtaccagaataaaagatgggcgggtgggggaggtgggaagaaatacaagagcaagaaggaatttccttgcctcattagcctgtaatgttcatgctgacctagaaatcctggcagttccaacatttgggttgactcaggcggggaagaaaaatcccaggtgaatgataattggattacccagttatgctccagagccaaatggctggaaaaggccaggtcagtaggctgtggtacaaagtgacattattttttaaaccaaaaatggagatactcaggctgatggacaatgggatggaatagtttaaattggggctgtcctagaaaaatcagggacatatgatggatttaggtaggtagcttattttgcaagggatcctctgggcccaatatgctaatggagaggggattaaagatcaaacacgggagatatccgaggggaaggctgtcattgatttgtaagggaagaaaaagatgaaaagagtgtgttccgtacacagcacatgaaggtacatatcgtaggtatggagtaggaaggaaaggaaagttgttcagaaccgaaagtatgtgggtgagatcagttcaggttatggaagacgggtgggtgggcagtagcagggcactgactggtatccgacacggggcccagggcttagttcagatggtagcgtcgccactggtttgcaacctgaccttgggccaattatttccctgtctgtggacttcagtttaaatacagaatctcacaaatcccgattttaatgtaaagaagcaacaaatatagtctaccttcatttggcataggaaggagagaaaacgctcttctaaaaatggaagaaaagacacagaacagcttgtccctttccatccaattaaaaacctcgtgagactgaactagattaaaaacaaaactctccagcgaagccgcaggcgcctccaagatagggagtccaccaccaataaagtacggcagatgccagcagtctcgtcccc

SEQ ID NO: 1694 - DNA, 1450 bp, Artificial sequence
  DNA replication origin
aggaaaaaaattacaatagaaagtaaaatgcgataaatgccatagatggatttgaggtaagtcatttaaaagctacaaaacaggaaaagttactgccaactagagatgttcaggatagatttcagggaggacgaggcattgttctagagcagaggttgacaaactacagcccaatggccaaaaccatcacattgccagtgttcgtacagctcgcaagctaataatgatttctacattttaaatttttttttgaaaaaatcaaaagaattctatttcatgatacatgaaaattatctgaaattccaattctagtgcccataaataaagttctattggaacacaaccacactccttcacgtacatattgtctgtggttgctttcctgcggcaacagcagagatgagttgttgccacagaccgtgtgacctacaaagtctaaaatatttactctctggtccctggcagaaaaagtttgccaactgctgttcttgagtctggaccttgaaggataggtaggacctggacatgcaaagttgaggaaagagcattccaggaagaactggtggaacttaagagagggaggcaggaaagtgtgggcatgttagggaacaggagttgaggatacaatcctgtgttaccctagtttataaaacaaaatataagtgtaagaaatgcagaggcagaggagaaggaaatatgaatattaatgaaaaggggggttgaaaatttgaaaaatagaggagaaagggagctaagtaaatattcggggaatgtaaaataaatgtaaacaaagaagatgggatgaggcctgagagtggaaaggggtggggggagaagaaaggcaggcaacgaatatgaatactaaggaaggcaagaaaatgggaccatgttgggaacagagggaagtcaagaatggagagaagtgcctggcgtgtgtccagcaccttcctgcgcctcgcgctcctgagggtggggactgtgtcacgctgcacgtctctgtacccccgcagcccctcgcgcgcgtgctgaatgagtatgcttcgccacgacagcgcaggttcacccggtgcgcttggggaagataaccaacacttacgggactctgaccgtgtgccaggcacggcgggccgcctgaacccacttcctcaatcagcctcaaccgcgagcccgaggccgctcacggaggtgtgaccggggcactcgggccatgacttccctctgatcctcggttcccagtgggaaggagaatgacttgtagggtcgttgtgaacaataagtcggggacagcgcgagcagggtttggcacgaactgagctctcggtgactggtggtcgttagtcttctgactgacccccaggcccctcagggagtgaacggtccaaggcgggagtcgcgggccgccccgccaaggagcacttgcaccggctatcagggcagcctcctcgtggcg

SEQ ID NO: 1695 - DNA, 899 bp, Artificial sequence
  DNA replication origin
tttgagctggctggctggctgcccccagggaaagtaaccagtggagacttgcagtgggccagtaggagggggtatggcagtgaggaatgtgttctcctgggggctgtttcctcccagagcaggcagaccctccagtcccagctgggactgctcccactgacagctgtttgggggcaaagcccctcccccatggcaagctccctgctgttcctgctcctgtcaccttggcaaccggcttcttcaggctctgcaaatagaaaaggtcccttatgccgagaataggggtgggggagcaggtgggggaggggagtaaggggcggagaacagagcctaagaggttgggctttggaggggaaggagaagggcctggcttgcccttctcactgacatgaggactgagcaatggagggcagaagagaggcaggcagcaggggtcccttgggcctggccttcagggaagccgagtcctaagggagtgggccacagccccagataggagacttggttcttggagtcctcattctagtggataaactccaggctttgggtgcacactcaggcccaaaggtgaggagaaagttgctgactgggagggatatgctgtgataaaagggaactgtcgggttgttgaaaagccagggccctttcacccagttgggcctccagatgccaggtctttgttctgcatcctcagcccgcctcaggtctcagctgaggagcgagaactctgctggaaggccacacagctgctttgtttgaacacagagagcgttttgtgcagggggcagtgatttctgtctgtgataggctggacaatgcagtgttgctgattccaggattcttgggtaccctatttccctcccaaagcagcctccaaactgcaagcacacttttactta

SEQ ID NO: 1696 - DNA, 611 bp, Artificial sequence
  DNA replication origin
cagaagcatggcacagagccaggagctgatggacattttgagatagggagggaggagagagagatccatggctggtatctttgcaaatccatgggaaaaaggaaagtgtgaaagtctcctcctgactcacggccctgagttttctgggaaaggattcctgcttcctgaagaccttacctggtgcaatgagggggtgggcagccacagcaggaaccgtccggctgagcccagcccggccttccatgctccctggcacactgctgttgccatctcctttcttgtgtggctccatcacactgtcagctatgccaggcttggcacctgcaggggaagcctgagcagtatttctgctctgtgctggggtaggcagaggctggctaccgcccggcgtgggtttcagggccaagctgggcaggacaggctgagtgggggtggggcccgaggctgctgccgctggtgtctgctgtgttcggagggtcaagttctgtacctggaaaagaggggtctgtgggagtccagagaatgtggcaggagcaatgccagtatacaactaagagggagagagggatggatccaggaatggctgaatagaacaggaggttgtcaaatca

SEQ ID NO: 1697 - DNA, 1876 bp, Artificial sequence
  DNA replication origin
atcccagtcagtaaggagggccataaattccttcagggcccatcctatggtctgaatacagaactggaaattctaccttcccttgaggctgtgtgcttggcagtggagaggggttgggaaagaaggaaagggtggtgggagaggcacacccagatctgagtttaagttcctctttttttctttttccatgcttttcttaaaaatcctcatttctgtgtagaggctgttccttctacccattccttcctacatggaaaaataatatttgtttgtcaccccatcacacacattcagtcatctgcttgtagagtatacccatttaataggtgaagaaaatataatttttcatactaatgagagcatgattagtgcaaagagccaaagtaatcattactattctgctgctatctccccaatactgctcagtttcagggttatcattgctcaggctgccttcttcagactgggggaatttcactgtgggctgaaaaaagtgtgggtaaagtctaaaagacaggaatgttgggagtctggaaacccaagccactcccaggtggcaggcagcaagttgcttatgatttccaaggcagtgtagcagcctgcaagctgcactcttgaccttactctttaagcagtgatttttccttatgttcatatgtctgcttttactgccatagagcaaggtgcttgtccatgaattaattccctttgtcctgagctgcacgcagtgctgggccttattatggctactgacttgctaaggatgcttatgatgataatgatgatgcaggaatcaatgaagcagcaaagtcaacaagtacttcctatgtcttggcgctgtcaaaatccactttatcttatgttctagggagggaaaattaggctgcataaaaagtggtaggaggtataattcctgatctcacagaaactgaaaaactaattgtaaaggtgaggtgcaattgaaattataaggatcatcaagcaacaaatcagtaaatgatagttccattcaaacacagactacctcacagaatcccaacatcttctcttagttcaaagtctcacctcccttttcccaaatgttggccagaattgggtttcatttcttgcttttcattacacactggaaaatctcaactgaagtacttataaatataaaaaataaaatgggaaaatagggcagaaaattaagagggtagaataatctacatcctggatgatcaagtctcagttctatttctgtgagtgtagttaatcatactgaattgcacacttaaaatctagtcatattctgaccttccctcctctatccttcacgtgattgagagagcaatcaagagagtaagagagcacacttgaaagacagccacagctatcaaaagcatgagctagaacagaggctgtgtagaggctgttccttctacccattccttcctacatggaaaaataatatttatttgtcatcccatcacagacattcagtcctctgcttgtagagtatacccatttaagaggggaagaaaatataatttttcacattaatgagagcatgattagtgcaaaaagccaaagtcatcattaatgtcctgttgctatctccccagtactgctcagtttgggggttatcatttctatttcttttttccttttgtagcagctagggcagacactgtggagagtgtacactcaaatcttgttaagaaataagacaaaagtcttgagggagcatggcattcctttacagaaaaactgtacaggccaggacagccactgctccccatgcaggggagagagacttactgcagcaacctgggcacgtgggcacagtgcacttcccacactcttgtcgcctgtctcctcctgtgggcaagcatgc

SEQ ID NO: 1698 - DNA, 996 bp, Artificial sequence
  DNA replication origin
tgaatgaactttgaaaacattatgctaagtgaaacaagccagacacaaaaggacaaatattaatatgcttccacttaaatgagctatctagaacaggcaaattcatagagaatgaaagtagattagaggttaggggataggcaggggacaagggggactgaggagttattgcttaatggttacagagtttctgttttgggtaatgagaaagttctgggaatagatggtggtgatgattgcacaacaggtgagtgtagttaatggtactgaattgcacacttaaaatctagtcatattctgaactttccttctctatcctttacataagtgattgagagagagagcagtcaagagagtgagagagcacacttgaaagacagccacagctatcaaaagtgtgagctagaacagagggtgcaagctggggacagagagcaacatgagcatgcactatccaagaagtaagagagagtgtctgtgtgaattgaagagacagacctgctgatcaagcctgggatggcagatgctcagggagggggagactacaagcgacaggagagagagctggagcatgtgcagcaagggtgcgggcacttgggagagccacggggagccagaggcaggagactggtcaagggcgagcagcccaggaggcagcaagaaggtcgagtaggggagagagctcattagagggaaacggagctaccagtctggatcaatcacagcggggcaagagggcaagagtgggagcaagagcgagggggaggacgtgctcgtattccagagagccaaggcagagtgagggagggtgagcacactgaggatgggcccacccaaggagcagctctgagaaatcagtggtgaaagggagcatgggcacaggtgtgagagatggcagggaccaggggcagggaaagagtgggaaaaccagggactggggaatcaaaaactactgacacagaaaagacacgggtggttgggggtggtagtgggagg

SEQ ID NO: 1699 - DNA, 1117 bp, Artificial sequence
  DNA replication origin
gcagcgcgcgggggacaccggccgccgcgctgccggcttaaccctttgggcacccagctgtcacggtcgggccggagcgctcggccgggacgggccgcgcggggcggggcattgccatgggcacggacaggcgggcggcaggcggcctgacccctggtccgcggcgtggggcccgcgctgggagcccgcagtcccggccggcgaccggcagagcgcggcgcccccgggccgggaacgcgcagcgaggagggctgcggagagcctggggccgaggcttgccgggaacgggaaccggaacgggaacgggccaaggtcccgtcagtgactcgctttctccggggaccgacccccctcctgcggagaggcccgcgccgcggcagcccgtggtcttgcgcggcctgcgcctgctccgcttgtcccgcagagtgcggtgagacccgggcgtcgggcctgaccggggcgcccgctccccagccgcggcgtgacagcgcagccgctggcactttcggcccagagtcaagcgtggcgtggggggcaccagcagagggaaccgggggttgctggaactgggaggagagaacagtcgtctaaaggaaaagcgggccccaaggttggagaaggagggatgccctagaaaggcgctggtcccttgttttctgtgctgagtgatgacctgacacccatgggaaaaggtcgctgctggacacctggatcgggtctgtcatacacggaggaagcggctgttctacgtgagtgtctaacaaatttcttataaggcgaggtttaaattcatcttcccccctccccaggtctgctacagaagtgtcttcttgtaattatccccctcccccaattcactaagactggtggcagctttaggctcacagtgtaatttagcttttgcgacaatagaaatggtaggaggagagatgcgccactgatactaagcttgccctgggagtttcttggaagtgtggggtaaaaaatatttctatcaccagtggggatgaaaaatcggctaatgcgcccgtgatatcaatagagtttcttttgtgagtctaaagtcgttccttctaaatcaagagaaaatgcggttacaattgaaaagtaccagaaa

SEQ ID NO: 1700 - DNA, 779 bp, Artificial sequence
  DNA replication origin
tgtctgctttgatctttcagggtctgaggctctcacttcgacccctcagtagaactgggcccccttctgctcgagtgccctcccattgggcggtgctgttatccggaagcctatggaaaaggccaggatcgcaacaggtcccgcccccatgtgtcgcgcccgttccgatttgttccagtgccagggtccgttagaagatgacatatctattggctgaagacgtctgaaaggcagcaaacggagggggccgcccccggcgctcgcgcggttccttctgggaattgtggtctcagacgttccattcccagggtggcgccgctcggactccgcgtcccagcattccccgcacgagcccgggagcacttccgccctgttgtgaagtgggtgtctcggtgggtgagtccgggtggcggggcgggggcagctgagacgcaggctctgggctggagacttaggaggtggtggtgacacagggggctggggaaggtgagaggggagaaagaagcttatatgtgggggtggagggtgagggacggtcaaaggatgtagaggccggagatgggaagggtcatacaggggtcggggatgaggaggcgatagagggccctgggaatgaggagggccttagaagggtctgaaggtgagggggttgagggaggttttggaggtgggagagtcatagaaaggtctggagaccacagaggaaaggatagagggtctggggccctggcaagaagtgaagagggcctgagcttgaagcccgaccttaaaaatagtgt

SEQ ID NO: 1701 - DNA, 1266 bp, Artificial sequence
  DNA replication origin
gcacatcttgcaccgcccttaatccatttaaccctgagtggacacagcacatgtttcagagagcacagggttggagtaaggtcatagatcaacaggatcccaaggcagaagaatttttcttagtacagaacaaaatgaaaagtctcccatgtctacttctttctacacagacacagcaaccatctgatttctcaatcttttccccacctttcccccttttctattccacaaaaccgccattgtcatcatggcccgttctcaatgagctgttgggtacacctcccagacggggtggtggccgggcagaggggctcctcacttcccagaaggggcggccgggcagaggtgccccccacctcccggacggggcggctggccgggcaggggctgacccccccccccccacctccctccgggacggggcggctggctgggcgggggctgaccctcacctccctcccagacggggtggctgccgggcggagacattcctcacttcccagatggggtggctgccgggcggaggggctcctcacttctcagacggggcagctgctgggcagaggggctcctcacttctcagacggggcggccaggtggagatgctcctcacctcctagacggggtcgcggccgggcagaggcactcctcacatcccagacagggcggcggggcagaggcactccccacatctcagacgatgggcggccaggcagagacgctcctcacttcctagatgggatggcgccgggaagaggcgctcctcacttcccagactgggcagccaggcagaggggctcctcacatcccagacgatggacggccaggcagagacgctcctcacttcccagacggggtggcagccgggcagaggctgcaatctcggcactttgggaggccaagacaggctgctgggaggtggaggttgtagcgagccgagatcacgccactgcactccagcctgggcaccattgagcactgagtgaacgagactctgtctgcaatcccggcacctcgggaggccgaggctggcggatcactcgcggttaggagctggagaccagcccggccaacacagcgaaaccccgtctccaccaaaaaaatacgaaaaccagtcaggcgtggcggtgcgcgcctgcaatcgcaggcactcggcaggctgaggcaggggaatcaggcagggaggttgcagtgagctgagatggcagcagtacagtccagcttcggctgggcatcagagggagaccgtggaaagagagggagagg

SEQ ID NO: 1702 - DNA, 1213 bp, Artificial sequence
  DNA replication origin
tggcaagagctagtaggagcctatcctttcttaaatgtactatgcatttgttagcagtcatcattttaggtggaaaattcatccagactaccttcagttttctgactcccactacccttcacttttgcactgtacctcggctccagctgccccccttgtcacctcaataacctgatttagaccaacattcccagttttttgtttttgttttttttgagacacagtctcactctgtcgcccaggctagagtgcagtggcacaatctcggcccactgcaacctccacctcccgggttcaagtgattttcctgcctcagccaccggagtaggtgggattacaggcacgcgccaccatgcctggctaatttttgtatttttttttttttgtagaaacggggtttcagcatgttggccaggctggtctcgaactcctaacctcaggtgatccacccgcctcagcctcccaaagtgctgggattacaggcgtgagccaccgcgcctggcccccagttttaataaaggcattccatcttggacacgctgcctggcatttctctcctggacacagggaatcagcagggtgggtgtagtcctcccactggaacctcaggtagcttggcagggattcagggtcaggaattggactgttgtccaacacaagctccggttggattgggaatcaagagagcaagggagcaaatattaagtctaagttcagaagacaagttcataccagcatgcaaatatgcaaacactttataagaaaatagcagatgggctgggcacagtggctcatgcctgtaatcccagcactttgggaggccaaggctggtggatcacttgaggccaggagttcgagaccatcctggccaacatggcaaaactctgtccctactaaaaataaaggagaaaaaagaaaggaagaaaagagcagattgctggacaccacatagagtggggaaagacttccaaacatcaggccaggacaagttttcataagccgtagggcatagatagagggggcaagcccaaactacaatgcctgtgagacaagctgcaccccacaagatctacctataccaagagaacagagtgtccctgaactaagaaatcaaataaacactaacaccactccattccctcactccagcagaagcacctgttattgctggtctaggaaaatcctacacatttcttttctcacggacaaaaag

SEQ ID NO: 1703 - DNA, 831 bp, Artificial sequence
  DNA replication origin
gagaggcatgggactgagagcacactagaggcccagccttagagaccgtgagggatgtccttccctcaagactgcagtaaagagggaagaagtggtggcagtgagttttcaggtaggatggcaggagaccgagggagatcctgtgatgacacaggctctattttctaagtggaggaggtcacagtctttgctgaaggtgagggacaagtcatgggaaaacgacttgaagagaatgtctgaagctgtcactctggagaagaggaaatcatgcctagatggattgccatgcacctctggggcccgccgagggtgcagatgactcatttgtagggataccatccagcagggctatatgacttgtcccagcagcccttggccactcagttcctgtagaagtagagaaaggggtaggaggattgactgagtgaggggggattgggcttggagaaatggaagacaacggggcaaaggagctgaacatgttgttaaaaagaatggccaaagtgttatccaagaggcttagaatgaagaaggaaagaggtgaaaggagcagggggcgatgggggaaatagaggatgggaagggatgatgggcaggagtaaagggagtgtcatgtgaaaaagctgaagtatgtggaattgagatttcagaggtgcttgatgatgaggtccagctgcagccagggtgaagtacactgaaaggaagtgagaaggtcaaggcctgagaggcaaggtgatggcaagtagggaggaggagatcagtgacagtgatgaggaggggtagaaagtgtcagagctgaagacagcataaggtcaaaggggaaggggttta

SEQ ID NO: 1704 - DNA, 900 bp, Artificial sequence
  DNA replication origin
cctctgcccggccgccccgtctgggatgtgaggagcacctctgcccggccgccccgtctgggaggtgaggagcgtctctacccggccgccaccccgtctgggaagtgaggagcgcctctgcccggccgcgaccccgtctgggaactgaggagcgcctctgcccggctgccccgtctgagaagtgaggagcccctctgcccggccgccccgtctgggaagtgaggagcccctccgcccagcagccgccccgtctgggaggtggggggcgaccccgcccagcagccgccccgtctgggaggtggggggcgcccccgcctggcagccgccccatctgagaggtgaggggcgcccacgcccggcagccaccctgtctgggaggtggggggcacctctgcctggccgccacgtctggggggtgggggggcccctctgcccgtccaccaccccgtctgggaggtgtacccaacagctcattgagaacgggccatgatgacgatggcggttttgtcaaatagaaaagggggaaatgtggggaaaagagagatcagattgttagtgtgtctgtgtataaagaagtagacataggagactccattttgttctgtactaagaaaaattcttctgccttgggatgctgttaatctataaccttacccccaaccccgtgctctctgaaacatgtgctgtgtccactcagggttaaatggattaagggcggtgcaagatgtgctttgttaaacagatgcttgaaggcagcatgctcgttaagagtcaccaccactccctaatctcaagtacccagggacacaaacactgcggaaggccgcagggtcctctgcctaggaaaaccagagacctttgttcacatgtttatctgctgaccttctctccactattgtc

SEQ ID NO: 1705 - DNA, 788 bp, Artificial sequence
  DNA replication origin
ggagccgtgttttcttttttgtttttgtttttgttttgttttgttttgttttgaaaccaccgattgaacctctgaaggcttggcctggaccaccccagttccccttcttgggaaagtgcgcctctcctctggcaggtcagtgagtggcgagctctctggcccactctggccttcagcgtcttgtgagtctgtcctcgcagaccgtgtcgcccaccgcttaaccgcggcatgttggggttcttggtcagggagggcgccccgagccagctctggctctctcattcctagctgacgggactttcttaggttctgctaagagtcatagccaccgacacccagagaggggcgcccgcggtgcgcgcgcctgggagctctggcctctcgcacacccacacccactgggaggctgtgcataccgacgctgctggtcacccagacttgccacatgggcggtgggggaatcgctgctacctcccgccaggcctcccggacgtacgttgaggcgaggccggtctctggcttagctgattggagaatgtctcggcatcggactgaattgtttttctggctagatttgtccctgccccttgggcatatcctgcccctaggggagagaaaaaggccgactcaccggcgcttgcaccgctcagcggtgctggaatcctgccctatagagatccatttgctcgcagctccttgctcagtagagaagttgcggggagggggccttgtgttcatggcttggggtagttcctctccggcaggccctgctctggcttgcaagcttc

SEQ ID NO: 1706 - DNA, 1237 bp, Artificial sequence
  DNA replication origin
ctggtcctgggggctggagaggaaccgtgcgccccctccccatttctgcgtctgcaaggtctgcccttccctgcccccgcccattttctccaattgaaaccggtgccccctctggaaccgactgcagactgcggccgccatccccctcctcaaatgctacccctccctcggcgctcggagctaggagggggttcaggtggacgcgtgcccacggtgggggtcccgcgcattccttgcaggagggtgcaggtgggggctggagggtgttgagggatgggaaggagggggtgggggttgtagcccgaggcgggggagggagtgccgccgccaggcttcgcgctgccacattcccctcggtgctcactccgcgccaaagtgccctttcccgcgccctgctgcagccgagcgcctcggctgcggcagcggcagcggcggcgcgggcggcgggaccagctcccgacgaccgagtccgggaaggggcagatctagcgggtgcggagagtcccggaacttcgcgggtgtctggctgcagcttgcagcgcgcgggggaggtacgcgaaccttcgagggaacccggtcccctgtggaggctactggccgcgactggtgccctcccgctttacccacagcacccctccgaagctcagttctagctacaagctagaaagttccgtgtgcccgggtggagacgggtccaaaccgggatgcctggaaccgcattttcatttagcccgcgaggctgacacccactgggggagaaaccgaaacacctgctggccaggcctagacctagggcaccttcgacctggagccgtgttttcttttttgtttttgtttttgttttgttttgttttgttttgaaaccaccgattgaacctctgaaggcttggcctggaccaccccagttccccttcttgggaaagtgcgcctctcctctggcaggtcagtgagtggcgagctctctggcccactctggccttcagcgtcttgtgagtctgtcctcgcagaccgtgtcgcccaccgcttaaccgcggcatgttggggttcttggtcagggagggcgccccgagccagctctggctctctcattcctagctgacgggactttcttaggttctgctaagagtcatagccaccgacacccagagaggggcgcccgcggtgcgcgcgcctgggagctctggcctctcgcacacccacacccactgggaggctgtgcataccgacgctgctggtc

SEQ ID NO: 1707 - DNA, 978 bp, Artificial sequence
  DNA replication origin
ggagggcaccagtcgcggccagtagcctccacaggggaccgggttccctcgaaggttcgcgtacctcccccgcgcgctgcaagctgcagccagacacccgcgaagttccgggactctccgcacccgctagatctgccccttcccggactcggtcgtcgggagctggtcccgccgcccgcgccgccgctgccgctgccgcagccgaggcgctcggctgcagcagggcgcgggaaagggcactttggcgcggagtgagcaccgaggggaatgtggcagcgcgaagcctggcggcggcactccctcccccgcctcgggctacaacccccaccccctccttcccatccctcaacaccctccagcccccacctgcaccctcctgcaaggaatgcgcgggacccccaccgtgggcacgcgtccacctgaaccccctcctagctccgagcgccgagggaggggtagcatttgaggagggggatggcggccgcagtctgcagtcggttccagagggggcaccggtttcaattggagaaaatgggcgggggcagggaagggcagaccttgcagacgcagaaatggggagggggcgcacggttcctctccagcccccaggaccagcgtgcctggcagaatcaggagccgggggagtagggctcccggaaagtttatcgggaaaaagcctagcaccgtgggggctgggaggctggagaaactgaagccacagaccaggtgccccgcaaccccgggcggggatgtctgtctcccaggcccccacaccggccgcatccgtccaagttgcggctggggttggggcagcagtgagggtgagggtggaggtgaggacgtggctgagggtggggtgggagacggaggcagggatgagaatgagagtaggcaactgggagggtgggagattcaggcagggatagaggcggggggagggactgggaccgggtcgaggatgggtgggctcggggctcg

SEQ ID NO: 1708 - DNA, 976 bp, Artificial sequence
  DNA replication origin
ccgagacgctgagcaacccacagcccagcaacagcagcagaggcggcggcgttggcggcggcgggcggccccagcggctcccggcgcccggcacaagcgccgaaatcccggtttcgccgcgagccctccccgcggggcagccgcagcgccccagctcccgtccccgcgagcgcggcatggcgcggccggcagcgccgagggagaggctccgctcgccgccgaggagaaaggaggtcaggagagctctggagcttttttctgctcggaaaaaatcccggtacgcgggagccctgagcttctgcggctggaatgaaccaagtgtccgcccggccggggagaggcgcgctgcgctctcggaaatgactcgctccaatcccgcttcgcggggttcgcgccggggggcgggagggggtgaattatccccggattaatcactccggagccgcttctccgccgctccaaatgctgggggtggaggcgcagctaaggataaaatattggggggcgggggttcctcttcagcgccacctccacctccagataaaccacaaattacatctaaagggttgtttatccgtgtctgttttgcaattgaccagtttcttttaagttcagtcctcctgttttcatttataacatcacccattaatacacccccctctccacacacacacacacaaacacacacacacacacacagtgacagagacacacgcactcacacacacaggcacatacacgcacacctcttccacgtttggaaattggaatcctgtctgggaaaaggtaaccaaagaaggacgcgttccccaagtcttggctcttaccagctgatcttgggtggtggctttgaacttgccatctagggccgggggcgatgcttatgagcctcattcacaatagcctcctaccccatcccaggagaggggcgtgtgtgcgtagacagaggcagggttaagaattggagggcggtgga

SEQ ID NO: 1709 - DNA, 784 bp, Artificial sequence
  DNA replication origin
atcgtcaactccacagcccctcttcacacccttccttggatggaaattcctggccacgctgacagccggccaacctgggtcgccagccacccccagcctggctcgccatccctacagtccctctccacacccttccccggaaattctcaggccccaccgcccgccggccactgcccccttggccacacagatgccaacgctccgttttggccaaatcaggctgccctaagcccggagcacagcttctctggggtgtgtcggcaaagggggcgggggtgcccatcgcaggtgcctttccactgcacgcgccagcagaagcctcctctctggaccttgcccctcccagtttcctccagcctccccccatgaagcgtctcttccctctcgccgagagtttggcgtagacagcgaaggagccatcgtgactggcggagaagcctggagtagacgagacagagacggcgaccgagtcgggtgggggatggggtggggaccgacactaagcccttggggcctagaggcagccgctactggggagaggtggggagcagctcacgtccttgggaagaactctcttggtttggggccttggctgggaggaggaaggggagaagaagaagtaggatccgattatttaaatttggggataaattgtactagtaactcttgcaccgtccttccaccaacctcactccccacccccaactcgcgtgcacacagggaccgcctctgccaccctgagatttttgtcttagggtaggagtgggaccgcactgggtcaaat

SEQ ID NO: 1710 - DNA, 946 bp, Artificial sequence
  DNA replication origin
caagagcgcgctgactcggcaaggcaggctgggccgggcggctcccaccaatttgcctgccagtagctcccacaccctcgccgtcgtcgagcgggggaattctttctgtgggtttcaaacgcaacggctcggtgcgcggggcgccctgggttcggagcccaagacccgccggtggggtgggtgggggtggggcccaaaggaccccagagcgcttcgggggatcagaagtcaaagccaaacgcgccgccgccccacttcgccgctccacacaaatctcagctcctgcctgggggtcccccggcaacctcgattttaatcctaactgccattttatggggcgcttgccctgtgccaagcgctgggctcacattcaatcctattaaagctcgtgaaattagtaccactttttattatcgttctacacgggaggaaagcgaatctcaaagtcataagggattgcgtccaaggccccctgagaaaagggaagctgagactcagaccccagcactctaggcctgatctagcccttgaccactgagacagcttcagtaggtgggtaggagcaggagtaggaggtccgaggtgcagggagaagggctaagttagctgtttgctgatcaacaggcccctaccctcactgaagcggcttcattcaattgggcactgacacagtacctctgctgagggagactttctggttccgagagtcagggggttgcttctctagcaattcccctgaaaaggaaaagcaagagggtggagacggaagaaagaagaatggacacaaatagaggaagatggcagtctataaatgcagggctgggttgaatcctgacactcatttccgagctgtgtgaccttaagaactttctgaacttctcccatccccattcataattcccccagtactgatgcaacccctcctctgtgcccgatgagttgctgg

SEQ ID NO: 1711 - DNA, 942 bp, Artificial sequence
  DNA replication origin
agaggatctggcagcatggggtctatattccctgtagcatcaagagctggagttgacaagcagctggccctaccttgtagtcattaggatggtaatcctggacactgtcaactcatcttcccaatagccctgcaaagcccacttagttccattttatagatgataaaactgagagtcagagataacgtgatttgctccagaccacatagttagggattgatggagctggggttgtggctcagttcttgttgaccccagagtctattctcttaccacagtatggagactgtctggctgtctgtgggaggagagtgaggagggagacaggtttggtatcagtgattaggaagggtgggggtgccacaggtagaggcaggagaacttgagggtggggagatgacgttgtcagaccaggccattgccagtgtgaagggacctcagggtgtccaggtgaaggggtccactcccaggtcacttttagcacctggagcctgggcctggtggtctgaggaatagaggattgtggctggagatattttggggacctggtgtctgattagccaaggggaatgaggcaaagggaggagatggaaatgctgttcaggtgccttgctggacagcctcagtgggtggcgcttcaggagatcagggttggggaggggcaggaaaggggaggagagagaggttgggggaagcaggtctgggagggggagatggcgcatccagtttggaggtgttcagttggagggagatgtctggggagagttggctgaacaagtctggagcacgggaggacgctcctagctggagataatgatccagagagtaagccgtgatgcccaggacagacaaaaggggccaggcctggggtgtccagaccaactgtggccttagtgcttggtggaggttggagggatgcccccgccattcagtctctctgac

SEQ ID NO: 1712 - DNA, 666 bp, Artificial sequence
  DNA replication origin
tctcgctctgttgccggagctggagtgcagtggcacgatctcggctcactgcgagctccgcctcccgggttcacgccattctcctgcctcagcctcccgagtagctgggactacaggcgcccgccatcacgcccggctaatttttcgtatttttagtagagacgggctttcaccgtgttagccaggatggtctcaatctcctgacattgtgatccgcccgcctcggcctcccaaagtgctgggattacaggcgtgagccactgcgcccggcccagagtcccacttcttgaggagctcatcccagtgaggcaataaagagaataaatatgtaaaaaaataagaaaatttcatatactagtaagtgctacaaagaagataaaatgagatcacataatggagagtgacagtgtgtggtgggtgaggagggtgggtcagaaagggcctcctggaagaggggatgtctgagttgagatgtgaatgctggggagacagacatgttaatctggaggggaagagccctgtcagcgagacaggtgcaaagaccccaagatgggagaaggccagtgtgggtggagcatggcaagaggggagagtgaagggaggttggcttggagcaggagcagtagtcagtgcctgaccccataagaccttgcaggcgatggtaga

SEQ ID NO: 1713 - DNA, 912 bp, Artificial sequence
  DNA replication origin
acgttgagccccaaggcaccaggcgacctagtcctgcctctcccccatctctcatccccttgggcgctgtagtggccttctttctggttcttgaacaagccacattcaggtcagccttctggtttttgcctttgctgttctctctgcctggactgccttctcctgactctttacttggaagcttcctcctccttattcaggtctcaccttcttacagaggtgttccctggttcccccacccccaccccaaatgttccttgctccacttcctcagcagacactcttcacagccgtctctgaaattatctccaggagagcagggagctccctggtcacgttcctgccacattaccagggcctggaatgtacagactctcagtcactatttgtaaacactgggtgcacataaggttatgtgcgagaactgtttctgtgtgtgtaagcctggagagctgtgtgttaagggtggtatgtgggccacgtgtgtgtaggctttgatgtgcgttgttgtgagtgtgtgtgatggtggagatggctggggtggtgtgggaggctgtgtgcatgtgtggttgtgaacgtgtgtgatggcagagatggctggggtggtgtgggaggctgtgtgcatgtgtggttgtgaacgtgtgtgatggcggaggtggctggggtggtgtgggaggctgtgtgcatgtgtggttgtgaacgtgtgtgatggcggagatggctggggtggtgtgggaggctgtgtgcatgtgtggttgtgaatgtgtgtgatggtggaggtggctggggtggtgtgggaggctgtgtgcatgtgtggttgtgaatgtgtgtgatgatggagatggctggggtggtgtgggaggctgtgtgcatatgtggttgtggtggtgtgtagtggtgtctatgtgtgtg

SEQ ID NO: 1714 - DNA, 1268 bp, Artificial sequence
  DNA replication origin
caggctctggaagcggccctgggttcaaatcttgccttttagtaactgcggccccttggataaggaacaacctctgggcccctcagtctcctccacgatagagtggaaacaatagtattcctcccgcctcgggttgttacaaggattccatggaaagagggtgggagcctggccaaggccacctgggtgagcgcggctctgtcgcggcgggcgttccgcagcaacccccgtcccggcatcggaggacccaagactcctcccggcctcccgcgagcaggtggcgcccctggtcccttcctagcccccgactcaccgcctgcctgccgggcggcccaggtggaggtggggacgatggccggagtgacgcccgcgggagccctgctggaccgcacgagcggcgggggcgccttaaatagcgcagaggggcggggtgggggcaggaaacgcgacggggagggcggcgggcgctggagagagggcgggggcggggactgggaggtgcagactccctaaacccactccggggaggtgggcctgtgtgatttgcggtggggaggggcaagaggggctgacctacccttcctctcctctgttctctctccaccaggtattccagacagtaaactctcctgtcgtttctttggccagggaaggagagttctcccaggccaggatctctcagggtggctggatttgaaggggttgcagtaagggctgtggatctgggcaactggcctgcggggctgtgaggggtgggcggatggggatggagtgtggggaccactcatttgctaggtggctggccctagtgtgccaggatgaggcgatcaaggctaattacggcgcgggaagctccaatgggggacaggggttgtaatccacacctccagcatacatggtggagcaggcgtctctatccacgcccagcccacgttcttccagaattctcaaacatccccatgtctgggcaggctacacaatcagaggccattaagcaattcccatggactccttgagactgggggtgggggaaccacctgacctttagcttggaccccgttcttatgcctctaaatggtggctgggtggtgtgggggacatccataggaatgaaagggctatgcggagcctgccttcatgcattcaggcatcacaggtggatgagcatcagtgagcatctgctgtgctgcagacgctgcttggggacctggggataccctgaggaaccagccaaacttggtctctggcctcctccctcactggctggt

SEQ ID NO: 1715 - DNA, 1000 bp, Artificial sequence
  DNA replication origin
aaatgactggatgatctttcactttttccacgcagaaaacacgtggcgacatcactgagaaacctcccggccaacagagggcgcgacgtccatttcagcgcagtggggcccagttgcggacgcctagcttccttccgtcctttggctgaagttcagccaatccctgcgctccgagagagccggcggccagtgggcagggtcacagggcaaggtcccgcgggccgctgggtgcggcgacttccgtgctcccggcgagcgggcggagagcgggggccgcactggggagtgtgggctgggccgcaggtgagcgcgcggtcccggcgagcaggtcgggtcagcccaggccagtaacctctgagttacgggaggagtgatcgctagggtccaccccggtcccggccagatctgccagctcccctctctggcgggtgttctggtgccaagtctgggagcccaggtagccctccgcagacagggcttctcggcacctcaatgaggacggacgttgatgaggccatgaatgaggtgggctagggacaggggaccgggagactcacagaagggagaagggtagccatttggatggaccttcgccttacttgcgctcccattcctggactgcgctctagtgactgtcagggctaattcttccgccttctcaggcctcctgtgtccttgttagtagttcttgaatttgggactacggcttctggcctcgttgggcctccgggccctcgcactggggcaggtttcccagcagcccagttgacctttaccggatgcttttggcagacgtcctccatgccgggctggaaatatgcgtcacagtgtttttcagacacttttgcctctttcattgtgataccctgcctggggacgactatgatggagtctttaggtttttgtaatcagcaaaggcatctgttatgctcctgccaccttttgggggagagtgggtggaggatgttgtgattttacactagggagtttgggctgtcat

SEQ ID NO: 1716 - DNA, 1472 bp, Artificial sequence
  DNA replication origin
gggcccgcggttctccacccgtactgtacacccagcgtcgaggtcactgtgaacgcgggccgccccgtgcgcccgccccaccggcaccggacgccccggcccccgggcccgtcacactctcgtgggttttttaccttcctgatcccacgcgaaggcgcccgggctgggcagggggccgtgcctctccgccctgcgcccctcacctggatcccctgcccacctggtccgacgctttgtccccacctcctccccatgggcaccatctctgccattctttcccccacgggccaggccgggccgggtccctcatctgggctctgcgtccccccctcccccaccccgcggggctgggcttcgtggggatcaagcttcgtggctttttatgaagaatcccgaaccctgcctaggagcccgccccaccctcccaggggctccatcctcagccctctgcccactgggcccagggaccacagtggctggaccaacccaggaccagggcgcctgggcctctcccctttcccagcggctggggaggggagatgggggcttcccctcaccacacctgtggctgttcccacatccccttgaatatcccaggaaaaataaaacggcagaactgcactcgagccagctgctctctccagaagaggccacctccgtcccgtgtgtgggaggacgggggtgaagggagaagggaccgggagcccactctcttggtttggagatagcaggggttgcctgagctccttccagggatgggccagctggtggaaaggagattcggccccctgatgcccacagtaagggcctggaccctcctggaggggcccaggtggggtgaagagggggagggtgccaagctctccgttcttcctatttcggtgtatcccgttctgcctcccagtccgcagggttcccccagagagggaagtccggagctcgccgggcacgcagcatgtgctcaataaaccgggagtgtggttattgttaggtattgacaaataattggtttcccttcccctaggggcacaatgttccttctgctccagtcattcctgatcagcagcagaaaatcttcagtcctgccgcattttctgatgcctcctatgggtggccaccttggtggaggctggggtgggggaagaggaagtacaaagaacagagctctcctgggaagctaaatggcaaccagaacctagtatcgatggctttattgagtggtcagtgtgggtcaggcaaggggtgagtgctttacatgaatgtggctggtccttacaatagaagagaaagccaaagctcagggcaggttacaagacctgtctgaggtcacaggactaaatgtggtggacccaggtctaatgccaaatcatgagcttttagctttgcaggcttcttagaccagagagggctgatggcagtctccacccagaaagcccctttccactccttgagcagtcctttgggttggtgtg

SEQ ID NO: 1717 - DNA, 1603 bp, Artificial sequence
  DNA replication origin
ggtgcacatggtgcagctttagaggccagggctgggactgcagacactgcaggccaaagggctgggccttctatggatggctgctagtccaaatcaccaagtttatggggactaagggaactccgttcagatctggactggtgtggggatccaggtggtgcgaccaagattacagagagggaggcagttcacaatgtcagatcctgtctgaggcacagaagagggagattcagccagggagatgtggccctggcccgagggagagcatggcccttcctgtaagtcagatccactgggagacacagtcttaccccagaatctctgagttgaggggacagtggctatgaagatgtgttatgtacatgaaattacttggtcattcttaaagagccaaggagtcttgcatgcactggggagtgatgaacaaagcttagccagtgggtggtcattgagctaatgccctggccaaggctatagggctaggctggggctggtttccgtctgttctctgatacgggagggagaaaggataaagaaggatgagcactcaagaaatgtaggctgtatgaaggagggaacatcagtgtctgaggatacagtcttggtgtagtggagcgagaacttgttaggaacttgaggatgggatggggctggggctggaggagactgatggatacacagtgccaagcaaccgaggggtcagcgtcattcagggcagacttcgtggaggctggggaaggagatgcatcatttccctccctgaatttccttctgctttctagtcctggagaagatccgcagtgctgtgggcagcacacaacttctcctgtcccagaaggttcagcagttcttccggctgtgtcagcaaagcatggtgagtgcccatagtagtagatcctaccagatacatgtgacccagagtgtgtgtgtgctggaggtgagacaggcaggtgacccagagtgagtgtgtaccagaggtgagaccaggcctgcatgccttctggggtagctgtgagtcttgtgcctggaggtaggaccaggtgtttgtgcacaagaaggggagtcctgggctcgctcttgtccccctgtctcccagcccccacccactctcccaggctgagcttcctggcagtaagggtggataggactttctcttgtcctggctggggctcagacctccttgaccaatcactttccctccatcttcctctgttgcaggatcccactgcgttccctgtgcccaccttccaggacctggcgggtttctgggacctcctacagctctccatcgaggatgtgaccctcaagttcctggagctacagcaactcaaggccaacagctggaaactcctggagcctaaggtggggctggggtgccttcaggcaaagaggccagactctgggaaattcccctccccagagaggtggagggtgggacgaacaagggggcaggggaagggatccatgggcagcaagggcagccttggacaggtgataggtgaccatccccttccagagtgaccacgctcgtggccactgccgtctgcttggccccagtgctcatcactgcttgagctgccagaaccccaaggcttcctcagcg

SEQ ID NO: 1718 - DNA, 1031 bp, Artificial sequence
  DNA replication origin
tcattcccttccttttttttgcttggggtgggggtgagagctggcatgagcctgggcaatgggggatgacagccacccctctccccaggcgagcaaggttcaagcgctccaatagtgtgacggctggcgtgcaggcagacctggagctggagggcctggcaggcctggccacggtggccacagaagacaaggccctgcagtttggacgctccttccagaggcacgcctctgagccccagcctgggccccgggcccccacctactcagtcttccgcacggtccacacgcagggccagtgggcctaccgcgagggctacccactgccgtacgagccgccggccaccgatgggtcgcccggccctgcccccgcccccacccccggccctggggccggccgccgtgactcctggatagagcgcggttcacgtagcctccccgactcaggccgcgcatccccctgcccacgcgacggcgagtggttcatcaagatgctgcgggcagaggtggagaagctggagcactggtgccagcagatggagcgtgaggcggaggactatgagctacccgaggagagtgagtcacggcatcggaacaaggggactctggggaccatggcctcgtgtgtgctcaggagaccctgatgggggtggctggggctgcagtgtaacaggaggccccttcggttggtgcctcactggtcttctgcactggagcgtggcgggtcaacatcggcagcaagacatgctgggagctcttgaaagggagcagggtgcacatggtgcagctttagaggccagggctgggactgcagacactgcaggccaaagggctgggccttctatggatggctgctagtccaaatcaccaagtttatggggactaagggaactccgttcagatctggactggtgtggggatccaggtggtgcgaccaagattacagagagggaggcagttcacaatgtcagatcctgtctgaggcacagaagagggagattcagccagggagatgtggccctggcccgagggag

SEQ ID NO: 1719 - DNA, 1386 bp, Artificial sequence
  DNA replication origin
gtgcgcgcacactggagttggcgccggtgccgccccgggccagccccaagccccccacactcatcatcaagaccatccctggcagggaggagctgcggagcctggcgcggcagcggaagtggcggccgtccattggggtgcaggtatggaacggggaggcgcccacgagggctctgaccctggtcggtcggggctggggtgaggggctggaagcggccttctggatatatcgacattctttctggcttgccctgagctgcaagtgaaccccgtgcctggacatcgacggggctgctccagccagcccccgcccactccctcgtccctcgtcctggcaccatcgcccctcctgactaatggagggctggagggctgtgcccagtggttgccactttgaggcctgtgaccgaccgcctgggtctctcatcttgttcaggcagatggtctttgcaggacctgccagctggcttggggcgcagccattgctagccgttctccccgggaagggctttcaccttggctcgccacagccactgactcctccaccctgccaccaggtggagacgatctcagattcggacaccgagaacaggagccggagggagttccactctattggcgtgcaggtggaagaggacaagaggtaaagtcacggtgggagtgcccaggcttcgctgggagacaggaggagagagggctgcatagtgtccccactagcccagtctccctgcacatcctcttttcctggaagtgagaccaagcctttttatagagggtggtcagagcagccacaggggctgttccatagagatgtcaccagaggagtcatcaaacctagagttcttgtgcccatgcccaccccaggtgctcagaggcagacgggagatacacagcagttgcagggaaggagaggatgggaaaggttacatgtaggtgccgagcaggcctccagcaattgtcctttccaggggatgataggatctgccaatccctcattacatcctgtggtgtacaagtatgtgagctcaaaaagaaacaaacgggaagattgcctctcaggagcccctggcagatataacactcctcctcacttggctcacacaagcatttaaccagttgggggtacctattacatgcctgagtctgtggtgtacctgagatagtacaattagcagcagccactattctggcattaggtggcctcagaaacattgactccttaattttcactgaagaattagcattgccagctctggaggggataccagaaagaggcctctctgttgttgggtgcctatggggagaaagggtgtctgggagcttgccaggggctggccataacggtttcatggtatctgagcttcccaggccatacgactggaggaa

SEQ ID NO: 1720 - DNA, 1378 bp, Artificial sequence
  DNA replication origin
aggaggggcgatggtgccaggacgagggacgagggagtgggcgggggctggctggagcagccccgtcgatgtccaggcacggggttcacttgcagctcagggcaagccagaaagaatgtcgatatatccagaaggccgcttccagcccctcaccccagccccgaccgaccagggtcagagccctcgtgggcgcctccccgttccatacctgcaccccaatggacggccgccacttccgctgccgcgccaggctccgcagctcctccctgccagggatggtcttgatgatgagtgtggggggcttggggctggcccggggcggcaccggcgccaactccagtgtgcgcgcacccatggcggggccgtccagcccgtcggcggagctgcagcgccgggcggggccctcggccgccgtgaagctctcgtgcgcggagtcggtgctgctctgggcggtgatggagatgcggggcggggcctggcttcccggcgggatggggggcggggcctttctgaagttgaaggctgtggccggcgagcgcagagacgcagtgggtgaggctcgcggccctgcctgggtcctgggcccgcgcccgactcccaccctcaagaggccctacgggaccctgcagcggcgcgcactccacatgctgctgcacacacgccaacggacgctctccccgtcatccgaccccgggagcgagcgatctgcgcgggtcacagcacagtcgagggggaggccagaacccggacccagggcgctctcctgcctagggccgggccaggggcaggaaggtgtactcacaggagccgggcctccctgagacagcggcaggggtagcgaggaggggcaggcagtcgtcgtcttgagagcagccggcctggatggcccggaggtagctgtggctccgcatgcggaaacagccgggcaggtccagggcgtccacggcctgggactccagctccccaaacaccgacccgcacacggcctccagctgctggttcaactcatcgctgagctggggggcagggggtcgggaggacagttataaggtgccgggagggggtggaagtccctggggtgctctgccttaggggaagacctctctatatctgcagaggctgtaggcgactcttccgcatttgaactaaaagaaactctaactctttgcaaagaaagatgggggcatctctgccccactctgctcccaaggcttgtcttggggcccagtctttcctctaaatatcccacccccacccccacctccaccccacctatgcctcttccaggtgtctggctggctgcactccagactgcagaccaccatgtttttctctccacctagtcccatcccctgacgtttctctcacctgaccccaa

SEQ ID NO: 1721 - DNA, 967 bp, Artificial sequence
  DNA replication origin
aatcccatgcccagcagtcaggcatcacctgacctcagtcaaccttctacccctccttctccttcatcctttcaacctgcttacattccaaatcctctctccttccccgctgtggggagccacagagggcttcatgcaggggagtgacatcagatttgtgttgcagaaagagctctcccacagtccaaacagaggctggattgtggagggccaggagcagggcagaggctcaagtggcgagaggacgaccaattaggaggctgatgctgttatccaggcaagagatgatgaggcctaaattaagacaatgacaatgagggggaagaggaggagatggaaatgagaggtgttaaggagcatcagtgagcctgattagacgtgggggatgagggggcgggaggagtcgaggatgactgccaggctgctggctgaggacctgggggagggtgctgccgctcactgagccatagaaccccagagaaacaagtctggggaaaggtggtagggtcggggttgagcaccttgagcttggcatagaactgttgagcaggtggttggatgtttggttctgggattcagtggggagatcggggctggaggcggacatgtgggagtcatgggcggcagctgaatccatagcagtgaatgagacagcccaggggagagaagaagagagatgagcagagatccactgacatttaaaaagggactgtgaagaaaggaagaggagcctgtgaagtcacctgagaaggagtgggcagaggggtaggagggaagtcaggaaaatgccatgtcatagaaacaggagacatttcaagaataaaaggagtcgattatgtcaaatgccacagtgcgttcagaggttagtaactcaggctcgggaattagaagatccatgtgcaattctggccccatcacttgctggataggtgaacttaagcaaaacagattaacctctaagtgtcag

SEQ ID NO: 1722 - DNA, 687 bp, Artificial sequence
  DNA replication origin
gacagcccaggggagagaagaagagagatgagcagagatccactgacatttaaaaagggactgtgaagaaaggaagaggagcctgtgaagtcacctgagaaggagtgggcagaggggtaggagggaagtcaggaaaatgccatgtcatagaaacaggagacatttcaagaataaaaggagtcgattatgtcaaatgccacagtgcgttcagaggttagtaactcaggctcgggaattagaagatccatgtgcaattctggccccatcacttgctggataggtgaacttaagcaaaacagattaacctctaagtgtcagtttccttgtctgcgagttggtcatgatacttatgcctacatcagagggttggtggcaaagataaatgagccaatagagagtttccaggacatagaaagtgctcaataaatggtaacaattattataggcactgaaaagtagcttttgaagatagcgctcaagagatcatctgtggccactgccaggacatgtcaatgacagggagtttggaaatcagaccacagtgaggggagaattgaagggaagtgaagagtaggtgtctatgctctaagaactcgattatgaaggacatggaaggtgggatggggctgcagaaatattttttaggatgcaagcgactttggacatgttttcagaatgatggaaaga

SEQ ID NO: 1723 - DNA, 941 bp, Artificial sequence
  DNA replication origin
cccgcgcccgctgccgctcggcgctcgcttggggctccgcagccggcgcggcccctcagctgggggctccgcagtgccgggccccggtccctgcccgcctgcccaacgccgcagcgcccccggcccgggccgccggcaccatgtaacccggccggagcccgagccgggccaggtaagccgcggggaggagtggggacggggccgcgctcgcggctccctctgcagcgccccccaggcacggcccggctgcggccccggcgccgcccacgccccgggctccggcgctcggctcccggccccgggaggggggaggggctgggcctcctcagctgcccccgctcctgccccggcctggctgcccgcgggcccgacccgaggggcgggcaggggaccacgcggaccgcggacccacgctcccggtcagggccgcggggacaggccagccccggcccagccctcgcccggctggaggctcgggtctgggagggagtagccagctggttgtgggggaagtcgtggtgctggggagatccggagagaagtttcctctgcaggtgtgtgaatgtgagtgcgtgtcgctgtgtgtctgtgccgagtgtgtcactgtgtgggtctgtgggcgattgtgtgtgccggtgagtgtatgccgtgagtgtgtgcgtgtgtcactgtgggcgagagtgtgtgtgcatgttagtgggtgtatgcagcgtgagtgtggagggtggtactgtgtatgcatctgtggacatgtgagtgaatgagtgtgtgttgtccccatgtgtgcctgtgtgtgtctgtgagtgtgtgaatggatgtgtgtgccggcgtgactgtctctgtgagtgggtcccggtatctgccctgtgtgactgtgtgtgtgtgtgtgtgcgtgtgcgcgcgcgtgcgttggctgtgtgagagagagtgtatctgagcgc

SEQ ID NO: 1724 - DNA, 1293 bp, Artificial sequence
  DNA replication origin
cgcacagccgacctgggtacagggacccaagcccggcggcgggcgggcggtcggggaccagctcagcctcacggaccgggtctcgccccccgccgaggggcagtcacgccctgaatgtcacacacagcccccaggcccgtccgcttaggagactctccttcgggctttcccggtcggccgcctgacctcagctcctggcttggggtcagggagcccccctcttcggccccagcccctgccaggatggggcgctgtgcccggcctcggagccgctggcaggcgtcccccacccacagtccgcacagccgaggcatccccagtgtggagggagagccccgctgtacctgccgcctgtgctgggcccccgcccgtgcccactgtgcccgcccgcctctgggccctgagcctgggattgtgccatggcggggtcggggtggggggaaagggactgtccgaagcacagctggaggctgcggagcccggacacaggctgcgggagccgagaggcggagagcggactgcagcagtcccctggcttgaatccgtcttggcgcccagagcgatgctgtaatgggggggagggggccacggtggggaagccgcagggggaggggctgaagacgtgggggaaggggtggctccggattccggctttccagggtaggtgtgaggaaacactgcctccggcgctgaaagttgggggtggaggttcagtgggcatccttaaagccctcttccctcctctaccttttccggtcttgaaagcttgggatggtgaggtgtgggcttgggaggcttgagactgcccacctctctaggaacataccttggagttgttctgattcaacggcccccaccccgcaccccaacaactccctgctctctgtttccttgtggggccaccggctctcctccctgtataaaggggaaagtgaggcacggaaaggagaagccaaaggcccagaagagctagaactgggagccaagacctcttttccccagggagatgatgttttaagatgccacattacattaaataacataaggggcttggagagccctcttcccaagggatacctagaagtctggtaagagactagtagattggtcacctaccctgctgctcacaagaacggttcattgtctcttcaatcatgaagtgaggttgcagaccatttccagcccagggttcagtcaagagcagatgtcatgaaaataagaaagttgttcccaggaacccactttagaactgaaggaaacatctcactttccgtggagcataagaacagccgt

SEQ ID NO: 1725 - DNA, 926 bp, Artificial sequence
  DNA replication origin
ggtgaggagcgcctcttcccggccgccatcacatctaggaagtgaggagcgtctctgcccggccgcccatcgtctgagatgtggggagcgcctctgccccgccgccccgtctgggatgtgaggagcgcctctgcccagcggcgaccccgtctgggaggtgaggagcgtctctgcccggccgccccgtctgagaagtgaggagaccctctgcctggcaaccgccccgtctgagaggtgaggagcccctccgccctgcagccgctccgtctgagaggtgaggagcccctccgcccggcggccaccccgtctgggaagtgaggagcgtctccgcccggcagccaccccatccgggagggaggtgggggggtcagccccccgccaggccagccgccccgtccgggaggtgaggggcgcctctgcccggccgcccctactggttagtgaggagcccctctgccaggccaccaccccgtctgggaggtgtacccaacagctcattgatagcgggccatgatgacaatggcggttttgtggaatagaaaggggggaaaggtggggaaaagattgagaaattggatggttgccgtgtctgtgtagaaagaagtatacatgggagacttttcattttgttgtgtactaagaaaaattattctgccttgggatcttgttgatctgtgaccttacccccaaccctgtgctctctgaaacatgtgctgtgtccactcagggttaaatggattaagggcggtgcaagatgtgctttgttaaacagatgcttgaaggcagcatgctcttaagagtcatcaccactccctaatctcaagtacccagggacacaaacactgcggaaggccgcagggtcctctgcctaggaaaaccggagacctttgttcacttgtttatctgctgaccttccctccactatt

SEQ ID NO: 1726 - DNA, 1028 bp, Artificial sequence
  DNA replication origin
agaccagcaggaaccccaggaccatggtcttggccgcgcgccggtgcgcgccggcggttgcagggcccgggcccgggccagagggcgccttgagcgcccgcgccaggctcacgttggccgcgagcaccagcaggaaggcggccgcgaaggccaccgtggcggaggccagccccgagcttgcccagcggtgctccaggcagggaggggccaggcccgccagccaggcgaaggcgcaggcagcgcgcgcggggcgccgtaggcaccgggccaggcgggcagccgccctgggcccgggaccgcgtacgaagccgcagcggcacacgctgatgagcgcggcgaagaccaccgccgcataggtggacacgtagtaggtggccccggccgcgtggcaggcggcctccgggccaggcccaggtagtaggtgagccacagctgcagcgtgagcgtgaagaactcatcaaccagagccaggttgaacaggtagagaagcagggcctggcccaggcgcccgccgctgcggatgaacattgccagggccgccacgttggctggcagccccaggcccagtgccaaggcataggccgcgggcaccacgatgaagcgagcagggtcatcccagaggctgcagccgccaacacccaggtccccaacactgctgttcatctctgaccttgaagtggcagaagaaaggttactgcggaggctagcgacaaaggcagcccccattccaccttctcccaccccagtctcctcttcttcagcccttgctgggaggggacactagaggcagagtccatgtgagagggaatgaagaccgaacctggccagcagctgctgagaggagggtatggactccagagtttttggtgacaaactgtgggaagcgaggaagaggcaggagtcctagataacttggaaatttccaaccttagtgactgagagggtagagatgcccctcacagatggagtatggttcatacatgttgggccacagacctgtgcagtaaacccacgtaggactgagccaa

SEQ ID NO: 1727 - DNA, 1066 bp, Artificial sequence
  DNA replication origin
tgatgaaaaagggcctaaacgctaactgattttcggagaggttggataaagaaaaaggagcattaaccttgagtatgcctttagctccagccacctttttaagaagaaattgctgggcaggtgggagaaggctagttgaggaacgaaactgtaagccggaccaggtgtgaggaggggaggtgataaaaggattatagggtggaggagcggaggctgaggaagaattgggacgtggctcggcctggcgaggaggggagaggtcagatgggtctgtagaaaaggaagattagaaagactcagcaatgcttggggttgggactgaggggacaggcgggagggaaagaaggaggatttgggatgagtcgcattgggaacagtgactagggagggaacaatgtgtaaaagaatgcctggatgtcagggacctcagaccgtttgcccattttatgataagaattatctagatctttaggatggaaaaatcgaaagtgctgttttctggctatttggaactactgtcaagtttgtattggggtcaagcgggattgtagaagaaaataaggcatttaggttttaggtcaggtgtgagttgaagaggttttaagttcttgagaacacaggcgaagggagaagagagaggaatggagggtggaagtttgcccatagtgaaggaggcaagctgagagaaaagagagagtagagacacagagggcaggggttcgggggttcttatgctctagaaaagtgggaaaggggttgggtcatggaaataaggggttggagcacagagataagaggttggggtgtggaaataagggattggggcaaagagataagaggttggggcatggaaataagggattggggtgcagagataaggggtcagggcatggaaataagggatcagtgtgcagagataaggggttggggggttcttgcctcccagaaaagtggagaaggggtagagacatggagaggtgttggggggtccttgccccccagaaaagcggtacttgccgctaagggtgaaggaccaaggcaggtgtccccgcgtggtcagacacct

SEQ ID NO: 1728 - DNA, 861 bp, Artificial sequence
  DNA replication origin
aagagagaggaatggagggtggaagtttgcccatagtgaaggaggcaagctgagagaaaagagagagtagagacacagagggcaggggttcgggggttcttatgctctagaaaagtgggaaaggggttgggtcatggaaataaggggttggagcacagagataagaggttggggtgtggaaataagggattggggcaaagagataagaggttggggcatggaaataagggattggggtgcagagataaggggtcagggcatggaaataagggatcagtgtgcagagataaggggttggggggttcttgcctcccagaaaagtggagaaggggtagagacatggagaggtgttggggggtccttgccccccagaaaagcggtacttgccgctaagggtgaaggaccaaggcaggtgtccccgcgtggtcagacacctctgaaacatgagtgaataaacagagaggcatccctgcaatgattaaacaccaagggaaggctgccttcccgagtccatgaccggcgtcggagttttgggtccacagataaaacatgtttcctttgtctgtaccagaaaatgaaatgaattgaaattaagagaagggagagattgaaggctgacaccaagattgaaaggagaaaatggttgagggatagtgagggaggttggagaagagagtaagaagaggccacttacccgatttaaaattggtgagatgttccttgggctggtgggtctgaggacccaaggtcttaggtggatctttttcacggagcaaagagcaggaggacaggggattgttctcccaagggaggtcccccgatccgagtcacggcaccaaatttcatgcacgtccatgtgaa

SEQ ID NO: 1729 - DNA, 1312 bp, Artificial sequence
  DNA replication origin
cgccgggcccgccgggcgggggcccctggtgatgctgctggtggtagggcgggtggtgctggcggcccccgcggggctccccgccgcctcgatgcggcggcttggggtggccgccaggcgtacttaggcccgggccgccacctggcttcggcccgccaggcattttgccgcctttgggaccacccggacctgggccctgcttaggccctggacccgggcccgggactgccgcgggcggaggcggcgggcctccggcctgaggaggtgtggtagggaccccgctgcttggcggggtgggtggcggcgccccgggaggggccgaggtgactgcaggcggcggggtcggagtcgggcctggcccggaccctggcggggcccccgaggttggtggagtggcgggcggggccgagctggaggctggtggtgcgctgcctactccgggagcggggccgggtccctgagcaacgacgggcttggaagagtcctgcggcggtggcggcggctgctgctgctgatgcggctgtggatgcggcggcggctgatgcggtggcggctgctgcggcggtggctgctgcggtggtggctgttgctgctgttggtgtggaggcggtggcgggatcggaggcttagggccgctctggcccgggccaggacccatggggccgcgattctgattgaggcccatgccgggcggcggagaacggaagtcgtggaggccgccgcggccgccgcctcctccacgcctgtggaagccaccaccgccaccgccacgactccggaaccgatcccgagacatgtctgtggtcaaggggcggtcgaggcaaaagcgaagaagacgctcaggaaacgtggaggccaccttgcttctcacaaaatggcggatgacacaggcggcgcgccgcctttgtcctcgtcttatataggccagctggcacggccccgcctactccacgatcgacagctccaatagccaattgcaattactatgcttgatgacactaagttgcgaacctctgatcattcctattggcccctgggtgagaggcgggaggcatggggggactgaagtttccagttggccagtgagcgaagaaggcgttggctgtaggccactatgatttgctaggagaaatttgaatgggtatgccagggcaattttcacttgcgagcaaataaccagggctctatccgctcctgcagagaagcgttggaggtctcttttctttcttgattgtccctaggagcaatctactgatatccttgcccagaaaaacagatgttttccgattcaaaatcagaaattgagtgcctg

SEQ ID NO: 1730 - DNA, 1205 bp, Artificial sequence
  DNA replication origin
gccggcagctgctcccagcccgtcggggcgctcctggggaaggagaggggtgccttaggtgacccactggcagctgaaaggaccccagcctgaaaggatcctcctcagctcgggagggttcagctgcagtccctcccgtttcttggggcccgaggtttatttccgagccacccgcgggcgcaggagcctcaggctggggacagcggtcacttgcgcatcgcgttctcagctggcgaagtccctgcggccccctccctccgagatttcgttagcgcgggacaggagggttggaaagtccagcactcaggcgccccgatcccccggccgaatatgtcccgggcccgagactactcaccatggcggagtaggtgtgcaccagcatggggcggtgagtgccgggcgcgaggcgtggcggcggcggagccctagcccgacggcgagcgctgcgggcagaggcgccgggagccggcacagcccgcggaggtcacggtgcggtagctgggtgcgacccagccgggatcctagtgggcgtggggtcctcagcggtggccgttcccgggcgggtccatggaggcaggacggacgggcactgatcgcacttggaaaagtcggtcaacgggtgcccagcgcccgcccttcctcctctgagcgtagcctgctccatgcactccagttatagtggcgggggcgcgccgggcctccgggggcgcgcattaaagagacaagctatggcagttctctcccttttccccagcggctgccacaggggaggcagtggctttggcgggatcgggtagggtgggtagggggcgtgaattcagcccacattgatcagagccgccttctgggctcgcagctcgcagctgcagtgaaacagaaatattcgaggctgggacgcaagggccctacatttgcctggctctatcacatccttgcctttaagcaaagcactattcttcgctggcctcagcttcctcggtaaaataggtatcaatcctttctctaagcacctcaagagactttggatgaggtgggtaatcgggaacgtggaagaagtttgtgagctgaagactccagcctatctgctcatgcgcacacagtgtcagtgcgtgtgtttagggggtctaccatcacagtctttcctgaatggttctggatcaaaatccctcgaaggtgcccacttcgctctcaggcttcctgggctg

SEQ ID NO: 1731 - DNA, 1709 bp, Artificial sequence
  DNA replication origin
gcccctccccacacctgccctcggcgcccccagcagttttcaccttggccctccgcggtcactgcgggattcggcgttgccgccagcccagtggggagtgaattagcgccctccttcgtcctcggcccttccgacggcacgaggaactcctgtcctgccccacagaccttcggcctccgccgagtgcggtactggagcctgccccgccagggccctggaatcagagaaagtcgctctttggccacctgaagcgtcggatccctacagtgcctcccagcctgggcgggagcggcggctgcgtcgctgaaggttggggtccttggtgcgaaagggaggcagctgcagcctcagccccaccccagaagcggccttcgcatcgctgcggtgggcgttctcgggcttcgacttcgccagcgccgcggggcagaggcacctggagctcgcagggcccagacctgggttggaaaagcttcgctgactgcaggcaagcgtccgggaggggcggccaggcgaagccccggcgctttaccacacacttccgggtcccatgccagttgcatccgcggtattgggcaggaaatggcagggctgaggccgaccctaggagtataagggagccctccatttcctgcccacatttgtcacctccagttttgcaacctatcccagacacacagaaagcaagcaggactggtggggagacggagcttaacaggaatattttccagcagtgagcaggggctgtatgggacgcgggaggagctcagaggaggcgcggagagtgcccgaggttgggtgagtgcctagaggggagatagttgaaccgggttcaagaggtgcttagtgggtgtttgttgaatgaatgagtgatgggctttgaagtctgagtgcattgaaagagggggtgtgtaaaaagggctcctttcatcacacaggacacagcatatgcaaatcctctccctgtggaaaagccagacaggttaaaaaggttacaaacaaattagccgggcatggtggtgcgcgtctgtagtcccagctactagggaggctgagccaggggaatcgcttgaacccgggaggcggagattgcagtgagccaagatcgcgccactgcactccagcctggaaacagagcgagactccgtctcggaaaaaaaaaaaaaaagttacaaaccgtgtgtgggtttcaggttatacaatcagagctggaggggagtggtcaaggatgagaactgagatggatccctcgttccctctggaggagagtgggtggttgcctacttgggggtggggaatccctctccacgggctcagctgtccaatctcaggggatctctaggacaggagctgatgtaaacagtcgccctattccttgctgtctttggccctggagaaggaggagggagctggggagggtctccacttcccagacaatctctaagcagccaggacatgggtgagatgagtgagatactgacttctgggacagaatttgagagggtgccaaaaaactcagtaatcaagataaataggccgggcgcagtggctcacgtctgtaatcccagcactttgggaggccggatcacttgaggtcaagagttcgagaccagcctggccaagatggtgaaaccccatctctactaaaaatacaaaaattagcccagtgtggtggcgctagcctgtaatcccagccactcaggaggctgagg

SEQ ID NO: 1732 - DNA, 1322 bp, Artificial sequence
  DNA replication origin
caaatggtcaattattgaaataaaaatatttgctcctagagtgaaaaaaaatcaagaaaaagttaacaaaaaacaacacatttggtagtaaaatattttgcaatttccaaagcaatttcgagagcattatttatttaatactcacattgcttctgtaaagtagatgatacttattttcattacccccttctttcttgtgtgtgcgtgcgcgtgccagagtctgtcgcccaggcaggagtgcagtggcacaatcctggctctctgtaacaaccatctcccgggttcaagcgattctcctgcctcagcctcccaagtagctgggattacaggcctgcgccaccacgcccggctaatttttgtatttttagtagacatggtgtttcgccattttggccagactggtcccgaactcctgagctcaagtgatccgcctgcctcagcctcccaaagtgctgggattacaggcgtaaaccaccgcgccccgccacggaggctcttaaggaaggtctttgtggatttgtaaaacatcagaccctgggaaagatggccagcggggatgcaggaagcagccagcaaagcccttgcaagccaagctgagtaacttaagcacctggggagccttggagagatcttaaactggaggagggatggggccatatttgcctttcagaagcccactctagaatactgtgtcccgtggatgagagggggtcagacagaaaccgttccacgtgtccagatgagatttggcggtggcctgagccaagagggcatgaacaggagaggggctgggaggcagatgggacagagcttagcacctgactggcacggagtgaggtgggagggcctgaggctcgcctcacttcaggtgatgagcagactgagcaggttgtggctgcggagaagacgagctcggcttccaacgtgggaagcctgaggtgcttgcgggtgccgtgggtggagctgtccggtgggcgggaggatgtgctgcaggtggggcggaaggcaaagcccctgctggagacggaggttggggagccccgagagtgggtgagaactgaggcctcggggtggaggatatcccaggagtgtggaaggaagcggtcccacgacagcccagggagacatcaaggtctagggagcggccctcaccctgagagctgtcactgaatgttgggggccggtgctaattcgcaccactcaagaacacacccacaaacccagtcccaccaccaggttcccaccccaacaccctacccgcagcagccctctcctccgtgctcccaccccgccctgcagacccgggttaatcctcccctccc

SEQ ID NO: 1733 - DNA, 1949 bp, Artificial sequence
  DNA replication origin
cctcgcgcctgaggccaaagccctgggcggcgcgggcgctcccggcagctgaggtggcggggcgggggccgcgggggaggagacacaaaagggggaggggcccaggctgcagctgccccgtacccgcggggacaaagggcctgctggcgggccggccccagccgttttcatgcttgttgggattaggggcagtaaagggcgctcgggactgtgcggatcaacagtctgtgcggggcggcgcgtgggggcgggcttggccccgcccgcccctgctttgtgcgcagcccccggcccgcgccactcgaggcgccgcggggctccggggaggccgcccctttgtctgcgcctttcggggacgagccccgcccggggagcgccgagcaccagctgagcgccgcgctcccgccggctacctcttccccggcgcggaggcctggaggcccctcctggggcgaggtcgcggccccccgccacgcccgagcccctcggacggctcccatcccacagcccgagccccctttcattcacggcgaggaggccctcggggaacccagccctctcccggcagcgacatctaagaccttagtaggatgtacgcacccccctttctccaacgccaccctctccccctcccgccagtctccacccgaagaatctcttctcaaatctatgggtgataaatgagaatggagcgattaggggatcgactggttcagagcctacgggttgggggcaggagtagggctgggaggaggggggatctgggcaaggataaggttgggctggagaagcttacagggctggaggggaaatgcagccgcatttctggcagtctggtgccagggctggggtgcggaaacctccccaggctgggtccagtcatttctgccaggggtgggaggaggagggagtatgtatgtggctctgtgtcccggagtgtgcatttgtgagtgtgaacgaaccatggtgcatgtgtatgtgtgtgaacgggtgtgggggctggtgcctgcgcgtctgcaggtgcctggtgggcgtgagcacgtataccagtgtggatttgaggtctggctcagatcccagaacatccccatctcaggctcctcttctcaccacctgcatcctttaactcctgggtctgggattccagatgctacatgcatctcctacctctgagggccttcttgtcctctcctagtcagataaaaacaattaacatttgtagactacttcctgtgagccaggcaggctcaggtctaagcccttaacatctgttaacttatttaactctcaagtaaccctgtaagagaagtactcccattgttcccattctacagttgagaaaagtgaggcacaagtaagaagtggaggatccaagacacctgggtccactctgcactagaaatcactatcctctgttgcctccacttctactgggtctccaagctcctcttcctccaggaagccttccttgaccaggcccttacagatctcgcctctctcctgttcctgtcacctgttcatgctgagagtaggagcaaacctacctacacagggtttccggtgaggcttgaaggctaagaggcaggtagacaggtcacaggctgccatcatggggcagtcagtctccttagagatagccattatacagagccctaacaagccagatcccccaccggggagcccacctatgatattctgaagcctttttctgcagtcttctaatgctttaccctcttactcagttcccagttcattttctgcctccctgcactcaggctttaaccccatttactctgaccatacttgatggggctgacctagttggtgtccctggagagcaagcaagttctcagtgcacccagcctcacaggcctctctgctaatcccttccatgctttccatcctgtacctgcagcctactcaggcctctgctgtgtgccctgcccgtg

SEQ ID NO: 1734 - DNA, 1373 bp, Artificial sequence
  DNA replication origin
gaaacgaactgttcctacacccttctccccaggacttctctgcccattgctgggggtggggagggtccatgccacctatggagcgccttccagtgccggctccacttacaatacccttcctcttcatgctcttcaattgttctaatcccagtgctgtttggtcagtagaatccctttgtcagttcaaatcctaattttggttagaagcaggttatggaggagagaagagtggtgtggtatgccctccctccagggcctcagaatggagcaagctagggacggggaccgcaagatagtggctgtgttccagaggcattgggagggaagggggcaggctcagaagaaaagcttgtcactggggaaggcggggctccctggctggggtaggaaagggaaccaaacccagctcttccagaacccagctcttccagccctggggagtcaagagtggattcctgagcatggaaattcactgcagtctcttctcccattcactcacttagcaagtacctgtatgcacagacagcctggttcagggctctatgctggctgactctggggaatatgatggaggatatatacaggaggtccaagccagattacaaactgctattacaagatcattaccacaaaccaaaaatgccagttgaatagacattcactgatcgtcgaccatgtatgccagggacggatgcaaagttggataagacagtgtatacccagcgcagtggggacccagaggaaggcataactaaccgtgcttgtttatgtaatattgattggggcagtatcaagacggcttcagagacatggggacatggaaacatggggatattacagctaattttgaagtacaaaaaggaatttgctgggtggagaagggaggagctttgaggggaggggagaggaaggatattgtaggccaaaggaatactgtaagaaaaacaatggtgtgttttgagatctctgggcagtttgctatgatgggaggggcagagtggcaagaggcaggtatggaggggtgagcaggggccagatcaaacagggtgttgtaggccaggtagaggtttagcaggaattcagggagggcattaggagtggtgacaagtgaaatttacatttttaactggaggcagagagatcagtgaaaaggccgaggcaataatccaggtcagaaatggcctggaagaggaagaatggtcagaatgtggttattaatgagatgggagaaggaaggatagtgaggaccccaggatgctctcagctttctggatggagtacagagccatcttgctgaggatactgaaggagagcttgtttggttatgtagaattttggcggggggcggtggtggagggggatgatgtcactct

SEQ ID NO: 1735 - DNA, 946 bp, Artificial sequence
  DNA replication origin
ttctcagagatagtaaaatgagaaccccgacacgccaggactaggtctccgcccaaacaggaggcagcctccttttctggccttgcgggagtgggagaccaccccaggagacagagaccatccttccctagtctcctcgaaggaggccactgtgactccccgcttcccgcggctgagccccaagccccaccccgcctcgggccccagactcggactcacggcgtagaggcgcccgctccggcgcgtctggctctggctccgcccggccctggtggtgtctagtccctgggctgggggttcctcggcctgggcgtctccgcggtccaggcgtgggtgcggggctcccgggcagcgcgcccagccccagtcccggactgcggagtcaggcggcgtctgcgcagcagggcggagcgaccggtcccacgtgggccggttcggttttccgcggagccccgcgccaggcccctgcgccggaaccgcttcgcccccgcgcggggccgcgttgacccaggccttccaggtccggtgctctctcctattggcattcgctgggcccttcccatcagttagcctcgctgcagacaccgtgccattttcaagtgaaatctgattagtcaccaccttccggcgttaaactcctcaatggcttccccaccgccgggacaacccctaaggcggtagccgcggggctctgtgcgtcctgcccttcgtctgcctctccggcttcgtcctctaccctccctctccgcagttaccctcccacacgcccctttccgccacgcggctttggcacgcactgttccctcggtctagcattctcttccccctctcgacttactcctatttcagatctcttctcggagagatctctgactccctagatcacgttcgttcccccctttatgtcagagcacattccttttcttcatagcatttatcacaattt

SEQ ID NO: 1736 - DNA, 1070 bp, Artificial sequence
  DNA replication origin
agccaggagccccagcggtgacttccccactcggggcccggtcggaaaacgcaaagggcctgcgcgcgatgacctccagggcccctcccaggcccagtgtggaactccctaacaccctcgctcgccctctctctgcggagaatccccccgcaccgctgcggccgggttcggctagagcctcccggctttcagagcaccctgaggggaggagcttccgcgacaggaaacgcgccaaaggggagggctggcggcaggaaccggctgaagaggggctgggctgccggcagtgcgcgccgcagagacctggagctctccggccacggagcccgaagcgcgggaagcccggcggcgggacgggatgcccggtcggaacccatcccggccgagtctcgaggccgcgggagccggcgcggcgaacgccgggagccgcagtcctcccgcccgggcgcctcgggtcagcggggtctaccccggccccacctaacctctcggtgcccggccttctaagcccccgtggggggcgtgtgcataaactcacctcagaacccacctcgcctgtcatgacttctgcctcccctgcgctccactagggacggagctgtctctgattccctcagccggagagcagcggctcccgccgtctccagcccagcagtgctgttcttgctttcccgcccagccagagtggaggtcccacccagatggtttgcaccaatccagagggggctttccagcgagtccccgcccccttccgacccaccaatcacgcagcgcctctggccgcccaatctcctattacccaggctgagttggcgggtcgcagctgctggtagcggagcctgggggagctggaggtgcacgggggcggggcagtcggtaccaggcgagccgtggtctttgacctttgacacttgccaaagcatcgagtgcgattggaggggtgagtctttcggggggaagtgagctgggaaacggttcctgggcacctgggagtgtcctgtacctgaactttttagaggaattccaaggttcccgtggggattttctccactgacttcatttctggagca

SEQ ID NO: 1737 - DNA, 1008 bp, Artificial sequence
  DNA replication origin
tcctccctcctcccaccccagatcgcttctgtcatctcgtcttttagggtcaccttagacgctagcagtcctccttcatcccttcattcagcaccacacacccaactgcgcgtccctctccgtatagccggaaggcaccacgggaatggaccctgatgaatgatgcattccctccctggtcccatgacaagcgcctctggtcagcaaatcaccagtcactttagaagagaaaggtcttggccgggcgtggtggctcacgcctgtaataccagcactttgggaggcggaggcgggtggatcacctggggtcaggagtttgagaccatcctggccaacatggcggaagcccatctctactaaaaacacaaaaaattagccgggcgtggaggcaggcgcctgtaatcccagctacttgggaggctgaggcaggagaatcgcttgaacccgggaggcagaggtttcagtgagccgaaatcgggccactgcactccagcctgggcgacagagcaagactgtctgaaaaaaaaaaaataaaaataaaagagagagagagagagaaaggtcttgctttcttggatgccttccccttagcagacaaaagccaagggagcagcaccacctccaaggcagcatggtcagcccagcaggcacagcatctttagggctttcagtaaggactttgagtgggagaacactggacaacaggccaagaagcagtttctagtcagcagaaggaaggagccccttgtccaccaattgaaaaggtacgatgagtttgtgtgtgtgtgttgtattcctttgctacggcataacgtaacaaagtaccacagactgggtggcttaaacaacagaaatttattttctcacaattctggaggctggcagtcagagatacgatgtaggcagggttggttccttctgaggcctatctccttcacttggtagatagtggccttctcccagtgacttcacgtggtcttccctctgtgcacgtctgtgtccaaattt

SEQ ID NO: 1738 - DNA, 1048 bp, Artificial sequence
  DNA replication origin
ggcggcggcgggggccgcctcgccccggtccccggcgcctcccgctccgggccccgccgccgccgccgccgccgccgcgtaacgcttgatctccggaatattggcgctggggtggcgccgcggagacgcgggcgctgggcagggggcggcggcggcgcccggcccggggacagggacccggctccggctcttccggcctcagcgacaacaaaaacaatccccgccgccgccgccgccgccgccgccaacgggagcgggagcgggagccagcgcgcgcgcccgccgggagggaagggggcgcggggtgcgcggacccagggtcccggcgggcggagggggcgtgcgcggccccgggcgcggggtccacagagcccggcaggcggcgaggcgggtcggggaacgagcgcgcgcccggagggtgcagagcccggtggacgtgtcgggcacgcgcccgctggcccgctctgccccgtccacccgaggaggccgtccggtggccaacggctctgggggctacgtgccatccccccagggcgtcctgcaaaagatctggattccagttccgctgacccacagattcagttttccacttctgtgagtggaaagtgtactgagattcacaggagccacctcgcctccctcctccctcctcccaccccagatcgcttctgtcatctcgtcttttagggtcaccttagacgctagcagtcctccttcatcccttcattcagcaccacacacccaactgcgcgtccctctccgtatagccggaaggcaccacgggaatggaccctgatgaatgatgcattccctccctggtcccatgacaagcgcctctggtcagcaaatcaccagtcactttagaagagaaaggtcttggccgggcgtggtggctcacgcctgtaataccagcactttgggaggcggaggcgggtggatcacctggggtcaggagtttgagaccatcctggccaacatggcggaagcccatctctactaaaaacacaaaaaattagccgggcgtggaggcaggcgcctgtaatcccag

SEQ ID NO: 1739 - DNA, 1322 bp, Artificial sequence
  DNA replication origin
ccggcgggcgcgcgcgctggctcccgctcccgctcccgttggcggcggcggcggcggcggcggcggggattgtttttgttgtcgctgaggccggaagagccggagccgggtccctgtccccgggccgggcgccgccgccgccccctgcccagcgcccgcgtctccgcggcgccaccccagcgccaatattccggagatcaagcgttacgcggcggcggcggcggcggcggcggggcccggagcgggaggcgccggggaccggggcgaggcggcccccgccgccgccatggaggcgctgggacccggtgaggagcgagctcgggtcggggcgggacccgggacccgggacccggggcgggcggccgggactttcgctgccccgtcgcctcgccgggttcgggccgccaggcctcggggaaggggacccgagccccgcagcacgaagcggagggagctgacccgggcctggggggcggtgaccgcgccccagccggccgttgggtggatcccgaggtccaggggggaggttcgggaaggtgaccggcgctgccgggcggaggccactcttggccccacctcggggagacgatatgtgcccggggtcgcgacgagggtagtttgggcctcagaagggggcgatccgctacccagtgcgcgcggaggcctggcccagaccgggaaaagggccccgctgcctactaccagccggtagtcctggtttggggccgcgcccctatttttctttgcactggcagatggtccagagccttcagatgaggaagaagaacttcatccaaacacctctcatgatctctgaaggtcaagggacaaaatgcccaccctttctgaaaggccctgatgtcccaaagaacatggtcctgtgcctctgtcactcagtctgtgtgttagtctcagagtggtctgagccagcctttgagtgacacaggagttgccagtcagtctgctccaccacaggcttcaatgccctgagttctcttctaattgggttatgagtggttgtgaggatcaaatgaaggagaaagtgctttggaaactaatttgttgtggatatggatggcctctggttatttctctctatccaaaccagaagaaccattccaggctgtaacaagtgtcctgagtattggggcctggtgcttccacctcaaagcccaacaggtttctaatgccttggctaagtagctcagtgtttaggggctgtggtggaattcactttaatattcaaactttacctacataatgaacttagtcgtagagtgtttcatctttttagtgcgtagaaaattcgagttgccatttga

SEQ ID NO: 1740 - DNA, 1470 bp, Artificial sequence
  DNA replication origin
cctaaaggcctccggggacgccgcccgacgccgccgcggttgccaagcgaagcgcccaggccgcgttggccgcggggggttgggggggtaggggaggggtggttgcctagcaaccggtggtgccaaacactggagctcagagcggggggcgcggagagcgaagcgggaaaggaggtaagggagctagggaagcgggggcgcccccttcctccgcgctggaccggggtactgatctaaaccaaaggcgatcatcctgcggaggggaagaaaggggtttgacggggaaccggactgaccccagctcttcccacggggctctccctgtccggccttcccctccaacagtaggcgagggcggaggggcgggagggcgtggcggctaccagacggggagggggccgccccgggggccgccccccagctccccagtgccaacaggcacgcgtccctggagacagaacagggctcctgcccttagatcccccacggggactggcccgcagcctggggaagaaaggaaaggaagatcaacaaggcatggttggctgggggcaggtgtggaaaatgcattaagggcaatttttttctgccatccgcctaccccccaggcatttggcacttcacacacacttcgaggcttccgggactccattattcctttttacctgctccaggacctgcaaggtccaggggtttgtgtccgcctggggacgggagggagggaaacttagttaatacctcacacaaagttgagtaaagcaagggctgtctccaagcaggcttccagcaggacagggctcagagcaaaatggacaggaacaagtcctgcgcagggggcgtgtgatccaggaggtctccggaaaggtctcccgcagcagtgttttccctctgcaggtggtgtctgtgaacaggcctaggggtttctgacccttctggtttctgtgccatggccacgctgagcgtcaagccaagtcggcgcttccagctgcccgactggcacactaacagctacctgctatccaccaatgcccagctgcagcgagatgcttcccatcagatccgccaggaggcccgggtgctccgcaacgagaccaacaaccaggttggggatgggaactcagctgggtgggcaaagggatagcccccaaccccttgacaccctctctatctggctctgtctctctcagaccatttgggatgaacatgacaacaggactcgactggtggagaggattgatactgtcaaccggtggaaggagatgctggacaagtgtctgacagatttagatgccgagatcgatgccctgacacaggcagggatccaggactgggtgcccgggggctgctgccgaaacctcccctccttccccacagctaggttgagaagcccttgatggggggtcatgagtggcatgtccatccgagtcactggccccctgctaaagtggggacaagcgctacttccccatg

SEQ ID NO: 1741 - DNA, 1167 bp, Artificial sequence
  DNA replication origin
gtgctgacccagcccagagaggggtgccctgaggggagggaaagaactggatttggtacatggagttcggaggaatagtgttccccatctttgctcctccatagacaggagggtgttcaagaaccctctccctgctggctacatacagtggggcagagaacagccggcctgagatcctctgcatttattccattcatttctctcctccctccttccattgcccacccaaccctgccctcctcctgcagtcctccaaggctaggccagctccagctggcagcttttgagtggactcagggtgctatttgtggtacgtgtgaaggtgtccacctcaggcacgaacctctcagcaggcacggtcagcttgcgccgtgtgtccatgcacttggtgtccagcagcatggagttggccttgcaggcaatgtcagcctgcagccgggccaggtgcttgcacagggcgtccagtgcgtccctagggaaggacattgacaaccccccagcccccatgaggctgggaggcctgggctgcgtgcatagccttcagtcaggaagacagccccagggagccagcagccagcaagaggccccatttgtgggcagcgtctcactgctccttccgcccactcccgagacctactgtgcttgcgccagcttctgcttcagggcagcgatggttgcctctagctggtgaacctcgtcggtgaggccgtactgtgcctggaggcagaggggttgggagttccaagtcagccacactgtcctttacctgagtgctgccccttgacagcagtgcccttgctccatcaggaatatgagaaaaccttggctagggggcccgtgcgccactgggacaccctctcacctggtcccggcagagttccacgttgggccggtaggttctggcctctagccgggtatgggacagcttcaggctcaggagctttgtgcgcagatcctcctccaggtgccggatgtcctcctgcagctcagcgatctcctccaaggtctgcaggggacagagtgactggtttccacctgctggactcacgtgcatgcctggtccagtgcctcctggcgggggcatgcggcttctcatcccacagcaggaagtccaggcccctggagatgctcacattcttctcttgccacttgagctcactgtacact

SEQ ID NO: 1742 - DNA, 1219 bp, Artificial sequence
  DNA replication origin
cacccagttagcccagtggtgaggagcggaaaaccgagactcaaagcacaggctggcgggaagtgcgcggcgccgcgactccgggccgctgggcggcgctgtgggcctggcggcggagtggaaactctaggccccagggagcgctgcggacggaagtagggaaactgtgagggcggcaccggaagtggcgagcagtctgcgcgcggatggccgcagcggcgatggcggcagcggcaggtggaggggctggcgcggcccgctccctctcgcgcttccgaggctgcctggctggcgcgctgctcggggactgcgtgggctccttctacgaggcccacgacaccgtcgacctgacgtcagtcctgcgtcatgtccagagtctggagccggaccccggcacgcccgggagtgagcggacaggtgggcggggccgggcgcaagtcagaggccgtgcgggagggaggccgaaggggcgcggagcctccgggggcgacgggtcgggggtgcgcggggatgaggctgccgagggcaccggggccagagccggatgacccgcagacagcttgagctcagcgagtgccagtgcgatctccggccttatagacgtctcgccccgaacatcccgtgctcggggcgtggcagcaccggggcctcaaccgtgcagggtgtggataaacccatcgtaagttgaaaatacctgaagtggaaagtgcgctttcagcttagacgaccgttttatctggacgcagccccatcggacgtcgaggagcctatgaatgcgtatcagcgttatcagaaagccgaaaaaaacttaagttgaaccatcctaagtcggggactgtctgtccacccttgccgacttgacctctttttcccggttctctagagtcagtataccaccagcccgttctccaccccgcaaggcgtgctttggaagcctgactctaatcgcgtcctcccctgcctaaaaccctgctgtgatttcccattacccttagtacagagccacattccttaacgtgtccgacgtggtccggccctcccacacgtctgcagtttcgttttccgccagccttggccttgctttctgctcttcggttcctcacaccatgattcctctaggccaggcgtttgcatgcgctgtctcgcctgtaaaactaacttcccttcccttgtgggctcagatcccggctcaggtagcaggtgtgaggtcaagcagagg

SEQ ID NO: 1743 - DNA, 987 bp, Artificial sequence
  DNA replication origin
ctggcaccccttgggcacctggttttccagggatagtaatgcctgaggggcccgggaggccagggggtcctgggggtccccggaggccctggtcccctcgtattcctggctccccccgaagccccggctgccctggtggcccgaccttgccagggagccctgggggaccagccttgcccatccgggagaagccagggggcccagcagggccaggctgcccatggagtcctggctttcccatgcctggttttcctgggaagccaggggggccagggggaccccgaggcccgggcttcccaggggggccgggctctcccttcaggtccatcggcagcagcggtagaggcatttctgagaaagaaagagaaaggggcagtcaggggcctgaactgtggggacaggggaccccatctacccattcccccattccagtatgaggtacacgggagaggaagaatggggctgccccttcctgctctcatggaagatggggtttgggggtggcccaggggacatcttgggggcaacagggtgtcctccttaagggctcctaacacccaacctacctaggctgggcctcctccatgagcctggctgattctcacctctcatccctgcatgacctgaaggtggagtggccaccaggtggcaccagcagcccaccttagagcccgtgggagcagagccccacctcccaacttcccagttcatctcccccttggaagaccacctgtgccagctaactgcaccgtttccaggccctctggggtattaggaaaaacactgaaggtaggaaaattggtggggaatgaggagctgtggagggcgcctgaggatctgatggctctcagggaggcaggggatttgggggctgggagcgatttgaggcactgtggggtgaggaggctctcacccaggtactggcctttgccctcacggaagggcggtcccacaggtcctttctgcatgggctggatgtacttcact

SEQ ID NO: 1744 - DNA, 984 bp, Artificial sequence
  DNA replication origin
gaggcccaggaatcttggcaggcgtggggaggcagcgggtggcgggtggcgctccggaaaaggctgcaaatgcgaaccagaaggtgagggattggaggctgaggaggccccgcctgcccctgcctgaggcctgggggtggctgggtctgtaggggccctcggatgtccagttcccatcagaagctcaaggcctctgctgggaggcaagcgacggccccagctgaggccggagcccctgggtggggaagggccagctgcctggctacctgcctgagggtacatggctgccctcaggtctgcccactgccgggccttttctagtccatctgcccctgcccggctgttcttaccttcctgggcactttgttattctgagatgctcctccctagggaagcagcggagaacctagactcagagatgggcagaggccaggggcttggtcacctgcaggagggagttcggtccaagccccctccagcccagaaccaagaaggactcaggaagagcaacaaagagaaagtggccctgtgataagccacctgagggcttggctggacaagggaggtgggtttttcagaggcctggacctggagcccccaggctacaggcttcatcgagcacatgccctgtgcccgcctcaggcaggagggaggtgtgggtggggaagaggtgctttcatgcaggtgggtgcccagaaggagctgttctgcctgagggaggcagggaaggctgcttggaggaggaggcttttgagctgggtcttaaatgagaactaatatgtttccatggaggagaaaggtagaaagggcaacccagcagagaggatcatgcaggaaaaggcagggacagggaggcagtgagacgtctgggttgtctggatcctagtgtgttgggggaggagcccagggctgtggtgggctccactcactccctaaatgtaggcgtgttccccaagggggaatccgtgggcctcctccaggctg

SEQ ID NO: 1745 - DNA, 1329 bp, Artificial sequence
  DNA replication origin
tgcgcggactccccggcggccgagccgcgggtcaggtggacggggagggatgggggcgggccgcccgggagcgcgtgtgtggagggggctcggcgtgggtgtcggggagggaggcagccgtccgagtccgcgctgggcgcgctgggccgggcggggcgcgggccttggccgtggctgtggaaagaggagggcggaggccccgccccgacgcgcccctcctgccgcccgcccactccggcagccgcgaggggcggccggcagagcgacgcggaaccccgccggcgcggaccccggaccccaacgccgcccgcccagccgcggacgcccctgcccggagccctcgccgcccgggccgccctcgagggccgggagcggcgcccggcggccgcgcccgcaggtaaaggccaggaggcgggcaccggggctcgggctggggggctccgagggcaagacctgggctgggcttcccccaacaccatgcgggatagcagggccggcgcctcggactccggggtggggacgcggtgggggactcgggccagggggtcgccttagaatgggggagcccatcccgttccctgtgccccgttccctccccggcaggatcccagtaaagccccctcctcccttcctctcccagaagcgagggctccagcataagacagtgccgggtgcaacccccgacgatgtggctctgggcgcgtcaccacctcccgatctcccgtcccacctgtaaagtggggataaaaaagccgccttcacagggtagtggaggagagaggagggagtgaggggccttagcatccccccgctctcactcctgcccccatctctctgccattgctgatttgctggagaccttccagttataaggtttttctgccttagcccccaggttcctcctattctaggtgccctgtcagtcccctcgccccaaactgaagacaagttcccaggaatgttcctgtcaggggctcagcatccccccagctccagactgagacttgcagggggtgaggggccgctgcctggccaagagggactggggtcccagggccccagaacaacctcccagtgtctctgccctgggtctggagccaccctagccccggaaatcctccaggtagagaaatgctattcagccagagggcccaggaacgctattgccacggggaaaactttgctggttgtatgtgtgcacgcacgtgtgtgtgcctgtgtgagaccatgctgggttcctgacacagacgtgcggctgacctccttaggggtgccggagcaaccagaaatcatccctcctgtctgctatcagtacctcttgctcaggct

SEQ ID NO: 1746 - DNA, 2420 bp, Artificial sequence
  DNA replication origin
cagcccgagccccggtgcccgcctcctggcctttacctgcgggcgcggccgccgggcgccgctcccggccctcgagggcggcccgggcggcgagggctccgggcaggggcgtccgcggctgggcgggcggcgttggggtccggggtccgcgccggcggggttccgcgtcgctctgccggccgcccctcgcggctgccggagtgggcgggcggcaggaggggcgcgtcggggcggggcctccgccctcctctttccacagccacggccaaggcccgcgccccgcccggcccagcgcgcccagcgcggactcggacggctgcctccctccccgacacccacgccgagccccctccacacacgcgctcccgggcggcccgcccccatccctccccgtccacctgacccgcggctcggccgccggggagtccgcgcagcccctgccctcgaggggccacctgcctgtggggacggacgcggctgctgagaaggacggccaggcgtggtcctgcagggaaggggcagctcgggctggtggcccccagtgaggagtccccagaaggctgcctgcagacgtgacctcggtaggctgagcccggaggactcacaggggccagtcgtgacccgcacattcaggctttagggcattgagccggggtcacagaggcaggcgggagcaggccagacctcgtccctcggaaatggggagtcacggaaggctctggagcagggcagtcacgtggtcagatgtgtgctttggaaagagcctcccgaagctgtgtggaggaagatagaggcaggccaccgaggaggctgcgggaataccctggcatggtcccatgaggtgcacagtgagggggaaggaaagggagggcccagtgtgaggggagtgaggaggcgaactaggcagagtttgggcgaggggcctaggaagaagcagtgtcaaggacagtgcgcaggctttgggctaggcctgggggcggcagggtctaggagaagaaggaggacggatgtaatgaattggatgagcctgtgggacttccatggatccggaagggaggtgagagttctgggatagcgaggaggaatccacggtttgcagatggcgactgatgccatagaataaggagcgggcccagggaggcgggcagggcgcgggcaggacactcatcagcattcacggggctgcccagggagaggggtcggcaaaggagactgagaagatggcagggaccgggagagcagtgtcccagaaggcaaaggcagagtgcttctagaaggccagggaggcccacgggatgggctgtcacagaaggacattcttagggacagcaattaagggttggaggttggggtgggggtaggggcagtagccaggcagcaggggagaaaggaggaggcagcaagtgcagagggaaggggagatgaggtcaggaaaggattttggggtgtgtgtgtgtgtgtgtctgtgtgcgtgtgtgcatgtaggtgagtgtgggtgtctgtgtgtgcatgtaggtgggtgtgggcgtgtgtgtgcgtgcatgtgtgtgtgcgcgtgcctgtgtgtgtacgtgtaggtgggtgtgtgtgtgtgtgtgtgcatgtgtgtgtgtgtgcgtgcctgggtgtgtgtgtgcatgcgtgtaggtgggtgtgggcatatgtggaggtatgtgtgcttgggtgtgcaagtgtgtgtgtgcgcgcatgggtggggggtcagcatgtgtgtaggtgtgtggaggggtgggggtgtgtatttgtgtgcgtgtggggaggtatgtgcgtgggggggtgtggggggtgtggctgcatttgggtgtgtggatgtggctatgtggctttgtgtgggtgtgtgtggctgtgtgggtgtattgtagctttgtgtgtgtggctgtgtgggggggtgtgagtgggagtgtgtgtggggggctgtgtttgggggtatgggtgtctgtgtgtgtgggtgtgtgggtgccgctgtgtgtttgtgggtatgggtgtgtgtgtggctgtgtgtggggatgggagtgtgtgtgtggctctgtgtttgtgggtgtgggtgtgtgtggctgtgtgagtgtgggtgggagtgtgtgtgtgtgtttgtgtgtctgtgggggggtgtgggtggctgtgtgtgggggtgagtgtggctgtgtgtgtgtgtattttcagtgggaaagagcagagccctcaccaggtccaggaaaggagcagggagggccccaggctgtctcgggtcagggcccacccccctcaaccttcccccttctgctgcctgccctctgagggcctcccacttttctgtccccctgccaaggtacacaccagccccgccactccacaacggggcctctcaccctcacctaccgtcagagcctggcccactccatcccacccgtcagaattgggggcaa

SEQ ID NO: 1747 - DNA, 1064 bp, Artificial sequence
  DNA replication origin
cttgaagcctcactggccagcttctgattgtcgtggctgagggaactaaatcccagagaggggcagcaacttgcccaaggccacacagcagatgatcataggcagagctgacccattgatatccagacaccaccagagacaggccaaggtggaagcccctggcaggggcgggtaaggagtctggctgggagtttggccttgtcaagagataaggcttggtgtgagagtccacgacctctgcgcaaatagctggtggataaggagacagcggccacaagatcatggcacagctgtcagcctctactgggggatggggagctgaggcccccttggggttggggaggcgcctgatggccaatgaacaccagggccacaggatctggccacgggacagggcccagacttggcgtccagggctggttgaaaggagaaggagctgcagccctccctccctgcaaagcactgggcaggggcaggtggggcaggggttggggggaaagggaggggattggggacaggtgtgtacctcatagaatcaggcctgagggccccaggaaaagtgtaaggagtgagtcaggagacccaggggtgggatctgagtgggggaccagctgaatttgtgtctgaatgtgggtgtgaagcccatgggagtccctttcccacaaagcatgcccctcccttgcccgtttgtgtcaccaggccccacttcatgcagcgctccctcccttctctctaaacagctcacactcagagtgaagtgctctgcatggattgactgtcatcctcacaacatgcctatgagagcttcccagatggagaaactgaggcaccagaggttaagtgtttgcccaatggcatgtggctggtaggtggtggcacttggatttgaacccaggcagtctaactccagggtctttgctgtcaacctttagtccctgctgcctagctcccaccccctcccagcccgtccccatgcacactcagcccccatcagatccccatgcagggtctggtttccacaccagcttcagggtcagaactctgcaatctcccctcagtcggtg

SEQ ID NO: 1748 - DNA, 1545 bp, Artificial sequence
  DNA replication origin
agtggccaggacaggggtcccgcggcgcatcacgcccggcccggcccggcccggcaagtagcgactcggaggcgggggcgctccggggaaggtcgaggcaggtggcccgcgagtctcggaggtgccggtcgcccggggtctctcggctgcggtcgcgaacccgttccccgcccggcgccggcccagtcccggcctcggcccaaccctattgtaccgcccgggctgggcctggcctctcgctggcgcgtaccaagttcgaggcgggggggtccaccccagcagcgccccgggacccagccccccgcgcccgcgccgtccgcgccgttcgcgccgcccccgccccggagccccgcgcccgcagcctcccggcgcctctcccacggccacggccgagcgggctccacggctccaggagttcgccgcgctagctgcctccccctgcgtccgcgtcttggtacgcgccgcagcgcctgaggactaagtagggagcgctcgggtgactcacccgccgcggggactgggggagagggggagcagggctgggactcccctttcccaccctggagtttgggggctctggcactggggctgagagggcagcttcgagtccaaattctcgctcaaacccacctaaaccaaagcggcccgggggacgtcgggaggcatgaaggagagtcacaaggagacccctgaaagggtttcgctttctctcccctgctgatggctgggctggggacaggtctgggagccttgctgccgcccttgctccggcattctgcgcttgtgtcttccctgctcctctgggggtaattacagccctgcgcagctgccttacccaggtctctaatctgctgggtccctcccggctccaaactgggtggtcctagccctggacctcccccacccccaccagacgaccccgccaatcaccccagaaggattttctcccagtggtctgtcgatgagggggtggtgaccccctccagaatccactccccaaagtagccctgcttcccagccctccagaatggactcccagcccccttgttggtgccagctgaggtgagggcttcaagccaagccaggcccagcccggggcagagtggggagcttgctgggaaggtggatggatgatggtggtgctgctgcagggacttgggttgcgggggaggaggaggggcagctgtgccctgcccaccctggccctgccctttgtcctgacttctagaaggtcagttctctagttcttcattgtccagagattaggcccagtgagatactgtcccccttgccccccttccctccagtttctccttcctttaagcagctccagaaagcggccatttggagggatagagtgggaaacaaaagggtcaggggctcaggcaacctgggagcagcctgtcctgggatgtgtgcgtatctgggggcttggacactcttgggaaggcctgggaagggaatagtgtcccctctggcccaaaaacattagaaaaggatgatgatagaagggcggcaactggagccagtaaccttgagctagtg

SEQ ID NO: 1749 - DNA, 2490 bp, Artificial sequence
  DNA replication origin
gcccgggcggtacaatagggttgggccgaggccgggactgggccggcgccgggcggggaacgggttcgcgaccgcagccgagagaccccgggcgaccggcacctccgagactcgcgggccacctgcctcgaccttccccggagcgcccccgcctccgagtcgctacttgccgggccgggccgggccgggcgtgatgcgccgcgggacccctgtcctggccactggccgccgccgccgccgccgctgagaccccgagacccccagtgacgccgcagccatggagagcggcccgcgtgcggagctgggggcgggcgcacccccaggtatgccgggagccacgcggaggcgagatgggggtagatggaggggctgcagggcggccgaggatgaggccggccggctgggcggggacccctccgctgccgcgccctctgaccacttggaagtttaaaaataaaggctgcggcggcggcggctccaggctcgcgatgcatcctctgacagctgccccctcccccaccccgggtgccggacgcatcgggcgtcgggagccgcagggaccccgcgcgggagttgttggggtgacccttctgccccagcttagtgccatctcagcttccccgcccccacgtcccttcccgattcaccccgggccttgaagatcctcttctactgagctagggcttccgtccccttccccatcccccgtggcacatgtgaccccagcctgagtgtgtcgggggtccatattctcaggcctgggccctgcataccgacgcctcggccttagtgcccgtaccctcaggccctggcccagacctcgcccccaccccatccgtccagctgccgcgcaaagggcctgttgctgctgcgggccggcggggaggggaaaggagggaggggaggagagagggaggtctctagccgctgctgccaagtaacccgccggataaaggcgagggggagggggaggcggcattgtttggggtgagggcgggagctggggagtgggccgcctcccctgcagccaggcctactctggagcccacccagcctgattcggggaggagggggacagaagtaaatctgcttctcctgcctgccctccttcccagcctctctgggccccaatctcccactagagaatgaggtaaaggctccaagccggcactccctggacctgccacatcattccccagcctgaggctttgatacctccccccttactctctttttttctctctttctgcccacaccttagaccaccaaagctcccctcccctccctcaccccaccaaccaccagtgctcaggacttctgcaaatcccattcggatctgggagcagctgatgagggggtggggacaggtttctggttgggcttggttttggagggaggcgatttctctttcttcctggaaggggagggaagaacatgattattgaagacccaagttctgttcccattgactcaggggggaggtggccccatccccacacccccatggagtcctgagcctaatcctgtcacctccctgccccttggggtgtgggcacaggatgaaacagttcgtgtgggtgcggagagcccaggataaggtggggccaatgggctgtgggtgggctcctccccatgccagcgaggatgcttctaggggactgtctgggtgtgggacctgggagaacagggaggggaggctaccatcagactggtgggtttcaggaggcttgtaggctgggctggaaacaagggtggctgggtctgtcctggtttggctgaacctgagaggggacacccagggaggcccagcctgagtccaacctcagcttactggccctctgcacctgagggcctctggcactggatagttgggggcctgaatgggggtggtgactgggatacagagcctgagctggtggctagtttataattaggatacttgggtaggatgcctagactgaatatgagagcatgggtgagatgcttggctctcctaggggcaggggggatgttcggtgggcggggagggctgcgtcaggggccggtgggcagactgcatataggcttcttgcattgagaggactcttctatacacagggatctagatggagtcacatgagaacctggatcaggatggtggcagttccccacacagaatagtcaaaggtgacaggagtcctctgtggggctttctgggagtaaatgtgctcacagcatgtgccctgtgatagtctgaggcatgggcctgacactccgagagcatgtgacacgaaccctgctccctctgagttcctttttgcacttggacactgagcagtaacagggggtggtgtggagtagaggacaagtgtggggaccactttcaggtcagaaaacctggatggaaatcccagttagccatgtactggctactggactggagcaagtgacttacctcctggagccacagtttctgcccctggaaaataggggcagtgttgtcaaccttgt

SEQ ID NO: 1750 - DNA, 775 bp, Artificial sequence
  DNA replication origin
atgccggctcccccgaggggcacagagccctgggtaaggtagagtggggatggggacctggagtatgtgagggctccagggacctggtgttcttgctgagctctggaggaggcttggtgggagctacaaggggctctggagggggaagggctgggccttctcttacttctactgggggagttccagagcgtggcagaggactttgagagccgcttgttgattatagagtccacgtgtttgggcaggttaactgccgacacggagcacctgctcccacctggagggggaaaagacacggcattagggccgggcccggcaggagccagtggggggcaccgaggccttccatgcaggatgctccgagggcggggtgggagagggaggagtgggcaggctaggatgaggagcaggaggcagccttggccctgggagagggagggtgggggggtaggtgaccagagacaacctgggttgggggagccgacggagaaggaacaaagggaggagatgagtaaaactagagaaactacagctttcctggccagaccaaggaagccattccttacggctgagtactgcaacccctccccataaccacccagcattagcacttgctgacactgcccagccaagacgtttggatacaacacccccgtactgggataaatgcaaaaaccctcctaaacaggacctacacagtcacagtcacttgcacaaatccacgtgttcatccagaatcacaaaaagacatgcagacacaggcatatagagtggc

SEQ ID NO: 1751 - DNA, 1007 bp, Artificial sequence
  DNA replication origin
cgcttcttgaggctgcgctcccgggctagggcactcttctccttctcgttttcccgctccttgtccttcttctcctttttctgcacctggcagggaaggaggaacggaagaggagagtagaggtcagcagcgcccgcgtaccccagttccaggctgcctgtccccacctgcgcggccactcgagccagtagagccactcaccggcgaggcctccggccggcggcgcaccggagcggggctgcccccggcgttgggcttgcggcgctccccgcgctcaccggcgggggcgcagcggtgcacgcttcgggtgacgctgcacggcgtcagggggctggcggaggccgagcgcgggcacaccggcacggctgcagagggatgagtgcggtcgggttgcggcccgcgcgccaggctggcccctgcccggccccacgtggggcctctcccagggtcgcagcccctaccctggtcccggccgttgcggggcagtgtgaccgcgctgcgactccgagcaaggaaggagagagtgggcgtcatcagacgatccacgatgctgctctcccatgcgctcagctgcaggctgcgatctgggggtagaaggccaggcgaagccggtcaccgtgggggccgtaggaggcaggaagaggcaagggagcagaccaggcaccatccccatgccaaggccaaggcttctcacccgggagtcctctccccacaatcacaccggggccacacttgtcctccctatgatctggacttccactacagacccaggcaaccagacacttcccagggcaacatcctgcatcggatgagggtccccgcctacaacgctccccaggtgaaggggccctgaacggcgcatataggaaggagccatccaggattggaagaaaacccaattgccctctgccatgtcccagtgtaaggtcttgcccctcctgctgtcagagggctgacccagccgaggctgtcccatggattcaggacagtgagggtccttgtgctcc

SEQ ID NO: 1752 - DNA, 1819 bp, Artificial sequence
  DNA replication origin
ttggaggccgcagatcagttaggctcgagccccgcccctaatcctaaacctcccaccagccagacccggcctcggagtcttagggcctcccagctcatagcagccctctccaggacaggaactggaatttgccccagcgctttcccgtcctgtccgctctaagcccaggccccgcccacctggcccgccctgcccaggccccgcccacaaatccccgcccaggtccgcacacctttctgcgctcttgccgctcttgctcctgctgctggaagtgcttttcccgctccagacgctgccgctccgcctcttcccgcgaccgagcttcggcctcctctttctgccaaagacccccatgagcgtggggcacttgactccagccttccctcccggcccgcggcgcccgcgcccagccgcttcccgcccgccgggggcacctgcttctgcagccgctcctgctcctcctgctcggcctgcgccttctctcgtgcctcctgctcctcccgcctccgggcctccgcctcccgctccgcccgggcctcggcctcccgtgccagctgctcctctcgcattcgcctgggggacggagcaaacggctcaggctcggcctctgcttcttctccagcgcccacgagggccccctcagtccccgaggcgcactcacttgtccctttctgcctgcagcctccgctcctgctcctcgcgctcccgctgctcccgggcctggcgccgcttctcagccaagagccgagtggcttcttctcggtctgtggtgccggccattggtttgctaggggtcaccgggggagcaggggctgggggtgaggtcaagacagcagcgtctggagggggatccgggatcaggcgtcagcacacccacgcagacaccgccgtcatctcccagcggcctgtgttctgggcctgggactgctgagggcaggagtctcctctttccatgtcccactcccagtcctcaggcatctctggcggcccacacccccacacaggagaagctggcttctctcgctcggcccacccctcccctctcttcattcctacctgtaggggtctccgcggggggctgctccttctggggcggggctggggtgggcgagggcgccggcgaaggtgccggtgaggctggggctgctgactccttctcgttactggccctgcgcttgctctggctcttgtcctcgggccctgcggcgctggggctctcctttgcctcctccttcctccgaacccgccccttgggggatgcagtggtgcctcggggggacggtggctttggaggcagagtgtggcctggccctgggctggggcagggggaggcaggcctgtgccaggatgtggagggagaggatggcctggccttggatttggggctaagagaaaagggaaaagggaagggttaggagacacacacacccacacgctgagaacttgttccttcctctgggaggtgccccctcccccaggctacatcagcgccgccccccgcccccttgctctcacagaaacacaccattcccttttagagcatacaccccagtttgtaatgacatgtttctgtgggattctttgattattgtatgtcccccgccaatagcctgtaagcttaataagagaaaaaaccatgcttgggttagctcagcaacgtgtcctcagcaccctgagtgctacctgacaggtccattcattcagcaggttttgttgttgttgttgttgttgtttttaagacagaatctggctgacccccaggctggagtgcagtggcatcatcatacatagctcactacagcctcgacctcctgggctc

SEQ ID NO: 1753 - DNA, 2033 bp, Artificial sequence
  DNA replication origin
ggtgtctgcgtgggtgtgctgacgcctgatcccggatccccctccagacgctgctgtcttgacctcacccccagcccctgctcccccggtgacccctagcaaaccaatggccggcaccacagaccgagaagaagccactcggctcttggctgagaagcggcgccaggcccgggagcagcgggagcgcgaggagcaggagcggaggctgcaggcagaaagggacaagtgagtgcgcctcggggactgagggggccctcgtgggcgctggagaagaagcagaggccgagcctgagccgtttgctccgtcccccaggcgaatgcgagaggagcagctggcacgggaggccgaggcccgggcggagcgggaggcggaggcccggaggcgggaggagcaggaggcacgagagaaggcgcaggccgagcaggaggagcaggagcggctgcagaagcaggtgcccccggcgggcgggaagcggctgggcgcgggcgccgcgggccgggagggaaggctggagtcaagtgccccacgctcatgggggtctttggcagaaagaggaggccgaagctcggtcgcgggaagaggcggagcggcagcgtctggagcgggaaaagcacttccagcagcaggagcaagagcggcaagagcgcagaaaggtgtgcggacctgggcggggatttgtgggcggggcctgggcagggcgggccaggtgggcggggcctgggcttagagcggacaggacgggaaagcgctggggcaaattccagttcctgtcctggagagggctgctatgagctgggaggccctaagactccgaggccgggtctggctggtgggaggtttaggattaggggcggggctcgagcctaactgatctgcggcctccaaacagcgtctggaggagatcatgaagaggactcggaagtcagaagtttctgaaaccaaggtcagaattcccccgaagggcagtgctgggcgtggggggcagggtgtgaaaaggaggctgcggaaaggcatccatggccacggagagcgaggctgtcagggaggccgctgcggcccgggcaaggggagggccgaactcagtccgaagtggctggggccggctgtcccttgagcctgactgctcttcctcttcaaagcagaagcaggacagcaaggaggccaacgccaacggttccagcccaggtaaagcccccattcctctcgcctcccttccctttgccatcctcctcctcctccatcctcacctctcttgccagcccctggctgatggcccctctttccctgtgacagagcctgtgaaagctgtggaggctcggtccccagggctgcagaaggaggctgtgcagaaagaggagcccatcccacaggagcctcagtggaggtaccagcttccaatcccagggtccctgagcagggaggcagactgcagctggagctgcggggtggcctgggctttcctgggaggtgaggtgctgagccttggcctctgcatccacagtctcccaagcaaggagttgccagcgtccctggtgaatggcctgcagcctctcccagcacaccaggagaatggcttctccaccaacggaccctctggggacaagagtctgagccgaacaccagagacactcctgccctttgcagaggcagaagccttcctcaagaaagctgtggtgcagtccccgcaggtcacaggtagatctcctgattcctggacccagctccattcctcccagcagccttccctgtactcctcagccctgccttctcttctggctctgccaggcaccctctcctgctccaccctgaagacccccagctatctgggcttgagtgctgtttgccctgactgtttcccttcctgtttttccccagaagtcctttaagagggtttgccttggatccgggcacagttgtgagggctcctctgcatcacctaccaggatgtctggaggagaaaaagacagaacaaagatggaagtggcctgggcccctgggggtgggtcctctctgttgtttttaatctgcacct

SEQ ID NO: 1754 - DNA, 1265 bp, Artificial sequence
  DNA replication origin
tgcctatccaaaatgtccatattatgattctcctagttaaagaaaataaattagtagctgctttgcagcttatactaatccaatagcaatttataaacaccattaacaaatggcaaccctcttccttcccacaaggccacttggtcattcttaagtagaaagttcctcacaagctcacaaggagcccctctgcccggccagccgccccgtccgggagggaggtgggggggtcagccccccgcccggccagccgccccgtccgggagggaggtggggggttcagccccccgcccgccagccgccccatccgggagggaggtgggggggtcagccccccgcccggccagccgccccgtctgggagggaggtgggggggtcagccccccacccggccagccgccccgtccgggagggaggtgtgggggtcagccccccgcctggccagccgcccgtccgggaggtgaggggcgcctctgcccggccgcccctactgggaagtgaggagcccctctgcccggccaccgccccgtctgggaggtgtgcccagcggctcattgagaacgggccatgatgacaatggcggttttgtggaatagaagggggcgaagggtggggaaaggattgagaagtcggatggttgccgtgtctgtgtagaaggaggtagacatgggagacttttcattttgttctgtgctaagagaagttcttctgccttgggatcctgttgatctgtgaccttgcccccaaccctgtgctctctgaaacatgtgctgtatccactcagggttgaatggattaagggcggtgcaagatgtgctttgttaaacagatgcttgaaggcagcatgctccttaagagtcatcaccactccctaatctcaagtacccagggacacaaacactgcggaaggccgcagggtcctctgcctaggaaaactagagacctttgttcacttgtttatctgctgaccttccctccactattgtcctgtgaccctgccaaatccccctctgcaagaaacacccaagaatgatcaataaaaataaaaaaataaaaagaaaccctcatttgggctcagagcaaaaaaaaaaaaaaaaaaaaaagaaagttcctcacaaaatgcatcttattcccaaaccacttataagcaacattagcagcttgccacaatcagcattctatttttgtttttagagatggggtcttactgtcacccaggctggaatgcagtggcatgatcatagcaatcctcctgcctcagcctc

SEQ ID NO: 1755 - DNA, 1433 bp, Artificial sequence
  DNA replication origin
aagagccggagacgccggggtcgcactggctccgtgcacccgcccaccggcgcccgtccccgcccttgcgctcacctcggcggcgcgcacagcgcggcctccgcgcctctccggagccccgcagggtctctgggatctcctgggaatcagggcacggggaaggcgctctcagctcccggggggcgcgcgctgagaccccacagcccgcccctggctcggcctcacctgcaccaggcgctcggggaagaggccatagcggcccccaaactctccgcgaagccagccccgcgcgggcacccagcgcacctgccggaccacgtccccgggcgccagactcagctcgtcctccttctgcgcgcggtatccggccaggacgaggacttctgcgggcggaagacggggccggcgtgcggctcagaaaggcccagccgggcagcctggctagggcgggcgtgtccccaagcaccgtagagggcagcgggggtcggggggtggtgtgggctcttgctatgtccacggttgcagagagaggccacctcaaagcctccgcacttacccatggtttccggggcgccctccagagcctggcagctccctctgacggccgagtactgggcccgcgcagggtgcgacctgaggcaagacagtagggtaaaggaggcgtagccgccagccgataggtcgggccaggtgctgggagtgggtgtggagagggggcggcccggctcagcaggtccggcccccaaccccggggtgaggaggactccagggtctctggcctgtgcagcggtcacagctccgtcacaggttcttccgcccacctaaattttaggccagccgcctctccctttccctcagcttttgcccggaggctcccagctacaatttgcacagagcctttccaggcccacccttccccagctcacaagcttttggcttgaggggaaaaggtggggagaggcacataccagggtggggccccccagcaagtagcaaccgctctaaaccggccttgagtgaatgaagtggctgcccttgtaccagcaatagctttgagtggacacttccagtctgctttccttcaaggcgtactcctctctggccccgtacccactctctacccccatataggaaggacacagcaaagacccctgctttggggccagaggtctagtttggtttcagaaaacacctccaggttttccctgggagttaggccgggagaatgaattttaccagcttccaagatttctgctcacagttgagtccccagccggcaggagtctgaaggttagggcccaccctatggccagtccatgtgggataggctctttcaggtagaaggctgagcctactaaccacatcccttgatccctgccccaccaccatgatgaaggaagccaaagtccttgcctatgacaccagtggaaaaa

SEQ ID NO: 1756 - DNA, 1472 bp, Artificial sequence
  DNA replication origin
gccctagccaggctgcccggctgggcctttctgagccgcacgccggccccgtcttccgcccgcagaagtcctcgtcctggccggataccgcgcgcagaaggaggacgagctgagtctggcgcccggggacgtggtccggcaggtgcgctgggtgcccgcgcggggctggcttcgcggagagtttgggggccgctatggcctcttccccgagcgcctggtgcaggtgaggccgagccaggggcgggctgtggggtctcagcgcgcgccccccgggagctgagagcgccttccccgtgccctgattcccaggagatcccagagaccctgcggggctccggagaggcgcggaggccgcgctgtgcgcgccgccgaggtgagcgcaagggcggggacgggcgccggtgggcgggtgcacggagccagtgcgaccccggcgtctccggctcttagtgacgggcgcggctctgggcgggacctcggggccgccctgcggtctgtgattggttctcgagtgcaatgctccgccctggggcggggctggagggaccaaaggctacgtgcgcgccttgcgcttcccccagctcctctgactggggcgtccgactggagctcagccgcgcttgtccggtgctaggtcatcctgccaaacacccgaggccccaaagatggtgcaaagtgaacttcagctacagcccagagcaggcggacgagctgaagctgcaagctggggagatcgtggaaatgataaaggaggtgaggggtgaggtgatgggaccgtttgggggaggatgatggaacgcgcctccctagtgagcggggtgggaagtgagggtgtggacggtgggaatggcgacggtgcagatacggggaagcgcgggagggaaggagggaggaaggggcgcttgggcagaaccaagggtggcagattatcctagggactcttggggcagaaccagacgcctctgcgtcctcccctctccccagattgaggacggctggtggctggggaagaagaacgggcagctgggagccttcccatccaactttgtggaattgctggacagtgggcccccaagtgagacctcgactctgtgaccctgtgactcgcaatctccaatgaccctcccagtggcatgagcctgtgattcacatatcctgaccctgtgacccctctgaccctctcccatgacctaacctgtgaattagcaccctccctaacctcactgtcccccactaggccttggtaacccagacatgccttcagtcagccctggtccccagcggcctcccaaggtaagttggctcagagtaggcacagaggtggtgagttcctcttggggtggttggaggctcatctagttcctccctgccccttcccccactagctgagcagcctggcctatgacagccctccagactacctgcagacaggtgagcacccatccaaagggtcccccactccctcagccact

SEQ ID NO: 1757 - DNA, 1238 bp, Artificial sequence
  DNA replication origin
gcaatgacacacacaccaggcctcaggaccctgacctcgaggctaaggtgctgctagccccggtgtaagcatgcgtgcttgggctggacggtggacttcacgtctgcgccgaggtgcgttcaagcgagagggcaggagtccctctgagcggacagggaggccagctgggaggggtccgagctggcgagaaggcccgcccggctcctccccggcgcacagctggattccggaatctaggccgggcgtcaagagcccgaccccgcctgggcccctcctgcccgccatttctccagtgcgcggctggagtccgaaggagacaccctcccccgcccctcaccatccggtggataaaaatagccgcgcgcaggccttgggaacggtaatgggagccacatgttggccagatgtgcctgggagggaccgtcaggaatgcggaggcccaggccctgcccccgcgcaggccccgcccccagcgaccagaccggcgtggcgccgtgctaggcagagtttactttctcgcgtttcccaaagtcgtgtgcaaggacgtgggtggccccagccaggtcaggccgcggtcccttcccaggcccaccctcagtaggtctgcgtctgcgtgtggatgacgcgcggggtctgggacttctgggtcccctgcatcacctggacctggtcgggagtgaggtggagactttgtcagggggccactcgccgtcagccccctcccgccgggacccgcgcctcacctccagccgccggcgctgctccttctcgctcttcagctcctcccagatgtcggtcagcttcctcctgcgggccgaggcggaggtgaggggctgggcaggtgagggctggaggtgaggggctgcgcaggtgagggctagggggaaccctaccttccacaacccccgccactgcccactcactccagctgcacctccatcagctccagcgccctccttagagactccacctcgcccctcagcgacgttacatcaactccttcattcttgttttccgtgtagttttgcgggaccagcgaggggagcgcgagcgtctcttgggagtctggaggcggcttgataggacgtgttttttgggcaaaggctctttctatggggggcacctcctcttttggagccacttcctctttagggggcaattcctctttcagggtcacctcctctttggaagccactccctctttggggagcacctcctctctcagaggcctctgctcg

SEQ ID NO: 1758 - DNA, 1116 bp, Artificial sequence
  DNA replication origin
tgggaagggaccgcggcctgacctggctggggccacccacgtccttgcacacgactttgggaaacgcgagaaagtaaactctgcctagcacggcgccacgccggtctggtcgctgggggcggggcctgcgcgggggcagggcctgggcctccgcattcctgacggtccctcccaggcacatctggccaacatgtggctcccattaccgttcccaaggcctgcgcgcggctatttttatccaccggatggtgaggggcgggggagggtgtctccttcggactccagccgcgcactggagaaatggcgggcaggaggggcccaggcggggtcgggctcttgacgcccggcctagattccggaatccagctgtgcgccggggaggagccgggcgggccttctcgccagctcggacccctcccagctggcctccctgtccgctcagagggactcctgccctctcgcttgaacgcacctcggcgcagacgtgaagtccaccgtccagcccaagcacgcatgcttacaccggggctagcagcaccttagcctcgaggtcagggtcctgaggcctggtgtgtgtgtcattgcagtgtatgaacccagggcactgtggggacagggcgacgtgtgtccaggcgtttgccggtaaggaatgcgttttgaataaggaatgcgcgcgcgcttgctctgtgtgtgaggctgggtgcaggcctgtgggcttctgcttttctgctggctgtgaagtgaatgcgggcaggtgtgctgtatcgtcgggttggtgggtgggggtggtgcagctagggtaagggagtcaagctgggcctcagtcctggggcccctgcgtggcaggagcctgggggtcgctgggggcaggagtaacagagggagagactgagtcactgagaatgcagctttctttcatttggtcacttcacctcttcatcgaccccagagagggagtggggaccctgcatgctgccccctccccgcccccggggtcttctggcaggactggggaagggagcctctcagggggtggcggtccacgcccagtagcacctgggagctgtgggggccgaggcagtccgaaggtgtggggtagctctgagctcatgtgca

SEQ ID NO: 1759 - DNA, 937 bp, Artificial sequence
  DNA replication origin
agctgtgggggccgaggcagtccgaaggtgtggggtagctctgagctcatgtgcaggtccggtaccccgagcgccttgcagcgggagccggggcccatcagtaatagtgcatgcggcccagggtgcccgtggccgtggggctgggccccagcgtgcctgtgcccagcaggtccggctgcccggtgcgccagatctcccgcaggatccgttcgcgctcctccagccgctgcgcccgctccagctcctccgccgacgtgaagacgttgacgttgaggggcccgtccggctctgcggacagctcggggcccggcagcgtgtcgtcggggcccagccgagtcaccgtgtcctcctcgtcctcgtcgtcgtcctcgggctccagggtgctgctgcgggggtcccggcgctgagccgggccccggggccgcgggcggggcgcccacgagatgctgatgacgagcaggcagagggtgagcagcaggccgaagcagacgcccagcacgaagtagaggccgaagctctcggggttggctgcggggcacagggcgggggtcacggagaggcccggacgggtgggggttgtcccacttccgaaagaccccaggttctaggtgtgggggcgaggcctgtaacccctactcgaagggcattagggaaccgccagcgggcaagagggcggggagcggggcggaggggacggacaaggcgctggggagggaaggggatggtggtcagggaagggttcaggcccccagtcttccggcgcccgccctcaccgcggatgtgcgcgtaggcagccaggctgttgctgagcaactccatgtcccttcgcggggcatccatgctgctctggggggcagctcccctaccagcctgcgaggtcagcaaagtcagatccttctcccagcctggagcccaccccgaccccttccgcgggcag

SEQ ID NO: 1760 - DNA, 1215 bp, Artificial sequence
  DNA replication origin
taggaaataatgataagaaaaaaagtctgtacatgttcagcacagatgcaattttggttttgaatatttttgatgcaaagttggttaaacccacagatgctgtggactagactaggaagtgctaggcatacacagtatttgttgactagtggctgcacagatttatatacagacatacccgcccccacaacaatactcaaatacatcacattaatagacaaatatacagatgtgggcaaaaatacctgcccgcacattcacagaacacactaaacagtcacaaagacacccaggagtcccttttccatccccataggagtcagtcctagtcctcccccatctagatctgccctctacttgaacccagtctcgggactgggggagtaggggtctgcagcccggacagggagagggtcgctggcccacaggcctcaggcagcgccttcagctatgtctgcaatttcctctccccctttcctcctcctctctaaggctcccgccaaggcggcctccccctcattctagctccagcaagggaggggaggtccatgatgggggggccccgtggagacagggcagaaggaagccccccgccacacacactgatcacacaccacattgcatgcacaagcccaggtgggaaatgcgtgtgtgagcacaggcaggtttagccttggggtgggggacgggatggggtgggatctgccacaagccgccacaagctgcttggtgcacaagagcgcaggagctcgcaggcacagaggccccacgctggggtctgcgagactgctggccgggccctggctcaaagctggagtccaacaatcattaaccctgcgtgactagaccagagctcggccaggggacacattcaagcctgggccctggaaggaggggtggacagtcccctcccttccagtccagcatgggtctggggaagagaagcagctttgcctggaaggggcctcctaggagggggagcggtggtttctagctcaggctttaggatcagagagcagcagattcaaatcctgacggttttggtaaagtcaattcaatctctccaagactccgtttatttgatctgcgaagtggggataatggtatcacgtcgcagggttgtcaggcggagtaagtgaaagaacctgtccaaggtttagcccttggcccgcacgcaggcagagctccagcctctctgttgttgctgttagtggc

SEQ ID NO: 1761 - DNA, 692 bp, Artificial sequence
  DNA replication origin
agacggagtttcactcttgttgcccaggctggagtacaaaggcgcgatctctgctcactgcaacctctgtctcccggattcgagtgattctcctgcctcagcctcccgagtagctgggattacaggcatgcacaaccacaccctgctaattttgtatttttagtagagatggggtttctccatgttggtcaggctggtctcgaacttctgacctcaggtgatctgcccaccttggcctccaaagtgctggaattacaggtgtgagccaccgtgcccggccaggagcttggtttttaatgtaagtgtggtggggagctcctggagcgttgagcaggggagtgtcatggccctgtgacacattttggaaagatccctgtggtggctcagtgtagggtgggccactgtgggcaagaaggggagcagggagggtggtgagtaggctggcagctgtccaagccagtgagggcggggccggtggagaggcgagagggctcagactcaggtggtgttctgaagggagttcctgcactggacttgaatgtgagggagagaggagtttagaacactttcatactgggctggggcacctgaggaaagcccatgtggggaagcaggtttgggggtagtcagtttcactgtagataggttagacttgaaatgtccattagatatccaggtgcaggtgttggcaa

SEQ ID NO: 1762 - DNA, 1198 bp, Artificial sequence
  DNA replication origin
ggcaaagagcagagtaagtaaggcaactcctataagggcagtgcagtaaatgattcccattaatgagggtttcgatatttaacagtaaggggtggtaacttatctgttatgtttcttggcggagggggtgggttggcgtcttctgggatgggtgtaaggctgagtcaggttggtccaaggagggtgctggagtatttacagggaacagctggttacagtatttacagggaacagtcggtggcaggtcagttgcaggagccctttttaacctggaaagatggtaccaagagttacgtcctgacagcttggctgcagtgggggtagtgagaagaacttggaaagggccttcccactttggtttaaagtttgttggagtgacggtttttaggaagtatactctcctgggaggagagtttggtcggcgggaccttggtggggttttgggagggcctggtcagcttgctcgcggaagagatgacggatgagggagagtattgggaggtgagagttagtgggggtatgttttgtaagaggaaagggtgtccatacattacttgaaagggactgaggaaggagggggcttttggactggctctgatgcgggccagtgctatgggtaaaagggaggtccgtggttttttgacttcaagagtgagttattttggttaactgagtcttgagaattccatttgccctttcgacttttctggatgactgggttcggtatgggatatggaggcgccactggatcccaagggactgggagacttgttgggtgatttgggagataaagctagggccattgtctgattgtatggaccgagagagaccaagtctagggatgatttctgttataagaatttgagagacttctgcagcttttttcgacggggtaggaaatgcttctacccaatctgagaaggtgtccatgaggctaagaagatatttgggttttttttgacgggaggcatgtgggtgaagtccacttgccagtcctcccctagaagtgttcctctgagctgatgtgtagggatggagggagagcggaaggccccttgggaggaagtaacagagcatataggacagtttgaggttatgtctcttagtgaggtgaatatacggggggaggagaaataagggcgaaagagcaggtacagggggtgcgcaccaatatggaaggattggtgaagagatgtca

SEQ ID NO: 1763 - DNA, 1083 bp, Artificial sequence
  DNA replication origin
cgaaggtgagggcaggggtccaggagcggggagccgggtgggggttgcgggtaggcggggcgggccccggcggccgcggcggtggaatcggagtgacagcctgaagccatctgagtgcagcagaaatggccccggcgaatgccccctcctccgctggggctctgcccttccccggcggcaggggcgagggctgcctcgcgccgggtaccgggaggccgcgggagcttcagtccccgccgcagctctgggaagtgggcactgccagctttgcctagagtcacccagccagtgagtgaagcaaccggcgtgtgaatccagccagatctttccaaaaagacaccttctgcctctccgtgtttccctcctaatcccgagggtgacttgatagttagaacgagtccccagggagggccagccagggcttcctccaagagccctcactctggcacgggcgctaccgctgctggggaattttcatatcccgggcggcgttcaggtacgagtcacagctacctgcttgccaaggccacgtttggccggccttttccaaggagagcttgctgtggtcagtgtttcacctgccgagccggtcaggcccgcccattcccacgccacttggccccgccttccagccagttaggtagggacattcggattcctgatgccgagttttctgcccaccccaatccccaggtttgaagcccttttgttagcggaaggaagagatgacagccgccctctgtgtggcaggatagactttgctctgttttaagtcactggaggaaaccggttggctttgctttggttttgagaaccagtggggaagagggtaggcatactgggctgggcgcctttccctctttgagtagttttgcgtgagataaggaagagcagaatgtgtaattgtagggccaaaataatcttgtttgtaaacagtgcctgtgagctcctttagtgcttcctaatggccgtgctgtgcaagttgttggttgggttaatctagacagtcctcattcattcattcattcatttctcacatgaccacaacaagagtccttgcctagaggcaagtgctagacagca

SEQ ID NO: 1764 - DNA, 1108 bp, Artificial sequence
  DNA replication origin
ttaatttccttctctgagcactggcttcctcagctgtaaacagcctcctacctaatactgtctcaagtgctccatgcagagtgtggcacaacggtgggagctgtcctgattactcttgttagtcagccctatcagcagctcagtgggcaccaggcattcagagacaaaggacacaggtagaggcagccagacttcactcatatcagctcttgtgtcctggcactgcctatgtggagatgacaaatgcacatacacacaagtggccacacaccctaggaaaacccagcagtgcacacaagcttagacacgtgtgcccacacatggatatagagtgacccaggggacagctggaaagacagccaagagttagacatcataagcagcaaacaccctgactcacacctctgggacaagggagtggggctacggccgctggtgctgctgccactgagcccttctagctgcttctgcatgccaagggagggaagccaggctcttagagggccccagtgagtcacttgcctgatgcaatccctttaaagggctcatctgctggtgcaagaagctgattcatggagggcgtggttgctggaggaggaggagaaagggaccgaaactgcagcaggaggaactgaggttagatagctgtagtcgctaataggaacgcttcactgtaaacctccctggtcaaggcttcagggatctccaggttgaaggttgccatcctcggggtttctacaaaggcgacagacctagagggaaatgaattatgagcgctgcgacaggaatttctgtcttttattgagcctaactgcagggctttcctcacagagttccacaaaccgggaaatgaggatcaaggatgagtcacttttctgataaatacactacaattggccgatcttccaaccgctggggacttcaacctcggcagggggagtgtagggcccgcgaggttctgtggggtcgggcggggcggtgcctccgtcccagcctcgccgcagatatagatcagcagtaagtaccgccccattagagcctcggcctccaatcgtgtaacaggtttcgcccagaccccaccctgaaccaatcctcaatcggactctgg

SEQ ID NO: 1765 - DNA, 987 bp, Artificial sequence
  DNA replication origin
cactgcacccagcccttgcaaattttatataaacctcagttatgtcaaaattaagcacttaaaatcatatgtgtatatagttatatacacttatggtaaggttaaaaattgcaattagaattttacaatggtgtatatacatcatttgtcaataaaaagtttaccttaagaatccaatccaggccaggcaagatggttcacacctgtaatcccagcactttgggaggccaaggtaggaggattgcttgagtccaggagtttaagaccagcctggggaacatggccagaccccatctctccaaaaaaaaatttttttaatttagccaagcttggtggtgtgtgcctgaggtcccagctactcaggagtctgaggtgggaggatcacttgagccagggaggtcgaagctacaaggaaccatgtttgtgccactgcaccccagcctaggtgacaggatgagacccagtccaaaaagaaataatccaacccgtgaagctctgctgggcggggagatggatggacaggactgcacaaatcctggagcacaggtaagagaatcttcagtgaattaatgccgggatcccgagggggagagaaaggaagggaagtgaggaggaggtgatagatgaggaaatagagggagcagagcctggaggcctctccgagtttagagagcaggagctgtgggggtgagggggtgagagatggacggagggaggcccatggacaaagaggaggtgttggagtggaaggttctagaggttgagcagatccaggtgatggcaaggtccatgatgtaaacaagatattgggtgtctaaaatggaaaagcccttagagataacccagtcaaggaattgaaaaccagtgggtcagcacagcacacttgtggccagtaaagttcccccagatggtggcaggatgggagtagagagaaagactgtgaggggctactcatgtcaagagacagaagccaaccgggtgccatgg

SEQ ID NO: 1766 - DNA, 751 bp, Artificial sequence
  DNA replication origin
ccactgtttcttgctgggggtggataatggagagtcagtcactcctcatctggccttgggtttggtttttgattttgctacagctgcaccaacggctctttcagtggtgtggccaagatatgtgggggtggtggaggggatggacttggggggacaggtacatggaaaggtagaaggcagtcactgcccttgagggcagtctgcagtctcactgggcaacccaaggcagtctctggagggaccaagcaacagacaccataggctgagtccctaggtgccctcaggatttggaggagacgggcagctaagcaaagctggctttttgaaggaaggcttctggtacaggtgggagaggatgtggggcagtagaacagaggggagtggtccacgccaggctcagaggggacaaaaaagctgtggtgatggggtaggtgatttgtttcaggggcagtttggggtgtggtccctgctccctgaatgtgtggcccagagtaggtgcccttcgaacctgctgagcactgagatggaggactgtgaaccccatttggtaggggttcatttagaaagattgctggtattggggagggcaagttgaggactgacagagagagcgaggcctacatcattctgctcctgtttcaacagtccctcccctattgccagtgccccagcggaggggctcagtcccatgccccagaccttccaatggctccccatggctgcaagctcttcatggtctgatggtggatgg

SEQ ID NO: 1767 - DNA, 926 bp, Artificial sequence
  DNA replication origin
ggaaggcttctggtacaggtgggagaggatgtggggcagtagaacagaggggagtggtccacgccaggctcagaggggacaaaaaagctgtggtgatggggtaggtgatttgtttcaggggcagtttggggtgtggtccctgctccctgaatgtgtggcccagagtaggtgcccttcgaacctgctgagcactgagatggaggactgtgaaccccatttggtaggggttcatttagaaagattgctggtattggggagggcaagttgaggactgacagagagagcgaggcctacatcattctgctcctgtttcaacagtccctcccctattgccagtgccccagcggaggggctcagtcccatgccccagaccttccaatggctccccatggctgcaagctcttcatggtctgatggtggatggggatctagagaaaccaggaagaccagcatgggacactcctctgactggcagcctggtggggtgggagtggtggggggtggtggagtaactctgagaaatcgagaatgggattaggagtccctttgggcccaagcctggtactgagaaggcagaatttttctaacaggtgacatgtgggggaacaaaaccatcagagaggtccttgctggggcagagattgggcgctccagggcaagacacaggggagaagaaaaagagctgggtgtcagagtggatctgagcagtgtgagccactgcactgcagaaagacagtgagggggagcgtggggcagggtgtgtaacatgaggaggacttcacctgcccagagaattgtgggggcagggataacataggagctcagagtcctctgttaccctgctgtctggaattttccataataaaaagttttttgaaaagaagagcgcacattttgctacaatcactgtcattatttctaggcca

SEQ ID NO: 1768 - DNA, 2610 bp, Artificial sequence
  DNA replication origin
tctcatggtgacgtgctctcctgacagcccgtccatcacccagctccgccatctgcttgaatttgcatattgaatcaggatctgtcttttctcctctgggggttccgatgagggtggagaagatgattccaggagttgctcccgtggcgatcgggcaggcgatgttggggggcacctctcctatctggagttgggtgactgtggaatgcctgggctccctcctgctgctctgggaatggggtcataccaggtacaccctgcccccagcttcgagaaggactggggacaatgctggggtccctcctgtcttcaggggacagggatgcctgaaccctcctttctccttccagtcttggctgcttcctccccgtaccctgtccctctcagggaagagccaggtatgactctaggattagacaccacaacccaggaccctggccccatgttgaggaaagtaggggtggagcaggggtcactctctagcaatgccagagaagctgccgggggaacccaataaagtcttttcactgagagggtgcccagaaaagagaatgagtgcacccacgtaaggggagaagctctggcgacggagacagcgtgactgatgtgatgggagaagagctgcggagatgtggaaggcagcgctgaggctgacctgaggaggatgagctcggctgctggcggagagcagctgagcaaaggggcgggaatgcctggtctggggcaagagcagggccactggcataacaaagggaagagctggcgggcacaggaaacccctgaactgatggaggaacaggtgggtggatgtgagagaatggcaaagctcatgtggggaagccgccgggctccaggttcctatgggaggacactgtgactcatgttcaggagcatctaggcttatactgagagagtagttggataaagccggggagatagctgggctgaggtgggggacagctgggccgaggtggggacagctgggccgaggtggggacagctgggctgaggtgaggggacagctgggctgaggtgggggacagctggactggggtggggacagctgggctgaggtgaggggacagctggactggggtggggacagctgggctgaggtgggggacagctggaccagggtggggacagctgggctgaggtgggggacagctggactggggtggggacagctgggctgaggtgggggacagctgggctgaggtgaggagacagctgggctgaggtgggggacagctggactggggtggggacagctgggctgaggtgaggggacagctggactggggtggggacagctgggctgaggtgggggacagctggactggagtggggacagctgggctgaggtgaggggacagctggactggggtggggacagctgggcttaggtggggacagctgggctgaggtgaggggacagctggactggggtggggacagctgggctgaggtgggggacagctgggctgaggtgaggggacagctggactggagtggggacagctgggctgaggtgggggacagctgggctgaggtgaggagacagctgggctgaggagaggggacagctggactggggtggggacagctgggctgaggtggcggacagctggactgaggtgaggggagagctgggcttagatggggacagctgggctgaagtgaggggactgctgggctgaggtgggggacatctgggctgaggtgaggggagagctgggctgaagtgggggactgggctgaggtgagggaaccgctggactgaagtggggacagctgggctgaggtggggacagctgggctgaagcaggggacagcttggctgaggtggtgacagctaggctgaggtgggggacagctgggctgagatggggacagctgggctgaggtggtgacagctaggctgaggtgggggacagctgggctgaggtgagggggcagctaggctgaggtgagggacagctgggctgaggtgggaacagctgggctgaggtgaggggacagctgggctgaggcaggcaggacacctggctaatggcacagcagtagagacactggcagtggacaagtccccatgtattttctgtttgggaccacatcctacttttcagaaatgccttgggaaggcctgaccagactgtgaccctgcagcctccaggccacagtcaggggagggtcacaggtggaagcactttttcccatcctaaccccccgccccccacaaatccacaggcaatggagcaggcgggcaggcgacgggggttgtgggcctcaccttccaccactgccctcagagactcccccaagggctgtgaatgaccctgaactctcgggtcccatggtgtccaaatggagcaggcccttggagggcgtcatcccaggcccccaattacaagtgtgtcagatgaccttcttagctccatttttcagatggggagactgaggactagagaacaacctgcctgcggtcaggcagaagtggtccgggctgaacagggattgaatgtgatcagtccagcctagttcccggctctttgtcactgcggctgcacctttccagaatgtatctgaagaagcaagacctcgaggccc

SEQ ID NO: 1769 - DNA, 1082 bp, Artificial sequence
  DNA replication origin
gagtggtgggtaggtgggtgggtgggtgaatgaatgagttggtgggtgggtgggtgggtgggtaagtgggtgagtgatttgcagaactctatgtataaacaaaaacatgatcccatttttataaagatggatcctaaaaccttctggcctcatttgtatgtatgtggagaaaggcctggaagaacacacactgagctgccgactctggttgcccctggaggatgggcctgggggagggaggaacactcactctgttctctacacacttctgtgtgttgttttttatagtgagaatgtattatttttgtaacattaaaaacaaattttaaaaatgtaagaaatgtttaagctttgtaggctaattaaaaattaaatctatatcagaaaagattcccttgtcctccactcccccgtgcagccactgcctctgccaggaagccctttcagacatcaaatctaaacccttcaagatatgaagctcacttctcgggctgtctccaggtgagcgggagaggggagctgccaggattctctgcccagccgctagtctgatgcactggccaaggctcccttgctggctgccttgggacctgcccccactcccatggacgtgatgaggaggagagggaacaggtttggcctggcctcattctggggagagctccccaccttcgagaaggaattttcctggcagaagcagcagccccttcagctcccaggacgcgtaggatgccttcaggcccaacatatgtgggatcttctaaaacagggacaggaaaggaggaaaaataaagtctgttcccctaggtctgttgtctcaacaagcagcggcctccagaaacactttccacagaagcagtgggggccaagattcacaggcagagtcccaatgtgcagatgggcaaactgaggcccaccggatgagaaaagacccatcctgcgtccccctgcacagtgggttagaggcaaagccaggactggaacgtaaaacccctggatcggagcataagatggagaaggtgggcctaagaggagatgagcagggaagggaggagacagagacagagacagagctggagagg

SEQ ID NO: 1770 - DNA, 1213 bp, Artificial sequence
  DNA replication origin
cctctcctttctccggcctgtcttccttcttctctccctcccctttattccctcatcccttttgtctccttggagggtggagagctgcctttccagaaataggagtttatggagaagtttatccttggcacgagagacatccgcctcactccagaaaacccaagataaaataaatctaattaaatctgttactgttcacagagactagttttgtgggcaattgacctgttttatttattatgtaaaccatcatgaaacccaagctccatattatttatgctaatggaagggaataggtaataaatcccgcatgaggatgtgggcagaccagatggtactggtggcactttgatggctcgtgctggaggagctggtgccagacgtcgctcccaaccccaggagaagggctgggaggggctgggagggggtgggattgagtcctgggggcagcttcactttcagcaaattgaaaagtgctaatgagaagatgggggctttctgggtcatctccttctccctcttggaggaaatgccaatctgtgatacatcccttggagaaatcggaataaaattagatggcgcacctcccatttgccccacactagggcaagcctgccacctgcatgctcacatcagattccacagcaaccctgagaagtaggcctcattttcctccattttataggtgagaaaactgaagcagcatcagggctggggtttgaacccaaggtgtttgaacttggacatgtaagcctcaagtcttctcagggcactgtggcctttggtaatacagatctgggaaggaagggtagagaccaggggaggagagaggaggacaggaggaaagagggaagggcaaagaagggtggcagcagtgaggggggctgggaggattggaagtggggcaggaaggaggggagaaggagagggaaaggagagaagggaggaaggtagtgtgaggcaagggcaagggggagtgggtggggaagggggacgaggagagggaaggtacttctctctccccctgagagcagctggccttagatcttcagaggaaatgagagttagacaaaggtggtaactgtttctagctgtgagggcagctgccccttagagaaatggaaaagcagggagtgtatttcctgccaaaggctgagagcatcatcttcccttcaaagaaaggaagaaagaaacataagtcaggaggccatgg

SEQ ID NO: 1771 - DNA, 1630 bp, Artificial sequence
  DNA replication origin
tcccttgctctctccctcactctcttttgttacttgcaaaccatccaagcaatcaatgccttgacctctccttctgatagacacaattacaaaaagacagagcaatgcaattcatctattcaagacggattgtttgaacactctgtcacactgctgagctatccatctccttgtctaagaggaaatttcagcccccaaaagaggcacaaagagagggggtgggtacgatgctcctcagcccagagagcccctctggcacctgcaagaaagccctctccgggctggtgctcggcgatgcctggctgctggagaagcattcagctccaagctcagccggctcaggtgccagtcttgagaatcagaagcacctagcacactccagagggcctaaattcttaaagccccagccagaaccctgagatcccagggatgggggggatgggaaaagggagagggcactgggcccagccaaggtggtgtgtttggattttagcatgagattctctctctctcgctcgctcgctctttctgtccatgtccactgtagctccctggctccagctggggttcaagcaggggctcagaaggacagaaactcagctccccaggagtctccagaggcctcagagtcctcccatcctccgcccaaactggcacagctctggcagtcacgtttggcgcaggcacaacaccccagtccatgggctgagaatcaaatggggcagggctcttggatataaatgacctgggctgacacgctaattaatcctggggcttaatacgaagaagattagaagagaggagggctctgccatcctttaatttcattattacacgctgaacccaagaaagggcgggcaggcttggggatgctcttcctaagggctgggaggaactccctaacccattcaatttcacagtaaggatacatcatcctgcgccttcccagcttatccctctgaggctgcccttacggtagcctgtccttctgggcctccaaagacttccatccctgaggctgggctgggagcacacccatcccacccctgtggaagaaggatcaaggaaaagggaactgcaatccgtgcgatgggcaaatagcaccctctcagtccccccacctttttccccaaggacaccctacgacgcaggcccccaaaaaagcagagggaaggagacagggaataaaggaagtgctggtccattactggggggggaaggggaggcttcctgcccctggaatggtgccaggctgggcttggggcaggcaaaggcacagagatagaagacatttcggttgtcaggagcaaccaggctgggctgcaaagggttaagcctgaccataagggttgtccccagtgtcccctcccgtgcctggcctcctctgcctccggtgctggtgtttgcctgccagggtcctgggcatggaccgaaagatctcagcgtgggcagagctgaggactgtgctctgccccatccagatggtgttcaagagggtccggctcccgggcggccgcccaggaggagacccacccgctgggtttctgaccgcctcctaggaaaatctcaagtacggaaaccaagcccgacaccggttccggcacctctttcacgccgctggcagcccaag

SEQ ID NO: 1772 - DNA, 952 bp, Artificial sequence
  DNA replication origin
ccggcagccggggcaggtgggagcccgcgcgggagccgagccgacgcgagtcggagccggagccgagtccgagcggagtccgggcggagcccaggagcctcgctcgcgggcagcccgtgggcggcagccaggcggggcgggcgccggcggggcggccccccagtaagatgtgcgcggcgccgcggggcgccccccacttgcagcggcgctcgggagccgggcggctgggccaggcggcgccttcggggctgctgcgcgcccgcgcctagagctgccgccccagggagcccgccacggccgcgccccgggcacgctcggcggcgcccaacgatgaccgctccctggcggcgcctccggagtctggtttgggaatactgggccgggctcctcgtgtgcgccttctggatcccggactcgcgcgggatgccccacgtcatccggatcggtaagcgctccctggagccgggggtctccgtgcgcccgggagggggcgggaatgagggggcctcccaacgcgttccggagagattttcctaacctctctccgagctgctgagccgatcggtgaccaccaggagctcctccctgtgaggacaaagttccagagtcggggtcacgggccttacttattggggaggaggccgccgggccgcagtgggcgaggggcccttggcgcgctcctgggaggtcagacctggcacagtgtggcgaaggtttccagtgcgatcccgagtcgagggcgcatttcgcggtgactgccagcatgaaccgcagccgaccgagttctgcgatcgggcttctccgcagagtggggaccctggggaaggcgccaacttctctcctctgcccacctcactccccgcgggcccttcgtccccacctctggcatagctcgagcagccgcagcgaggtcgcagggcacagattcgcatgacgagggcagccggtcttc

SEQ ID NO: 1773 - DNA, 1465 bp, Artificial sequence
  DNA replication origin
cgccgatgctatcgcccgggctcgcacaaagccccggagtggagttgcacgcgcgcacactctccctcccagccccctcccctgcgccctgcctcccgcctcccgcgccgcccgccgcccgcgctccctccgcgcactcccccgcgcacacacacttcacactcacacttgccgaggcgcacactcgcgcgctcacacctgcgcggggggcggggaaggggaccctggccccattgtagggggacgcccggagaacgaggactctcctcgcttcccagacgtccccacccgccccgccggccccagtcccttctactgcgagggcacggagcccgggagccaggcgtggagcgcgagagctggcaccgcgagctgggagacggcggcagcccagcggccggaccagctggaggagacgcgcccgccgggagcagcgagaccgggagcccgccgtctgcggagcctggcctcgcggctcccacgcggcgggcgctggctggacggcggtggcagcgggagactgacccgggaaccggcttccctccccaaccccattcctcctggcagcagagttggggctgggggttcggagaggcagaattcaaagcgaattgtctacgctgggccaggggagctgagggagttggtagaggtgggagagcccaagtcagaccccctgctgtgggaagctggacttgaccgcgcacaggtcctggggctgcggaggaggaagaccgctcacgccttagatgtaggggggcgtgggcgccgggcccgctccctctcagccctctcccgtaactgtgcaggaagggctggtgccccctccctcattctcctgagaaagaataaagagaaactgtaatttgtcgtgggatggagtaggatccgtgggggagcaagctaaaggggttaaaaagaaaaacaacgttgtttattagcaataataattttttttcaagtggcgctgggtgtgagggaagggaaaggctgtggagcgaggctggagcaggaggctgcgaattactcagttaggcgagtttaatgacctttttgacagagacaaagcggtgccgatacagtagataaataaacggatctgtcaccgggcagcggctaggctgtgtgtgaatttatttttctcatttaaataatttgatctattctatcatttccaatctttcccatttgccagctgtctggtaagagcatggcccccaacatctgaagagcaaatctttaattttcttacaaatattctatgagccgagctctcacccgcctgttaatttccctcttttttcccctccctgtctgggtgcagaggcccgtggcattgtgtggggatgtgaatatctcagtgtggccaatcctgccaattaggaagggacgccctcccacctgaggtggaggccactgtggctgtgggaggaggagagactccctgggctcctcacaaaagaac

SEQ ID NO: 1774 - DNA, 1732 bp, Artificial sequence
  DNA replication origin
ccggacggggtggctggccgacccccccaactccctcccagacggggggcggctggccaggcagaggggctcctcacttcccagtaggggcggccgggcagaggagcccctcacctcccggacggggcagctggccgggcggggggctgaccccccccacctccctcccggacggggcggctggccgggcagggggctgacccccccacctccctcccggacggggcggctggccgacccccaccccccccacctccctcccggacggggcagctggccgggcagagaggctcctcacttcccagtatgggtggccgggcagaggcgcccctcacctcccggacggggtggctggtcgggcagggggctgacccccccacctccctcccggacggggcggctggcctggcgggggctgacccccacctccctcccggacggggtggctgccgggcggagacgctcctcacttcccagacagggtggctgccggacggaggggctcctcacttctcagacggggcggcttcggggcagaggggctcctcacttctcagacgaggcggttgccaggaagagggtctcctcacgtctcagacggggcggccgggcagagacgctcctcacctcccagacggggtcgcggcagggcagaggcgctcctcacatcccagatggggcggcggggcagaggtgctccccacatctcagatgatgggcggccgggcagagacgctcctcacctcctagatgggatggcggcggggaagaggcgctcctcacttcctagatgggatggcggccgggcagagacgctcctcactttccagactgggcagccaggcagaggggctcctcacatcccagacgatgggcggccaggcagagacgctcctcacttcccagacggggtggcggccgggcagaggctgcaatctcggctctttgggaggccaaggcaggcggctgggaggtggaggttgtagcgagccgagatcacgccactgcactccagcgggggcaccattgagcactgagtgaacgagactccgtctgcaatcccggcacctcgggaggccgaggctggcagatcactcgcggttaggagctggagaccagcccggccaacacagcgaaaccccgtctccaccaaaaaaatacgaaaaccagtcaggcgtggcggcgcgcgcctgcaatcgcaggcactcggcaagctgaggcaggagaatcaggcagggaggttgcagtgagccgagatggcagcagtgcagtccagcttctgctcggcatgagagggagaccgtggaaagagagggagagggagaccgtggggagaggagggagagggagagggaggcggagggggagggagagccgtttactctgttttttgagatggcatctgactcggttgcccaggctggagtgaagtcaatgttcagtaattttcttagagcagggtttctcagcctcatccctattgacattttggtctgataattctttgtgaagggggactgttctgtgcatggcagaaggctaagcagcatcccgggcctccattcgctggatgccagtagtgagtggagctctttgcaaccctctgttttgacaaccaaaaatgtctccaggtatttccaattgtccctggggggcaaagtcaaccccttttgagagccactggcctaaggtcgtacagtagtgtgtggcacagccaagattggagcccagg

SEQ ID NO: 1775 - DNA, 978 bp, Artificial sequence
  DNA replication origin
ccagccaccccgtccgggagggaggtgggggggtcagccccccgcccggccagccgccccgtctgggaggtgaggggcacctctgcccggctgcccctactgggaagtgaggagcccctctgcccggccagccgccctgtccgggagggaggtgggggggtcagtcccccgcccggccagctgccccgtccgggaggtgaggggcgcctctgcctggccacccctactgggaagtgaggagcccctctgcccggccagccgccccgtccgggagggaggtgggggggtcagtcccccgcccggccagctgccccgtccgggaggtgaggggcgcctctgcctggccacccctactgggaagtgaggagcccctctgcccggccagccaccccgtccaggagggaggtggggggggtcagcccccggcctggccagccgccccgtccgggaggtgaggggcgcctctgcccggccgcccctactgggaagtgaggagcccctctgcccggccacgaccccgtctgggaggtgtacccaacagctcattgagaacgggccatgatgacaatggcggttgtgtggaatagaaaggcgggaaaggtggggaaaagattgagaaatcggatggttgccgtgtctgtgtagagagaagtagacatgggagacttttcattttgttctgtactaagaaaaattcttctgccttgggatcctgttgatcggtgaccttacccccaaccctgtgctctctgaaacaggtgctgtgtccactcagggttgaatggattaagggcggtgcaagatgtgctttgttaaacagatgcttgaaggcagcatgctccttaagagtcatcaccactccctaatctcaagtacacagggacacaaacactgcggaaggccgcagggtcctctgcctaggaaaaccagagacctttgttcacttgtttatctgctgaccttccctccactattgtc

SEQ ID NO: 1776 - DNA, 646 bp, Artificial sequence
  DNA replication origin
gctgaggtggttggatcacctgaggtcaggagttcgagacaagcctgaccaacatggtgaaaccctgtctctactaaaaatacaaaaattatctgggtctggtggcttacgcctgtagtcccagctacttgggaggctaaggcatgagaattgcttgaacccgggagacggaggttgtagtgagccaagatcgcgccattgcattccagcccaggcaacagggctaaagtttgtctcaaaaagagacagagagaaagagagagagagagagaaagaaagaggaaggaaagaaggaaggaaagaaggaaggaaggaagggagggagggagggtgggaggaaggaaggaaggaagaaggaaggaagtggggaaggaaggaagggggaaggaaggaaggaaggaaggaaggaaggaaggaaggaaggaaggaaggaaggaaggaaggaactaaggctttgggagtttatgcttgcctgcaagttgccaatggctatacttgggttcctagaaccttcacctagggcaggactgggggcaagacttgatagcaggtgggcgtggggcagcaatggctgagaagtttccaagtaggagaagcagaggcacaggggtagggagcaggcgcagcagttcataagtggaggtcg

SEQ ID NO: 1777 - DNA, 834 bp, Artificial sequence
  DNA replication origin
aaagagatggaaagaatgaaagacaccatgaggaagacagatggaagagggaagccaggaagggaggaagagaggtgaagtaggcaaggcaggggttcctaagaagttagagatcatgggagaagagagtaaagtggggagagaagagggatagaaagagaaaatgaagggagaagatgaaggaaggggtgagagagggagcgtgtgcaaatgtgagtactatggagggaagaggggagaagagagaggaagaagggaaagaaagagagattgagagagtgccaaggagaaaggaggcggtagggaaggaagagccaaggaaagaaggaaagggatgtagagagggaggggaggggaggagcaagggcgggggagcgggggagggggggcggtggacctgatgattcaatagagagaaattgagtgagaggaagagtgaaaaaagggagcagagtagggtctgtgtttcctaaatactgagcttctcagacccactagagcctctgtgccatcctgaggataagttcaaataaaaaagaaaagaacaacaacaacaacaacagcaacagcaacaacagcaacaacaacagagaaacccatgaaggggctggtaggaatgagcccctcacgacgaaagcagatgacagacagggcaagaacgggagaaagcacttgaagaagcggacccagaactagagagaggattgggagctctggaaagaaggaaaatgtaatgatccaagaccctagaacaggcacagctccacagctccccacacagtcagccggttccattaaccagcgttcattcgtactgcctggcaatcctaggat

SEQ ID NO: 1778 - DNA, 1123 bp, Artificial sequence
  DNA replication origin
cttgtgcctgtgtgaccttgggcaattccctttctttctttgagtttccatttctttctctgagagatgagagggttggaaataatgattcccaggggtccttttacctttgaaatataatggaaaacaagagaccctgaagacaaagggtattaatacggtggtcaaatcaagctggatcttctctcccctctgccaggggcctccacatcaagcaggacttggcagtggatttacagaagactcggcacaagggccctgggctctcacctttagaaaatggtgcaatttaatggtaatgcaattacagatgtgctgagattgaaacagcccatcttatctcaaactcatcttccccaccaagtatcggggcaggtgctgatccctaatagctgctgaaatgaattcaccaggcagctgggggcttctagggaggagagctctgtgcagagaaagagacgagggagggggaggagagatggagagaaggaggatgggagcagggagggagtgagagagagaggaagagagatgaagagagagggagggatagagggagggggatggtagggaaagagggagagagggaggcaggtgggagagagagacagagagagatagagagagagagagagagaatgagacaaagcagagagagaaggagggagccagtgagagtgagggaggaaaatagaggaaggagcaaatagggagagaggaaaagagagggcaaaagagaaggagaaatgaagagataaagagatggaaagaatgaaagacaccatgaggaagacagatggaagagggaagccaggaagggaggaagagaggtgaagtaggcaaggcaggggttcctaagaagttagagatcatgggagaagagagtaaagtggggagagaagagggatagaaagagaaaatgaagggagaagatgaaggaaggggtgagagagggagcgtgtgcaaatgtgagtactatggagggaagaggggagaagagagaggaagaagggaaagaaagagagattgagagagtgccaaggagaaaggaggcggtagggaaggaagagccaaggaaagaaggaaagggatgtagagagggaggggaggggaggagcaaggg

SEQ ID NO: 1779 - DNA, 1738 bp, Artificial sequence
  DNA replication origin
tgcatctggaacactctttccccagatgtctatgggatggcctccctcgcctcactcttctctctgctaagagaggccatcactacccactgcaacagagcatcccttcctgccctactttttttcattaagttgatcactaccagccattacattataaaagtatttgtatatttttaattgtctggtcccccaagtagaatgtaagttccaagaaggcaggagctgtatctactttgttcagtgcttggcttctgtgcctagagcatgtatgacacatgctaggttctcaataaatattggagggagggagggagagaaggagaagagggaaggaaggaagggagggagggaggcagggagggagggagggaggaagaggggagggagggagtttgggagggaagaggaagggaggggagggggaaaggaggggaggggaggggaaaggaggggaagggaggggaggggaagggaggggatggggaggctggaaagtacatggtgaagaaggcatcagacaggatagggaataactgctccaaaggccaaacaaaatgaaattcagtaagaggaattggagttagacataggggagtattttttgacactgagaggtgtaaggtagtagagcaggaagctgggagtaggaggggatttgcagttaggaagtgggttcccagagcggtggtcaaactgaaggaggacatctggactttcctgggcagtgtgggaatgtagccagacctgcattcttttttccctctcccttcctttctgtgggagcaactggcacagaagagatttgggacttggtgaggggaggggaagaggaggaggcagttcttttttcttaacctccccataaagttacagaagaaatctcgagtagtgaatcatccctctttacaatcaagcagttatttaaaatggaaaaaggaaaagagacccagagaaagggagaaagtgggagattatcgcccgccagcttgctcccaaattccaggcaatcagccactgagatgtgtctcatctcacgatgagccgctttcctgattgagggagctaattgcagggctgacacagcttcccgggaaagtacttgtagacaaaaaatgccaagagctaccaacagcaacaaaaatacatccatacacactcataatggctcaagacccaactggcctgtactgccagagacatctaccccaccctgaaaaaggagaggaagctcttgagaccagccaaagccattaggaaaatcccaggggagaaagtggccaaagacataaacagccagttcacagaagtggaggtacaaatgtccaataaacctaggaagaaaggttcaacctcacttgcagtcaaagaagcaatgctaattacaaccatggcaccattttttgtggacaaattagaaaaggttttaagggaaaaaacattcatattgacctgggcctttagggaggcaggggtgagatcctgatttctttgctgatggagtttatcatcaagatacctgggagaaacaggtcacaggggaactatctctttgggggctgttggcacacagtctagcggaaacagaaagtagtcactcagcctgctctgggatgcagctgagctccagtcagtgccttcggtttgtctgtgtccccctgaatgttacccagaaagaggacttgatggattctccatccaacaaggagccccttccctgggctccaatacactggct

SEQ ID NO: 1780 - DNA, 1564 bp, Artificial sequence
  DNA replication origin
gagagcagaacggagtgctgttagtcacggtgtggagaggtgcaatccatccgaaaaggccagcgggacgcggagaggtcatctccattacaaactggctgtgattaagccattacttaccgtaatgggatccttgcagtcgtaggtgatgcctgccacagccgataagccgcagcggccaccgcggcccggcaggctgcaataacacaggctctcccctctgtgacaggttcaagctctcacgctcatcgaaaagtccattttccagcacaactgggtacacttccccatgacaaatgcctgttcgcctttaatctgttacaagccgaagaagcccaaaggaagcactccatcacgggaagaatgtttttataagcgtgctctttgagggccccgagtgaggggctgcggcagcgcggggacgcgggatggctgcacatttacggggaacgacggcgggggtgggcacaggcaggtccagagctgccgctgggaggaggggtgtgcccatggtgtgtgggttcgggaggagtgtgtgggttcacacaggcgtgtgggggtgtaccttcatgtgcctgtgcttcaggagggtgtgggggcgtctgggagggtgtagaggtgtccacgtgtgctcatatgtgtgagtgcacgtgtgtgtctgtgagccagggcaggagggggatgttaatatctacagtgtgtgaggagataagtgcggggtggtggggttcagatacgtgttcaggatcctggagcttctacaagcgtgtaagagtagaggtgtgtaagtgtgtgtgtgcttgcataagggtctaggtgtgtgtctctgggtgtgtgtgtgtccctggctgagggcccaagtgtgtgtgggtgtgcctgagtgtgtgtgtgcctgtctgttgggggtgtgcgtgtgtatgggtctgggtgagggcctgggtgtatgtgtgtctaggtgtgtgtgtgtccctgggtgagggcctgagtgagtgtgtgtgcctgtctgttggaggtgtgcgtgtgtatgtgtctgggtgagggcctgggtgtatgtgtgtctaggtgtgtgtgtgtacctgggtgagggcctgggtgtgtgtgtctctgggtatgtgtgtgtgtgtgtccctgggtgagggcctgggtgtgtgtgtgtccctgggtgagggcctgggtgtgcgtgtgtctctgggtgtatgtgtgtgtgtctctgggtgaggtcctgggtatgtgtatatccctggatgagggcctgggggggtgtgtgtgcccctgggtaagggcctgggtgtgtatgtgtctctgggtaagggcctgtgtgtgtgtgtgtgtgtgtgtgtgtgcgcgtgtgtgcctgggtgagggcctgggtatgtggggcgtgtctagggaaagacctgggcatacattcctgtgcacatgatagagagggtatgtgtgtggcatatatgtgatcattcacgtgtctacctgaagagggacagaatgagtctaactgacaaaaccagcttccccaggccccacgagtgattattttcttgcagtccccagggcctcctgaaaa

SEQ ID NO: 1781 - DNA, 1236 bp, Artificial sequence
  DNA replication origin
cctggggttgggggtcagtgggtgtctgtctcagtccatttgcattgctatgaaggaatacctgaggcagggtaattttaaagaaaagaggtttacttggctcatggttcttcaggctgtactggaagcatggtggcggcaaaggtgctgccccaggtgagggctgcaggatgcttccactcatggcagaaaggagaggggacctgtgtgcagagataacatgtgtagacaaagagagagggagagggggagggagggagagagagaaaggaagcgagggagagagagagggagggagggaaagaaggagggagggagggagagagggagggagggagagaaagagggagggggagggagagggagggagaggggtgagagagatgggggagagacagagagggaagggggagagagaggaaagggggagagagagaggaaagggggagaaagagagaggaaagggggagaaagagagagggaagggggagagagagaggaaagggggagaaagagggatgggggagagagagagggagaaggggagagggagagaaagagcgggagagaagagggaaagggagggagagagggggacagaagagggagagggagcgagagggggagagagatagggagggagaagaggagatgctagattcttttcaacaactagttctcaggggaactaagagtgagaactcactcactcccacaagaatggcaccaagcctcacgacccaaacacctcccaccaggtcccacctccaacactggggatgaaacttggtggggccaaacaaaccctatttaagccatagcagcgtctcacagcatcactgtggagtaatggccaccataagcaagtcctccccaccctgagccctggcacgacactgccaattcttgaaacccagggtgcagtggtgacggcagctgcgtatggtgggaagtaggctgtgagcaagtcacagtgccccatctgtaaaacagagataagaatacgatctgcctcttgatgtcaagattaatgagataataatggtcatctcttaaaagattgtatctaccaagggctgttcacagaataacacatctaatcctcttgacaatcctatgtggtagttgctatcattacccattttatagaagagaaagctgaggtattgactcattcaagtcttaaatgggggattggatacaggtggtctggccccgagcctggattcttaacca

SEQ ID NO: 1782 - DNA, 889 bp, Artificial sequence
  DNA replication origin
caggcgcagtctcggctcactgcaatctctgcctcctgggttcaagtgattctcctgcctcagcctcccgagtagctgggattacaggtgcctaccactaggcccagttaatttttgtatttttagtagagacggggtttcaccatattggccaggctggtcttgaactcctgacctcaggtcatctgcccaccttggcatcccagtgctgggattacaggcatgagccaacgcgcctggccccagagacagaagtctttatcaggcattgtttggtttgaaaatttcagccagctctgcaggccatgtttaccctaaaccagtactgcctttttgtgagtcagacaaaggtgcctcattcaggcagctccagccccgtggacatggatatgcaggtttgggagtggaggttggctgggacctccctcagccctgtgtgtggtgtgtaaggggcacctgcctgtgtgtgtgtggtgggcaggccagcttagatgtgggagggtgggtggtgtgtactggtttgtgtgttttcatggtgtgtctgatgtttgagtacaaggaacgtatattgttttgggtggtgtgggtctggatggggtgtgagttgcatggagtgtgtgatgtctgggtgtttccggggtagtgaagaatgggttttgtgtgagtggtgatcatttttggggacatggaggtcagtatgatatgagtatccagctggtgggatgtcaagtgcatgcaaggcaggtgccacgtgtgtgattgtggcatgtgccttctattgggtcaggtgaattgggtgtgcctgtatgtgtgagggtgtgtggtgtgtaatgcatgcctgtgtgcgtgactatgaatgggattccctgggacaggttcaaggtctcag

SEQ ID NO: 1783 - DNA, 790 bp, Artificial sequence
  DNA replication origin
gagatagaacagacaattaaaatatctgctaatttttctcttgaattcacattttaggaaatgtttataaactgagaattctaattacttttctccttcacacctcttttcagatgaatacattgtaagagaattatagtatctgttaaaaatattgccaatcccagtgtatcagttgggactccttacagggaaaggaacaggagatccactgcaacttggattaaccagtaaaaggaatgtgtggtccgtgtgatttggaagtctgggggtgtattagtcttttttcacactgctgtaaagatactacctgagactgggtaatttataaacaaaagaggtttaattgacttacagttctgcatggctggggaggcctcaggagacttacaatcatggcggaaggtgaaggagaagcaagtacccttttcacaagatggcaggagggggaaggagagagagagaggagagagggaagaggggagggagagagagagggagagagacagggaggtaaagagaaggagaggcagagggagagagagtgggagggatcaagggggagagagggagagagatggggagactgggagagtgggagagtgggagacagagtgagagagagaatgagcaggggaaactgccacttttaaaccatcagatctggtgagaactccctcactatcatgagaacagcatgggggaaaccacccctgtaatccaatcacctcccaccagttcgtaattgacacacagggattacaattagaaacgaattttggaggcgggg

SEQ ID NO: 1784 - DNA, 1195 bp, Artificial sequence
  DNA replication origin
taaacaacaggagcgcggtgcgccaggagccaggagcagttccagcagaggctggggaggtgcgcgggtgaggcagttgtggaggctccccccactccctggcagctgtgtgcacccaggtcgggcactagcacatacagggatgccagcctcagctccccacccagctctacccccaggacccatgcccaggggttggtgtgcacatctaccttgcacattcagatggcaggcgatagtgggggctgagaatgtggaggggcgggggaggctgccttggagccctggggtcctggacactgttgtctggagaagcattaggaagtagctaaggcctctgccagggccagcattcattcggatagttatcctctgacgcaatctgagtcctactcacgagggcctcatcttcatcatggctatgccccagggcccagaccgcaccaggagtgtggcaagtgctgcatagatgctggatacctggatgaatgacttcattccggcaaacaatactaatggaaatcctgctctgctgtgactccctcagggtgggtgtcacccggcatagggtgtgtttggggtagaaatggtgaagataccacaggagatctgaggagcaggggcatgcctgggtggcgctgcagggagagaatggctctgtggaactggcaagggcagagtgaacagggctggagaagaggcagtccgggcaagggcggggtggggagggagctgagaaattgaggtggctgaatctggcctggaaggaagtaggggtaagaagatgagtctggagagaccagtcggggctggcttgtgaagagtggcaggttgctttgacttcatctcagggcaatggggacttgctgcaggctcagagcaaggtgatgtgattccaggtggcttcagggacactgactctggaggctggtgggagggaaaggagagtcccgccaggtgtgctggcatccctgcaggctgagctgagtacttcaggctggttggttaaggtgaactgtggctgctgggggtggggagggaaggcagggatgatggtggggcctttctctgagctggagagcctggaggaggagcaggttgggaaagtggaggggttcagttgtggcaacatcagcagccccccaatatagacccaactgtgctaaggatataggaaggagatttcagactggca

SEQ ID NO: 1785 - DNA, 1398 bp, Artificial sequence
  DNA replication origin
cccaacttgggcaaagttggaggggtcctgaggcccggcgggccggggaacaggaccccgacccttccgtcccctcccctctccacccctcccgtcccctcccgtcccctcccctcggctcggctcggaccccgccggagcgctccctgccgcttccccgccgaggcccgcaccctccccgccgcgcctcaccccgccatgcgccagcggcggccggcggcgtctccatggggccgagtcctgggggtaaggacggcggcgcctttatatggggcggcgcgcgggcaggtggtggtgaggcactgacgcggaagcgggcaaggggcggggccgtcccgggagaccgccccgggggcggggctgcctcgccccttcctgctccgctcctcgcgtcgcggccccgcccccgcggccgctgcgcgccggacggggcccaagcgggggtcggagcctcaaggctgcggcggcgacgagctccgagcgggacactgaacggcccgtatgcgcaagataagcacggactgaatcaggtacacgcacctgccggggacgcactgaccgaggtgcggacggcggtaccaggacaggtaaagccgcgaacactcggacctaagaacttgacaggtacaccctgcctgatgaagctacgtacggccaggtgcgcatcgagtgaatcaggtacgcggaggttggtccacgcaccttggaggcaggtccatggttatagacaggtacatccagacaggcacttttcagatggagtcaggccccctcaagacacactgtgcttaaagccgtcacacagaggttggccacccccggggccaggtacacttttcctgaaatctgtactttactaggaccaaaaggcaggttcagtcagcagatgcacaatgaccgaggcagaaaaccaggcaaaagagggccatttaccccaatcaccacatgaatactgtccacacaagaatactgtcacccataccgcagaactcactgagcgcccccactggaggagcacccttgctccatgaagatgcttttagtttcccaggtcagacctgatccctcgcatgagcacagcactttacaggcttacactcacgggcttacagacagaggtcattatgctgatgttacccttgagaaattctgcaaaggctaaactgccccagctggaaagactcgaaccaggatggagagctcctattctagtgctcctattatttgccatttttgtgaaccacgagtgactgagggcagaggggagcctggcttcctatgtgtgtgtgtgtgtgtgcgtgcgtgtgtgtgagtgagagagagagagagaaaacacagagcccacacgctggaggacagagccacatgccaccagtgcttactatgtgccagtccttt

SEQ ID NO: 1786 - DNA, 1459 bp, Artificial sequence
  DNA replication origin
ggctccgacccccgcttgggccccgtccggcgcgcagcggccgcgggggcggggccgcgacgcgaggagcggagcaggaaggggcgaggcagccccgcccccggggcggtctcccgggacggccccgccccttgcccgcttccgcgtcagtgcctcaccaccacctgcccgcgcgccgccccatataaaggcgccgccgtccttacccccaggactcggccccatggagacgccgccggccgccgctggcgcatggcggggtgaggcgcggcggggagggtgcgggcctcggcggggaagcggcagggagcgctccggcggggtccgagccgagccgaggggaggggacgggaggggacgggaggggtggagaggggaggggacggaagggtcggggtcctgttccccggcccgccgggcctcaggacccctccaactttgcccaagttgggagagccggggaagagcaccaggttcctgatcgggatcgcgggccgagcaagcgcgggtctcgggccgggacagcctcggcgtcaccagctcccggcagccaaccaaagttttccagcaacttttctccccacgggtcaccccagaaacttgccctccccggctccgggagtccggccatgggccttgcgctgcctgggcctgagctctgagtgccggacgggtgggcgaaagtggtggcctcagtggggaagccttgggccccgcaacgcacttccagccccaggattccatctgagagccccgtccctgccttctgggtcccctgggttggcgtgggggttcgaggctttacagctggggtagttccagtcttagttcagactaagttccgatcttcgagccaccagctaacagctggatgaccttgagcacgtttttaatgtctgtgcctcagtttctccctttatagaatgggaatgggaatgcctagctgggagagcttttgagaggacaacctgaactaataacacgatgcagtgtgtagtgccaccaatccctcatcctgctggatgtggttttgggagggaggttaggagagagcgctattcaccgtccctaaccctgttggttgttcagtaggagctgtggcgcggggccttccaggagtctgagctatgagtggcccctgtggagagaagcctgtcctggaagccagccccaccatgagtctgtgggaatttgaggacagccacagccgtcagggcaccccaaggccgggtcaagagctggccgctgaggaggcctcggccctggaactgcagatgaaggtggacttcttccggaagctgggctattcatccacggagatccacagcgtcctgcagaagctgggcgtccaggcagacaccaacacggtgctgggtgagctggtgaaacacgggacagccaccgagcgggagcgccagacctcaccggacccctgccctcagctccctctagtcccgcg

SEQ ID NO: 1787 - DNA, 975 bp, Artificial sequence
  DNA replication origin
gtatacacgctggcctgctccttggccaggctgcctgccctgccccacgggctcctgccagcccctgggctctgcactgggggctcctgaaggactgatgtgggtgggggcagtgggtatggttcagaccagtactctcgaggtggaaaggcagggggcgcgggtgggtagtcggcagggacactgaagtggccagcacccatggcccggccaaaggcagagaaggctgcggtggctgggagctcagatccatagggactgtagcccgtgtaaggggctcggggtgggcccggctcaccagggcctcctcctcgaaccccccaaagttccgacatctggctctccagggagccaatgcccgagtccaggcaatcctgggagacgtacgggagtgagtccagcgtctgtgggagccagtctgtgggcccaaagctgctgccactgcccccgctaggtgcgaggctcctgcctgatggggcataggtctgtgttagaccctcttggcgggaccctggggatgcctgggcccccagcttcttcccatccaggctgcactgctcactctctgttagcagagagctggactgggatgaaggtgaaggccgccggccatttttgtccttgcttggggctctggggggtgagaggagagcattggcacggagctcatctgccacagagcgctgggggcagcttggccgctctgggtggaagaatcggcacttgatcccataggtgcatttccttcctggaagaggaatcaagagggactctaagcaggggcacttcagaaccagggatgagagcagggaaggggtggcacaggaaacggggttgggtggtccaatggtggaggtccccaagaggaaaacagggcacaggcagacaggtgagaggaagggcaggagtgaggagggccggggagggcaggctgggttccataccatagggacacggctgcttcctgtgctccaa

SEQ ID NO: 1788 - DNA, 787 bp, Artificial sequence
  DNA replication origin
gggcgccccctggcggcgcagggaccgcccccaacctcgcgccgccgccgcccgcctcagcccaacatggcgatgcacaacaaggcggcgccgccgcagatcccggacacccggcgggagctggcggagctcgtgaagcggaagcaggagctggcggtgaggggctaggacaggggttgcacggcatggggctccgcgcccgccccgcctccaggccccaagcccggccgcgctaggccgtttgttactccgggggcgcggcgcggcgggccgggtgctcggcggcctgaggccgggtgcgcattctgcggcccgccggcggttcagcttcccggctgtgcgaatccggagccgggagagagccgggagcgcgggagggggaggggaagcggcagccgcaggagggggcgtggagggaggacggtgccggggcccggggagagggcgctaggaagggcgagcgtcagtgagccgcgggggtgggcgaggcgggctagtccgtgatctttgcggggagggggtggggaaggaggctagtgtgggagggggacccagtcaccccgtctggactttggaggctggtggggagcgtgttctttttggtactgggagtagatccgttgaatggaggtttttgatagacagggttgtgatgtgtttgggaacatctagaaggtgacaggcgagggagaagaacacattccggagaattcagaattgtgacaggcacccaaggcccaatgcactctggtggctaagctcttcctgcccccgcgtctcggcttgg

SEQ ID NO: 1789 - DNA, 987 bp, Artificial sequence
  DNA replication origin
tagcgccccctctttcaagaagttgactgttggctggcatggcggcttgtgcctgtaatccagctgaggctggaggattgactgagtccaggatttcgaggctgcagtgagctaagattgagccactgcactccagcctggatgacagggcaagaccctgactcaaaaaaaaagaacctgatagttagatctgtgggaacagaagagcctggatggtgcctcaggcaacacctgcattcaacagctaggcaagaggaaggggagcttgggaaagaagtggagaaggatccttggatagctgggaggagactgagagacagaggtgccaggaataaggttgaaaagggagagatcttcagggaccagggctgggaggagacaaggccagtgagctctgaaacaaatctgcaagacttgactctcagtgatcattgattaggtgaccttgagaagggcagttttggtggagaggtggagatgagagccaaaccacagtgggcttcggagtgagtggaagggaaggagtggagataaagccaggagggtgagagagaaaatcagagatcacagacagagaaggggaaagcatggctggggatggggaatgtgattacaagactcagaggcaggggacattgatggagtagagacccgaggacacgaggaaatgggagcatcaagacacagggctcagatgctaaagctggccttggttaggaggagggaccagggggtcaggtagctgagctccatgagggtttgggggctcagaagaggaatgggggctcagtgacaggcagggtcagttcaataaggaaaggggtgtttatcaagggggacaggaagcacaggatgttctcagctcagagaggcagtgaggggatggggggagaggagagggggctcgacagtaagaatgtgcccttgaaggaagggtccaaggaagacggttcatatttgggggaaatgcataatgattcagagcag

SEQ ID NO: 1790 - DNA, 1706 bp, Artificial sequence
  DNA replication origin
gtccattttttcttgcggatccctggaaggggggccggctcgcgggggggactgcgaagggggggattccctccctggtgctcgcagaggactggcccctctccgggctgggagctccggccgagcggaggcgcgacggagagcaccagcgcagggcagagagcccggagcgaccggccagagtagggcatccgctcgggtgctgcggagaacgagggcagctccgagccgccccggaggaccgatgcgccgggtggggcgctggccccgagggcgtgagccgtccgcagattgagcaacttgggaacgggcgggcggagcgcaggcgagccgggcgcccaggacagtcccgcagcgggcgggtgagcgggccgcgccctcgcccctcccgggcctgcccccgtcgcgactggcagcacgaaggtgagtcccctcgtagctgccccatccttctccccagcgcccccttccccgggagctggggcgcggcgggccctcccgtcggggctggttctagctgggtgcgtggggggagacagaaaggaaggggagtctgatcgctctccggtcggcgatcaggacagggcacctcctgcacccttcctgcaagtctgccgcccccgtcggccctcaatccagcaggcagcctcttcccctcgaactcccctccatcccgcagccccgggtgatcatcctcactcgcagtcctgaattccccaagtccaccagccctgtttataccccgcctccaatccagaagttcttgatcctggggctcattggctcggattcccccaagtcccacggtctctggtgacccccaccccagtccgcagcctgggcctgggttcgacgtggcaggcggcatgcgctgcggcccccggtgcgcagcgaagtggcgcggctccctggccctcggggtctggcgctcaggaaccgatggtatcgcttagttggggagaggtgggggctatgttcgcccgggactccctggagggccgggacagacttggagtgagtgtgcttgggggcaggagttttcttgtgaaactggcctctcagacgtggacagctctcttggctcttgagggccagccaggggaacctcaggtccgcgtctccctcggcacctgttggggcctctgcgggatggtgggggagggaagaagaatgtgcgcgcttgcgggggtgatggaggggtgaagaagccatcctccgctgcccttgcttttggagggggggcacggccccagcacctggcttggctccgacagacaggctaatcccgacaggtcggacaggcacatactttgtcccgccccccgcccgcaattcttctgcccccgcctgccagcctgctgggcggccaaaactctccagcctgtagcccggcccggggagggctaatgcgaaattatctagatagtttacatttttgggtctgtatcgggcccctgatggagtaccactttattctgacggtattgcaggcaagaaggtgaaagtgattccagccccctcccggggctgagtttctgccctcagctccacctccagctgtgtccccctccccgacctgtatactcccctccgaggcccttgtggcctctcgctttggtctcccttctcagctctgcctctgccaccagccccgtccccactttgcaggtccactccccaagctgggttgtgccccacactcagca

SEQ ID NO: 1791 - DNA, 743 bp, Artificial sequence
  DNA replication origin
aaggtttaagcaggggagtaaatgatgggacctgctttataattgttaatttactctggctactgtgtgaagcctgtgttggtgggggacagagtgggagtggggcaacctggaagggacactaacaattgtccaggtaagcggcaaaattggcttaaagcaggaaagtttctgggggcagatccaacagaatttgccagtagagtggatgtgggaggtgagagagaagaatgcaaaacaactcccagtttcttgctttatcagtttcatcgctgtttccaaggagaaaaactggggagaaagaggttctgtgcagggcccaagagtttagttttaggagcagggagttgaaggggccactcttggccatcttagctgcttgatgatgggggctgggacggagtgagaggctgggagaggctggaaggggaagtctgcacggtcatccgtgggcttgctgaagccccagtggaggctggctgtggatttgcagtggcactgtctcaggtagctgggggactgtccagaggagctcagcaggaactggcagggggtttgtggggcagttgagatgttgaggcaaggccagtgcagaaatcgttatcgggcaggtgaaacgccaagaatctgaattagaaggaagggcatgagagattgggagcagaaggttagagtgggggggtctgaggatcttgaagcctatgatttcagggatggagtaatttgggtgaggtcaagagggg

SEQ ID NO: 1792 - DNA, 1068 bp, Artificial sequence
  DNA replication origin
tgctggcttcttagatgggtttggaggccactagagaagtcagggctggagtgaggatcaagcttcgggagaatgtgtgcagagagaaggagaggcttccgaggggctttactggggaagcccaacctgcatgatgttgcccaaggagacggcagagagggtgagaggagaaccagcaggtactggggggcaggagccaaggaaggagacagaggaaggaagaaagggaggaggggagggagggagggagggagaaaggaaggaaggaaagaaggaaggagggagggagggaaggaagaaaggaaggaagggtttgaggtgataaaggtacagagggagggaagtaaggaaggaaagaaggaaggaaggaagggtttgaggtgataaaggtgcagagggagggaaggaaggaaggaaggaaagaaagaaggaaggaaggaagggtttgaggtgataaaggtgcagagggagggaaggaaggaaggaaagaaagaaggaaggaaggaaggaaggttttgaggtgataaaggtgaagagaggacatgtaggatgaggacaggtccatacaggctgtggcctctgtaagaagagtttcttggaagtgggggcacagcagctagtttgcagtgggttgaagggtgaaagagatgaggatatggaagtgatgcatgtagaaagccctttaagagggaaaggaagaaggcagtagcttgaagcagatgcagggggcaatttggaatggaggagacaggaccctgttctgtcggctgaggcgcagaagacagcagcatgagaagggatggttgatggcacagagtgcccgagcacaggtggagaggctggcttaggaccagggcagggaaggacggaaacctgacagtgagtttgaagggtgggagtgtctttggggtggcagttaagaggcaaggtcatttgcccagggataccagggtggcgcggaggctccaggggtggggaaggtagggaaaggcccctaaggatgctggatgagaaagatgctgggctcaacagcaagcctgggtttgggactttctgtccctcacccat

SEQ ID NO: 1793 - DNA, 991 bp, Artificial sequence
  DNA replication origin
aatccacatcctggctgcaggcccccagctgcccccgcatgcggttttgtgaaagtgtgaataaggcaagcggatccagcactcgggggcagcttctggtctggtcaggaaaacaaacatggagagttagccacaagcccactcaccagtgctggcaaaggagaaaggtgctgtactgttgggacacgggacagacaggcctgacctgatccaaggtcattgtggagggcttcctgagacagaggcagccacgggccaaaggactgcatcacagtcaacaaagccacaggccggtacttggggcccctaggggcagggccttgctggccaagataaagactttggcttttattctgggagcagaggagagcccctgtggggttgaagcagaggagtgcaatgatttgatttctactttagaaagagctccagttgcagagtggaagctgccacgggtgtcaccacaggagaggagctggcagtggttctagctatggggtcaacatgggcatggagagaggcagaggactcgagtgacatgaaggtgacaggggccacagggctgagaggttgttggatggcagaaaggaagagggagaagttgcccacagtttatggtggtgccatttactgggatgaggagacaaaaagttcacatttagacatctgagtttgcaggcctgggggataagcagggaagataagacgggcgttcgacgtgtgtgtgtgtgtctggagcttggaagagaggcctgctctgcagatacaaatcaggagcaatgagcatggcccagggagaggatggagtctgagaagagggactaggaataagtctgagaaaccccaacatctaggctagcggaaggaagcaccaaggacagtacaaaagaatcgccagaggaacagaaggagagcagagggaaactggggcagggtatcacagggaccaaggacagagaaagtagaggggatggtagagagaaatcacata

SEQ ID NO: 1794 - DNA, 1352 bp, Artificial sequence
  DNA replication origin
gtgggtggggctcccgcaggaccgacggggcggccccaagagggcgcaggggcggcaggcgcggtggcctcggggtggggggcgcggacggccttacccccgggcccggtggagacggtgacctgcgcgtaggtggttcccgcggcggccgccgggcccgagacgccgttgagcgcggccacgcgcacggtgtagcgcgcgccgggccgcaggtgcagcagcgtggcggctcgctcccgcagccctgcctggcgcggtaggaaggccacgcgcggcccgcacggctcgcaggcgcccgccgggccctcgcggccgcagcgcaggcacagcagcgagtaggtgacgtccgagcggcctcccgagtcggccggcggcagccagcgcagtcgcagcaccagcggcgagcggctcaggctgtactgcaggtcccgcggcgccgacggcggccctgaggcggcacaggggcggggcggtcagggcggggcgtgggtgcccgtgagaggggcgggatgcacgaggggggggcggggtcttgtccacccccagtgaggcaggagaagcaggggcgcgagggtcagtcggggaggagggaaccagggcgttcatcaagggacttggtggatgaggggggacgggggacaggagagacagtggcatggggtcagtcagggaggaaggtagaagggacgaccggtgaaggaacagggatggatgagcgggaatgggccgtgggagccagtgggcatgggggataggaaggtgtgaggggtctggggtgggaggaatgggggcgtggggttcagtcagggagattggtacagagatggtcagtcagtgaggggtcgagggcggatgagcccggggcaagcgggagcaggggcgagcgggagcaggggtgagtgggagcaggggcgagcgggagcaggggtgagtgggagcaggggcgagcgggaggaggggcttgccccgggaagggtcagagacgggggcgtgggggcccttgggaggtcggaatgtgagagtggcggggcagttggtgaggatttgggaggaggttagtgaggaaccgaggatggcagcatggggaccgaaccgatggtgcgaaggtcgggagcccccctttcggctggagggtaggcagggtgaggagagggcagcggaggggcgctctcctcagtgatctgccaggcatcctaaccccatcctccgtctggactctcgcagttgtcctggttcttctcatcaaaggccccggcccccagggcgcgtccaggctccgctcccccgtacgccgccttccggggcgctggcccccatatccgcccacgtgcgccccagtgcggagaccctgc

SEQ ID NO: 1795 - DNA, 937 bp, Artificial sequence
  DNA replication origin
gctctggggtctgggggcattgctcagcggtgctaggctggcgcggcttgagccgccgccggactgacagctcggtctgcggaccatggagacctgcgccggtccacacccgctgcgcctcttcctctgccggatgcagctctgtctcgcgctgcttttgggaccctggcggcctgggaccgccgaggaaggtgagaagactggtgagctctgctcggagcgtggcataccaaaagatagggggctggcgatgggggttctgggggaaggagtcattggagagactagagtctgtattggggcttgaagcaagcaggcagcaaagaactggagagacagagaaaaatgtgatcaagcagtagcgaagagaggggcgctgaggagcttgggggctggagacccgggaggttgggaaagaaagaggccaggaaccgcgggagccagaggcggcggtccagcggccggtgagacggacaagctgagtgattggaggtgggaggtgcgggggcggggagatgaagagtggagacagggagatgcggaggtgagctcggaatatggggagacgggatggagcccggactacaggggctaggagaccacagtgtggccaacagaaggtggaatgctggtcgagggggctggatccgggcgctgcccgacgtgctgatcatggaactgtccgcagtgctgaattctgagcgtagtctgccgggcgcgctccgcgttgccgggtttgaggctgtcggcgatactggagcccgcgtcttgcctctgattgtgcatttaggggagctatacgctcagttgaatccagaggcgtcatatctaggtgcagaatccggaggagctggaatctgaggcgttgaccgcggggttggtctgggccctggatggctgatgccttccagttcgcgattccgatgtgctgtcagtt

SEQ ID NO: 1796 - DNA, 1107 bp, Artificial sequence
  DNA replication origin
gccacaggagcaggggcctgagtcaggccgcgtgacccgcgaaagaagagtcgcctggctgcctgggcggcaggtggtggcgcctggctggggagcggggacgcaggccttccggagcgcgggagagaggcggcgcggcgggggcgggggcggaggcggggcgggggggggaaagaagcgcgcgtcggtggttctctccccaaggatttccttcttcgtcgatccacctttactcacttcactggccccctccctacgggtctcagtgccacccttctagccccaggtcccccatccctcggcccccctccccggcaccccaggcagcccctgaacctcgggggaaggggcgtcgggaaatccccaggaatcggaccctgcagacgccgtccggggcctggcgggcggaggacgaccgtgactcgcgcaaggtcacactgaccgggcctggaccccgggtcagggcgcactctccagagctcgctgcactgcccagcctgccgggtcgcagtgtggcttagtgagttctctggttggaatctcacgaagccaaaattaaggcgttggcaggttacactcctttctggaggctctaggaacggatctacgtccagctcaatggcagaattcagttccatacaattgcagggctaaggcccccatttgcttgctggctgtcatctgggggtctttctcagtttctagaggcctgctgcatttcttggcttgtaggcctgatgtcgtctggagcggtctctcctgggagaacctcctagagtcagggaggattaaatgagatggttcccgtaaagcacttccacggggcctgaaaagcaagcgctcaatacatgtgcgcctttcttcctggattctgggctccagaggacaggccccgtcttatttaccttgttagacgccaagggctgccggaacagcatctgacactcacttcctagtgccgtttaagtgagtaccagcccctggtgtgatagtctgtagataataagcttttcactcgctattgatagagttcctacactgcattattcattacttcatttattcagaagatagttttgtttatcatatgcctccttcagtggtccg

SEQ ID NO: 1797 - DNA, 1480 bp, Artificial sequence
  DNA replication origin
ctgtgtgccgagcccgcccgcactgcggggacaggccgggcgccgcccacgccgcgctctgccgggcgcacagtctgcctgggaagcgcgcggccgggcgggcggccatggcgcggcacgctgggaggtagcgcggcggctgcaggagcgcacagtcggccatggcccggcggcggcgccgcgcctgcatcgctctgttcctggtgctgctcttcgccttcggcaccctcatgggtctgcgcacgctcaaggctccggacggactcccggcgctgggcccgggcctggagctggcgccctttgagcgacgcccagagggggcccccgcgcccgctgccagggccccggcagcccctgccgcgccgcccccgccgccgccgccgccccgcaccgcggaccctggcggctcccctgggccggcacccgcggaggccgagcccgcccccgtgcagagcctgcgcgtctactcggacctgcacgccttctactactcgtggtacgggagcccgcggcgcgagggccactacattcactgggaccacgtcatggtgccgcactgggaccccaagatctcggccagctacccccgcggccgccacagccccccagacgacttgggctccagcttctacccggagctggggccctacagctcccgggaccccgaagtgctgcgggagcatatgacccagctcaaggaagccgccatcggtgagcgccccccaccccgggcggccctgccccccagcctcacccttcctccttcccacaccccagctccctctggtcctgtcaccggccctttggtcccacttatccgccagcctggcttcttagctgttccctcccactctcatcctgggcccaccatgcgacaccgcccctccgtctagtattcagaccccccagctgggcccttccatccctaacatccagggcccttcccatagggcggaactgctaggagtttgcaccaggagagggaggcagagtcttcaaatttgttgggcgatgggaagtgaggcctggagtcctggcccgcaggttctggggttcagaggagtggaacttagggcggcctctgctttcatggcaggtacagggtagagcagcagccgttcctgcttttgctggctgcagagaggaaagtgtgcccgtgttccatgaaggcctctgctctatttgcagttggaggtagtgttgggggtttagaggcttttcatcaagcacccagctggagggaaggtcccagggcgcctccttcgtaggctatggaggggaggctcacttatttcggatttcgtcactgaattttgctggattttacagatggcctctgctcagggctcttctccatgcgggacgttagggttaggggtgcttctcttcttcagaggtaggcctgtggcttccaggtgggtgtggcactgtcctcccattccctttgttctactacttgctgaggcagtctaaagcctgg

SEQ ID NO: 1798 - DNA, 1471 bp, Artificial sequence
  DNA replication origin
ccggcgcagaggcggggccgagtctcctggaccggaagctggctgggagcgtcacttcctcccggaagcgggcctgggcggatgtctccggcgcgtcggtgcagggggatgagggccgcggtggctgccagcgtggggttgagcgaggggcctgctggctcccggagcggtcgcctcttccgcccgccgagtcccgctccggcggcccccggcgcccggctgttgcggctcccggggagcggggccgtgcaggccgcgagcccggagcgcgccggctggaccgaggcgctgcgggccgccgtggccgagctgcgcgccggcgccgtggtggccgtccccaccgatacgctgtacggcctggcctgcgcggcgagctgctcggcggctctgcgcgctgtgtaccgcctcaagggtcgcagcgaggccaagcctctggccgtatgcctcggccgcgtggccgacgtctacaggtaaggccgccccgacccggccccgctaggggcggcaccgcgggaggggtttccggtgacaggcttgggagactgaggcgcagagagcgggaggggcttgtccaggctcaccaaggaatccggaactggaaatatgtaccgaggacttaacgtgccccgggccctgaactacatgctgctgggaagcagcaacacacgagaaaggcagggaccctgttcccttggcgtatttgtgctaattggggaggcccccgggaaaaaagcaaacaaacacagtagcttaatttaatagcgaatgccttgaagaaaataaaacgtggagcttgatcccactatcatgatatcacagcggtgcagctgttgtagtccctgagaccagaggcacatgggcgtcaagccaggggtgcgcctctggagccctgctttctgctcaagctcttagggaggtgaagcagggagacaggcggctcccattgtaaactcgaaggattccttttctacgtctgcctagagtctaggaaaggaccaccagtggcccttcaattttgaatggatttattcttctgtgtttcccagatactgccgtgtgagagtacctgaggggctcctgaaagacctactgccaggaccagtgaccctggtgatggaacgctcggaggagctcaacaaggacctaaacccttttacgcctgtgagtcaagttttctcttgtgtccccagactccaggccacttggctttcactaggatccagataagacttaccctcttatcccttccaacctttctcatgatccctttccccttgccttacagcttgtaggcattcggattcctgatcatgcttttatgcaagacttggctcagatgtttgagggtccgcttgctctcactagtgccaacctcagctcccaggccagttctctgaatgtcgaggtgagtttacccagtccttcccctggaaatgtcaccagcgcacatactgttttctgtgaatcagtg

SEQ ID NO: 1799 - DNA, 1137 bp, Artificial sequence
  DNA replication origin
ccgcctctgcgccgggcagcttaaagggaccacgacccccaggaggattgaaggagaccggtggggacggggcggggcgcagccttgcgaagccctaacgcagcgctggggaggggggcggccgaaaggggggcggtggtcgggccgcgcaagcggagatggaatggggcccgggctcagactggtcacgggggtgagagggggcccgtcggggcgggaggaaggggcttggccccgcgcaagcgccggccctgaccgtctgtctctcgctctctcccgggcagggaggctgccggcgtggaccgcgggaaggcggggctggggctcggcgggaggccacccccacagccgccccgggaggagcgcgcccagcagctgctggacgcggtggagcagcggcagcggcagctcctggacaccatcgcagcctgcgaggagatgttacggcagctgggccgccggcgcccggagccggctggtggcggggttagtgcccaccctgggctgggctggggtggggtggggtctgcccactggctaggctggccaagccctagcttaccctggaggggggaagtatgtctccgccgctttatccctaacctcctttgatctggtgagaggtttcgaaaaagttaatactatccaaatgccaaatggccacatccttgtggggcctaatccaaggccttgcctcccagcctcacttttttcctttctgttccaactagaacgtctcagccaaacctggagcgcccccccagccggctgtctccgccagaggcggctttccaaaggatgctggcgatggagctgcggagccctgaccatccccgagcagaataccctgacttctctccctccccagggccggtggctggactctgaacaactcccttcagtaaaggggccagtcttcactggcagtggctggtacttggctctcagcctggagtggcagctctgctagcagctgggttcactcccacttcatcctggctgaaagcagtgctgtgctttgaaatgcagccaatgaatacccagtctgattacccagatttgggcagaccagcagtgctcgccagagtggtctggcctgctatgggggatccaggtggtgttacatgtccatttcat

SEQ ID NO: 1800 - DNA, 1369 bp, Artificial sequence
  DNA replication origin
gatggggcggctggccgggcagaggggctcctcacttccccgtaggggcggctaggcagaggcgcccctcacctcccggacagggcggctggccgggcagggggctgacccccccacctccctccctccgggacggggcggctggccgggcggggggctgactcccccacctccctcccggacggggcggctggccgggcagaggggctcctcacttcccagtaggggcggccgggcagaggcgcccctcacctcccggacggggcggctggccgggcggggggctgacccccccacctccttcccggacggagcggctggccgggcagaggggctcctcagttcccagtaggggcggccgggcagaggcgcccctcacctgccggacggggcggctggccgggcggggggctgatccccccacctccctcccggacggggcagctggccgggcggggggctgacccccccacctccctcccggacgaggtggctgccgggcggagacgctcctcacttctcagacggggcggctgccgggcggaggggctcctcacttctcagacggggcggttgccaggcagagggtctcctcacttctcagacggggcggctgccgggcggaggggctcctcacttctcagacggggcggttgccaggcagagggtctcctcacttctcagacggggcggccgggcagagacgctcctcacatcccggacggggcggcagggcagaggtgctccccacatctcagacgatgggcggccgggcagagacgctcctcacttcccagatgtgatggcggccgggaagaggcgctcctcacttcctagatgggatggcggccgggcagagacgctcctcactttccagactgggcagccaggcagaggggctcctcacatcccagacgatgggcggccaggcggagacgctcctcacttcccagacggggtggtggccgggcagaggctgcaatctcagcactttgggaggccaaggcaggctgctgggaggtggaggttgtagcgagccgagatcacgccactgcactccagcctgggcaccattgagcactgagtgaacgagactccgtctgcaatcccggcacctcaggaggccgaggctggcggatcactcgcggttaggagctggagaccagcccggccaacacagcgaatccccgtctccaccaaaaaaatacgaaaaccagtcaggcgtggcggcgcgcgcctgcaatcgcaggcactcggcaagctgaggcaggagaatcaggcagggaggttgcagtgagccgagatggcagcagtaccgtccagcttcggctcggcatcagagggagaccgtggaaagagagggagaggg

SEQ ID NO: 1801 - DNA, 977 bp, Artificial sequence
  DNA replication origin
gcccctctgcccggccagccgccccgtccgggagggaggtgggggagtcagccccccgcccggccagccgccccgtcccggagggagggaggtgggggggtcagccccctgcccggccagccgccctgtccgggaggtgaggggcgcctctgcctagccgcccctacggggaagtgaggagcccctctgcccggccagccgccccatccgggaagtgaggggcgctctgcccagccgcccctactgggaagtgaggagccactctgcccggccagccgccccgtccgggagggaggtgggggggtcagccccccgcccggccagccgccccgtccgggaggtgaggggcacctctgcccggctgcccctactgggaagtgaggagcccctctgcccggccagccgccccgtccaggagggaggtcgggggggtcagacccccgtccggccagccgccctgtccgggaggtgaggggcgcctctgcctggccgcgcctactgggaagtgaggagcccctctgcccggccaccaccccgtctgggaggtgtacccaacagctcattgagaacgggccatgatgacaatggcggttttgtggaatagaaagggggggaaggtggggaaaagattgagaaatcggatggttgccgtgtctgtgtagaaagaggtagacatgggagacttttcattttgttctgtactaagaaaaattcttctgccttgggatcctgttgatcggtgaccttacccccaaccctgtgctctctgaaacatgcgctgtatccactcagggttgaatggattaagggcggtgcaagatgtgctttgttaaacagatgcttgaaggcagcatgctccttaagagtcatcaccactccctaatctcaagtacccagggacacaaacactgcggaaggccgaagggtcctctgcctaggaaaaccagagacctttgttcacttgtttatctgctgac

SEQ ID NO: 1802 - DNA, 1252 bp, Artificial sequence
  DNA replication origin
atgcctgacccctgaggtttaggcgttttgaagttcttgtgtgctggagatgtagctggggtttctctcacagcggaggcaagtaattacaactcttctgtattactgtaccccttgaaggtgaggtcaattaagtactgttggggggttgaaggccagaatctaatttttggagatttttctaatgtcaggagtgggttgggtaataaaatgtgtattgagaataagacagccttctggcccctctgggtctagggcggtaaagcatctaagggttgttgccaaacgggccatggactgggctgggttttcatatttgatgaaaaagagcctaaacgctaactgatttgggagaggttggataaagaaaaaggaggattaaccttggctatgccttcagctccagccacctctctgagaggaaattgttgggcaggtgggggagggctggtcacggaatgaaactgtaagccagaccgggtgtgaggaggggaggtaatagaagggttatagggtgggggagcagaggttgaagaagagttgggagctggctcggcctggcaaggagcagcctggggaggagggtagaggtcagatgggtctgtagaaaaggaggattcccaggattcagagcttggggtggagactgaaggaacagacaggagagaaagaagaaagctttgggatgaatctcattgggaacagagattaggaagggaccgatgtgtaaaagaatgcctggacgtcaggcacctcagaccatttgcccattttatgacaagaattatctagatcttgtaggatggagaaatcgaaagtgtcattttctggctatttggaatcattgtcaagtttgtattggggccaagcggtgttgtagaagaaaataagacgcttaggttttaggtcaggtgtgagttgaagaggttttaagtttttgagaacacaggctaaaggagaagaagggagaatggcgagtggaaggttgcccatagtgaaggaggtaagtttaaagagaaaggtagagacatggagaagtgggtgggtgagcagccctgggctgcaatgtgggtgagcagccaaagcaggcatccctgcaattgacttgccaccaagggaatgtgggtgaatgactaaggcaggtgtccccgcagtgatcagacaccagtggagggtgggtgaataatcaggcaggcatctccgcagtgattaaacaccaagggaagactatcttcccgagtccgtgactggc

SEQ ID NO: 1803 - DNA, 1261 bp, Artificial sequence
  DNA replication origin
tggctcagtctgcccccatttgttcctgcacaggcttcgattctgcgacccgggatcctgaattcctgtggctgtctcggtataggtgcgcagagctggagctggagatgccaacgccgcgcggttgtaactcggccctagttacctggccagggtacgcgacaattggcggaggcaggtatccgtcccggaagaaacggtggggattggaggaggcccggccacagggggcgggctccgttctgttttggggcggagcgatggagaagacaggctttcgattgatggagcgggcacacgggggcgggttcgtctgggggcggagcgcgcgggacgggcggcgggatgaggagcttgaggaagcaggcagggaaatgtctgccgccgccggctctcgggagcgcaacactgcaggttcggcgggcggcgggaagctgggctggggagctgggccgggggcggcggtgcgcccggccctcgggtgggcagggtcggcggtttggccagtggacgctcggggcgaagaccaaagtcctggtggccctctggaggctgggacactggggcagaagttctgtgatgttcttcttaggcgtgcgtgacgagggtaggcgggtgggaatggggtacttgggaatccggaggctggggttttagtaaagctccgttccgaactcgctgtgtgacctcgggccactcgctgcccctctctgggcctgttgctccatctgagcttgctcttcaatcctgatcttccgagtttgtcgcgtggggcgggtgggggagtggtgccctgcctacgatagagtcttcctttgggtgaggtatggtatgtgttggggctctgtcagttctcagcccctgtgatgatagcgcagtgtacagggctggagtcttggggagccctgtctactctgggactagaggccaggatgaagttacaggttataaaaggactaggttttttcccacccagcagttggtggataatggggagcacagaaggccagttgctgagcaggagcttgtcgtttggagatgggaggctcagggctgaaatttgggtgagtccgtgctctgggaggacctgcagacctgtctttttttgtccagctccagggttttctgcaagggcccctggtgcttttttcccctgggtgtgtccgtgaggctccatttatgtgtgagctttggcatgacccctagtacctatttgtgacagtcatttgccagcaatgaagagcctgtcaagtagctgtgt

SEQ ID NO: 1804 - DNA, 961 bp, Artificial sequence
  DNA replication origin
gaacttggttgccttgtatataaaatggggataataggccgggggtggtggctcacgcctgtaatcccaacactttgggaggccgaggcaggtggatcatgaggtcaggagatcaagaccatcctggctaatacggtgaaaccccgtctctactaaaatacaaaaaattagccaggcatggtgacacgtgcctgtagtcccagctactcgggaggctgaggcaggagaatcgcttgaatccgggaggcagaggttgcagtgagcggagatcgctccactgcactccagcttaggcgacagagcgagactccgtctcaaaaaaaaaaaaaaaaaaaaaaagaaaagaaaagaaaattgggataatagtttcctccctcataaaaggtgtgttacgaggagtaggaagataatatttatacgaggcacagaccttggcacatagttaccgtgaggttcaaggaatggcggtggtctctgccttggaatagtacttttgtgttcacaattattcttgcatttgaacctcagtgcgcacagaacccttctgtgcgcgggagaaacagggccggagtctcttgggataatacaatcatgcagagccggctcttcaagctcgtggctcagtctgcccccatttgttcctgcacaggcttcgattctgcgacccgggatcctgaattcctgtggctgtctcggtataggtgcgcagagctggagctggagatgccaacgccgcgcggttgtaactcggccctagttacctggccagggtacgcgacaattggcggaggcaggtatccgtcccggaagaaacggtggggattggaggaggcccggccacagggggcgggctccgttctgttttggggcggagcgatggagaagacaggctttcgattgatggagcgggcacacgggggcgggttcgtctgggggcggagcgcgcgggacgggcggcggg

SEQ ID NO: 1805 - DNA, 889 bp, Artificial sequence
  DNA replication origin
caggtggtaaatgctggacagaggcaaggctggagccctatcatgcctgtgtcactggccccatccaccacacgctgtccattcctgcctccacttcctagaggaggcaggtgagaatgagacacatttccctggagggctggcaaggtggtggtcaccaggggtggaatggaatgtagcttgtcctctgggatcgtcgggtgggctaggcctaggagcagagcaggactgcctggggaagtgctgtgacacctctgtaaagccctgaccccctgccttgcccccagggagagcatgatgtgtgtgggcagctcacaacctgacatctcccccaccacggcctagatgagcacaggtgcttgccccaggcctctttgtagcttgttggggaggggagtgctggatgggctggactggggaatggtggggatgttaggagtggggaatctgagagggggtggggcaccaaaggtagaaagctcagacttggggagctaatgaggaaggcagagtttttttttttgttttttttttttgtggtgaggtggagtctctctctgtcgcccaggctggagtgcagtggtgagatcttggctcagtgcaagctccgcctcccaggttcatgccattctcctgcctcagcctacagagtagctgggactacaagcgcccagcaccaccatgcccggctaattttttgtatttttagtagagatggggtttcaccatgttagccaggatggtctcgatctcctgacctcatgatccacctgccttggcctgtctcgatctcctgacctcatgatccacccgccttggcctcccaaagtgctgggattacaggcatgagccaccatgcctggcctaggaagacattaaaggtaagggt

SEQ ID NO: 1806 - DNA, 1144 bp, Artificial sequence
  DNA replication origin
tcttggctcagtgcaagctccgcctcccaggttcatgccattctcctgcctcagcctacagagtagctgggactacaagcgcccagcaccaccatgcccggctaattttttgtatttttagtagagatggggtttcaccatgttagccaggatggtctcgatctcctgacctcatgatccacctgccttggcctgtctcgatctcctgacctcatgatccacccgccttggcctcccaaagtgctgggattacaggcatgagccaccatgcctggcctaggaagacattaaaggtaagggtcagggccgggcgccgtgactcatgcctgttatcccagcactttgggaggccgaggcgggtggatcacgaggtcaggagatcgagaccatcctggctaacatggtgaaaccccgtctctactaaaaaaatacaaaaaataagccaggcatggcggcgggcgcctgtagtcccagctactcgggaggctgaggcaggagaattgggtgagcccgggaggcggagcttgcagtgagccgagatcgcgccactgcataagcctgggtgacagagcaagactctgtctcaaaaaaacaaaagaaaaaaaggtaggggtcagtcagaaaaggcctagaggttagcatattcatagaggttgggggggctggtgaaaattgagctgagatttgagggcctctcaaagggctgggttcaaagttgagggttagtgtgcagaagggctctgagcttgtggatgagtaggaatgggagtcagaggtgggggctctgaggaatggggctgggagctgcaggttggcggggcagggctgagtattaagggtggggctgtctcaccccaggctgactcattgagcacgaaacagagtggccctccattgcagcactgcagcctgcaggggtctgggctgggggctgagctattggacagcagacaagggctaggaccggtttcatttcccccttcacagctgaagctgcaccaggccatgtagtgggaagcgttgagttgaatcagctgggtagagagaatgcaggcatgtccaggaggatgggggcacagccaggcctgggccatagctccacgttcccagcatcccagatactgactcctctccctcccgcttc

SEQ ID NO: 1807 - DNA, 1497 bp, Artificial sequence
  DNA replication origin
ggccgggggcggggtccgggcggggcgggcccgcgctcacttcctcggggaggggttggggccgcgctcccactcgcccacacggtccgtctgcagtcggcagcctcgccggcagctcgctcggcccccgcttggcccggcccgcaggtaggagccgccgagggacgcggcgcccggttcccggccccgcctgcgccgcgcgctccccgctcccgccgcccgcttcgaggtgagcgccccgccgaccccggctcccagccctggcggtccgcccccgcgcccaggccggggagcgaagggacccgcggagggctgaggccagccgcggccccggtcccctgtacccgccgggctctggccacgggtgcccggggcacgccgagcccgggacagcgcccgccgggactggacccctccgggctatcgggcggggcgggggcgggggcggcagcgagagttgggcgggggagggggctaagtttgaaatagaaaagccggagagagacagacagaccgaccgaccagaagcgctggagaaactgaggttctcggaaagcccggtggagcgagagaccgagacaggcagggactcgaggcacaggaggctaccgagaccactgaaacaaggacacaccgggcgtacagagttactggtggacagacccgaggcatgggggccgtcctaggctttgtggagcattttcagaaaaagcatacgtgggaccccagcgaacacattccctagggcccttccccgggccttggaggtgccctgaggcttgggcgtcattggcctcatgctgaatctgctctctgaggcctgcagagacgctcagagactagagacagagacattcaggcgtgcagaggtggcgaaagagacttggatgcagagacagagaaagggaggtggtggggattgagacattcagccatgtagacaagaagagaccaagacttgagatccacagaggcatgggccccctgggggacagccagtcaagatacagagccgtccaaaacctaaagacagagactgaagtgtgcccagacacagagatgctgagtgaagcagagacagacaccagaaactgagactaagtgggggcagagagacctaggtggtctgacagcttccaggacagcccctgacttacccgggcctgaaccattgggaggtgaggctgtggggaaacagaaactctgagcctaccgatcccccatgaggcagaggccctgagacagtaagttcgagatcaagaagagccccacgcacacacacagccaccaagacagccccaacttatttttgaactcaaatcttggatgggctgcctcagccctgggggacccagggtgaatgaactgttcctctcatgtccccagagcagctgcgggatcttgctccccaacccccttccctaaacttctctgacttccaggccacatgggggagagcagagcttggggttggtgcccggtagcagagggtgaggg

SEQ ID NO: 1808 - DNA, 953 bp, Artificial sequence
  DNA replication origin
aataatacccagacccaccctggtcaggctcagcaggagacatgtccactggtgtgtatgtgttgggggcagggattggagcaaagctctcctggtactcaggtcatctgaggagagcccactcagatgcccaggagcggggtgggtagtgggaggtgggtcatgcccttggagaaagaccaatgtaaccatgtgaacgtgccactgtgcgtgcgcgcgtgcgcacgcgcgtgtgtgtgtgtgtgtgacatcaggggcccgtgactaggtgatgctgggttcattgcatagcaatgtgggggcatatgcatagctgaggttttactgcacaagaaggactacggcaggaatggatagatctaattgctgtgtgtgtttgtatatatacacgcatatgtatgtgtgggggtgtgtgtttaaaaaataagatcacacatacatacaaacacacagcctaactttaattatctgaaaggagccggaagagatctgggaggagctgggacaatgatggacaggaatgtgtttggaaagcagtttaggggcaagtgcttggaaatcctgagagaaggggaccaggtcaaatgttgcaaaggatggccgtgtgtgcttaatcaaatattacatgtgccaggtactcagtgactctcaagagcttagtgccaaagaccagaaagctagtcttagactgcccaaactgtggtgtgggtgtgaccatgggtgtcttagcatgcgtgtgagtgagcaaggtggtgagagcctggattggggttttaactggttgaggggaggagtgatggggatggggatgagtggagagagagagagaggaggtggtgtatgatcgtgggtttctgagagtggctgtgtgaatgggcagggtggaagatgagagggaagggtcatggattagtgtgtgtgtgtatgtatgtgtgtgtgtgtgtgtgtgtgtg

SEQ ID NO: 1809 - DNA, 1058 bp, Artificial sequence
  DNA replication origin
ccaagcacaaaatgtttcttctccccgccagtgtgtacatatctcacatatttacatggttcccacctcaccccaaacttggggaatttctctcccggcctcccctggcatcccgcatcccggcgggctggaaagggagcagagggaagctgcagggaatcaggcggagggttctcagggaacggcttatttctacagctggttaaaaaacaatctctctaacttttccaagtttcgtttggtgtggccaggagggcagggccccgcggggagcaggggccgcgctatgcggcggtcggtctgcagcagggcagaagccccttcccgtctgggtgtgtgggagcgcagacccctccggcgtggccgggaaccaagccggggctcggatgaaacgaaacgaaaaatgaacactcgaattttttttgttagttttttttttttttttttgcttttttttggggggagggtagggtagggaaatataaggggaaaaataaattaggctagattaaagctttggctatttcctgcttttatacacagacgcggctctcgcgacctcccctccggggccccgataaatacagtatactgcgatttaaattaagggcgcgggcggagttagaaggaccccaggagccgagaggctccacgaataaataaaaaccgtaaaaaaccaagcccggagaaaggggaaagcggggtggggcgcatccttataggagagaagaggcgtgtagcgaataaagtgacagccccccaccctggacccgcaggctcaggagtccacgcggggagaggggatggagaactctcctcgcttcgtcctctctcccggggaatccctaaccccgcactgcgttacctgtcgctttggggaggccgctgccgggatccggccccgaacagcccgggggggcaggggcgggggtcgtcgaggggatgggggcagagagcaggcggcgggcaggatgcccggggtgagttggcgagttccggatcttcgctcctctctcccggggctcgggcgacgcagcctaccgggctgtcttcgccgc

SEQ ID NO: 1810 - DNA, 1043 bp, Artificial sequence
  DNA replication origin
attccacgcgagctgaattcccgcccgcatcccgcccgggcagcagggattgccggctccgggaggcgctcgggctccgagaagcggctcagccccgcgcccctccctcctcagtaccgctgccggcggaccaggattcccgcgggtcctggcggctgcgagcgcgaggcggcgcggattcgcggctcggttccggcgcgactgctcaccgcgcccgcctcgcctcccgcggctgccagcgtgcactgggcgctcctcggcgcgtctgcccggcccgtctcggctttccttctccttcctctagtcccagcgtcacaactccgccgacctcctctgccctgagagcgcgtccggtgcgggcggagtcggacggactctggcttcacgcctcgcgcgggcacaccttctcccgggcactgaggcccaggtgagtaccgcgcgggcagctggggctgggacggcgggcggcagcggttctacagtcctacgcgagcccctggtacccggccgcgctccggggttccagaaggagaagatctcgaggtggagactgtggctccggggaaaacgctgctggcaagggcgctagttgggggtggacgttgggcccaggggtatctgacctgcgccgctgcagccttctcgctccttctcccagcttgaacggctcatcggctgtggtcgtggtgggatcacgccccgggagaggagaaggatgggctcagggaaggggctcgggctctccagaaatccggcgtgcaggccgggagctgtccagcctcgctaagagccctgggctagagtttgcccggacttgcctggagctgctgaaaagggaattgagattgaggaggccttgttggaaaggtgggcagtggaatttagctacctcctcacgccccagcccttgaggactccctgaaggatcttgagtggagtcggacctcactgcagttcctttgtgccttcttacccgaccttgggccccaggctgagggtactgagctgtgttttctcctcttccccacaccgaggcttgggtc

SEQ ID NO: 1811 - DNA, 1161 bp, Artificial sequence
  DNA replication origin
ctatagtaaacaaacagtctggggccaggcatggtggttcatgcctataatcccagcactttgtgaggctgaggcaggtggatcacctgaggtcaggagttcgagaccagcctgaccaacatggtgaaaccccattgctactaaaaatacaaaaaattagctgggcgtggtggcacatgcctgtaatcccagctaattgagaggctgaggcaggagaatcacttgaacagaggttacactgagtggagattgcaccattgcactccagcctgggcaacaagaacgaaacaaaaaaaaaaaaaaaaaaaaaaagtctgggactctgggcctgcctgggaaccaggaaggattggggtagttgccatctctgttcttggaggggtgggtgggtgggcgagctttgaacccagcagctgctgtgggcctgagagttgaggccagtcctcccgaccccagccagacctggcttggacagcagatgtggggcagcacacagactaggcggtgagctgtgttggctggaagtgaaactgcagagggcccaaaggcaaaagacccaaatcagacggagatagagatgcagatagagcagagggatatggagattgagggggtgaggggggagtgggggagagagagagagagtctcagaaaggcaagacagagtcagtgagagagggaagattcaaaggactgagaagagaaggatcaggggaggggagtccagggcaagggaagaaagccggtgtggtgggctcagggaagcaggtctttcaaaggcaggggatgcagagagtaatgatagcttaataaaagccccctcctgtgtggacagcaccctacagcgaacaaactttcccacttgccaaaactcattcaggcctcctgatagccgggctgagatggggttggagatctccacgctgcaggatggggcggggagctggaattggaactgggactggctggagtgggtaacacagggtgggggtggtgagtggcttagagacagagcccccagctgggcccaagtccctgcagtgactgagacttccccagctgtgttcccgggccaggcttgtgctcgccattcctgccaccatgacagtgctgctttgtttcctgggaggaggtgcgtcgctctcaagtcccggctgctga

SEQ ID NO: 1812 - DNA, 1108 bp, Artificial sequence
  DNA replication origin
gcatatgtgcatggatatggatgttcatgttcatatgtgtatatcagtggctgcccacgcttgaatgcctctgtgtgggtcactaggtatgtctgtgggatctgctatttgtgtctgtgcatctgtgtgtcagtatgactatgtgtgtgtctctgtatgtgcattcctatgcatgtctcaatttgtgtgtgtgtgtgcgcatgtgcgtgtgaaatgcttgctagactgactgtgaaatgaagttgcagcacagtggaaagaacaactcactggagacagtgacatgcgtattctctggaccctgggcaccctgccgctgatgggctcacagggcagtgggagagatgagcccttcagtgggcagtgaggacccgggttactggttgatggcagaggccagcgcagggtgctcctcggaagctcagttggccctgagtaggagtaggggtgaggtggggttggggagagtttctgaggcggcggctgttgagtgggatcctggagggtgactaggagttagccagatgagaagtagagtctgaggagcacggatgtggcactgtgacagcacctggcctgttcagagaggctggagaccaggaaggagctcattgtcaggagtcggggtagctggactagaccacccagggcgcatatcctgagggaagcgggactcactggaggccttcaagaaggacagggtcatggtcagggtagaaatatcactctgctttcacagtgaggaaggactcagagggatatgccaggagacagagattggagccacggcagcagggggaaaggaaaggggatggaatcagagggtattcccgaggtaaaacgattagtatccagagattgattagacaacaaagtgaggggagggagagggaggagcaggagttgggggacatccagtttgtggctgcagagattggatggttgatgaggatgttcacggagacagtgaacacagaagggtgaagggaagagttttctttggagggaaggtgatgagttttagacatcttgagtttcagatacctatgaaatgtaatttgttcattcattcttcattcactcatacatataccatgtatcaggcatt

SEQ ID NO: 1813 - DNA, 1467 bp, Artificial sequence
  DNA replication origin
gaagagaagagaggagaagagaggagaggcgcgttctggcctgctgacagcagttctactcccacaactcacatatgtctgattccgaagcagggaagtgtgtccaacacacccaatgcaaagacaggttgttgaatattttttctctcatcactaaaaaggattccctgctgggtgcaatcaagatccataaactcgcggctcgagtcggtgtgaaagcagcgctccagcccagactccctcgctggcgctaaatgcaggctccgggcgggcggagatgcgccggcatccgctagcagcctggccttgcgaccggcagttcccggcacattaggcagtgcgcttattttgggctccgcttcagtggattaactttcagtgtaaagttttggagcttgggcaccgtccccgtgacactgccccctcccctttcggtgggtaccaaacttcacagagccagagtcaaggagagctggctgggttctcagcagccctggggttcagtggctgttctccctggcagcctggagagccccccagctggctgacccagcctgccttagtggggaccaggtgccaacgcctctctctggggcagagacactgagcttgcagggttttggtgattttgcaaggttcccgtcgggggttgatctgggctgaactcgtctcacttctgctggtggtggcaagcctggtatcaccgccctccacacactggctccctcctgccttgggcataggaacccaggacgcatcctggaggctggaatcctgatgtttatatgaagataagggtgccttctttcttctgagatgccttccccatccctcaagtagggaggctgaggcagaaagggaagtggcaggagacttagttgggccataggagagccccagggaagccgagggggcagagagagggtgtgagggagagaagaaaagggaacacggccagcccctagactcctttctgatgtcttgggaaggaagagattggggttcttggagaaacctgggctcctctttccctccccccaccagatgctcagtgactgtccgctgggaggtgctttcagatccaatggtttaaaactctagttcccatgaattattaagaagcaactgaaaatgttgtcttcagaaaagttccccttcttcctccagcatcccattttctgggggcctaggatgtgtcatttaaaaccagagtgagcttcagaaacaacatgcagggtgaagcagcccagtgagagtgcccagactctacagggtgtggactgtgttacttactcactcattcatcccaacacatcatcagggctgactttgtttaggttactggatgggggctttgggaggcacggcctggtaagggagagtagatgcatacctgttcacacatttgttcatttattaacaccgagcatgagccaggcaccgtgtttgggtgccgagtgcaagcag

SEQ ID NO: 1814 - DNA, 1567 bp, Artificial sequence
  DNA replication origin
ggcttccccaagacctcagggcagttctgtggttagaggacacaggccgagaggcacctggagggagggaggccaggcctcaccagggccagtggccaggctggagggaatcactggttgaatggtgctcagggtcctggagctggtggaggtgggttccctgccctcccctggccctgcatggcccccagggctgtgagtctggggactgggcacctcccctgggcctctggcagggagcgagcagtgcctgaggcaggaggcaggcaggcatggcgtggtccctgcccatctggggagtgcttggtggctggctggaactgagcagtggacggcgtttggactcagcagcgtgagcccagctcggaggctgcgaggcagagccgtgaacgccaacagtctggaggcaggctccggagggagacaggctcgggcccattcgctgagcttggttcccacgacagctcagcagacagatggacctgggaatcctcactgcctggccaggagggcgcacacatgaatggaaatgcaggcaccccggtggggagggacaggctggaggttcccagggagggccaggggggcgagccaaggagcaggagctatggcctgggctaagcggttagataaaccagttgggtgtgctgtgcttcttggttagactgatccctgggcctcggcccaggtatagccctgaccttgacctcaggctttgccttgattccagcctcaatctgaatcctgaactggaacccagactgagctgtgactctggcctctgctcaactgggccgggaccttggtcttagactgagcagactgagccctgaccatgaccccagattgagccctgatcatcaaatccatttgcctatgtccttctctgaaagcagcccagagccgactgcccacaatactcaccagtaggggtgggtaaaaggtgagggccgggcccaggtggtactgacagcctctggatggcacaggagagcaagagcagaattgacttagagtggtggtggggtcgaagggtggcataactgaccaggaagagaagactcgcctgctgggatggagaccagagggcagtgtcccctgcccaccttgagcaggtccaaaattcaggctgaggaggacagagcccaggtgggtgggcttatggggtcccaggaggcaggaggcaggaggcacttgagaatgaagcaggaaaggcaggactgcccgccggagccagggagaggacagtgcgagtgcagttgtgaccagagctggggcctggggaggaaccctcttcccaggaccagagtcacctggagctcggaaatcagcagcacctaagaaagacaggcaggcagaggcccagcaaggagatgaacgcagatcatttgggaatgagccagccaggaatgactttggttaggggctggtggtgatgatggaaggtgtggagtattagagggcactccctgttcttggtacttccaactatgatctgatctagtcctcctaacagtttagtgagatcttgcagcagcggccctggatgccccagtctccaacttcc

SEQ ID NO: 1815 - DNA, 1341 bp, Artificial sequence
  DNA replication origin
ggaattgcaacttttttctattattgtacaccttgaaggcgaggttaattaaatcctgttgtggggtttgaggggcggaatttaatttctggagttgcatttaatgtcgggagcagattgggtaataaaatgtattttgagaataagacggctttttgaccttttagggtctagggctgtaaagtgtctcagggttgctgccaaacgagtcatgaactgggctggatttttatatttgatgaaaaagagcctaaatgctatctgatttgggataaagaaaaaggagcattaaccttgactatgcctttagctccagccacctttttaagggtaaattgctgggcaggtgggggagggagggctagttacggaacgaaactgtaagccggaccaggtgtgaggaggggaggtgataaaaggattatagggtggaggagcagaggctgaggaagaattgggacctagctcggcctggcgaggagcagcctgggaggaggggagaggtcagatgggtctgtagaaaaggaagattagaaagactcagcgatgcttggggttgggactgaggggacaggtgggagggaaagaaggaagatttgggacaagttgcactgggcacagagactagggagggacagatatgtaaaagaatgtctggacgtcaggcaactcagactctttgcccattttacaacaagaattatttagatctttcaggatggaagaattgaaagtgccattttctggctatttggaactactgtcgagtttgtactggggtcaagcggcattgcagaagaaaataagatgcttagattttaggtcaggtgagagttgaagaggttttaagttcttaagaacacaggctaagggagaagaaggaggaatggagggtggaaggttgcccatggtgaagcccagagaaaagagagagtagagacatggagggaaggggttcaggggttcttaccctccagaaaagtgggaaaggggtcagggcacagagatacaaggttggggcacagaaataagggattggggcacagagatataagaggttggggcacagaaataagggatcggggcacagagatataggggattggggtacttgcccctcccccagaaaagtggtacttgccgctaagggtgaaggagaaggggttgggagtttcttgccccccagaaaggcagagaaggggtagagacacggacagaagaggttggggtatttgccctttccccagaaaagtgggacttgccgctaagggtgaaggaccaaggcaggcgtccctgcgtcgtctgacacctctgaaacctgggcgaataatcagaggcaac

SEQ ID NO: 1816 - DNA, 1836 bp, Artificial sequence
  DNA replication origin
ttgtggcggcgctcctgggtggggggggcgcggaccccgggtctttgtgtgcaaatttcccaccgggaccaagcgactttccacaatttaattaagtggctttagagtccggagttggcctaacaagctcctgttcatgaatgaaagatttgtccgcagcagcgggggccggctgaaaacaaagtgggccgcagttaccctggatccggccggtttcgctgctccgcggccagccccagcctcccgggagcaggagaaggcggctgcgggggctggcagcggtccttctgggacgcgtctcacctagctcgcagcaaatatgccatccatatgcccaggatcacaaccgaatcagctccatcaggcctggcaaagaggcatttaaattgctaatattgcactggggaacgacgacagaactgcctgggctcagctctgtgggatccacagagacaaacctgggggtgggggtggggtgagttggggatgggttcggaaaaagtccaagtgagaatcactagaagctggctattaggaggggcgagaagtggggatccttggtagagagatgccaggagaaaccgtggcagaaatgcgcccagggtggagcgctggtgctggtgggccactcgggccccttttccatccattatttctgaagagaggccagctggagtttctacaaaggctgctctgctccagggaggcatccccccactccccagcactcttacctttgaacaagacaggttttctagaaagacaaaaaatattggctggttggaagaagagaggggccagctgccgctgtgaaatgttcctcgtttacagttgttgagtgtccctgcccttggctgtggtctgtcaagcaggtttgggatcagggggtcttttgcagctactttccagtggagggttcaatgagtgtttttctctgactgtatttttagaaaaaattatgatgacagttgttaggtctcaggcaggcaggcaggcagcacattccattacaaagttagcatgaaatcaatatgtaaataaccctttctaactggcagctatttttgaaggcagaacgcaccggatgttgcaggtttgttccagttcactttaaatacctctctgttctcagagcctgtgaatgtgctcacattgagaagagccttttccccttttcacttgatctttgcagcgtccctgatagtggtaatgccaccatgagctttgtcctcaaacctcctcctccatcatttaaaaatcagattgacaagacccgcaccaggctgggagtgttagttccccttcggcatggtcatttttcaaaagcacgggttgctccaggaagggtacaggcggcaaaagccgtggccatccgcggaaagaattaaaggagcgagaaagcccgagaggctgcgatcagggttgaatcagagattcaggcagtcactgccaaaatgcatggaagtcattgccaagacataaaaggtcagaggataccagccgtgagaagaaccaggttagaaccgtgactgcagctgaacaggaagaaacaggtctcaaggtactcctgagtgagcaagggcctgagaccgaaggtctttgcatagttccttgtcagtagtgacagttttcattgtggtttaattttgaaactagctgtgctgtgtgtatctgcatgaaaacagaaatacttctagaatgtttagtgtcagtcatggatggcgccacaatgcctggtgtgacatatggggtgtgcgtatgtgtacatgtgcttatttatttcctgaattcaaaggggcaatgaagttcaagctggggcctaatagtaatgattcc

SEQ ID NO: 1817 - DNA, 1579 bp, Artificial sequence
  DNA replication origin
gaaatcagtaatttgtccaaagatttgtcattcccatggctttccaggcagagcaaagcactggtcctgcgaaggcgcccccagctgtaagggaggcagaagcctggcctcttcagaggagacgatgagctgcttcctggtggctcctgtgtttgcattttttaaaagaggagggagctaaggtgaagatagaagggggctggggagaagagtaatggagggggggaaaggaggtgagagggagagggggaggaggaggggagttggggacgagggagagaacaggagaggagaatcagagctttctctggctgcttttggccggctggaggggtggaggaaccttcaggtaatgttatttaccatcaataggaaaaaggattactccaggcttctttccttacaacaatatgctaatcaaccccttgggcccacaagggtctgggaagccaggcagctgcctctgtcgcatctctaggagcatggccactgatttaatgagggggagggcagggctccgctgggctcctgggagtgggatcagacaatgactgggggtgggtggccgtcagggcagcgtggaagaagcgggtctgaccagggcgcctgcgtggagaggaatggcagcagccagggctccccaccacccccagtgctgctgcagggtcaggtgagagcagctgctcatgttctatttattagagagacagagtcccctgaagaagggtggaaatgtaaatattttaaaaaatgaatccgaggcttgagtcaagggcataaaggaagggagggaaagtgctgagtttggcaggtagaaaaaggcggggaggtcagaaaagggtcagagggttcactggcctgaagacccctttgaagtagttgtatcctaactgtgaccccagctcagagctggggaatgctaaggtgggatccctgcccacccttctggaagagaggccgtaagcttcactgctgaagaaaagaggaggctgtctggactccagaaagtgggcctcacctggccaaggaagctaaagagcagaggcagagggcagaggccctggactcagagcagaggctggggtatcatacaaggtcaaggtccctgcagcaaggcagggtcagggatggggtctgaggtgttgaggccttgagttagaaaagactcattattatgtgctcattcattcatttcaacattccatgtgtatttattaaactgttactgtttgccagccgtggtgctaggtgcaggatgagccaaacagacttgattcctgaagccttgaagcagaagcaagtctaggaggggaagtagacacaaatcaaataattgtgcacatccatgtgtgacgataaactatgctgagagccatgcaagaaaggagcacagggctttgatagcccgggacagaggaactggacccagtctgagaggtggggatgtcattgggagtgggggagggaaataatgctaagataatcaattcaaagtgataaaagggtaattcacaaggagaagcattgaccttgctgctcaaatcttgttggggatgcatgtgagtgtgtgggacaagga

SEQ ID NO: 1818 - DNA, 1114 bp, Artificial sequence
  DNA replication origin
aaacgcactgttggaggagtcagcctgcagtggtcctcgatgcctccaaatgggcaaagcaggaagggcagaaatatccaactgcatgtgaaatcagatccagggtcactggatctcgccgccccccgccctgccccctacctccttgaccccagcctgggctgaggacaccttggacatctggaacacaaattacagacactctaaggggcccttgatgacctgaacagcggtgtgctctgtaatccactgctgtaagtgtccaagggggagggaacttccttgaccacacccagcccatttcagcagagtagggagtgctagatgccacacatcctgccagacactcttaggaaactcagggtgccctccttaaatcccaccaaggagccccagcccaggctgctccctgccagagacaactagcccaagaactccagatgccccaggggccacttggctgcttggagggtgagtaaggatgggggcatcagtatttcctggtccatcaggtgggagagtctggcttggaggtgccacctgctaagagaagctgaaggtctggaatttaccaggaggaatttttagccagctttagaacagtgttggagagctgtgctttggagaaggggacccagtggcaaaagaggcagtgcccagagttaacgtcattgggatggtcagccagcaaaagccacatggataatggggacttggcccacataggacctgaggccccttcccttctattctcctagatctacaagaaccctctgaaaggatctgaaaagtacatgggaccaaggcttttctccaaaccaccatgcaggcatcaaccacaggaatgagaggcctgagctgagaccggcatccttactgttgagggagaggaggagggagagaccggaggcaaaattagagaggacccagccaggatggagaaagtgagattgggagaatgagacaaacggaagtaaagacagagaccgggagagagaggcagagagctggacctgggagagatacagatggagagaggcggagatggaaggagccgaagggaccagagagagcgtggacgggaggaagacagacacgaagaacttaagagggg

SEQ ID NO: 1819 - DNA, 997 bp, Artificial sequence
  DNA replication origin
ggcagaagaatttttcttggtacagaacaaaatgaaaagtctcccatgtctacttctttctacacagacacagcaaccatctgatttctcaatcttttccccacctttcccccttttctattccacaaaaccgccattgtcatcatggcccgttctcaatgagctgttgggtacacctcccagacggggtggtggccgggcagaggggctcctcacttcccagaaggggcggccgggcagaggcgcccctcacctcccggacggggcggctggctgggcgggggctgatcccccacctccctcccggatggggcggctggcctggcgggggctgaccccccacctccctcccggatggggcggctggcctggcgggggctgacccccacctccctccctgacggggcggctgccgggcggaggggctcctcacttctcagacggggcggccgggaagagacgctcctcacatcccagacggggtcgcggcagggcagaggcgctcctcacatcccagacggggcggcggggcagaggcgctccccacatctcagacgatgggcggccgggcagaggcgctcctcacttcctagatgggatggcggcggggaagaggcgctcctcacctcctagatgggatggcggccgggcagagacgctcctcactttccagactgggcagccaggcagaggggctcctcacatcccagacgatgggcggccaggcagagacactcctcacttcccagacggggtggcggccgggcagaggctgcaatctcggctctttgggaggccaaggcaggcggctgggaggtggaggttgtagcgagccgagatcacgccactgcactccagcctgggcaccattgagcactgagcgaacgagactccctctgcaatcccggcacctcgggaggccgaggctggcggatcactcatggttaggagctggagaccagcccggccaacacagcgaaaccccgtctccaccgaa

SEQ ID NO: 1820 - DNA, 935 bp, Artificial sequence
  DNA replication origin
tctctgcccggccgccatcccatctaggaggtgaggagcgcctcttccccgccgccatcccatctaggaagtgaggagcgcctctgcccggccgcccatcgtctgagatgtggggagcgcctctgccccgccgccccgtctgggatgtgaggagcgcctctgccctgccgcgaccccgtctgggatgtgaggagcgtctcttcccggccgccccgtctgagaagtgaggagcccctccgcccggcagccgccccgtcagggagggaggtgggggtcagcccccgccaggccagccgccccatccgggagggaggtggggggtcagcccccgccaggccagccgccccatccgggagggaggtgggggatcagcccccgcccagccagccgccccgtccgggaggtgaggggcgcctctgcccggccgccccttctgggaagtgaggagcccctctgcccggccaccaccccgtctgggaggtgtacccaacagctcattgagaacgggccatgatgacaatggcggttttgtggaatagaaaagggggaaaggtggggaaaagattgagaaatcagatggttgctgtgtctgtgtagaaagaagtagacatgggagacttttcattttgttctgtaccaagaaaaattcttctgccttgggatcctgttgatctatgaccttacccccaaccctgtgctctctgaaacatgtgctgtgtccactcagggttaaatggattaagggcggtgcaagatgtgctttgttaaacagatgctcgaaggcagcatgctcgttaagagtcatcaccactccctaatctcaagtacacagggacacaaacaccgtggagggccgcagggtcctctgcctaggaaaaccagagacctttgtgcacttgtttatctgctgaccttccctccactattgtcctgtg

SEQ ID NO: 1821 - DNA, 1449 bp, Artificial sequence
  DNA replication origin
gggggcgaggcgcccacgccccaccctcccgctgtggccgctggcgccggcccgagcgcgcgcagcccggtgcgcttcggcgcccgctgagcccgcgaacctctccgccgcgccatcagcgcagccatcagccgcgccgcgtgctgtcccgcgccccgctgctcgcggccgcgggccaccggcggtaataatgaggcacagcgccatgaccgcggccctcggctgcgccgccggcagcagcgcgggcgccgcattagcatctccgaagccttcctgtgtgttcttttgtgctcattttccagcccgaatgctcggcacatcccggaccgcggacggagccgcaggagccaccgcggccgaacgtagctgccctggttttagaaagagctgcgggctgcgggcccggctgtccccgagacctctgcctcccgcacggcccagccagatctctcgggggttgttggggtggggtggggcggggtggggtggggggcgacggaggggcggggagggcatgccaggaagaaagaagagcctgggaagggaaggcgacagggcaggcttcgccccaaattttgcacagagcaggatcttctagaacccagagaggccccttccgtccctgcaactctggcccgagcgcacaggccctccgcggagccagaaagaggtggccttgaatgctggctctgccacggaatgatgtgaggccctatctacaacctcatctatgtgtgcctcagtttccccgcctttataaatgaggctgaggctacatatctcaggagtaaacgcttgtaaagcacatatcttagtgcttgacacattatctaatttattcttcaccaaccctgagaggtgggtattaatactgtcaaagtaaatggtgttcagggggtgaagtgacttggcagagaccttgacagccaggaagctattgcactgctggagggagcagccaagagcagcggtcttcatctctaccgtagactaaggaatgcactttgtatatgagtacagtttcctggccctggaaggatctcagggacaaatggattcaaaggaggaggctggagaagacgcctgtacctggggaggcacctgttaaggagcttagaagccctgagattcccatgtgtgtgcacaaacttgcttccccagcatcagccaaagggagccgctgcctctttccgccccacaaactcctccacaaaccctcacacccgtcattcatgcgccaagcacctgcaaaaacctactgcaaagctgcaatggtcagacagtgtggcactagcataaggacagacacatagatcagtggaagagatttgagagtccagaagtaaatccttaacgtgtatggtcaattaattttgacaaagttgccaaaataattcaatggggaaagactactcttttaaacaaacggtgctgcgacaacaggacagc

SEQ ID NO: 1822 - DNA, 1425 bp, Artificial sequence
  DNA replication origin
cagcgcgccgctccgcggaaggcgctgtcgctggcaccctagcccacgcttccggggccccagtgaccaaagcaaggaaagagttccagaaagcagcccaggctcccctgtccggaacggagcgggggcttgctccgggcttacccggagcggggtccgaggcgtggcgctctgggctccgtgttggggtaggctccgccgggcgggggcgccttcagcccctcttgggcaatgccggccgcgcgcacagggcccggggacggtcggggcgagaccgcgtggggtgaaatccgcggcaggaggccgcctgactgtgtcctgatccggtccctttagacgtgacccatggtcaagccttctacctatctcccctctcctgctccagacctaggcatgtggagtctctccctagctgggagaggccgcgggccggtccctgcctgcctcagccccagcgacctccacccagaacccacaatggcaggtggaggcacccgcccatccccgcggcggcacctgtgggcgagcagagattggcatgtctcggaggttggcacacggatgatttgggcctcatcggagagagacatctgtgtgggcagaggaggtggtggtgctgggcaaaccgtgccttccctacatcagaggggaggtgggactcaggggactgggatcagtcctgttgtctctggagtgtgcaccgatatgaattcataggttcgtttcattggcccctttctttgggcctcagagtggtaggttctctgcctttaaggtctgacattacagtgctgggatctgcctgacgtgcaggggaggtctacaaaggaccctctcacctcccttctctattcatgcttcttctctggatgtggcttctttcttttctaggaggaaggggctcaattttgtgaatttgacctggcctacaggtcatctttgtgcactgggcagcaacagacctgaactgtgcttcagattctgagaaattggactttgtcttggcccttggaggtggggacactgaggcctagagggggaaggcctttgccaaggtcacttggggcatccagctttcccagtccaggactcttgttgctgccaggccttctcaaaagacatcctctagatcccaaagtccttgcaaagttctatactttgcattgcttttgaaaatcatctgaagctttgtccgagtgcatgggccattaggtcctaggagtagagttgggcactgaagggtgttgttcctcaggatggctctccaggccttgtcttccccggtctgggccgtacaggtcaggtcagatgaaggcagttggggactggtggtgtgaacatcccttgatcccatcagtagccccctgggaaagccacgtagtacaaggatgtgagtggaattggtatctgccacatgtccctctg

SEQ ID NO: 1823 - DNA, 1117 bp, Artificial sequence
  DNA replication origin
caacccctccgcccgccgccgccgcctcctcttcctcctcctccacgccgtagccgaagtcctttggaaacgaatcggccgcgccgtaactgccggcgaggggcgtctcctccgccccgtactgcagggacatggtgctggagccgccgccgcccgcgccctgacaggccaggccaggccgagccaggccgccgcctccccagtccgcctccgccgccgccgccaccaccgccaccgcccccggcagccgccacagtccggcccgccccccggagcccggctctcataggccccgagccgaagcccagccgcttattggccgcccgagctgctactcgagagcagcagggtaggtggtgccccgtcacgtgccggaatcacctgactcagagccgcggaggggggaggaggagtcacgaggagggcggcccggccgcgcctctagccccggctcgggccctcagccctccgccccggcccgcatacaacgctgtctgcaccgctcccctgccttcttccgggctcccagagcaccgctatggagatgctctcccggcatttgaggaagaattgattgtcctcatcctgcaactgtacttgcccaaccgatatttattgatgcctgcagtgtcctgggtgcctaccaaggggcacagaactggatccgacgcagaccctgcctgccttcaggttgcttgaagatgaacagagagatcggacctctgcgtaagtaacctcgctacgaaatattatgtgggaaggtcacggataaataatgctcgggagttgaatgagaaagcgtctgagcagatctaggtggatggatagattgggatgtgcaaaggtatgggggagccagccacactgagggcaaacctcaaccaaggcagagtcatgggtcaccgtgatagtttgttctagcaggtagctggaccctgatgggaaagcagatgcagccaagctagaacatcttatcttctttcttcagtaagtcgccgatagtggatactgctgccacttcaaacccaacgggactcaatttgccctccttcccgccttgtcaaagtctactctaggaattccatcccccatagaacactgcctcttctatgacctc

SEQ ID NO: 1824 - DNA, 933 bp, Artificial sequence
  DNA replication origin
tggggccgggcagaggggcgcagcgccgccgcttcggggagccggggctcagcagcgccgcctcgaactccatgggccgcttcagcgtcgccccgcacgccatgccgctgaggggccagggaccgggagcggacgcggcggtaagtgcggcccaagaggctcctcagccgggctcgccagccaagccggctccaatggcgcctccagcacccggcagcggcgctggccccgccttctgtgacgtcacgggcgcacaccatcgcccggcagaggggggcaggccggaagagggtggctctgcgaggctggtcagtgccggcccggcccggggcgccccctgctgaagaaatggaacggtctgggcggagagcgtggtcaccaagcaacaccgggaaggcccccacccccacccccgcccctcccagggtcccatcccccccgctttggggctgtcgcgcccgggtggcccctaaggttttcgcacctgcgctgcgcgggcgtgggggaggggagagcttgaaggggcctggtgaggggccatgggggtctggtgactccaaaaacctccttctaggccgctcttgtccccatgataaaagggtgattgttaaaggtcatcaagggcattccgctgagccctgggaagtctgcacttaaacagaagcgagtattggaggatgggctttagcaagtccatgaaccccatgaaattatttgcagatttgtggggtgggagcgagggtgggggtgtttgtgggagtatttttgagatagctgacccataccttaagcagctcatcaaagggatatgttactttaaaacgttgagaacctacaaaaagcacccactggcttaaaccgtctaagaatggcttcagagtgttaagaacttcagctggtagctgatttgccattcttcccatctgacttggc

SEQ ID NO: 1825 - DNA, 1520 bp, Artificial sequence
  DNA replication origin
gtgcgcccgtgacgtcacagaaggcggggccagcgccgctgccgggtgctggaggcgccattggagccggcttggctggcgagcccggctgaggagcctcttgggccgcacttaccgccgcgtccgctcccggtccctggcccctcagcggcatggcgtgcggggcgacgctgaagcggcccatggagttcgaggcggcgctgctgagccccggctccccgaagcggcggcgctgcgcccctctgcccggccccactccgggcctcaggcccccggacgccgagccgccgccgccgtttcagacgcagaccccaccgcagagtctgcagcagcccgccccgcccggcagcgagcggcgccttccaactccgggtaacctgccctgctctgggtttggcaggaagccaggcccaggcattttttggggggggtggtgggggagggttgggaataccaggccagtttacccagggaccccttctttgccttgagaaaagggaactgggatgccgctgggcctggttgcttccggtgatgggaggcatccgggaggggtaatggggccacagggtcggttttaggttttcctgggggaggagagcctggaggggtggacaccaagaggaagatgggaatacctctggccgctccgggccctccctgtcgctgaagcccctccttcctccgctggccgggtctgcaccgagcaaccctgcagatccagtgggccatggaaaattggattctactcacgaacctggcctggagggcgggggtgggatgggggcgggttaccgggaaggggcgcgagtgcgtgctgtttagccctgtagggagacatgatttccagaagtctttaggaacccagaggccgccgcaagagtcacggaatccgatttcaacctgataatttctaagggactggccacgttcttttattatatggctattgcctcgtaccatatatggcttgaaatcggtagatcattagctagaatttgagaatcctacgacatacggaggttctacagaactaagaatgtaactgtccttaacagggactctccttcagtaaggcgttccactttgtccaaggaaaaggactggcgttacagtagacacctcatagcgcaggagtagaggggagggtgcttcagcattaatattctgcgattttaaaggacttccggaaatgaggggggcgtctcaataatggatttgggcaagtcgtttctttgtgtgtttttctattcctcaagcttaagcaaaaccttaggctcaccgtaaaatcatcctttccaccccttttcagtagcagtgccttcaggtttcatttcctccttcctctgcatatcgatccacaatgcaaattgcaggccctcatcctcacaccaagattcctacacccagctaaagctgtcccagacttcatatccttaactcgagttcacctttttaatcctagaattcaaaggacttatgaactgtgaccatatcttacctagtcagtctcttacaca

SEQ ID NO: 1826 - DNA, 1493 bp, Artificial sequence
  DNA replication origin
ggcccgcactgccgctgtgcccgcgcctgtcaagccgcctgtccgcggccgccggctgccgggagctggggcgcggccgccgggggcgatcaatcaccgctccccagccgccgctgcgcatcccgcgcagcgggcagggcgcctgcatccaaccccgcgccccgcgccttaccctgggagccgaaggaggaagaagacgggcccgtggcggcagcgaaggcggcggcggccgggcgcgccccaggctggagcgcagtcgaggggagcgtggcggagccgaggggagcggctcccacaatggccgagctcgcggcgccgagccccccgccccccgcgccctagcggcagcggctgaagcagagccggcgcagccgcccaacccgctcccccactcccagcgccgacgccgccccccgccccccgatgcgcgctccccccgccctgcaccccacccctgcgcttccgcccgccccgcgcgcccctgccagtccgtcgcccggcgccccctcctcactgaccccgcgtcctctggccgcccccaggccctccctcggtccctcccctctgcaactcctccctagtggcctccggtgtcccccgcaggccaaccacacccccaaattctccgccctctgctctgcgacctctccgccccggccccgcggccgctagctgaccctgggccagctcagccgacccgcccccttggagctcctcaccgccccccagtcgctctctcaggctgccgggctgtccttctgcctggcccctggttctcaaaccacccttttccatgcccacccctctttcgcccgtttcccttaaacccacattccgtccccgcccttggcgctcttgctccagctctcggagagcgtcctgcagatcctgcgggtcctataggcccacctatctgctgggcttctggaactgaatgaaggagggacccaaagaaggcctcatcttccccgcagggtaaagagcagaaaagaaccaggccccaatgagggaactcagtctctttagacagcgctagccccaagtggagccttgggagatgctttatccaccgaggaagcatttattgagctccttctgcacacacgacctaatgatgcacaaaacgaggcaggagtcccttctatcctctcctaggacagatacgtgaatgtttccagagaagtaatgtgtctaaagtcattccacttagtaacctgcgtagcaacagctaccatatgggcgtgtctcctggtgactgtgcaaggcgctttacctggatcatgccaaatccagtcctcacaaccctgttcattcattcattcattcattcattcattcaacaaatacgtgctgaacatctacccggtgtcaggccccatgcagggtactgaagatacagtgtgagcaagatgcatttcatccctgcctgttgaccatgggctcacagttcagcaggaaagatggatgcatcccatgaggcagcataatgatct

SEQ ID NO: 1827 - DNA, 1223 bp, Artificial sequence
  DNA replication origin
tggggagcggtgattgatcgcccccggcggccgcgccccagctcccggcagccggcggccgcggacaggcggcttgacaggcgcgggcacagcggcagtgcgggcctcgcacctgcagcccccgcggccggcgccggggagcggcgaagactcggagctggggtttcccctctgcgggcgctgccagggtggaagggaggcgtgttccccgggaaaatgggacacggagccctgcaggggccgggcgccggaccttagggagcgggcagggctgggcggggaaggtcgcttcccggccccagggctcggccgctggccccagcgccctgtcggtcctcggtcgcgcgtccccgctctttgtcagccacgcttggcgggcgcgcggacccacccgcgccgccccaggctcgcgggcgcgcccctcctccgccgtggggaaacgggtgggggccaggtggggagggtcgcagggggtgagagcacctggtgaggtgcctgtcgccgaccggcctgcggcctagggggtgggctggggcttgggcgggcactcctgtgagtctcggggattgatggaatgacccaggtggccgagggtcgggcgggagcccggaggtcaaacaagtgtttgtgaggggccggagattgacggggtagagcccagaagggacgctttctccgggaggaggccttgggagagccggcctttgtagtgaaatgggcgtcttggagaggaatgggcggttctgggatgaagcaggtggtctgagaggaggggcatttttcctgcccccgagctgagggtagggatggaagcttggcctgagtttcccagaggttgaggctgtcacttcagcacctgccctggcactagaaggtaatgggaggaggggtaagtgctaagataaagggcaaagctgtgccaggacctgggtcctttcctttctgcttcctgtggctagatcccttctagatgttctttgggaagagggctcacacgctgctggcacaaggggtgccctggcagggaggctctgctgcccgaggctgcctacaggcctcctacaccatttttatgtttcttttgttatctctttgaattctgtgcctatggtggggatctgccaatgacccaggaggctgtctctgccccttgctgcctctaggctcagattcgagaatcctggaggagctgtggccacagacccattgtgtccagccatgta

SEQ ID NO: 1828 - DNA, 971 bp, Artificial sequence
  DNA replication origin
caaagctgtgccaggacctgggtcctttcctttctgcttcctgtggctagatcccttctagatgttctttgggaagagggctcacacgctgctggcacaaggggtgccctggcagggaggctctgctgcccgaggctgcctacaggcctcctacaccatttttatgtttcttttgttatctctttgaattctgtgcctatggtggggatctgccaatgacccaggaggctgtctctgccccttgctgcctctaggctcagattcgagaatcctggaggagctgtggccacagacccattgtgtccagccatgtaggctacctcgctgtctctacacagccctgtgagccggtattccctataagggaaaatcaacagctcttgccctccctggaccctacagccaaagtcaaagctgggtacccaggttggctttgcggcctgtaggaaggctggtagctgaaggcacataccatttgtgctctgatggagcccttggggtggtgggccatgtgtagcagatggttctgggaagtgagcttgacctggctgagggaaggctgcccagtctggctggtggagcccagctggccttagagcaattgtattttcactcaactctctccactagctaaactgaccagaaaaaatgggctttctgtcccatccccccaccccatcctcatgctgtgccacgtattcccacaacagcccttggaataagcaaatgaacatttaatctaatgcctgctgggtgccatgcatggcatcaaccagtactacatttgcatttgacaatgttcttaaaacatcctctgaggtggaatattacccccattttgcagatgaagaaactgagtctcagagaggtgaagtgacttgcccaagatcacagcaattgtaagtggccaaaccagaatatatacccaggtctgtcttacttcaagtctggtacattttctaatatatctg

SEQ ID NO: 1829 - DNA, 1774 bp, Artificial sequence
  DNA replication origin
ctcgcccggcccggcagtcgcgctccgctcctcagtccgctcgcacccggcccgctcgcgctccgccggtcccggctcgcgtttccgcgtcctcacccctcggctccgctcctccctcagcccgccccggcgcggctgcagcggcgggcggcggcggcggctcctcctgtcaggagcgccaggcccggcccgttccccgccccctctccccgccgcctccgggtcccggcgagtcctcggccccaggctgcggccggctgggcccgggctgcccacacgggtcccccaggggctgccgacccccgcccggcccggactggggcccgagccgaggggcgcgagaggccggcccacgcgggagtcccgctgggtgggaggccccgcgcgtcaggatgaaaggctgggccggccgaacggcagggagacccgggccggctccacagggcgagcgggagccccagtcagcgctgacctacgccgccgggagcgggacaaaggagggtttctccctggctggagagaaacccagcggggcctgtgcggctgctggagaaggacctggagaaactgaagggaaagcagagggcaaaagaccacgatgcctcagatcccagggctagacgcggtcagaacgaggacaagggcaagatccagacagggctgcagtgtagggccggaggacactgagcccacaaagaagcccgggaacaaagggttttccagaaacagaagaagctgaacaagaagtgacggggcagatccagcaccatgaagtaaaccaggccaaggagccagagcctgagaaatgacaacccagggaggcacgaaaacgggattctgaatgcaccatggggtgaataagaggagagacagggagacataaatctgtaggggatagaccctccagaattattaaactgtgacagccatctgaacagagagacagagatcaaaagggagaaatgtgggaacctgagacggaaccaggactgttagggaacaaagaaaggactctggagcatagctggtcagggaagaaaaggggaagccaattattctttgtcatcaggggaaaggaaagagtaaagaaaggaaactggaaaatatgggtagggatttattaggggccattttgaggacagagctcccaacatcatttgatccaacattcggttgtgtatcattcaatcccaatattcatggagtgcgctggagccatgagcagtgaatgaagaactctggtcaatgtaggtgacacgttgtgcccgccaccccccatttagcagttatcctcccctgttagcttgatttttcaggaggtctggagaggtggttgtgggtaagaagttacactggctgatctcacaataagggcacattagcaagtaaaaaaagaattcatgcaacactgagcaaccaaaattgggacttgggcttccattccagttcccattctcaagagtttgaaggagaaacttcttaaccccaggctagggaaggtgtctttgtaccttgtgagtagtgccaagtattttggtcaatgctcagcacattggtaacaagtaaaacaaatgacgcttttcgctaataggtgcatgctggttgtttccacaccacaccctgatcagaaatcaggtgagcaagtcattaatcatatcttttcccatcaagttttgctggcctgcccaagttgtgggcatgaagatcatgcagggaagggcctgaaagaggacagggaggatccttagacaaatgctcatttccttccagttta

SEQ ID NO: 1830 - DNA, 1306 bp, Artificial sequence
  DNA replication origin
gggaccggcggagcgcgagcgggccgggtgcgagcggactgaggagcggagcgcgactgccgggccgggcgaggcgggcggacggcggagagcgagggcgccgtcgccgtctctgagacgcacaaagggtcgaggctggggccgccgccgcctcagcgcgcgggcctggaaccggcagcccccggggctcggcgagaaggcggtgcgggcggccatggccggctacgtgccgggtcagcagccggccaaccgcagccaggagaaggagttcgtgcaggcgtacgaggatgtgctggagcggtacaaaggtagggccggggactggccggcgctgaggcccgcgggccggcgcagcgtggccttcggagccggtcggctcggcggctgcaggtggggcggccgggcggggtcgcacccaccgcgcggggcttggccctgagctgctgcttctcggggccagtttatttacagagttgagataagccttcggaaaccgcccccggggcagtcggcgcgctcagagcgccagttacatgatttgccctattatccggccccagctggaagaaggcgagacaaggcgctggcctggagaccggccgccgtggggagttgctggggaggaggaggaggaggagttgggcgcgggagaaaccacccgctctgctctgggtgcgagcttcctcccagaggggctcggacctctgtgtgcccgcggagagtccctccctcgcccccttttgtctctttgagtctcggatgagtcgcgtggaagccgaggttggaaagcaccttggtgtcttcggggtggggtgggcagcggtgtgggtgagtgtgcagtttttggtggcgagaccttaccccctccatctccccgggggtctgggcctgctggaggtaggggtctgtttttttcctcccacataaagatttgccttggagctcggatttcagccctgaaggctctcttgcgagacacttctgcaagttaatgcctaatctgcgccttgggtgtatggggagaaagttttgacagacaagagggcctgtggactgcatttccctaactgctgtaggtgcccctgaatggaagccagggatgcgtggccttgggaggcccttgccttgatctttaacatccggttctgggagtttgctttggctggcagttatgctttccacagacggggagattttcccagaaacgacacaggcagcacttttccccattttattcagctcgggcccttgtgactaggcccttagtttctttttatctgaaggagaggaaacttcagcccctatg

SEQ ID NO: 1831 - DNA, 951 bp, Artificial sequence
  DNA replication origin
aggtgaggagcatctctgcccggccgccccgtctgagaagtgaggagaccctctgcctggcaaccgccccgtctgagaagtgaggagcccctccgcccggcagccgccccatctgggaagtgaggagcgtctccgcccgacagccaccccgtctgggagggaggtgggggggtcagccccccgcccggccagccgccccgtccgggagggaggtggggcggtcagccccccgccaggccagccgccccgtccgggagggaggtgggggggtcagccccccgccaggccagccgccccgtccgggaggtgaggggcgcctctgcccggctgcccctactgagaagtgaggagctcctctgccaggccagccgccccgtccgggagggaggtgggggggtcagccccctgcccggccagccgccccgcccggaaggtgaggggcgcctctgcccggccgcccctactgggaagtgaggagcccctctgcccggccaccaccccgtctgggaggtgtgcccaacagctcattgagaacgggccaggatgacaatggcggctttgtggaatagaaaggagggagaggtggggaaaagattgagaaatcggatggttgccgtgtctgtgtagaaagaagtagacatgggagacttttcattttgttctgtactaagaaaaattcttctgccttgggatcctgttgatctgtgaccttacccccaaccctgtgctctctgaaacatgtgctgtgtccactcagggttaaatggattaagggcggtgcaagatgtgctttgttaaacagatgcttgaaggcagcatgctcgttaagagtcatcaccactccctaatctcaagtacccagggacacaaacactgcggaaggccgcagggtcctctgcctaggaaaaccagagacctttgttcacttgtgtatctgctgaccttccctcc

SEQ ID NO: 1832 - DNA, 1809 bp, Artificial sequence
  DNA replication origin
atccgatttctcaatcttttccccacctctccctcctttctattccacaaagccgccattgtcatcctggcccgttctcaatgagctgttgggcacacctcccagacggggtggtggccgggcagaggggctcctcacttcccagtaggggcggccgggcagaggcgcccctcaccttccgggcggggcggctggccgggcagggggctgacccccccacctccctcccggacggggcggctggcctggcagaggagctcctcacttctcagtaggggcagccgggcagaggcgcccctcacctcccggacggggcggctggcctggcggggggctgacccccccacctccctcccggacggggcggctggcctggcggggggctgaccgccccacctccctcccggacggggcggctggccgggcggggggctgacccccccacctccctcccagacggggtggctgtcgggcggagacgctcctcacttcccagatggggcggctgccgggcggaggggctcctcacttctcagacggggcggttgccaggcagagggtctcctcacttctcagacggggcggccgggcagagatgctcctcacctcccagacggggtcgcggctgggcagaggtgctcctcacatcccagacggggcggcggggcagaggcgctccccacatctcagacgataggcggccgggcagagacgctcctcacttcctagatgtgatggcggcagggaagaggtgctcctcacttcctaggtgggatggcggccgggcggagacgctcctcactttccagactgggcagccaggcagaggggctcctcacatcccagatgatgggcggccaggcagagacgctcctcacttcccagacggggtggcggccgggcagaggctgcaatctcggcactttgggaggccaaggcaggcggctgggaggtggaggttgtagcgagccgagatcacgccactgcactccagcctgggcaccattgagcactgagtgaacgagactccgtctgcaatcccggcaccttgggaggccgaggctggtggatcacttgcggttaggggctggagactggcctggccaacagagcgaaaccccgtctccaccaaaaccagtcaggcgtggtggcgcgagcctgcaatcgcaggcactcggcaggctgagtcaggagaatcaggcagggaggttgcagtgctagccatagcttttatttaacacaccctaaattgttaagtattttcactcatgtagccagttgttcaagttaggaacctatttgattcagtactgcctataatctctcccttgttaccaagtccagttaatcacttgtagctcagaaagattgcatgcatctgtcttctcttctccatctccatatcgctgcttttgttcagggcctctgtgtctgttgccttgaccattataatagtttcctaataaagttttctataataacaatggtagtaatagtatcttgaagacttcctgtaaatcagacgtattctctctctgtgtgtgtgacagggtttactctgttgccaggctagagtgcggtggtacaatcatagctcactacagcctccaactcccgggctcaagtgatcctcccaccacagcctcccaaatagctaggtttataggcacatgccactgtgcctggctaatttttgtgtgtgtgtttgtagagatggggtcttggtatgttgcccaggcttgtcttctactcctgacctcaagtagtcctcccaccttggcctcccagtgtcttggaattacaggcatg

SEQ ID NO: 1833 - DNA, 1574 bp, Artificial sequence
  DNA replication origin
gggcggctctcctcccccttccccgcgccgccgcgctgcgccgccccgcccgggcagccccctggaagccagggagcgcgcgacgcggagagcacaggaaggaggacgagggcgggggcggggcccggcgggggcggggccggggagaggagcgactccgagagtggagggagcggtggagaggattggaggctgaggcgccgaaggaggggcttctgcgggattcggagcgagagacccgggacgccagccgttcggctcccgcagcccacgcccaccgcgccccggggccagaggggaacgccccgcccccggagagggcgcaaggagaggaacggaacccgcgcgagtctgggctgcgcggcgcaaatcccctgacaaaggaaagccccgccctcctcccgctggcccggcccctcccgcccctgtctcgctccaaccggcccggctccgagcccagcccaaaggcgaacgaatccagaaagggcgcccgcgctcccccagctagccggctctggcgacggccactcgagttcccgtgtgccggcaggtcgcgccggctggggtaggccgcctgcatcgctctcggctccatctctgccgccaaaggctgtccctgctccttccagtgtcacctttagcgcgccccttgccggaccgaagaacactccagccttaaacccggcactttcccggtgtcccaaaggaattcggtcacgctcagagaccaaagttattggataactctaggcacattctaccttccctctcccccttctcaagtatatcaagtcctggtcaattctcccaccaggatttctctgctcacagacctgagtggtatcaatgacggaagaaaatggggtgttgggggaggtggggatgccaacagctgagccctacgaccaaacacctgggtcctttatagttgcgcacagccaaggaaacctgagcctccttggaccagatgaaaagcatgggtatttcaaatctcaaatagaaaacactagagaaaagtcgctcacaatcccgtcgtccacggcctttggcttttagaaaagccacttggtcacctggtgactgttaaacaaagaaagtacaaagggcaacccaggaaactgtccaccagaggcagctgcatctctgaacgggtccaatactctgttctatttgtgatggccattctctgattttatgaaggaaaaaaacatctattaaaattcggaatctctgtcggaccatgtggtcaatatataccgcaaaacttatggaaaagttatttctatcctttacacaaacagtaagtgaaaccaacacctggtgtatgaagatctggcactgaaaccttgagctgagccttaggcttacttagggaatcagactggtccttggcaaaaatgagaagtgcgctgaagcctgtaatcggaattaggcaactaaaagacctttctctggtaaaatgctttacacttcatttctcacttcaacaacggctgctgatcaattctacccactcaaatccaaaagactctgcccatctgtaaactgaaaggggtggggaggccgactaggtt

SEQ ID NO: 1834 - DNA, 1221 bp, Artificial sequence
  DNA replication origin
cctattttctttataaattacccagtctcaggaattcctttatagcaatgcaaacggactgacacactgagcaatgaagaaacagtcaacaaatggtgggaaggcagtcctggaagagggtgcaacccaaacagagacagggatgcctgacagtgctgtgaccaggacccctccactcactggctgggcagaggatgcaatcagaggaatggcaagaggcagggttggagaggcaggcaggagacagatcacgaaaggcttctgtgtcaggctaagggttggccatttattctgagagcaacagggggcagctgaaggatttcgatccaggtaagagacatgatcagacccatgctttacagctatcactctggcttcagtgtaaaacatggagtgatgtgggggtgggggtaagtgtgggatggggagtggctagcagtgagaagacaggttaagaaaccattgcagcaactgaggcaaaacatggtgagggccagagccagggcaggaaagatggaaccaagaggtattttgaaagtgggactgacaagccctggtgagtggctagatgtgaggaaaaggaggaactccagacatcacaggcctctgaatgaggaaagggggggcagatctggaatggacaaatgacgtcaggcaagggggcaaagataaagtggaaattttagaactgcttctagtttactgtatgtctggactttaggagatgatagtgctgaagatgaaaaagatgcagaagctttataggtaatagctaaagctgttagaccagataaatcttagcagagtgaggagagcatcaagaatgagacgtcagggaacaacactgatgaataggcagggaagaggaaccagctaaaaaggctaaaaaggaacggtcagagagatcagaggaaaacacaaagattaaaggacacagaagtcaaaagggaagttttgggaagggatgaagagccagctaggttacatgtcaaacaaaataaagactgaaaaaactctgttggatttagccagtagaatgtgaccagaacagtgtcagccagaccacagggacttggggagtgatgggaaaaaaggagatgagacagggaacaagaagcgtagctgaaaaaggaggggaactctgggttggaaggacatgtctggaagctttagagaaaagaataaacagggagagactgaagacatagaggagagagagga

SEQ ID NO: 1835 - DNA, 783 bp, Artificial sequence
  DNA replication origin
ggcagtggaaactggagagcccagggggcaaacggcggaggctggaggggctggcaagggaggcaccgcaaagggcctcacaggggctagacgagggccctgggcaccagagattatggtgccccgccatgtggattgaagattaaacctcgaagcaagtgtataatgcccccaaaaatcacatttggaagtcatcacttcaataaaattttctacaacaaattcttaatctaaatagtcatttgctggtgccttaaacacacgcctagtttgtcttttacccaacaggtatatttccacactgctcgtaaattttctgcgcggtccccagagcgccccccatgaggcacctgcatcagctccgggcagagcagatgtggatgccaccgcctagaagccggggctaccctgcggactgggactgtcccataaggatactgagctaaggataatgcagaataaccgttgaaagtacccaagaccagagcttggaagcagagcggaatatggatcagagggagacaggagtcagggccctgcagttggaggcaggtacagcaatcagatgtgggggtgggtacaatgaccatgagtctctaatggtgatggggtggaggggcagaggagaaagctgtttaggaggctgaatccacagggctttgtccccatgtcatcttggtcagagtctcggaatctcctgcccacacccccttcactgtcctctctgcacgccccttttgaatccactgcacatcacttgaggccctagatccagcctgtaca

SEQ ID NO: 1836 - DNA, 1216 bp, Artificial sequence
  DNA replication origin
cggttggtccgggcgaggagcccgcagcctgggcgtcagcgtggtcagggccgtcgtggctcccgccgcgggcctcggcgcagagatcctaaggccgcggcgccgtcccggtcccgccagtggtgccacccggctgcctcgccgtggtgtgccgtggtcgccaccgggcccgacacgcggccgtagccccgtctggagagccgggcggtgccagccaagccccgcgggtggggcctgttcctctgcccgcagcagccggcccgggttccggccaccgcggcccctcaccgcctcctggcgccttccccgtggcccctgcatgcgcttctgcgggcgcctccttctcggcacctgctcggctgcttctccctgcgtcccccacctggctcccgcgtgagcccaggcagcgccccagtcgggccgcccccgccagccctagctgtgcgccctgcgtccccggtactgatccagctttgcggaggaggctccgcctcctgcctccagctgggccagaagctctggggcccttcccgagcactcgggagccacctgtgcacatcttctcagtccccacggccccggtgcaggcctgccaagagaaggatccccgcggaaacgtctcgactgactcagtccctttctgcacacctgctcttccctgggcgcgctctcgccttacttattcctgtgtggttcaggcgctgcggaaggagaaggcacctagactgcactgggaaggctcctggagttgacctggagcgccaggaaaggtcagtggaggaaagtgctccaggcagagggaatagcttgtgccaaggccctgagaccccggctggggagcctaataatggcaacagtcagcacttgccacgccaaggcatgttctgagtgtgtgtctcgtgtcatttctgtgatgctcgcacatcgttagggggtacataccactggaacctcctcttttaataaatgaggaaactgaggcacacggcggttaagggacttacgccaggtcacacagcagtggagctgcgctcgggcaggggggcagtggaaactggagagcccagggggcaaacggcggaggctggaggggctggcaagggaggcaccgcaaagggcctcacaggggctagacgagggccctgggcaccagagattatggtgccccgccatgtggattgaagattaaacctcgaagcaagtgtataatgccccc

SEQ ID NO: 1837 - DNA, 1461 bp, Artificial sequence
  DNA replication origin
ctgctcgccgaactcagctccccgttcgccgtcggggcgtccccgggcccaggggcggcggcggagctgatgtgcgcccgctgagcgcccccggcccgccatggccgcgcgccccggaccgctctggcttctgggcctgacgttgtgcgcgctgggcgggggcggccccggcctgcgacccccgcccggctgtccccagcgacgtctgggcgcgcgcgagcgccgggacgtgcagcgcgagatcctggcggtgctcgggctacccgggcggccccggccccgcgcgccacccgccgcctcccggctgcccgcgtccgcgccgctcttcatgctggacctgtaccacgccatggctggcgacgacgacgaggacggcgcgcccgcggagcagcgcctgggccgcgccgacctggtcatgagcttcgtcaacatgggtgagtgcggccgcccgcgcggggaccctcggagtaagctggctgcaggggaggggcgcgcatccgcgggcggtgccgggccctggccgaacggggaatcacagacggtggacgcgaaccacaggggagtgggaccgccgtggttagggaaggtctaagggtcatgggggccccctgggctgcggggtggtcaggagcagagtgtgggggactgtggactcccaggcgctgccttcaccctgccccagacacacccaggagtaagaattaggtgatgtctttgcccacctgggctgccccgggaagacagcctggtcctggggagacaggtgagtaaacagaggccgggatgctgtcactgtgataaggacagtactgaggagagggacaaagttcagcgtggaaacctgtggtcacatcatcggagtgaccagagctgagtcgcgtgccctgagtccacagcaggctcttccctgtgcggagcctgggtggggtgcggctgtcaggggagcggctggggaaggagcagactcagctcgctggggcagggactgtggccttgtcaccctgggccctgcacttagcatgtggcctggtatagggtgagtgtccggtcctgtggaatggcccagtgggcagctggacccactgtgttctcccaggcaaagccgggcttttcctgtctgcaaacatcttgtatcaaaccctggagctatttattccttaagatctcagatttttcttttccagtactaaactctttggtctatgctcgtgtagttactgttggtcaggtcccccgtctgctttgcctcctgtctgtggctagtgacaggccggggtctgggagccaaggaccacagctcagcccgaagtgggggagctgtggggctgagagcagggagtgggtacctgccccagccaccagcctccctccacagacagcatcattaattcttcatcctcccgacaaccctgataacagccacggtcttcatccccatctcccagatgaggacagtgaggt

SEQ ID NO: 1838 - DNA, 1125 bp, Artificial sequence
  DNA replication origin
gcaaagccgggcttttcctgtctgcaaacatcttgtatcaaaccctggagctatttattccttaagatctcagatttttcttttccagtactaaactctttggtctatgctcgtgtagttactgttggtcaggtcccccgtctgctttgcctcctgtctgtggctagtgacaggccggggtctgggagccaaggaccacagctcagcccgaagtgggggagctgtggggctgagagcagggagtgggtacctgccccagccaccagcctccctccacagacagcatcattaattcttcatcctcccgacaaccctgataacagccacggtcttcatccccatctcccagatgaggacagtgaggttcagagaggcagcgccatgcctaggacagcgcagcctctatgttgctgagccaggacaggcccaggaagcctgactgtccatccagggctcaatgagatgacatttctgttgtcaggtcaggctttcagggtgcagagagctttctgaggagtctgggctgaggaacacagggtactgagctgcagcaggtcttgtggggccatcagccatttgcttcctacactagagcagaagagggcatggccaagcctctgcttcccgcaacccagagctggtggtggaggcgagcagcagaaggcagccattcaccatcgctgagcgcccagtgccagggacaggactctagccggtgggatctgtatgctgcctttgtagttagaggacagggtggggatgtgggacagaggagaccatctgtgaagctggggctggggctctgtcatcaggacaggctgacactgggctcaggaccaagaagagttgtggatggagtcgtccaagaatgtccccagggagccgcccatcagaatgcgtcaccacccagcccacatccgacctcccctggcatcccctgggtcaaggcatgcacagcctggtggggctgttgctgtgaattgggcagggcccacccctctgtgtgaccttagggaagttcctcaccttctcagccttggttgctccttataaaaggaggtgcctggtgatctgtcctcagggttgttgtgtgattggtagaggggcaggagtagaaagcctgtg

SEQ ID NO: 1839 - DNA, 1800 bp, Artificial sequence
  DNA replication origin
agaccagctcagtgcatgtggggtcctgggttgagtcctggaccagcaaaaggtcattagggagaagttatgaaatccagatcgatcatggtgtttacttaataataaggtatcagtattggttcattagttatgagaaaggtaccctgctagtgtaaaatattagcatttcccagaggaaactgggtccaggtgtatgggaactccttgtgtagtttttttttctttgagacagggtttggctctgttgctcaggctggagtgcagtggcgcaatcacagctgacggtaacctccaactcctgggcgcgagcgatcctcccaccttagcctctgtactatctttacaaagttttatgtaactatcaactgttgtaaaattaaaacttaatatatgcataaaataaagaaccccctgacttcagtggagagagcagactgagatggacaagagtgaagtcagagagacgtgtgggggccccacagtggtccaggtgggcgctgtgagtgacttgttggtagcagtggagatggagaaagatgagtcgatttcagtgtcaggacatgcttatagctggcgaggaggtgagggaacaggaggaagcctgaatgatgtgtggttggagccagtggatttttttcaatagatttttctttttggggaaaagatagatgaagggcaggtttgaggtgggtggccaagggttctcttttggctggaatattactgacccccctgggatgttactgagatcactggtcctcatggaaatgccattacagggaccggtgagcgtgaagacccaggcgagggaggtgctggcatgtaagtggatttaaagcatgggatgggaccaggtcatctagggaaggagggtagtgatggagaagaaagagggcctggcccagagccctgggacctccaacatccagagacctcacaaggaggggccacagagagcccacagagaccagccagggagggagcaggacacctggaggatgaggtgatccagacgccagagtaaagtgtttccagaagcaagggtttgtcatttgtgtcctgctgtgggcactgaaggcaagaacagagaagtgaccaagggttttgccatcacagaggttgttgatgacctaaatatccgtggagtgtgggtctgactgaggaggtggagggagacaggcagtggaggcaggagacagctctttccagaacctttgctggggaaggggagcagagacatgggctggggctggagagaacccgggacaaggcaggtcctttccaggtgaggagacgcctgcacgctgctgtggtgatgcagtgattctgtgcagagggaagaaaactgcaaaattccgcacaagttggagcagggagctggagtgggggaggtggagagggcggggggatgcagaggacaagacggggggcctcttcagagcagggacccttcctgatggaggtgagggatagtgtccccactgtcgcagtgaggggtgaacctgagctctgggaggctgtagtggggcaggcactcactctccgggttgtcacaggattaaaggagggtgcttggcacagagtgatgcccagtgaaggtgttcatgagcgtcggtgtcacccagcggcgcctgctcattggacacttggtgtctttaatgagctggggaagctggggggaagcttgggcggggtggttggagtttgtgtctgaggctccactggggcaggaggggacctagcctgtgccctactcgcggagcctgacctcagctctgtcctgcgcccgggcctgtg

SEQ ID NO: 1840 - DNA, 1384 bp, Artificial sequence
  DNA replication origin
gctgcgcccgctgctttgccaccagtccccggccccgtgccaagttctacgcggacccggtggagatggtgaaggacatctctgacggggcgaccgtcatgatcgggggcttcgggctctgcgggatccccgagaacctgatcgccgcgctgctcaggacccgcgtgaaagacctgcaggtggtcagcagcaacgtgggcgtggaggacttcggcctgggcctcctgctggccgccaggcaggtccgtcgcatcgtctgttcctacgtgggcgagaacaccctgtgcgagagccagtacctggcaggagagctggagctggagctcacgccccagggcaccctggccgagcgcatccgcgcggggggcgccggggtgcccgccttctacacccccacgggctacgggaccctggtccaggaagggggcgcccccatccgctacaccccggacggccacctggcgctcatgagccagccccgagaggtgagggagttcaacggcgaccacttccttttggagcgcgccatccgggcagacttcgccctggtgaaagggtggaaggccgaccgggcaggaaacgtggtcttcaggagaagcgcccgcaatttcaacgtgcccatgtgcaaagctgcagacgtcacggcggtggaggtgggggcttccccccagaagacatccacgttcctaacatttatgtaggtcgcgtgataaaggggcagaaatacgagaaacgaattgagcgcttaacgatccggaaagaggaagatggagacgctggaaaggaagaggacgccaggacgcgcatcatcagacgcgcagctctggaatttgaggacggcatgtacgccaatctgggcataggcatccccctgctggccagcaacttcatcagtcccagcatgactgtccatcttcacagtgagaacgggatcctgggcctgggcccgtttcccacggaagatgaggtggatgccgacctcatcaatgcaggcaagcagacggtcacggtgcttcccgggggctgcttcttcgccagcgacgactccttcgccatgatccgagggggacacatccaactaaccatgcttggagccatgcaggtttccaaatacggcgacctggcgaactggatgatccctggcaagaaggtgaaaggcatgggcggtgccatggacttggtgtccagtcagaagaccagagtggtggtcaccatgcagcactgcacaaaggacaacacccccaagatcatggagaaatgcaccatgccgctgaccgggaagcggtgcgtggaccgcatcatcaccgagaaggccgtgtttgacgtgcacaggaagaaaaggctgacgctgagggagctctgggagggcctgacggtggacgac

SEQ ID NO: 1841 - DNA, 881 bp, Artificial sequence
  DNA replication origin
tacagggcagcaaacaggcactgtgctctaggggaggctgtcggtgggcacagaagcaaaccaaccgtggagttgacacctcctgtgaggaagagcagagcagccgtgccgtcagtggagtgagactgggcccagcctctccacacaaggaggggcacgtcagcagctggaggaggaatgttccagaaggagcaagtgcaaggccctaagacaggagcaggctggccctaagttcagggccagcagggaggagaggggctgggtgcagtgaaggggaggagagtggagggaggtgatgccggggtgagccaggccagctcccgtagggcctggggttccctgggaaggagggtggattttattccaagcaaccccagaggctgtcagaggtcttcagcaaagcagtgtcctggtctgcgtcaccctccagaaggacctttctggcttggggaggctgatggtcgcgggagtggaaggcagaggagcaggggatgagtgagggctgctgtggtcacctggcaggtgatggcagctcgactgggcaggtggtccgaggcagcacggaggtggaggttgagccaggggctgctctcagggaagggaggaggcgaaaggagtcatccaggaggcctcccaggcgggagctatgatgtcagggcgggaggaattctatgttccactgaggcctcattagacccccaagtgcagaagtgggaaggggagcaggatccgcaagtctggagttcagaagagaggtccaagctgagccaggggagtggagaggtgcgggcacatgcagggccttgaagtgctgagggcggatgcagtcctctgggagaaggagcagcacaggagagggggcgaggcctggcctcccagag

SEQ ID NO: 1842 - DNA, 1769 bp, Artificial sequence
  DNA replication origin
tttagatctggtgtcacctcggctgggcacagtggctaacgcctgtaatcccagcactttgggatgccgaggcgggcggatcacaaggtcaggagatcgagaccatcctggctaacacggtgaaaccccgtctctactaaaaatacaaaaaaaattagccgggcgtggtggcgggcacctgtagttacaacttcttgggaggctgaggcaggagaatggcgtgaacctgggaggcggagctagcagtgagccgagatcgcgccactgcactccagcctgggcgacagagcgagactccgtctcaaaaaaaaaaaaaaaaaaatctggtgtcaccttaacagatctaaaggagatgtccttgtttccggacggccccttctttccttaatctggtgccggatggggtggggcacggtgcgggcttccggcggaagcgctggaagcaagatggcggccgccgagagggttcacaaagggtagggtggtgtggagcaaggcagggtcctcgcaggcagtgccaagattgagctgggggtgggcagagtgggcggggtgcggacccatggccctacgcatcctgggccaggtctcttgtggtgcttcacgctctcgacctgtgagtggtgcctgctagagctgcccagatcccttttccctaccccttctgaccctggacccagagtggtggttgcgatctgctaccgtgacgtcagccctcattcgttcgttccacaaactccacagctctggtccattagaggaaggaggtcccagaatagctgggaaattacgagaacagcctcactgcacgagttggtgaatgctgtgatggcgattgtatgatggacggtgatgttgaaaccagactggggaatgaccgccccatccggagaggtgagggtaaactttcgggatgctctgagtccagagatgggtttgaaagatgcaaagttaaccaagcagccaaggtgggagccaggctgttgcctgaatggagacaagcagcgagagtcaaaacccagagtctggccatacttagtatatgctatactaagaaatgtggatttttctccgttggccattggactgcttttgaagaataccaaccagaagagtaatataatcgtatttgtattttcttgggataacggaggagagaaaaagaaggcgatcccattcaggaaattgtcaccataaaccagggcaaaaaatgtaggtcagaagagggatagggagaggagtgtatctcacaagtggttttgttatacccagaagagtattgggacccctcccttcctctcctccctgtgctcatgttaacaaggtgttggagcaactgcaccaaaagtgtggagacattgattcagaatgctcttggtatctgcaaagggggtgaaggacagttctttgtgctacttttattccttttggaaacatcacagatattctgattctgctgtattatgaaacaggtgacactgaaaagtccctcttaagattcctgatgccaggaaaataggaaaaaattttaagtcatgagcattctgtgtatggctggtatataatgaatttcagggggatgtctctctaggtcagcatggtggtgatcttggagatggaataggaaggttctgaggacagcagagctaggatgatggtgtggctatgggttgaaatttacaaaaattaacaatctggctgggcgcggtggctcacacctgtaatcgcagcactttgggaggccgaggcgggcggatcacgaagtcagg

SEQ ID NO: 1843 - DNA, 1483 bp, Artificial sequence
  DNA replication origin
cggggctcgccgagtcggcgcccacaaagatttggtttccctctgccccggcggttgtaatcttaaaccgccggagcccgaggcctatatttatagagaaacgcgtgtccccgaggccgccgtgggcagcgtccggtcgcctcttaaaggatttttacccttcggaaggggattccccgtttaatttttttcctactttgattttttgaaatttggagcttcgcaccaggaccgcggagaagtgcaaagtcgcggggagggccgtattgtgcggagagccttttgtctgcggtgctgcggccgtgggagccggcccccgcctcccgtttccgtcccgtctccaagcccgccgactccagctcgtcctcgccgcgccggtgccacctgtgagccgcggcgcgggcccgggctccgaaggcgcccctttgtcctgcggcgggcccgataagaagtcctcctggcggggctcggggtggtggggggcggggagatgaacgctgcggccagcagctaccccatggcctccctgtacgtgggcgacctgcattcggacgtcaccgaggccatgctgtacgaaaagttcagccccgcggggcctgtgctgtccatccgggtctgccgcgatatgatcacccgccgctccctgggctatgcctacgtcaacttccagcagccggccgacggtgagtagaagctgtgcccacacgtgcgtgggagcccggaggaccccgggagtcgtcttctggcagggccctcctgccgaggagggcggcatcacgacagcatgttgccaccgaagctgggagcagggtgcggagattgagaacgcggacctggcatcagatgactcgagtttcaatcttgtttctaccacttgctaactgggtgaccttgggctacttattagtgttgctggtagtggggttggaaaccaaggagactgtaaaacaggattagagtgaagccactggcattccactgcgtgtggtccttgtcagtggggctgggctgttagagatccttgcttgtgcccctcacaggctggccaaaaaggcgggacgtttgaaacacaattccccgcgaaagttttacattgtaaagctcctgcccgctccgccacctttactaaccttgactacctgatgttgtgctgataaaggatcagtcagggcaggcaggaagcagggggaaggtttctgtgcgttaaactttcgcagagacttaggttagtgccacaaaagctgcgtgtgccaggccacctccttggtctgtgtgtttgccactggagtggagaagtgctttactctggacaaatggtatccaggctctgtgctgtagagtgtcgtggaggtagtttagggaagcgtcacttgaaaatctggtgtcatttgtcacctcagctgtaacagtgctttgcactagtcagagcccttttatttcatctaatctgaagaaaatgggactcctgagaaggagaacgaat

SEQ ID NO: 1844 - DNA, 1732 bp, Artificial sequence
  DNA replication origin
gtgatggttttagtgaacatctgtgggatgactgacttgttctcaccagcataaaggaaggcagaggacccgtgacctatgccttggtgcatagggtgagaatttctgaggctgagtccactgtctgattccccgctgtagttcccccacctaacatgctcaatggtagagtgctcactccctgagcagccttttccactttcaagtcactctagaaatgtctgtagtgcagagggatgagggcttgagaatcacacagtcctgtgccctgctatttactagctgcgtgatctggtgtaagttacttcacctctctgtgcttcagtttctttacctgtgccatgggcataataatccctaacctttgggatcattttgaggagtcaattcaatgggatgatagacataaagacacctgagacacctaagtataaatttccattccttttaccctggccagtgacagatattggtaaatgatcacagcatctcaggcagctgctaccaatcaacaagagatgccatgagaaacgaaccttatctgccacccacacagtatttcctctagcacaatcagcaatgtcacatacctgtttctcaaaggcagtggggaccaagcgtcgcaattcagaaaggctactgttgatgcggtctcgacgccgtttctctatgatctaaacaatcatgacaagaagttactcacaggtgtgtcatcacagtttccaaagtgccttgatggtcatcaactcatatttacccacacagtatttttgtgagggagatcaatctagtcttactttatggtggagaaaaccaaggcccagagaaggacagtgatttgcttaaggtcacacagcaagaaagcgcagagctgggagtacaactcagatctcttgtctcggtctataggggtgatattcaagatgtttaaccactggtacagcagggcacagccaatcacaatgaggacaccagccacggtgctggagcaggccctggaggcccgtgctgggccaggagggtgaccccgtcatctgtgaggtcatgagatggtttggggagtcccacgtgttgctctctctagctgcagggcccttccacccacacactctcattcttccctccaatactggtagcagaacaccgggagcaggacagatatgaccccattttacagataaggaaaatgagggctggaaggaagtggtttgcctaagggcttacagtcagtgagtgtcaggctgctctctgccagaccccaggtgtctggactcccagtgcagaaacacagctgcatcctgggaggaaagtggggctgaacatgatggacagatgacagcggcaagtggggatccttcttctgtcccctcccccaccccggcacactgagggggatgaaagttctggactcagagaggagacagaagataggaacaacaatcataatggcctattgtgtgtctgctattgtttagagcattacattaatgcacttaatctgtaaagcagccctttgaggtgggccctctcattattccagttacacaaaggagcaaatcaggctcagagaggttaacaggcttgcctggaatcaccctgatagctagtgacagagccgggatttgaacccaagcagttagcttcatggtgaaatttctgcctagggttctccccgccgccagactgcaggggattcatggcaaccctttgttggtcaactcagaggctgaga

SEQ ID NO: 1845 - DNA, 1383 bp, Artificial sequence
  DNA replication origin
agcagggtgctaggagagtattgagcaggggacactagtgggaggaggaatgttagaaaaggctccccagggaggtgccatctgagttgagatctgatgggttgtagaagttatggggcaaagggactggggcttggggtgatgggtgaaccaaagatggtggacctaggctaggggacagtgcatgcaactgaatgaaggagttggtgcattcataggctggggcatacagaagaagacggttgagtctagaggggttgacaggggccagttggaccacctgaaagatggtggccttgatcttaaaaaacattggggccagccatggtggctcatgcctgtaatcccagcactttgggaggccaaggcgggcagatcacctgaggtcaggagttcaagaccatcctggccaacatggtgaaaccccgtctctactaaaaatacaaaaattagctggacgtggtggtgggtgcctgtaatcccagctatttcggaggctgaggcaggagaattacttgaaccgggtggcggaggttgtagtgagccaagatcatgccagtgcactccagcctgggcaacagagtgagactacatctaaaaaaaacccaaaacaaacaaacaaaagttggggagccactgaggagttttaagtgagtgatatgatcagatttcaatgatcactctgcctgcagtgtggagataggcttgtagagagtaaaagagggtgtaaaaggacccaacaagaagctcttgcagtcacccagatgaaagatgataaaggcgtagcattgagagaagtggcggagaggaagaggacagacgtgagatatattttagacatagcgtgggcaggttttgatgaggtgggggtgaggaggaggaggaatcaaagacagcatcagctttccaccttgcagaactggggtaccttcactgagatggggaaacccaggggcagcaggagcaggtgtgggtgaaggccagcttgcagattcctgttcagatgtgtggcgttgtgtcttctgaaacggcaggggagtcaccttgtttgttgtttgttggtgcagtgtctgcccactggagctgagttgaggaagggaagggctggggtctggctgagtgcaccagcacccacccaggcctgaatagggccttagaagtgttggccaaatgaatgatgcctcagtggacccagcgaatcctcaccattctaagagagcttctgaagcagaaaacctgaagaagggttagcagttgggctggagattattttggtcagagtctgggcaggaaaagcccccccagggctgagcctcttctctgtaatgggagctcctggggtgtgagcaaacatccatcattcaaccggggcgcagagggaag

SEQ ID NO: 1846 - DNA, 1135 bp, Artificial sequence
  DNA replication origin
cgcggggcctcccagggcacctgcccaaggccacccagcgcgcggcagccgagacagcggagcagagccggacctcccagccgtcgatgaaggcggcgaccgcctagggccttcccacggctcggcggcgcgtcaccgcgggggcgagggggcgcctgggcgcccggagctgcggcgcaggaaagggccctgggaaagggcggtggcggcgcccccgaggcggggccggggcggggccggggcggggcctgacttcccgactgggagccttagccgcggggctgagaccaggcagcctgcgttcgccatgaagcgacccaaggagccgagcggctccgacggggagtccgacggacccatcgacgtgggccaagagggccagctgaggtaagggccgggatgcggggaccgagcaggcggagggcgagcggggtgggggtcggcccgacgggctcgccgagcaggcgggccagccctccagcaccgcctgggcagaggcaggtgagcgcgggggccacaggtgtcggcgtagggggcgtgtgcgggccgtgccgttacacgcacgagtgcctggatcctgcgcgctctcggtcgtgcagggctggggatgctggcagggagggagagttcagctcgggggatcaggtggctagtgggttatcatctatctgttgaagtggcctaggggaggccattggcaggttttccctggagatcttagaaaactctcatagactgatggtactctggcccctgtctggaatctgctgacgatgcagagtaaccccatcctttcccaattttaccctagtttggatgcagttttcatgtagtccacaaattatttcaggaagaagaaaatttgtcctcctttgagcaaattggagtttggatttagggacttagtattgaagaaaataataagcgacttgcaagggcctagactctaattccaatgttcctcctatcgtgcccccatactgccagtgtctttcagctcctggtagatagtctgacctgcttcaaacctgtcgaacaaactgcgcttgtatagttctgctacctcgcagttctgtaaactgtctaagcttcagtttccttatctgttaaatgagcatgaataatagaaccaact

SEQ ID NO: 1847 - DNA, 2003 bp, Artificial sequence
  DNA replication origin
accagagcagagctcccaaaataaacccgagcccgcgccagctgcagggcgcattctggggctgaggagctgcgtcccctcccagaggggcgccacgggtcccttcccaagagacttatgacccctcctccggggtaacccttcccccgtcccccgcatacccgtgcattgcttttaccgatttgggtttcttcttgggcgcgaggttgtcgtagaaaatcttggcttcctcccagaccggggccgcagcggtctccgctcctggcccgggctcgcggggctcctggggctcccggggctgcccaggttccatgctccggctctgacccggcccggccagagcaggcggcggcgtagacgcggaggtggctggggctgggctgcaggagggaggcgagtcccggcgagggaagggggcgggcagcggcgaggaggctgtgcgtgtgagctgggctccccgcccgccgggcggggggaggtcacactggccctctcggtcgcccgtgtgtcgctgccgctgctgctgctactgctgtacggtatgagggatagctgggctctccttccccgaccgacccacgccagcagccggttgggtggtgaggggggctctctggctctctgggtttgtgggctgcagcggattggggattgcgaaaatgatgttcttcgcaggcgctgcagggcgcggagacaggagaggcctgacaactttttttttcccccaggatagtgatccccaaaggacaaaatgaaaagctagccgctcccctcccaaaagctagctgcccatctttcctttaggagctaggaccctgggatcctgacgatgtccccttccctccgaggccagtccatccggcagacgggcaggaggtgatgcatggatggctcctctcactagcagaagcctgctcccagcgggagctcagtgaagggcccaacccggcagctcctccacaccacctaggaggggcccttgaagtccatgttgagaccaggctcgggtggtctcaggtcgagaccttggcctggggtggggacccaggccagagagactcccagggactctgaacccgaattcttgctggccctttggtggtcagcagagggcgcgcattcctaggcccccacctgcccagcttggggtgatttgttataggccatgaaggggctggatagagggagggcagaagaggggcctcggaactaccatcctggaattccagggtgttgtccctcttgatgcagagctctgtactagtctcagggtgcagacacaaatgtcacccatcccaaggtacaggccaggaagcagacagcctctctcagaggtgtgcatgggtgggtgggagaagcaggagaaaacactggcttagctaggagggcctctgactggggaggtgagggggctacagaatggagtgatcccctcagcctccaccaggtcctgggaggaataaaccaacccttgtgtgggaggaagggaaaaatcataataaaatgttaggattgggggaagtgtgtttagacttacttctagaagattgtttccagagatggcccaaaaacctcttccatcctgcctgtcctttggaaatgtgactttgacattcctcccattcagaggtggagtccagtctgagctggccctgtgacttgctttgaccaattgaatggagtagaagtggtgctctgtggtttccaagcttacgtcttaagaggccttgcagattccatttttgccctcttgggagccagctactatgtaaataagtctggactatcctgctggaaaggccacgtagtgagacagataggacctggaggataagaagctagcgacagcccaggtgactataggcacaattgacagacatgtgaatgaggccatcctggctgtcccagccccagctcagctcccagtggagtgcagctatgtgggtgacgccagccaacacaacctgaagcagtaaaaccttccagctgagcccagccaactc

SEQ ID NO: 1848 - DNA, 1343 bp, Artificial sequence
  DNA replication origin
caggcgcctgccacgacgcccagctaatttttttgtatttgtagtagagacagggtttcaccgtgttagccaggatggtcttgatcacctgacttcgtgatccacccaccttggcctcccaaagtgctgggattacaggtgtgagccaccgtgcccggccgcgcccagccaaatttttaaattttttgtagagactaggtgtcactgtattgcctaggctggtctcaaactcctggcctcaagctgtcctctcatctcagcctcccaaggtactgggattataggcatgaaatacggtgcccagcctggaaaaattttaaaacacataccttttcttgggtccccagtgactcgttcaagactgggtatatcataagcattctgtaaatattgtggaatgaatgcaatcttcccagcccttgttttaaaaaatcccaggagcgtctgttccctccaatttcttggcatggattggaggccctttgtaaccaaccatctgcctctttgacccagttacaagttattgaaggttggctcatgtctgcttcatctccatcactggcacagggcctagcacacagtcagtctcaataaatgctcagggaatgaatggattaatgaaaagccaaatgtcagtagaggatttctatttgtatagaggaaagagggagagaagctccctgctggggtggcccaagaaagccttgaggaagaaattgggagacagtgccaaggggacacacaaggaacctaccttgggtcccttctcaggacagaagcctgccaaggagggtgggggctgacttcagaaagccctaaatggcaaggagaggagtcaaggccttagtctgtgggcaggggagccatgaaaggtgtgagcaggaggggagaggatgaagactgtggcgtgctgcacggtcagtgaggaggagagctgagacctggaaggcgggagacccccggggctaggagaagaaacctacctgaatgcaggtgttgtgaggggagaggaggccccattatgggggagtgtcatgaggggaaggaacctgcaaccccgccctgtgtgtggcaggggagggggcagctgtggctgaggcagggcctttccctggacccagtcggaggaatccctctgtcccacaggccccgccatggggaagaccaacagcaagctggcccccgaggtgctggaggaccttgttcagaacactgagttcagcgagcaggagctgaagcagtggtacaagggcttcctgaaggactgccccagcggcatcctcaacctggaggagtttcagcagctctacatcaaggtgggcggccggcacctggtgtgaggg

SEQ ID NO: 1849 - DNA, 1282 bp, Artificial sequence
  DNA replication origin
gagggactcctaatagaaggggcctggagaatgtgtgggaggaggtagcctgtacctaggctggttaagaaggaatgtgtcttcagtgagttctaaaccaaccccgcccccctcaggtctcctctctttaatgtcctcttggttcaggatcctgtttttccataatcagccatagaaccagagtgtctcagtgccagaaggctgttcaagttcatctcacccagtctaccctctctgttatacctctccccattttcatgaaggatcagagaggggagtgacttggccaaagtcaaactttggctgtacaagatttgaacccagctcatctgccctccaggtatagttcactttagggccaagagcaatacagcccacatggcaccttggcaaggtccccacggagcagcaggaaggtgggagagagggagcaaatagtcatacaaattagaaagacatttgacaggcagaatgagaggatttggtgcctggctgtgaggggggagggaggaggtatggaggttggggccttggcagcaactggactgacggtatgggtggtctgctgggggtggtgtctttggttcatcctcccgccaggatgagagatgccaaatatggggcctctgcctagcactgggggccactggggagggctgtcgagactgtgaggagaaaaactggggaagggggattgtccccccctcaggtatgctgtgggctctgtcagcttgaggggtgggatgtggggacagtgtctggggacaacaaggagggagcgctctgtggagggggaggctgtctttgggggcaggggctccctgatgagaagtggctaggggctatccgtggaggtgggagtttgccatggtgctgggcagacaacccatatccaaacaggagggagggtgaccagcgcctccagctagcaccagcgccaccacacccccagatgtgtgtgtgtgcatctgtgtgtgtatgtgtgtttgcgcgcgtgtatgttgggggccatagcaatggttgttctcacctgagctggggataagtaggcggctctgcctccttctctgcacccatgggcctggactgaggtggggggtctcctgcccaggggtgggctcttcagttgctgccgcctaaggcggaaccacgggtcagggaggtgaatcagggcaggacatgaggatgggaagggagagtggagggggagggggccagggcctccgcccggtgggtttgttgccttgaggacccggtcccactcgcattacctgaggccggt

SEQ ID NO: 1850 - DNA, 924 bp, Artificial sequence
  DNA replication origin
cctggcccaggcatttctgggaccagctccagaagcctcgcccccactcgcggcaggtctgaccccatcctccatcgccccgcccagcccacctctaccttcgccgcgcggacagaagccccgcctctcaccgctgctcttcagcgtccgcgctccgattaggccaatccccagccgtccgccccgactttcgacagatccttagaagtccctgccccgcacgtggcccagcccggggatgtctggctccccttttgcccccagtttggcttaaaagggttccttcccacagccttgtgtcaggagctctcagacgccagtgcagcccaggcggccggcccgggctgtggggagacccccaagtgcggggaggaggtgttgccggggccctgaaagcttccagacccgctcagtgtaaaccgcctcgggtttgtgtcaacatccgaggccggagactggcggcggctggggaccggctccgtctgcgggacgggaaaacgggagggtggggaatggaggatccatggctaggcataggggtccttcgggggagaacgcgagaggcctcttgggggtccatgagaaaggaggagggcccgtctggggagggaccggaatgaagggccagaggggtggctggagggaacccacgactagcgcggggctaggtagaggctgggacttcgccacccataccgcgctctccgcgcgcaaccagcaccctcctctctgccccacggcgtgaggggagtggatgcgtggggaggggggacgcagagatgtggactgctgaccagccacctcctccctctcccacccagctcctccccagctcctctttggcccctcccaatttcgggtgggatatgggtgtgggggggggtctcatcttgtgactcatcccctcttccgcccccacccatg

SEQ ID NO: 1851 - DNA, 1041 bp, Artificial sequence
  DNA replication origin
cgggccctcctcctttctcatggacccccaagaggcctctcgcgttctcccccgaaggacccctatgcctagccatggatcctccattccccaccctcccgttttcccgtcccgcagacggagccggtccccagccgccgccagtctccggcctcggatgttgacacaaacccgaggcggtttacactgagcgggtctggaagctttcagggccccggcaacacctcctccccgcacttgggggtctccccacagcccgggccggccgcctgggctgcactggcgtctgagagctcctgacacaaggctgtgggaaggaacccttttaagccaaactgggggcaaaaggggagccagacatccccgggctgggccacgtgcggggcagggacttctaaggatctgtcgaaagtcggggcggacggctggggattggcctaatcggagcgcggacgctgaagagcagcggtgagaggcggggcttctgtccgcgcggcgaaggtagaggtgggctgggcggggcgatggaggatggggtcagacctgccgcgagtgggggcgaggcttctggagctggtcccagaaatgcctgggccaggctcgctgggggaggaacccgtggacgtcccttttctttaggacctgtcccgttgccccttgaaacggttttgctctaccattttcgaggctgcggactatgccttctctctgcggccttagcgggggctgagggctccaaggaacctgcagctgtaggagaaggcgcgtccttggcactatgggttggtgactcatgaaagacaggtgtttgaagctctaactctttcacttctctgataccttctcagctctgggtcttggggacccagagatgagcgagaaccccccttgctcacagttaaccataatccaaggcgtgaagaagtggggagaggcagcacaggttactagaagtggtatctgaaaccctaacattgactgacccaagttcatattgctaacattgagtctcatttttgccaatgattccatttacgaccg

SEQ ID NO: 1852 - DNA, 784 bp, Artificial sequence
  DNA replication origin
gtttcaccatgttggccaggctgctctcgaactcctgacctcaggtgatccgcccgcctcagcctcccaaagtgctggggctacaggcatgagccaccacgcccggccaagaaaatatagtttttttattttttccaactatttcaaaaggtaaaattcattcttagctcccaggttgtccaaaaacagacgcgcaggatggccaagcaccagagtttatcgtttgcccataataatcgggttgattcggccaaggtttccctcccccaacacggtgcgcactgggaagcgcgaggaccacgtcccttggtttaccactgcgcacctcacaaggcgcccagtgcatccgggtagcgggatgccggttggaccaacgcgagggtgggcggggtctaagagctaagcgttgggggcggggcgggacagtggggaagaggacgggtcgagtgctggcttccggcggaaaagcgcgcgagcaagatggccaccaccaagcgcgtcttgtacgtgggtgagcaggaggggttgctaggcggagtctgagtgaacgcgacccccaagggtcggggcgtggggtgggacgcatctctgaaccaggaggacggcgagctgctgtcaaggccgggtctctggcggtagtgctggcgatagctctggctgtgcttaaactccttccaaggtttcccactgtcctcaggaaaaagtgcagacttcttagcagtacgcacttctccagcttctttgctttgcttcccgattcgctgggtctcccgaaaaatgaccc

SEQ ID NO: 1853 - DNA, 968 bp, Artificial sequence
  DNA replication origin
agtgcagacttcttagcagtacgcacttctccagcttctttgctttgcttcccgattcgctgggtctcccgaaaaatgacccacttgcccccaaggttcaggttatttcacacctttgggcctctgcttttgcgactcccttgcagtgaacagccttgccacacacctcaggtgcgtgaacccgagacggaatgattattctgacttcctagcccgctgagctccagcgggccccgaggagcggtaaaggagtattatggcccttcggatcctctcgttcatttgttttacaaacattcagtgcagcgacggctcagccccagcccctgccataaaggaaggagttcccagactagccagaaaaaaagtggaattacctcagtagcacacttttgataagcgctgtagtgaggatggatcatgataatatgggcctggctgcgggacaaatgacccatccatctggagaagcgagggcaaattctggatgcggcgatgccagagctgatgagcaggagttagctacgtaaccgaagcagaggcaaggccgttcactgcaagggagtcgcaaaggtgtgaaatagcctgacacttgggggcaagtgggtcattattcgggagacccaggaaattaggaagcaaagcaaaaaagctggagaggtgggtactgctaaggagtttgcactttatcctgaggacagtgggaagcctttgaaggagtgtaagcgaaaagttacgggttcaaatttgcattttcctaagatcattctagttggctttgtggagttgatggaatggaggcagggaggtcagttgtgaagctattgcagtaatcccaggactagatgagagtctgaaagaagggcgaagagaggaatatttttcataagtatgggtgggcagagatgagagggggatgtttgtttacccaaagaactgaatggaagggtcctgtcccctggctagca

SEQ ID NO: 1854 - DNA, 1311 bp, Artificial sequence
  DNA replication origin
ttggaaaggcccagggatgatgaggacgcgtggggcggcccagcccagccaccctttatgccgtgtggttctcatggctgcatgtgtgggaggcacgcgggaaggtgactgcatctgcagctcccagactccatctcctctgcccttgcccctgcccctcaggggctcaactaaagtgagcactcgtaacctgctgggcagcaaacagacaggcgctgcgctctaggggaggctgtcggtttgttggtttgtccaaagcaaaacaaccgtggaggtgacgcctcctgtgaggaagagcagagtggctgctccatcagtggggagagactgggcctggcctctccacagaaggagggggccagtcagcagctggaggaggaatgttccagcagaaggagcaattccaaggccctaagacagcagtgagcttggcaggttcagggccagcagggagaaggggctgggtgcagtgagtgggaggagggcggagggaggtgacaccagggtgggcagggccggctcccctagggcctgggggtctgaatgaaggtgttttattccaagtaacccaagaggctgtcggagctctttagcaaagcagtgttctggtccatgtcaccctccagaaggacctctctctggctgctgggggaggctgggattgggggtgggggtggtggtggaaggtggaggagcaggggatgagtgaaggctgctgtggtcacctgacaggtgatggcagctggacggggcaggtggtccaaggcagcatggaggtggaggttgagccaggggctgctcccagggaagggaggaggcaagaggagtcatccaggaggcctcccaggcgggggctatgatgtcagggcgggaggaactccatgttccgctgaggccccattagaccccaagtgcagaagtggcgaggggagcaggatccacaagtctggagttcagaagagaggtccaagctgagcctggggagtggagaggtgcgggcacgtgcagggccttgaagtgctgagggcggatgcagtcctctgggggaaggagcagcacaggagaggggcggaggcctggcctcccagagactggggagggaggccagggtgtgggaggcagagcctctgggggtccgaagggccaaaagaagaaagtggtccttccaggctcccccttggggacctcactaagggcacaaacctggccacacagttctccttcccattatccccaggaggaagtctgagcccttggcctgggactccaggcccctcattagcgccttgcccacctgctgcacaccccctg

SEQ ID NO: 1855 - DNA, 1487 bp, Artificial sequence
  DNA replication origin
ctgtcccagggctgcgcccgctgctttgccaccagtccccggctccgtgccaagttctacgcggacccggtggagatggtgaaggacatctctgacggggcgaccgtcatgatcgggggcttcgggctctgcgggatccccgagaacctgatcgccgcgctgctcaggacccgcgtgaaagacctgcaggtggtcagcagcaacgtgggcgtggaggacttcggcctgggcctcctgctggccgccaggcaggtccgtcgcatcgtctgttcctacgtgggcgagaacaccctgtgcgagagccagtacctggcaggagagctggagctggagctcacgccccagggcaccctggccgagcgcatccgcgcggggggcgccggggtgcccgccttctacacccccacgggctacgggaccctggtccaggaagggggcgcccccatccgctacaccccggacggccacctggcgctcatgagccagccccgagaggtgagggagttcaacggcgaccacttccttttggagcgcgccatccgggcagacttcgccctggtgaaagggtggaaggccgaccgggcaggaaacgtggtcttcaggagaagcgcccgcaatttcaacgtgcccatgtgcaaagctgcagacgtcacggcggtggaggtggaagagatcgtggaggtgggggctttccccccagaagacatccacgttcctaacatttatgtagatcgcgtgataaaggggcagaaatacgagaaacgaattgagcgcttaacgatcctgaaagaggaagatggagacgctggaaaggaagaggacgccaggacgcgcatcatcagacgcgcagctctggaatttgaggacggcatgtacgccaatctgggcataggcatccccctgctggccagcaacttcatcagtcccagcatgactgtccatcttcacagtgagaacgggatcctgggcctgggcccgtttcccacggaagatgaggtggatgccgacctcatcaatgcaggcaagcagacggtcacggtgcttcccgggggctgcttcttcgccagcgacgactccttcgccatgatccgagggggacacatccaactaaccatgcttggagccatgcaggtttccaaatacggcgacctggcgaactggatgatccctggcaagaaggtgaaaggcatgggcggtgccatggacttggtgtccagtcagaagaccagagtggtggtcaccatgcagcactgcacaaaggacaacacccccaagatcatggagaaatgcaccatgccgctgaccgggaagcggtgcgtggaccgcatcatcaccgagaaggccgtgtttgacgtgcacaggaagaaagagctgacgctgagggagctctgggagggcctgacggtggacgacatcaaaaagagcacggggtgtgcctttgctgtgtccccgaacctcaggcccatgcagcaggtggcaccctgacg

SEQ ID NO: 1856 - DNA, 1571 bp, Artificial sequence
  DNA replication origin
tttttttctttgagacagggtttggctctgttgctcaggctggagtgcagtggcgcaatcacagctgacggtaacctccaactcctgggcgcgagcgatcctcccaccttagcctctgtactatctttacaaagttttatgtaactatcaactgttgtaaaattaaaacttaatatatgcataaaataaagaaccccctgacttcagtggagagagcagactgagatggacaagagtgaagtcagagagacgtgtgggggccccacagtggtccaggtgggcgctgtgagcgacttgttggtagcagtggagatggagaaagatgagtcgatttcagtgtcaggacatgcttatagctggcgaggaggtgagggaacaggaggaagcctgaatgatgtgtggttggagccagtggatttttttcaatagatttttctttttggggaaaagatagatgaagggcaggtttgaggtgggtggccaagggttctcttttggctggaatattactgacccccctgggatgttactgagatcactggtcctcatggaaatgccattacagggaccggtgagtgtgaagacccaggcgagggaggtgctggcatgtaagtggatttaaagcatgggatgggaccaggtcatctagggaaggagggtagtgatggagaagaaagagggcctggcccagagccctgggacctccaacatccagagacctcacaaggaggggccacagagagcccacagagaccagccagggagggagcaggacacctggaggatgaggtgatctagacgccagagtaaagtgtttccagaagcaagggtttgtcatttgtgtcctgctgtgggcactgaaggcaagaacagagaagtgaccaagggttttgccatcacagaggttgttgatgacctaaatatccgtggagtgtgggtctgactgaggaggtggagggagacaggcagtggaggcaggagacagctctttccagaacctttgctggggaaggggagcagagacatgggctggggctggagagaacccgggacaaggcaggtcctttccaggtgaggagacgcctgcacgctgctgtggtgatgcagtgattctgtgcagagggaagaaaactgcaaaattccgcacaagttggagcagggagctggagtgggggaggtggagagggcggggggatgcagaggacaagacggggggcctcttcagagcagggacccttcctgatggaggtgagggatactgtccccactgtcgcagtgaggggtgaacctgagctctgggaggctgtagtggggcaggcactcactctccgggttgtcacaggattaaaggagggtgcttggcacagagtgatgcccagtgaaggtgttcatgagcgtcggtgtcacccagcggcgcctgctcattggacacttggtgtctttaatgagctggggaagctggggggaagcttgggcggggtggttggagtttgtgtctgaggctccactggggcaggaggggacctagcctgtgcccttctcgcggagcctgacctcagctctgtcctgcg

SEQ ID NO: 1857 - DNA, 886 bp, Artificial sequence
  DNA replication origin
gaggcctgggtggggccggcttcatttagtgcaaacgtttgttccaggcttggtcccggggtgtagacagggccaagaggccctgcagccaggctcaccctgagccccgcagctggctggtgctcagcaggccccaggctccaaaccctgaactcccgttgcgcccccttctcggcccggctggtcctgggactcagagatgagacagaggagggagcctcctctgggaacttccaggctaaagggaagatggacattggacccaaggcagaaaagggccccagccctgcagggaaacctggtagacaggaacataaccgacataactgacggcatctcaggggacacaaggcatccagagcctgcccactgcctggatgggaggtgcggcaggggagggctcagggctgacagctgagctgggctgaggcatgagtgcgaatctgccatggtgtcagggagacgggccctgcaggggccggccagccaaggcagagggccagagcagaggggtctgagggcagggcagggaaagcaagcaccaggaaacagcagagggcaggagacccacgtttcctttctggaacaagctggaagaggaaggagggaaacgtggaaaggaacaagaaaaaccagggcaggagtgacaactcccagagaggccagtcaggtgctggggaagtcggagggtctcactgggtgatgggatctgagcaggtggcatctgaactggctttgaagggtgggatgggtcttggtaggtggagaaggtggcagggagggtgctctagggagaggggacctcgcatgcacagggtggaggcgcccacaggtcagcgatgttggggacggcacatgagctctgctgcggcctgcctgctgaggg

SEQ ID NO: 1858 - DNA, 1236 bp, Artificial sequence
  DNA replication origin
cgagcccagcctccttgccgtcggggcgtccccaggccctgggtcggccgcggagccgatgcgcgcccgctgagcgccccagctgagcgcccccggcctgccatgaccgcgctccccggcccgctctggctcctgggcctggcgctatgcgcgctgggcgggggcggccccggcctgcgacccccgcccggctgtccccagcgacgtctgggcgcgcgcgagcgccgggacgtgcagcgcgagatcctggcggtgctcgggctgcctgggcggccccggccccgcgcgccacccgccgcctcccggctgcccgcgtccgcgccgctcttcatgctggacctgtaccacgccatggccggcgacgacgacgaggacggcgcgcccgcggagcggcgcctgggccgcgccgacctggtcatgagcttcgttaacatgggtgagtgcggccgcccgcgcggggaccctcggagtaagctggctgcaggggaggggcgcgcatccgcgggctgtgccgggccctggccgaacggggagtcacagacggtggacgcgaaccacaggggagtgggaccgccgtggttagggaaggtctaagggtcatgggggccccctgggctgcggggtggtcaggagcagagtgtgggggactgtggactcccaggcgctgccttcaccctgccccaaacacacccaggagtaagaatcaggtgatgtctttgcccacctgggctgccccgggaagacagcctggtcctggggagacaggtgagtaaacagaggccgggatgctgtcactgtgataagggcagtactgaggagagggacaaagttcagcgtggaaacctgtggtcacatcggagtgaccagagctgagtcgcgtgccctgagtccacagcaggctcttctctgtgcggagcctgggtggggtgcggctgtcaggggggcggctggggaaggagcaaactcagctcgctggggcagggactgttgccttgtcaccctgggcccaacacctgggatgtgatctggtatggggtgagtgtccagtcctgtggaatggtccagtgggcagctggacccactttgttctcccaggcaaagcccggcttttcctgtctgcaaatatcttgtatcaaaccctggagctatttattccctaagatctcagagattttttttccagtactaaactctttggtctatggtcatgtagttactattggtcaggtcacccat

SEQ ID NO: 1859 - DNA, 1236 bp, Artificial sequence
  DNA replication origin
ctgccctgcccagcggtccgcgtcgcccgcccccaccccgggactgaccaatgggggggcgggggcggggcctgggagcgggggccacgcctgcgagggggcccggggctgcggccggtgtcgcgggtggggagaccccgaggtgctacctgggcgtggcgggtgggcaggcggcccgggcgaggggctcgcagcctgggcgtcagcgtggtcatggccgtcgtggcttccgccgcgggcctcggcgcagagatcctagggccgcggcgcccttccggtcccgccagtggtgccacccggccgccccgccgtcgcgtgcgcgggtcgccatggcatgctgcaggcgcctccttcccggcacctgctcagctgctcctccccgcgcccccacctggctcccgcgtgagcctgggcagcgccccaggcaggccgcccccgccagccctcgctgcgcggcgtgcgccccctgcgcccccagtactgatccagcttcgcgggggagacgcgcacccgcctcctgcctttagccgggccaggagctctggggcccttctggagcacccgggagccacctgtgcacttctcagtcgccacggccccggtgcaggcctggcaggagaaggatccccgcggaaatgcctctactaactcagcccctttctgcactctctgctcttctctgggcgcgctctcgccttacttattcctgtgtggttcaggcgctgcggaaggagaaggcacctagactgtactgggaaggctcctggagttgacctggagcgccaggaaaggtcagtggaggaaagtgctccaagcagagggaagagcttgtgccaaggccctgagaccccggcgggggagcctaataatggcaggtaacagtcagcacttgccacgcgcgaggcatgttctcagtgtgtgtcttgtgtcatttctgtgatgcttgcacatcgtcagggggtacctaccactggaacctcctcttttaacaaatgaggaaactgaggcacacagcggttaagggacttacgctaggtcacacagcagtagagctgggctggggcagggggcagctcctcaagtggaacctggagagcccacggggcaaatggcggaggctggaggggctggcaagggagggactgcaaagggcctcacaggggctagacgagggccctgggcaccagtgattatggtgcccccccatgtggattgaagattaaacctcgaagcaag

SEQ ID NO: 1860 - DNA, 999 bp, Artificial sequence
  DNA replication origin
cgcccttaatccatttaaccctgagtggacacagcacatgtttcagagagcacggggttgggggtaaggttatagattaacagcatcccaaggcagaagaatttttcttagtacagaacaaaatggagtctccaatatctacttctttctacacagacacagtaacaatctgatctctctttcttttccccacatttcccccttttctattcgacaaaaccgtcatcatcatcatggcccgttctcaatgagctgttgggtacacctcccagacggggtggcggccgggcagaggcgccccccacctcccagacggggcagtggccgggcgtaggtgccccccacctcctggacggggcagctgccgggcggaggggctcctcacttggcagacggggtggctgccgggcggaggggctcctcacttcccagacagggcggctgccgggtggaggggctcctcacttctcagacggggcggccgggcagagacgctcctcacctcccagatggggtggcggtcgggcagagacactcctcagttcccagacggggtcacggccgggcagaggcgctcctcacttcccagacggggtggcggccaggcagaggctgcaatctcggcactttgggaggccaaggcaggcggctgggaggtggaggttgtagctagccgagatcacgccactgcactccagcctgggcaacatggagcactgagtgagcgagactccgtctgcaatcccggcccctcgggaggccgaggcaggcagatcactcgcggtcaggagctggagaccagcccggccaacacggtgaaaccccgtctccaccaaaaaatgcaagaaccagtcaggtgtggcggcgcgcgcctgcaatcccaggcactctgcaggctgaggcaggagaatcaggcagggaggttgcagtgagccgagatggcggcagtacagtccagcctcggctttcacaactttggtggcatcagagggagaccgg

SEQ ID NO: 1861 - DNA, 993 bp, Artificial sequence
  DNA replication origin
aaggcagaagaatttttcttagtacagaacaaaatggagtctcccatgtctacttctttctacacagacacagcaacaatctgatttctctttcctttccccacactttccccccttccacttgacaaaaccgccatcgtcatcatggcccgttctcaatgagctgctgggtacacctcccagacggggtggcggccggagagaggggccccccacctcccagacggggcagccaggcagaggcgccccccgcctcccggacggggcggctggccgggcagaggctgtcccccacctcctggagggggcagctgcctggcagagacgctcctcacttcccagacggggcggctgccgggcggaggggctcctcacttctcagacggggcggccgggcagagacgctcctcacctcccagatggggtggcggtcgggcagagacactcctcagttcccagatggggtcgtggctgggcagaggcgctcctcacatctcagacggtgggcggcggggcagagacgctcctcacttcctagatgggatggcggccgggaagaggcgctcctcacttcccagactgggcggccgggcagaggggctcctcacatcccagacgatgggtggccaggcagagacactcctcgcttcccagacggggtggcggccgggcagaggctgcaatctcggcactttgggaggccaaggcaggcggctgggaggtggaggttgtagcgagccaagatcacaacactgcactccagcctgtgcaacattgagcactgagtgagcaagactccgtctgcaatcccggcacctcgggaggccgaggctagcagatcactcgcggttaggagctggagaccagcccggccaacacggcgaaaccctgtctccaccaaaaaaatatgaaaaccagtcaggcgtggcggcgtgcgcctgcaatcccaggcactcggcaggctgaagcaggagaatcaggcagggaggttgc

SEQ ID NO: 1862 - DNA, 1520 bp, Artificial sequence
  DNA replication origin
agaaataatttaagacaccattctccctttcagagagtagtgtcttactctatccagacaaggaaatgtcatcagcaggacaatcaagtccaaccccatcgtgtgcaaatggggaaactgaggcccagatcagcgaagtccacatatcacctttgtaacgttctggatctcaaactaaaatgtccaacttccaaagcaatgctctttccactctaccactccaccagccgttgtagagatacatctttattggttttttgatctcaagattctctttccagccattaaacaaacataaactcttggtgtagaaagcaagctggttaaaaatgaccttaacacagtggaccaggaaaaaaaagacttttaatttttgttatcctattttttctctcaagtgtaggaaaacttccataccccattccccagttccctatcaaatggtcgtgtaaaagttattcctaaaagctacagtgagctttcttggtcctaatttatttgtcactagccacagtctacactctacaaaaataccctctccaggatttctcacgggtgtggaggtctaagatgccagaataagaacaatgtagtttagtggcacaggatgccccagtctgccctcagcgaggttgcacttgcatcaaggatgggagaggagggcctggagttctactgccttgaccccagcatgtagcccacagattgccacaaagtaggggccagtgaatatttgttgaatgccagggagcagctgacgctggagatctattgagggggagcaagaaggacacttttccatctcaggacaaacagcaaggcaaggtgtagtgcttctaagataagctaccacaaagaccccaaacatcaaggaagaggtgcctggttgggatggagcattggggaagaggggctggctagatggcagaaagctggagctgacttgtagtgattgtctatctctaagcctcagtttttccatctgttaatggggagtgttcattcttccctccctgtctcagggatgcacgagtggtaagtggtggtggggaggcacgagaagagggcatttattattggcattttaaagtaaagccaactggagacctaggtttttaaaaggacgaaggttttggctttgcacaaaaggctctcggcttcttctccccctaggggagtgtgagtttcctagggaaagaggcagcagcaaaaaaacttcaggtttggagtgtctcttaaggtacccccttcaatcccttacagtccaaccccagtattgtcctctctaagcgccaaccctcacctcaaatcccttgtcccctggggctccaataatcatcaaagggaggctggctcccacgccacttttccaaactgtttaccaacacacccacgtgccagacagacacggttggggactacacgggcagcttcagccaaagagaggcggagatggcccaagagcttgagaagagccaatgcctgacctcaggcaggggcagagctttggccacccatgg

SEQ ID NO: 1863 - DNA, 1079 bp, Artificial sequence
  DNA replication origin
gatttagagcccgaaacgtaaccttcctgagcttcagtttcatctgtaaaatgaagggatggtaatgcttacctcacagggttgttgtgaggcttcagggaaataagagcatctagggaaggggtctggtctaggtggagaggcagacggcgctggcttagcccccgctttggggaggcggtgcagaaatgaggaatttttcccagggcaaagccagctgagacccgccatgctccctctcatctcacacaaaacactgtaggagctgtacagtagagaatgaggatttggcatctggaaaatactgcaggaccaagttgtttcaagttttgccctgcattgctggccaagatgatagataacccctttgtataatcttctttttaaattttaaatatattttgttaagagacagggtctcactcagcgtcaaggctggagtgcagtggctcgatcatgactcgctgcagcctcgaactcctgggctcaaatgatcctccctccttagcctccgaaagtgcagggattacaggcacgggtcaccgtgctgggtccccctttgtgtcatcttctacacagatgacctttggtggaagagaaaaaattaaactatacggccagtctgagatttaggccagaggagagtaacttgggacagcagccaatacatctagattcctccacctggcatcaaggtctggtgtctgtctaccccagcctgattgtctgctgtctctctctttccctcccacccctgtggtctaagaacaccaaactactcactgttggcagacggaagtgagaagggcaagcaattcagtgtggttggagcatgggacacggatgtgtgttgttatatgggttgggaaggcagggaaaatgacagccttccgttttagatacgttgggtctgtgctgcatgtgggacatcttgaaggcagaaacctgctcctacttgctttgtgatttctgcacctagaacagcttctggcagacatttgtgaactaactgacttactgagggactcagctaaccagatttcactgagacagcttgtgtgccctgctttgtgctaaac

SEQ ID NO: 1864 - DNA, 930 bp, Artificial sequence
  DNA replication origin
gtgaggagcgcctcttcccggccgccatcacatctgggaagtgaggagcgtctctgcccggccgcccatcgtctgagatatggggagcacctctgccctgccgccccgtccgggatgtgaggagcgtctctgcccggccgccccgtctgagaagtgaggagaccctctgcctggcaactgccccgtctgagaagtgaggagcccctccgcccagcagccgccccgtctgagaagtgaggagcccctccgcccagcagccaccccgtctgggatgtgaggagcgtctccgcccggcagccacctcgtccgggaaggaggtgggagggtcagccccccgcccggccagccgccccgtccgggagggaggtgggggggtcagccccccgcccggccagccgccccgtccgggaggtgaggggcgcctctgcccggccgcgcctactgggaagtgaggagcccctctgcccggccaccaccccgtctgggaggtgtacccaacagctcattgagaacgggccatgatgacaatggcggttttgtagaatagaaaggggggaaaggtggggaaaagattgagaaatcggatggttgctgtgtctgtgtagaaagaggtagacatgggagacttttcattttgttctgtactaaaaaactcttctgccttgggatcctgttgatcggtgaccttacccccaaccctgtgctctctgaaacatgtgctgtatccactcagggttgaatggattaagggcggtgcaagatgtgctttgttaaacagatgcttgaaggcagcatgctccttaagagtcatcaccactccctaatctcaagtacccagggacacaaacactgcggaaggccgcagggtcctctgcctaggaaaaccagagacctttgttcacttgtttatctgctgaccttccctccact

SEQ ID NO: 1865 - DNA, 1230 bp, Artificial sequence
  DNA replication origin
cacagggttgggggtaaggtcaccgatcaacaggatcccaaggcagaagagttttttagtacagaacaaaatgaaaagtctcccatgtctacctctttctacacagacacagcaaccatccgatttctcaatcttttccccacctttcccccctttctattctacaaaaccgccattgtcatcatggcccgttctcaatgagctgttgggtacacctcccagacggggtggtggccgggcagaggggctcctcacttcccagtaggcgcggccgggcagaggcgcccctcacctcccggacggggcggctggccgggcggggggctgacccccccacctccctcccggacggggcggctggccgggcggggggctgaccctcccacctccttcccggacgaggtggctgccgggcggagacgctcctcacatcccagacggggtggctgctgggcggaggggctcctcacttctcagacggggcggctgctgggcggaggggctcctcacttctcagacggggcagttgccaggcagagggtctcctcacttctcagacggggcggccgggcagagacgctcctcacatcccggacggggcggcagggcagaggtgctccccatatctcagacgatgggcggccgggcagagacgctcctcacttcccagatgtgatggcggccgggaagaggcgctcctcacttcctagatgggatggcggtcgggcagagacgctcctcactttccagactgggcagccaggcagaggggctcctcacatcccagacgatgggcggccaggcggagacgctcctcacttcccagacggggtggcggccgggcagaggctgcaatctcggcactttgggaggccaaggcaggctgctgggaggtggaggttgtagtgagcggagatcacgccactgcactccagcctgggcaccattgagcactgagtgaacgagagtccgtctgcaatcccggcacctcgggaggccgaggctggcggatcactcgcggttaggagctgcagaccagcccagccaacacagcgaatccccgtctccaccaaaaaaatacgaaaaccagtcaggcgtggcggcgtgcgcctgcaatcgcaggcactcggcaagctgaggcaagagaatcaggcagggaggttgcagtgagccgagatggcagcagtaccgtccagctttggctcggcatcagagggagaccgtggaaag

SEQ ID NO: 1866 - DNA, 1699 bp, Artificial sequence
  DNA replication origin
caggaggtagaggctgcagtgagccatgatcatgccactgcagtccagtgtgggccatagaacgagacaatatctcaaataaataaataagcaagccaggtatggtggcacatgcctgtggtctcagctacactactcaggaaactgaacggggaggattgtttgagaccaggaggtcaaggctgcagtaagctgtgatggtgctactgcactccagcctaggtgacagaatatgaccctgtctcaaaaaaaaaaaaaaaagtggggagtgacaaaggatttgaatagacatttatccaaacaagatatattaacagccaataagcacatgaaaagataatcaacattattagttgttagagaaatgcaactcaaaaccacaagaaggcccggcacggtagctcattcctgtaatcctagcactttgggaggccaaggtggacgcatcatttgaggtcaggaattccagaccagcctggctaacatggtgaaaccctgtctctactaaaatacacaaattagggctaggcacagtggttcatgcctgtaatcagagcagtttgtgaggctgaggcaggcggatcacctgagttcatgagttctagaccagcctggccaacatggtgaaacccagtctctactaaaaaatacaaaaattagctggatgtggtggcatgtgtccgtaatcccagctactcaggaggctgaggcaggagagttgcttgaacctgggaggcagaggttgcagtgagctgagacatgccactgcactccaacctgggcaacaagcgagattccgtatcaaaaaataataataggccgggtgtggtggctcatgcctataatcccagcattttgggagaccaaggcgggcagatcacatgagttcaggagttcaagacaagcctagctaacatggtgaaaccctgcctctactaaaaatacaaaaattagccgggcatagtggcacacgcctgtagtcccagctactctggaggctgaggcaggagaatcacttgaacccaggaggcagtggttgcagtgagccaagatcatgccattgcgctccagcttgggcaacaagagcgaaactccatctcaaataataataataataataacataaaataaattggtaaaatacagaattacccagccttggtggtgcatgcctataatcctaactactcaggaggcagaggtgggaggattgcttgagcccactagaaggcagaggttgcagtgagcagagatcatgccattgcactccagcctcgacaacagtgtgggaccctgtctaaaaaaaaaaaaaaaaaaaaaaaaaaaacaaaataaaaacaaaaacaaaaaaaccacaatgagataccacttccacacccattaaagatggctgtagtaataataataataagctcgagaataacgggcagggctgtggctcacacctgtaatcccagcactttgggaagccaaggtaggcagaccacttgagcccaggagttcaagaccagcctggccaacgtggtgaaaccccatctctactaaaaatacaaaaaaaattagctgggggtggtggcgcgcacctataatcccagctactctggaggccgaggcagaagaatcgcttgaacccaggaggtggaggttgcaatgagccgagatcgtgccactgaactccagcctgggcaacagagcaaga

SEQ ID NO: 1867 - DNA, 910 bp, Artificial sequence
  DNA replication origin
ctgccccaggggcgcccatacctggcctccggccttcaaagctcttcccgcaaccccttcccccactacagcttcctttcccacgaggccccccacccaccccaatcctgccagcccctggctaaggcccaggttggagcctttgatccagtcttcagggccgggggcaggacagcctgccttacctgtgcaggctgctcagggctcccccggcgccagcccgtgagacttggccctgtgcccgcctccctggcagccagtagaaggggaggctctgctgccacgtcgcctcatgaggcccagccaatgggaggcagccgctcccagggatggtggctgcaggccgggttactcccagttacactgggttcctcagcagcagctgctcagctgcttatgagcagaggatggagtgtttgacaaaggctgatgaggagctcttgttccctgaggagacagagtcaagagaggtggaggtgggcaggccttccctgtggcatgtaggaactgagcaacttcctgggcaggcgtggcagccagtttggggaagttgctgggggcccttcaggctggtttctgatctagcaggtgcctgtgtgcacatgcttctgtggctggtggtgcctgtgtatgcctgcacgcgggatggctcgtgggctgaaggctggtgtgcatatgacctccctgtccaaactttttttcctttttgtggtgaatggggtctggctatgttgctcaggctggtctcaaactcctgggctggagctattctcctgcctctgcctccctaagtgctgggattaaaggcatgaacatcaccatgcctggccagacctctccatccataccacctgacccctcctcaggccaggcctggagacctggaaccccctttcctttcagtgtagga

SEQ ID NO: 1868 - DNA, 1326 bp, Artificial sequence
  DNA replication origin
ctcctcacttcccagacggggtggcggccgggcagaggctgcaatctcggcaccctgggaggccaaggcaggcggctgggaggtggaggttgtagcgagcggagatcacaacactgcactccagcctgggcaccattgagcactgagtgaacgagactccgtctgcaatcccggcacctcgggaggccaaggctggcggatcactctcggttaggggctggagaccggcccggccaacacagcgaaaccccgtctccaccaagaccagtcaggcgtggcggcgcgtgcctgcaatcgcaggcactcggcaggctgaggcaggagaatcaggcagggaggttgcagtgagccgagatggcagcagtacagtccagcttcggctccgcatgagagggagaccgtggaaaggggagggggagggggagggggagagggagagggagagggagagggagagggagaggattcatactcttaacacagcaaacactgctctgagtccttcctaagaattctgacagattgctggctgcatggatatcagtgaaaccccattgggaaagatgttcctaaatatcttgatggtgaaactgcatattcacttgatcatcccttcttcacagaacaacacggacaccagtttgcaatagatagttccacttggtcttgtctctctgccactgaagatatgggctgtgaaccactgaaatctgggcatgacgcatttcaacttcttggaacgcagcttattaaactgaacttggcttattgaacttaactagaagtggctgggcacagtgtcatgcctataatcccagcactttgagaggccaaggtgggcagatcacttgaggtcaggagtttgagacaagactggccaacatgacaaaaccccatctctactaaaaatacaaaaaattacccaggcatggtggcaggcacctgtaatcccagctacttgggaggctgaggcaggaaggagaatcgcttgagcccgggaggtggaggttgcagcagtgagctgagattgtgccactgcgctccagcctgggcgacagagcaagactgcatctcaaaacaaacaaacaaaaaactggctaggtacagtggctcacgcctgtaatcccagcaatttgggaggccgaggcagacatatcacctgaggtcagaagctcaagaccatcctggccaacatggtgaaaccccgtctgtactaaaaatacaaaaattagccaggtatggtggcacgtgcctgtaatcccaggatttgtagttacttaagtagttccagtcttaggcaaaattgtacaaagcgacttaaccagc

SEQ ID NO: 1869 - DNA, 1034 bp, Artificial sequence
  DNA replication origin
tgtcatcctggcccgttctcaatgagctgttgggcacacctcccagacggggtggtggccgggctgaggggctcctcacttcccagtaggggcggccgggcagaggcgcccctcacctcccggacggggcggctggccgggcggggggctgacccccccacctccctcccggacggcacggctggccgggtgggggggctgaccccccacctccctcccggatggggcggctgccgggcggagacgctcctcacttcccagatggggtggctgccgggcggagaggctcctcacttctcagacggggcagctgccgggcggaggggctcctcacttctcagacggggtggttgccaggcagagggtctcctcacttctcagacggggcggccgggcagagacgctcctcacctcccagacggggtctcggccgggcagaggcgctcctcacatcccagatggggcggcggggcagaggcgctccccacatctcagacgatgggcggccgggcagagacgctcctcacttcctagatgtgatggcggctgggaagaggcgctcctcacttcctagatgggatggcggccgggcgcagacgctcctcactttccagactgggcagccaggcagaggggctcctcacatcccagacgatgggcggccaggcagagacactcctcacttcccagacggggtggcggccgggcagaggctgcaatctcggcaccctgggaggccaaggcaggcggctgggaggtggaggttgtagcgagcggagatcacaacactgcactccagcctgggcaccattgagcactgagtgaacgagactccgtctgcaatcccggcacctcgggaggccaaggctggcggatcactctcggttaggggctggagaccggcccggccaacacagcgaaaccccgtctccaccaagaccagtcaggcgtggcggcgcgtgcctgcaatcgcaggcactcggcaggctgaggcaggagaatcaggcagggaggttgcagtgagccgagatggc

SEQ ID NO: 1870 - DNA, 951 bp, Artificial sequence
  DNA replication origin
gtctctgcccggccgcccatcgtctgagatgtggggagcgcctctgccccgccgccccatctgggatgtgaggagcgcctctgcccggccgagaccccgtctgggaggtgaggagcgtctctgcccggccgccccgtctgagaagtgaggagaccctctgcctggcaaccaccccgtctgagaagtgaggagcccctccgcccggcagctgccccgtctgagaagtgaggagcctctccgcccggcagccaccccatctgggaagtgaggagcgtctccgcccggcagccgccccatccgggagggaggtggggggtcagcccccccacccggccagccgtgccgtccgggagggaggtgggggggtcagccccccgcccggccagccgccccgtccgggaggtgaggggcgcctctgcccggccgcccctactgggaagtgaggagcccctcagcccggccaccaccccgtctgggaggtgtgcccaacagctcattgagaacgggccaggatgacaatggcggctttgtggaatagaaaggcgggaaaggtggggaaaagatggagaaatcggatggttgccgtgtctgtgtagaaagaagtagacatgggagacttttcattttgttctgcactaagaaaaattcttctgccttgggatcctgttgatctgtgaccttaccccaaccctgtgctctctgaaacatgtgctgtgtccactcagggttaaatggattaagggcggtgcaagatgtgctttgttaaacagatgcttgaaggcagcatgctcgttaagagtcatcaccaatccctaatctcaagtaatcagggacacaaacactgcggaaggccgcagggtcctctgcctaggaaaacaaaggttcacttgtttatctgctgaccttccctccactattgtcccatgaccctgccaaatccccctctgtgag

SEQ ID NO: 1871 - DNA, 1405 bp, Artificial sequence
  DNA replication origin
tctcctcttcatatggagggtatagtttaatggaagaaatagacatgaaataaatgatcacgccgggcgcggtggctcacgcctgtaatcccagcattttgggaggctgaggcgggtggatcacgaggtcaggagatccagaccgcggtgaaaccccgtctctactaaaaatacaaaaaattagcctggggcggtggcaggcacctgtagtcccagctactctggaggctgaggcaggagaatggcatgaacccgggaggcggagcttgcagtgagcggagatcgcgccactgcattccagcctgggtgacagagcaagactccctctcaaaaaaaaaaaaaaaaaaaaaaaagaaagaaagaaatgatcacatgataagtaattcaaattgtgttgggtcctttgaaagaaaactacagggacccaaaaccatggaacaggtggtctgggaaaccttccctgatgaagcaaattagctgagacccagggtagggaggggctggccaggtgtggaagggtgggttccaccaggtcaaacgcttagccccaatttctccttcctccagggagagccagggcctcgaggagaaattggtccccagggcatcatgggacagaaggtaagtgcctggcacaatggcccctccccgggggcctctgcggcagctggcactgctggatacagcatctgctccgtgcagcccgtgagatgcctccccaggcagggcctaggtttgctttgctggtctgccaagtggagaaaggaccccctgccagtgacagcaggaatggagggcaccctgaccatgcggtgccaggcctcggtgcgggaggctacccctgctgagagctgctgaggttgtgaccttctctttccatttcagggtgaccaaggcgagaggggtccagtggggcaaccaggccctcagggaaggcaggtgagtgcaggccagctaaggtgggcagggcgtcatatccaggcccctcattccatttattcctttggtttcttttctcctcagggccctaagggggagcagggcccccccggaattccagggccccaaggcttgccaggcgtcaaaggagacaaggtgccagatggggctgggaaacacctgggaaaggggccctataacagggggagtggggtcggcaggactcagatccttccggagcctccaaacctgcggatctcagggttctggtctggtcggcgaggcggagttggaaagaggggtgtggccgaaagttaggtgggggaccccgtggaggggggagctcgccaaacccctcactgcccgctttctccagggctccccagggaagaccgggccccgcggcaaagtggtgagttccagcacccctgttcccagcgacccccaaccctgctctgcgtccccg

SEQ ID NO: 1872 - DNA, 914 bp, Artificial sequence
  DNA replication origin
ccgctggccccatcccctgtcaatcaggccttcatctcccaagatggtggatctcacaaagtgaccgggaagacagggtggagagggcagaggcaggacctggaggagggcactagggtaagctggtaagggctggtcaggggtatgatttgggcttcttttgcttccagggggaccctggaccagatggaccatcggggcccccaggaccccctgggaaacctgtaagtgtccccagacccccgacatggcaaagtgcaggggaaggagaagggtctttgagcaagcctgcggcgggaaagggtcaggccaagctccatcttcatgtctcctctcagggtcgcccgggaaccatccagggtctggaaggcagtgcggatttcctggtgagagacgaggtctggggcggggctaacacaggggggcggggccacagagatggggaggcggggccacggagatgggggtgtctggagagatggggaggggctgcagtgcaggggttccaccaggtgaggcggaggagagcacggggcttggagagatgggggcgcactgcccagctgatcacaggaccctgtgggattttctgtttccagtgtccaaccaactgtccacccggaatgaaaggtcccccagggctgcagggagtgaaggtgagagctcctggcctgaatcttgggagggtggtgcaggtgacaggaggggacctcgtattgagctctctccttcccttcaggggcatgcgggcaaacgcgggattctgggtgatcctggccaccaggggaagccggtgagtgcaagggctgagggctgtgggtcagggatacgtggagatggtcctacagggctctgtccccttcttcgtcccttccccttcccctgtgggttctggggacagagccttgagccgg

SEQ ID NO: 1873 - DNA, 1071 bp, Artificial sequence
  DNA replication origin
tgtcccgcgcctactgacacccctagcccgagaggccacctgaggacagcgccgcgggcaggtcccctcggtgggtgcatacatggtgcccatcgcggcaccgtgaatggaggtggctgagccggagagtcaaacgggacccgtccccagacgcgcggcccggcccgggacaggcagcgtggggcaggagctggcgcccggtcctggcagcccggggagcccaggtggcggggcatacaatggtgctcattcacccgctgcgcagcctccgcccccgccgcctcccagggggcgccggctccaaccagacgccgctgtcgccccgaggcggcctctcggccctgcccgcctacccacgtctcccttccgagggccgccgggggctgcgggcgcgcgggtagggcagagactgggcccggtcgggtgctgggtgtggtttcgagctcgcctgcggggcgccagcctggcacttcgcggcctggggaggtcgtgggcaccgggacccctgcctgggtccgagctggcctcttaaaagggccgccttttaagatctctgatctgttcagagatgggcagcaggatggagactctccagctgtgagctcgcctcatcttgatatgacttgtgacctccctgaaacctcacacccacccaggggcattgaattgcaggcaaacgggatccagagagagggtctgctttctgggaggtgccggctcctcctgctcccctgcagcagtcagggcttagcagagggaggaccgggcagctgtgctgccgaaggggcgctccgagtgggaagatagtacccgcttcacctccctacacctcctttctctgcgcctcccccactttcccgtcgggttttcccgcaccatggggagaggaggaggcgctgtctctgcctgtcgttcacgtaagaacaacaacccgagccaccgctcactgagggccggcagcctgctaggcacaaccttacattccatctgtgatttatttgagctgtccacgtctccatctattccccaccgcgaccgcgcaagggcaaactggcacagtggaaggagtcg

SEQ ID NO: 1874 - DNA, 1274 bp, Artificial sequence
  DNA replication origin
gttaaatgcctcgcatgagtcatctcattcaatttccacaaaaaccctttaagataaggacaatttgctgggcacggtggctcatgcctgtaatcccaacactttgggaggctgaggcaggcagatcacctgaagtcaggagttcaagagcagtctggccaacatggcgaaaccccatctctactaaaaatataaaaattagccaggcattgtggctcatgcctgtaattccagctactcgagaggctgaggcaggggaatcatttgaacccgcgaggcgaggttgcagttagctgacatcgtgccactgcactccagagccttttaagactctgtcttaaaaaaaaaatatatatatatatatatatggactattagtatccccattttacagatgaggaaaatgagacttcatagagtttggggtgcctgtggtcatatctataattgtgaaaaagtcagattccaaagcattttaccaatattgcctaagtgagtgggagggaagggaaggctctctggagtcgggctatgctggacagcggggttcggaaactctggtgaataaagtggtagttgtttctatgaacatggagtgagaaggcccaatcctaaacacaccagtgcttaaggcagctgcagagaattaaaggcaatagaaaaaggggagctggatggcaggagcttggatggggaagacttcaagggcaggtgaagatgccaacagcttcctgcctggaggaccgaagaagggttgggcttcactgcagacctccaggagacagatttgcttgttgggacagagtagggaggtgaaagcgaggtgaggaagttcgggggtgggggaggtgcacacagctccactaaagagctggaagaggccgatggagtattcatgagacggctgatccaggaaggactgtggcatattaatatggaaaaggcctgtttgtttgtgcttggagaggaaggagccagaggagaggggagcaaggtgggcgggagctggggagagcctgcagcaagatctgcagagcccgaggtgctctcggcctgggccctggagaggacgtagggtaagtgatggggcacaggctgtgcgtcagggggaaggtgctggggcctgaaggtcccgaggggaacctcagacggccttatgccttctcacaaagaaactggaccatcatctccgacccgcaccccggtcgcccctcgaggacagagggtgggcgcaggaggctggaccgagcggggcggagctggatgcctggcgc

SEQ ID NO: 1875 - DNA, 1412 bp, Artificial sequence
  DNA replication origin
cgcaaggccagcagacaggccggccagagggtcatctgcgtccggcacccaggaggctcgtggtccgcctttgcctgggctgagggtctctggccccgcagcctctcttggaggcgggcctgtccctaagcccgccaaggggcgccgcgccgaggggctgcggagtgggggacggacgcccccgacccgggaaggggcgtccggcggggccggaggagagggctctccccgctcaggaggtgcccctgggcgggggaccgggagtcctcaaccccggactgaggcaggggtctctgggggcgaggagggcgcgtcgccctctgcccccgccggcaccctggccatgacaggcaagtcggtgaaggacgtggatcggtaccaggctgtcctggccaacctgctgctggaggaggataacaagttttgtgcagattgccagtctaaaggtagcgcatcccacctggcgggccaggggtccagccgcgccggggtggtgggggtgggctgcgtgaagaggcggtttctgaagcttaggccgcccaactcggcttataagtggtaacgcgtgctgcgcttgcagtgagcctactgggctttctgcagctgggggattggtatgggtagagcttgcgagggcgagtctgtgtgtgtcggggagggtggaggtgatggtgcgggtggaagttgcctggcgtgttcaggtgagaatgtctgtatttgagggctctgaatgagttctgggccggctgtccagagagagctcccagcatgtcacttgcaaagctggggatgaactgcattgcgtgcgtgcgtgcgtgcgtgtgtgtgtgtgtgtgtgtgtgtgtgtgagagagagagagagagaatgacgaggaggaggaggagggaagtgagatggcggaaaggaaaactgcttaaatgatttttaaaggtggtgatttttgcttcctgctatttggttagcaactcctgtcattttgcagccttgctaagatctgacaagagtgcttaggtgactttattcttctggatgtgtgcagtgggaaactgccttatgcagtgacacagtgcggatttctaggcagtgtagccctggcttgtagagtgcgttggaggcctatgtatgagtggtggcagaaactagccgattatgcctgtagtgcaggatccgtttaatcagtggagagagaaagatgaattcgatgaattcattgcttccatggcgattacacttctaaaggtgaaatatgatcattgtaaattggcagaaccatttagtctttgttttctgtgccctagaagattcatgatttgatacaattaaaagtcagtacaataggaaatcttggttattagtgaaatgttggcacttgacatttatacaagcttctatgaatctttttttcctgtat

SEQ ID NO: 1876 - DNA, 1167 bp, Artificial sequence
  DNA replication origin
tttgtcacgggtttcaaaggctcaccctaacgttcacgtgcattttcccagcggaggaaagatggttgttcttcatcagagtctggggcccaagaacgcaggctccatctcctcccgcaggagccaggctgatgatgctcgcagggatcggatactgggagcccctgaacgcagccaacccggcgcgcaccggtgggggcgtctgcgctggcggagcggctccccgggaggacgctgggaaccatgctctagccagccgctgcgcaggcgcactgggccccgactgcccgccgcagcgctacgtgggagcttggccgcgcagtgccggaacccggctgcagcggtgggaaggcgggggcgtgccggcccagcggggagagggtgagcgggtggctgtcccgggcttggggagctgggcgagccgggaagcgcgagttccgcccgcggccaccctgtcgcgcgcggtgctctccgcagccccggagtcgtgctcagacaaaggctgggaggctagggccgggggcgttttgctttgtggggaggacttagcctctcatttggggaggaggaggcggggtctagcggtttcgcggtttgctacagccgactagtgaaagagctgggattccaaatccccggctactttacacataattactgccccaaacaaagaattgggttgtattcgtctctttgtgcttcctgacatgtgcgcggtgctttgaattttgtgggctgtgtctgcccaccgtctccgtgtatcttttggaaacattttacagtgatccatatatgttctagcgttctgccctatgactgagcctccttagtcctttgctgattctaatgtcttctgctcagcatctgcaggggctgctgagagtaaatacttggcgcctccagctgctggccaaggagacagatggagctcaagttgggagatacgccctgagagccgatgatagacacaagtccagatctcggattttgatactgtatgttccctgggttcctgagagaggacattgaggagtaggagtcggcgattaaggagatcggtacaattgggaagcctcctgtcagagcttccagcaatttcctcatcagaggtggacaagccctatgggctaagacagagggtcctcagaaaggagtgcggacgccgtc

SEQ ID NO: 1877 - DNA, 1194 bp, Artificial sequence
  DNA replication origin
gggagagggcgggctccgtggcagccccctgtgggcggagccggcggccggggctcacaacccgccggaagacgcgcgggttgtggcagctgcagcgggaccgcgtggggtgggccccgggaccgccagggctgcagcgagagcggccggcggtgcaagcggccgggagggcgcggccggaggcagaggccaggcgagacacccggctgcggcctaagaggccaggctgggtgggcttggctgcagccgccagccccgtgttaaagcggcagccagggaggtgtatcctccccggggtctgcaagacgccggctcagggcatccctcccattccggccctcaaagcctcgctcctgggggcgctgctgggaaagcccacccgcctgggcgggcccttgatgggaatgtggagcagaccctcgtccactccggaggccgagggtcctccgggcttccgaaggaagccgacctcaacgctggacgcttcttggagaatgattgcgttgagtggagatgtggtctgtctataaaaggccgggagggaacaatatctgttaccactcagtccgtctctaaagagacactctttaccgctgaaaacctcaagagtgagcactcccacgcccccgtctctggtcctacctgggtccaaggccgatgtggtgagtaggagtctgtgtgcagtctttgagtccgagggtggcatgtctgggagcactgtgagggtggggcatcttcgatatgaagcttctcagccattaactgtttcccgagtaagattcgaaaattcgtgcactttggtaacaagactttttatgtattcaggggtgggatatttctcacaagctccaattcctagaacacacgcagctcctgtctctgcatatagtcacacacacacacacacacacacacacgcctataagtcacatacccatccttctccaacaaacttcaaaaagttgggccagctcccttcccacgtagctccgactgttcttggagtgccgtatactttggacctggtcacggtcaaagcacctgctcagattctagggtttggttgagatgatggatttgagttgtttccaaatttgcctattactattctgcagtagtcctcattatactaaatttacaccatttgaagacataccctcttccccaattttaacatttctgaaaccaagatgc

SEQ ID NO: 1878 - DNA, 850 bp, Artificial sequence
  DNA replication origin
tttaatccctatagtatctgtcatgtacaaataataagatctccacttaaatttgatgtaaggaatgggaatggaggcacacgctaacctcaggcagcaagataaccaagacatggtggtggctgagaacccagtcttggaaaagaggcctttatctgaggaagatgcccctccacgctgtatgtctgctggtcatcatccagtgtcttccatgttcactgggtcaccaggatgctgggtatcacattcccaggagctctgggacaagccaggttctcactggtagggacagagggcatgcccagtggagtgtgggaatcaccaggcctggtgagggcttgttggggcagatgtcctagcaggagcagaagaggcctatctgggcccaaggctcatgcagcaggtggaagaagtagggtgaggaagtggggcaggggtaaagggaggggtgtgggagaagaggggagcaagttggaagaggcagcaaatggaagagagagggagtggaggaaggcaggtggtgggaggagcaggggtataagccggggtggaggtggtccaggcagggagttgggaagaagagaaactggccagaggaacaagatggtctggacatgaagtaggaagagggtttgagtgactggtgactgaggcaggcacagggggaagagacagagaagtcatagggacaagagacagggcagagggaagggagggagctgaaggccaagccacggaaggggaagaagtgggatgaagtagaacttgggcaggaatgaggcagggcaatttcctttgcgtagctctccattgagaagtgagggttgtttgatgggttcagtgttctgct

SEQ ID NO: 1879 - DNA, 1068 bp, Artificial sequence
  DNA replication origin
ctgcttgggaggggggctcatggagataaggtgtctggatgtggtaggatgccccctcatctctgaggccaggacttgagacctcctggggggagtaggggctgcataccctacagttcttctgcttcctatgtataacacaggcctcagggaggcctagggagcagtgaagctttgggagccacaggtaagggcaaggctgcccctggggcttcatgtcccagagcttggggctcagggacagtgaagcagaaggcttcggagtctcataggtccctcttcccctactccccgctttgtccaccgctttgtgctgactgcttgtccctgggacctcgcagcagaccccagggggcctcggaggacacagtggatttatcctcagggcccatgagcagggccaaagtagagaaggcagatggcaaggagggagggaagtcctgtctgccccctccctagtcccatgttcacagtgggaagggtggcctgggcaccaggaggatggagggcctgggtagagtgtggggtgtgtgcttgtgtgtccatggtgaatgtttgaggatctctgtgaaggcataatgtgtgtgtgtatgtatgagagagtttaagtgtgtgtgtatgtccctggcaaatgtagctaggtaactcacagatatgtctgagggtctctgagggcatattgtgtgtgcactgtgtgtgtgtgtgtctgtggtgaatgtatcttcatgcgatatgtctgcagttctctgcgagggagtttttctgcagcgtgcgagtttgtgtgtgtgtggcagggtgtgttgtgggtctgtgtgatgtgtgtgagtctgtggtagctgcatctccatgccatgtgagtctgtggtgcacaaggtgtgtttttgtgtgcatgtgtgtgctctgtgagtgcctgtctaggtggattgcctgctgggtgtggtgtgtgcctgttgttttgtgtacgtcatcttctttgtacagcgtgcatctcgctctgtggcgcgtcggagtggccaaccggaggtgtatggcttgcgtgcgggtctttgtgccctgaaagggtccggg

SEQ ID NO: 1880 - DNA, 1738 bp, Artificial sequence
  DNA replication origin
actggccccgcccatccacgcggccccgcccccggcaggccccgcctccccttcgcctcccgccggcccaagcttgggctttgcacccggcggcgactgaaaacggtggctgctgcggagccggcagcgcaggcgggcggagcggagctgcccccgtggtggcgggcgatgcccccgtgagcctccctcgccgcccctccccgccccgcgtgcctatccactcggagtccgcgccagcctggggccgggccgcgcctactgccgggttcgcggggcggggtcccggggcagcacctgccccgccttgcggagccgcctcggcctgtggaggccccctccctgtctggaccccggccccacctccgggtaagtcagcaggccttgctcgcctgggagtggacgtggggagggggctgcagaggtctggaggaccacggggggaggggggctctggccatgaagcgcaacgtaggtatgtgagtgtgcaggggcgggggtggggggatgaacacagggtgtgagagggctctggggaggggactaagggatgagagagggacgtggggtgtttggggaagcctggaaaatggggaagggggcccagagtcttgagttctttgctgatgctcagagctcctggggccctggtcttcaacagcattgcctggcatggcatttttggaaagtgcttaaaatccctcctggaaagggagctggaaggcagcctgcttttctcccttctgcctgtgccctggttgagaagcagccactttttcctcaacgtgacaccgttgtggtgtccagaggaccccctccaccccataaaagaaaaggagtgctgcttactccagccctggggtgggaagagggggctttgggaagctgggaatgcagttggtcagcagcatggtgcagagcccagggttcagggaggcttggcaggacccttgatgggcaacttgggcatgctctcattcatagggaggagctcttccctgactggccgcctgggtacctggactccatgtccccatcacctctggacaactcagccctgaggagtgggtttcttcagtgtcctggtcctgaaggctcaggaaggatcctggaatggggtgggcaatggcatatcaaggctggagaacagggggcattggctggcactgccacttggggcctgtttcaatgtggtccttcagggcttggacacctgggtgaatatgtgtccaaccctagccccaggggtgttatcaggatgtagggaagaaggctgctgctcctttggtcctgtcctctatccatgatgacttcttaagtctgggttccttgggtttggggcctgaagtcatgggaggaggattgggcctggtcaacaaggggttaatgagccatctcccccaccccaccatagttgctgccagccaccaattagtctgtaatcaggcagctgccaactgtccctgggggcatgtgggtagcctaatggggcattcttggttgggaggcggggtgggtgggttggcagggatgtgctggggaggtgacccatgtgccctgtgcttaaaccaagcaccatgccctttgttgtttgtttagggcccacagaccccttccctgccttctgttcctgactgccttgcttagggacttccagccctggggttctacacttatccgaccctttgcagggtatgaagcccagagttggttaaacttggcttcaaacccaagctctgcc

SEQ ID NO: 1881 - DNA, 775 bp, Artificial sequence
  DNA replication origin
ccccgcccctgcacactcacatacctacgttgcgcttcatggccagagcccccctccccccgtggtcctccagacctctgcagccccctccccacgtccactcccaggcgagcaaggcctgctgacttacccggaggtggggccggggtccagacagggagggggcctccacaggccgaggcggctccgcaaggcggggcaggtgctgccccgggaccccgccccgcgaacccggcagtaggcgcggcccggccccaggctggcgcggactccgagtggataggcacgcggggcggggaggggcggcgagggaggctcacgggggcatcgcccgccaccacgggggcagctccgctccgcccgcctgcgctgccggctccgcagcagccaccgttttcagtcgccgccgggtgcaaagcccaagcttgggccggcgggaggcgaaggggaggcggggcctgccgggggcggggccgcgtggatgggcggggccagtgggccggaccttggtggtgggcggggcctaggggaatccggggagtttggcttgccgggttgtggttgggggacctacattaatgaggcttccaagaagcggggtctggggaagcctcattcctctccgtgtccctaggactctcttgcctcctgcccggcctcccctctccaccacctaccctatctgttctttctcatccttccttttctttggggcacctcccaggacctcacaggcaccacggcgccccctgccctgccctgccctgaagcagtt

SEQ ID NO: 1882 - DNA, 833 bp, Artificial sequence
  DNA replication origin
gttccaggaacgtcagatggtaagagaagaaacgacttacaaacgtcaagtccattttacagatggaaaatctgaagctcagataggagaaaagacttgcccaagtgcctggtatgaagagaaagactttataatgtccctttcagacagaaggaagtagagtggccggccctgaagcccaagttaacctgcttcccctgcgctctctacttctagagcaatggttttaaacttggggcgattttgccccccagggaacattcgaccatgtctggagacatttttggttttcccaacgaggaggttgctactggcgtctcatgagaagagaccagggatgctgctacacgccttcaatgcacaggacagcccctgcgccagagaattgtcaggcccgaaatgtcagcaggtttctgaggttgagaaactctgttctagggcctggcatctgcctatataaacttccaaatagactcctggagtcctgggttcttctgcagcccgggaggatactgtatgaagtctttcctagggtcgtgcctgccccaacttgtatatttaaccttgcttaggactggtcagttccactcttgggctccagtgttttgaattccacccactgacagagaggacagaataattaatatttgctggaggcatgtaaaaccagtagtctccctgctgagggcatgaattaaaatgtaaatgggagctgggtgcggtggctcatgcctgtaccagtgttttgggaggccaaggtgggtggattgcttgaggctgggagttcgagatcaacctggccaacatggtgaaaccccatctctactaaaaat

SEQ ID NO: 1883 - DNA, 1253 bp, Artificial sequence
  DNA replication origin
gggggaagggaaaaggggaaacggtgcaaacggcgtggccgccatcttgcttgtgcccccgcttcgcgcgcgctccgttctccgtgacgcacacttccccctcccctccgccgcgcctgggcctctgcattgcccgactccgtaggagcgcgggggcggctcctgctcttcctggactcctgagcagaggtgtgtgagtgtgcgggagtttctgtgcgagggtgatagggaagcggcggcggggggaggggcagcgcttcccgccttcgccagagacctcacttcctcgcgcggccgctgctgtagctcggtccgtcctgcccgccgccatgttgtgctcttgcctggcccgctgctgtcgccgccgccgcgctcgtggggtccgtgtgcctcgtcggcccggcccgcgggctttctcccattggcggaaggcgacggcgggggggctcgctcgtgattggtcggtggcggggaggccgcggacctggcaccttattggacgcgccagctccggtctagggggtgatgaaggaatctgaggctgcggggatgcgcgcgtcttgggctagggcggctggggcaatgaccccctgcggcgcaggcgtggggttgcggcgagagggcgagcctagaggctttaagggggaagagagggtgatggcctggcaggtactttgggggtagcttaggccatggcctgggaatgggggacactcactttcagaggtgcttttcctggtacatgcatggcccaagattggggtgtgcaggccctcagggttccaggcttggaaacaccgaaacccaagtgacaggctgagagtcttcgagatccagggttgctaatgtgacccagtttggaagtggccctgaagtccacggtgtgagtgtatggtgtaggaagaaaggcatcagggctaggggcatagctgaacggtagaatcggatcagggattttgctggagagtgcaagcattcaaacactgaggttttggtggagccctggagtccagagtcaacggacctgggatgtgatgtgaggagcaagtaaaccgagagaggaatgctattgagaagtgtgctctgtccgagcctaggaagcacagcattaagtagtatcagatttaaagtgacaaaatctgatataggaagcattttaggggacattttcggacttgggaagtgtattaatagaacagttatacattattgagtctcaggaccatacaagtagttttgagatgttgtatatg

SEQ ID NO: 1884 - DNA, 951 bp, Artificial sequence
  DNA replication origin
agagacgcatggctcggacccggggccagaggggcgacccggggcgggcgcgggcggcgggggctaggggccgggccggggccgcgggcgggcgctcggagcctgggggccgccggagcccgcactgacctcccgcttccccggcgactggggctgctctttccgactccaactctcttattacgcgctccatgccgctcgcctttccacctgccaccggcgcgcgccgctcacatgtcaccctcccccgccccgcccctcccccgcccgccccgcggccgccttcccaaatcgggagggagcgagcgagcaagcgaggcgaggcggagggagggaacgcgcggagcaggcggcggggcagggcgcacgggcggccgagttggtgcctgggccgaaccgcgtggcgggggcagcgcgcggggccgggaagccggacgcgtgcaagtggtgtccaccgctgcgtggggcagtgtggccccgaaggccagcccggggtgggacgcctcgtgtgtgcttgtggaaagtggaatgtggagttgtggccgcgggcggcaggggaagggacgcagtgtcccgtggagtttaggtgtagaccggtggaacggcgtctacttgtgtgtgcagggtgggtggctgtgggtctaccaggtgcggggatggagtcagtgaggtgtgagttatgggtcgggtgtgggtggctgcgaaagtggaggtggagtccgaaggggatgaggtgtgtccgttggggtcgagcactgtgtgcctggtgcgggtgcttaaagtgtgcccagtgctgtgtgtggctgggtgggcagcggcggttgtcctgctcttacctgaaaggcctggagcccacgggctgctaggcagcatcagggtgtgtggaacacagtgggcctgggtgtgtctttctcccaccaactgccacctctgagcttcccttcatcgtga

SEQ ID NO: 1885 - DNA, 1052 bp, Artificial sequence
  DNA replication origin
gcagagggacagccaggccagcaggagggctgctagacagtcaggtgggcaggcaggtgggccacccaggagaccccagcgccaaagggccctctctggtggcagcaaaaagggattaatagccacacattttccagggaccagaggtctctctctgggcacctctgagcgtcccagcgtcaggcccagcccttcaactgatatctgcggggcctctcatgttcctggctgggccaggccgtaccccaagactgagctctgagctgccaaaattcactcttcacacccaagaggggtcagtgtttttgaaagttgtaggagcctggtgagagggaggagggggccccagcagcgtcagtgtttccaaacctacccctctcctctttctttttcccctggtgcctagagccaggcctggtgctgccagccaacaaggcaggcgagctgggccaagccggcagggtagggcagggcaggcagggcggccgccgttgccactgggaagttgagggtggaggggaagactgagcgaagacacagatcaagtcggacacagcatatgcgagtgtcagggcccagggggcccacagggacccccacacacccacagtcagctgggcaggggtaggaatgagggccgccctggagaggagcacccctgaggggagcccttcatagctcagagctggggagcaggtgacagaagcgtgtgggagccaagggttcctctttgtgtctgggacacagggaggcaggggtggggaagaggaaaagggcgcccactccaggggccccagacttcgccaagcggacttgggggaggcagctggcggtcgggagtacctgggacagaggagcagagattggcggtcaggatggaaataagcagttgcggtgcggggaggtcagaagcgaggtcaagcaggggtcaggcctgggagatcagggcttagggtcgggctcagcgaggggatcagaaaccgggcttaggcctggggggagagagatgagggtcggccctgaggcaggggggtagaaggcggagccagggc

SEQ ID NO: 1886 - DNA, 844 bp, Artificial sequence
  DNA replication origin
caccacgcccggctaagttttgtatttttagtagagacggggtttcaccatgttggccaggctggtcttgaactcctgacctcaagtgatccacctgcctcggcctcccaaagtgctgggattacaggcgtgagccaccgcacctggccaattgtggagttctaagagaggaaatgacacagtccaatttgcatctcaggaccacttggggaagtacacagaatagatcaaaggagataagactcagcagaaagaccaagaaagctccacaatagctcagacgacagatgactgtggcctggcccagggtggtggcagcagggaagaggagtggatgggttggaaaacaccgcaggaagtagggctcggtgattaactggaaacgggaactaggaaggagaacaacttctctatttctggtttgggcattggatggatgaaggtgccatgagtgccttcatgggacgggggagaccccactggaggagcaggtgttgggtggtgggcatgttgagagagagagagggctatgggcactgggcaaacactccatgggtatgaagagagagacccggctggaaatgcagatctgggggacatcagggtagaggtggtgactgaggtcacaggagcagctgagacagtccagagagcttgtagcaaagttagaggaggacccgatggagccccagcggtgcagcaggaacagaggccctctacgcagactgggagggatagccagagagctgggagggaaagcagaagagagaagtgtcagagaggccacgtgaagaacatgtttcaaagcgggagtagacaacagtgtcaaatgctgccaagaggt

SEQ ID NO: 1887 - DNA, 752 bp, Artificial sequence
  DNA replication origin
ccctgagctctatttcctcagctggaagatatggataattattcaggtgcctggaacacaggatcttttctttttttgagatacagagtctggctctgtcccccaagctagaatgcagtggcgagatcacagctcactgtagcctcaacctccctggctcaagcgatcttcccacctcagcctcccgagtagctgggaccacagatgcacacccccatgcctggctaatttttgttttgattttttttgtagagacagcatctcacaatgttgcccaggctggtcttgacctcctggactcaagcaatcctcccaccttggactcccaaatgttgggattacaggcatgagccaccgcgcctcgtcccaggatgttttctattagtccaagtatatcccttcaaatgtaatgagagtatcaagggtatagaaactcttagccagtgggttaaagcagggagaagtgaagtttgggggctttttaagcagcgtccgccaaatggagatggtcaaggtcagaggcgttactttttaggaaagacatggggcagccagaggagtcagggatggatgtgctttggggacctcttcagtgggtacaaactggaggctttggcttggtaacatggtgttttgatgtttggttacagtgaactcctgctattcatttacttagtctttcaatagtgctgtgaaatcaatcaagcaatcggtcagtcagaataaggggcaagagagtggagatgaggcca

SEQ ID NO: 1888 - DNA, 875 bp, Artificial sequence
  DNA replication origin
gtaacatggtgttttgatgtttggttacagtgaactcctgctattcatttacttagtctttcaatagtgctgtgaaatcaatcaagcaatcggtcagtcagaataaggggcaagagagtggagatgaggccattctttcagagaggggatggctggggaggcccctccaaagaagtggcattggaacagacctgggtgaggcagaggaaacagtaaagcaggttcaaagcctggaggtggaaatatgttaggtgtgttccaggactggcaaggaggccagaataagtggggtgcagtgagccagcaggagagtgaagaaggtcaagtttggaggcgggggtggaggcacagaccttgcagggccttgttgtcagtgccgaggagttggactttccctctctaagtgcgatggaagtccgacgagagttttgtggagagcgatggtttccagctgtgcattgtgggaagatgaccctggctgcgttgaagggagtggtcacattcaggcacagtggaggcagggaggccaggtaggtgccagatggtggcggcttggttgggatggtgcgacctggcctgcccagggatagattctgaaggtagagccaatggaatttgctcagaaggggatgtgcagggggagggaaaggaagaatgaaggagcctgagccctgggggagccgtggtgccgttactgagatgggtaggctggaggtgaggaggacttgaggacaaattgagaactggtgtttggaggtgttgggtttgagaggccaccagacatccaagaagagtcattgagcaggcatttggacacacgagctggacacctgggagaggctgccacatcctcactcctgctaaatggcagaggc

SEQ ID NO: 1889 - DNA, 1826 bp, Artificial sequence
  DNA replication origin
cagaggcctcccagctcctgtctgggctccgcccctccccaggccctgtgaagttgggctggagttgggcaatagggcagttctggctagccctaaaccaggcatttggtgcagggggaagtttctggcactgtcagtgagcatcctggctctgtgtgtgacttggcatgtggctccaggaaagtcacatagcccttttgagcttcaaagtggtgtcacagttgggctggggacatgggtcagcacacagggttgacacaccagtgcagtcacacggccctgctcctagggcttcttcccgggcatcttgtacctggatgaggttggctgccggcatcctccgcttctcgaagtgcttctgccggtgctgctcctggaccttcagggcaaagccggagcctaggatgccctagagggatagggcatggttgggggaatgtgctggcagtggtggggcagtaagaggctgcaagggtgtccccatccttgcccctctgaggtaccccaggctccccaggcaaatgtgtgacaggggtgagcaggtcccaccctcagcctcccccaccaactgagcaggaggcaactcacggcaggcagggcaaagaaagagatgcccagtaaggcgaagccagcagccaggaccctgcccagccatgtgtgcggtgtcttgtcaccatagccgatggttgtcaatgtaatctggagacacaaacaggttacaggcaggactggtcacgggggccacctacggcttgttgggggtacaggcaggtaggagcctgatcatgagggaaggggcccctggtcacccacgggggctggttagggtcatagatggattctccctctcctgggctggtcaggggaaaggggtatagtcacaaggtcttgatgtgcggggctagctggggacagaggcaggtccaccagagcaggttggggggttagcattggggctggtctcaggggggtcccagctctagtgagagggcaggggcaggcccgctcaaccctgagtcaggagtcacgatgggcagacctcgggaagttcccagggaggatcccagggagaagggcagccctacaaagaccctcacgcaccgtcccccaccagagcgagtcggcgtaggaggagaagtcggagttggcgtccttctcagccaggtagaccaggaaggaggcgaagatgagcaccaggaacccgatgtaccaggcggtgatcagctcctgcggggcaggcggaggggcgcggtgaggagcgctgtgcctgcctgggagatgtggggggcttccacacgggaaagggataaaggtcccccatctcccggagtcccaggctcgcttttctttctcagctcctcccatcacggcgaccctgccccggccttcgcgaaaccgccagcactccccctaccccgacccccattcccacccccaccctcaccccgcctgccttgagtctccaggttccaggctcaggactccagcacccggcctaccttgccccgtcccccaagtcccactttcaggcttccacctggggcccaccctagccccgctccagccccaccctcaagtcccacctcagctgcccactttgtggtacgagtggtcccttcaaacccagaagcatccaggggaaaccctcaagccccgcctctccggccccgccccctgatccggtccggactcctaggcccgcccctacctaattcagaatccacttcgccccacccgcttagacctcgcctcctgctagggctccaacccccgcaggccacaccccttcccagcacggagacagcccctctgacctcgccctctcc

SEQ ID NO: 1890 - DNA, 1307 bp, Artificial sequence
  DNA replication origin
gcagtgatacagccagctcgtctcccctcagtcctgaatgggggacagagttagtggatattgcagctggttggagaaagtgtgggatgggcagaaacatgtgttccagacttaggtgcatgctcctaccctgaacccccatgtaggaatatgtgcccacttttactgggccagtcagcagcctcagggcccagaagtgggtctgccccactggcccgggccaggctaagactgcatgggggtggcaccaggagagggattattaatagcatcacaaaggtgcgtgtggccaggtgcctggctaggccctcaggcaggaatgaaaaccatggagcccagctcggtcccacgggcaggcgggcatcaagcttgtggctggggcaggatgctgtgctcagcgcttctgcgggtgccttttttgcctcattagttctccaggagaagctgttgcgcgattccactcgcctctgcacctggcttccccatccctgcgccctcccagccctaggggcttcccaggggagaagcaggagagaaggggccgggaagaggggctcccagcatcacactggtgcccccacatctctccacccggcagaggcaagctcctacctcagagtgggaaggtgactagattagaagagaggccttttgttcaaggctgggcattcgagagtggggcagggctgatttgtaagaaatacaatgtgtatgagggaagatctgggggtgggggtggtcagatggtctaggacctctgcccagaggaacagagcctagtctggagattctggatccactgggcatctgctccctggaccttagtttggtcatccatgcaatgggaaggcaggcaggagagagggaagataccctccttggctcatggcagcagaaaatggcctggagagttaggaagaagccacggtcccgaatctagtcttcaaaaacccagtggcaagagtgagtgctggaggggaaggaagctgggctagccaccctgtcacaccgccctcctcacctccatctccccttaaaatccagagtcagatctggagggaaaggatgtcagggccactgctggcctctctgaggaggcacggcacgttcaggcagtcagcttgatgggctgagagtaagctccttgcacggctgcccttgagctgtgccagccttcacatccatgcttggcatccctgggaactgggggtagaaagggagtggggaaggccagtctcccactgtccaccctgtcctattctggccgggctgtcagtgaacacctctagagcagcaggacctggcaa

SEQ ID NO: 1891 - DNA, 1234 bp, Artificial sequence
  DNA replication origin
tggtgtggctgcactggagtgagaggtaggaggtgaggtcagagggctaacggcactcagagagtgtaaagtcctgtaggcccctgcaaagacgttggtgttcatccaggatgagctgcaagcattggagggttttgtgcaaacgactgacaagatctgaattgtcttttaaaaggatcaccctgggtgctgtgttgaggatggacttagcggagtgagggtggacacaggtagaccaatgagaacctgcttcagacttccacgcatgagaccgtggggacttggaacagagtggcagctgcagaggtgggacaagtggtcagattctagatacattttgtaggcaaagttgacagggttttctgatggggtgttaagagaaagaagagagtcaaggatgaagctaaggtttttggcttcagcaagaggaaaaatcgagttgccatttgttgacatggagaaggcaatgaatggagcaagtttcggtcaggagatttgggaggtgccgggtttgtgatgcctatctgacattcaagtggagtgttgatctggcagttgaatagagaagtgtggagtgcagagcagaagtacaggatggagatgaagatttggtgtcgaaagtgtagaggaattgaaaattatggatctgaagacatcaactagtgagtggagtaaatagagaatagaggtcccaagagtgagccttggatcctgcagtgtttccaggttgcagagatagaggaggaactaacaaaggagactgtaaaggagaggtcagggaagtaggaaaagaactgggagagggtggtgtttcaaatgaagaaagggtttgctggaagaaggggtgatcagatgtgttgagtgctgctagtaagtcaagtaaaatgaggacaggagttgatcaatggatttagcaacatggggttatttgggagcttgacaacagtagttttggtgaaatggcaggggtgaaagcctgactggagtaggtttaagagagaaggggaggaaaggaattggaggtagaggatagagataacactttcaagaattttgctgcaaaggagagcagaaaaataaggtgaggtcagttctagccttgtccacccaccttaaaagtcacattcccacgtgtctccactcctcccatcctctttccccttttccccaatccatcttttcttttcttttcttttcttttttttttttttgagacagtatcttgctctgtcgc

SEQ ID NO: 1892 - DNA, 735 bp, Artificial sequence
  DNA replication origin
ctgaggtaggcttatctgaaggttatgggcgggcttatgcagcctgggggcggggcttagcaggagagggcgggtttatgggaatgtctggcggcgagggcgggggcttcggccggggagggggctcttaggtcttctcggggacccttgggctgtggctgtgggaaacgcatcctccccatgtcaccgcggcccccagagcttcttggtatggccagctccgccaccccatcctacactcacctgcttctccaccttgaccacgcgtcccatcatgctgatttcatccaccacctccgcgtcggagggccccttgtcgcccttctcccgggccttcctgtccccgggcccccgacccacaatttggtccaccctaagggtaagggaaccatcagagggcccggggacacgccgtccctcccttccacaagaattataggttgcctgatgaaggagaaggcaccacgaggggacaggcaatctgagggaaggggccattgccctgccagatggaggctgagttgagggtggagggactggcccctgctctggtggttctccactggccaagcaaaggcaccacacacgaacctgacaagtaaaacaaccgtctggtgaaagaggaatggaaatagtggactaggaggcccagcgcagtggcgcatgcctataatcccagcatttggggaggctaggtagggaggtatcacttgagcccaggaattcgagacagac

SEQ ID NO: 1893 - DNA, 941 bp, Artificial sequence
  DNA replication origin
cactcaggcagctcaatactgcgtgtggtctctctccccgtgagggagtgagttcaagtacgagaggagtccggaggcctcagagggcagtcggagcgccaggccgcggggctggccgtgtgctgccctgcctctgagaagtccctcagtccatgttggtgctgaccgagcgggagatgctgagcgtctgtgcggagacggagatgtcctcgtggtccacagggctgtggtagtcggaggtgatgtcggggtcgaacagcggcacttgcacggcgcccaggctggccgaggtgccagagcgcaggcagcgcgaatagaagcccaacagcaggtccagcttgtgctcgatggactgcacctggggacggggcgcagctgggaagcagggcctgggaccggaggggacgcggccgggggcggggcttgggtctcggggcggaccctagccggtggagtgggcggggcttatctgggaagcacaaatcccgcctggaaaggtggagcttggctagagcgaggggcgaagctgggcactggtgcataacccggggggtggttaggtgtgaccgatggggatagtccgcgagctacagcgacaactgagaggcggggtcaaatggagtagggggaactgaggtaggcttatctgaaggttatgggcgggcttatgcagcctgggggcggggcttagcaggagagggcgggtttatgggaatgtctggcggcgagggcgggggcttcggccggggagggggctcttaggtcttctcggggacccttgggctgtggctgtgggaaacgcatcctccccatgtcaccgcggcccccagagcttcttggtatggccagctccgccaccccatcctacactcacctgcttctccaccttgaccacgcgtcccatcatgctgatttcatccaccacctccgcgtcggagggc

SEQ ID NO: 1894 - DNA, 1513 bp, Artificial sequence
  DNA replication origin
cagccactgaacaaaaccaagaacaatcacctcctcttgaaaactttaatgaaaccaataagttaataagttaacaaagtgaggtacttgcatatccgagaaccgagttgatggcggaacctcgatcgtggaaggaaggagggcttcttcccatgtctccttggtcatagggtaatcccattctcctggccctctccacagctgtctctgagtgggtggaggggtggctctctggggacagtgcagtgcaggtggggtgagccaggagtggctccatccagggcatgacggtcacatgcagagggcatgttggggcagaggctgggcaccatggactgagtaagatccagtccaagccctggtgctggcgcatgcaggtccccagcacgagatgcaggcagcgtggcctcggccccttgttcccacagagggttgccattggtccactacccctcaccttcctgccacctgcattggctttgcagaagaggagcaaaggggtggggataagaaagtgttcctggagtgaatgggggctgacgcctggatgtggcgctgccaattgaagtgaagaagtggggtgtggagggaggggagacagtgcatgtgaaagccggatgcgcggttggtatagctattacatgcattcttattctctctgggagttagagtgactaggaaggcacaggcctggctagaagtgggcctggggtctctccagtggtgtcaggcctgggcccgagttgtgctgtggagacacggaggcgggcccttggggacaggcagaggcagtgggttagggctcctggaccagagaggaggagatcttcttgaagaaggggagcgggtaaaggtctgggtggggcctggagagctctcgggttacttcaaagctccttctcctgctcagatggagttgggggtcttcctcttagtggtcgtcaccctgcaaggccagtccactggcatctgctgcagaggcccaggagcggctgagtggctctgcactcatgtctccaagtgtgtcacgtcattgcatgtttaagtgtgagaggctttcttcctgtctggagaaactaaaaggctatgtttgtgcgatcgtccacgaagcactgtctgggagttttggggaggatacagaaacctgtgctgactatgagtggtgtctggagggccaaggaggggagtggccacccagcaggaggagggagcccctgggagctgacacttgcaaatgggaagaaaggcccaggcattgcccttaggagagggcaggggagaaacaggccccatgctgggaggggaaggagtgataagccaaagaatagggacagggtggtggccaagcagcctgagaccagctactgctgggggcccagctcccaatgggggagggacagagagaccccatgggggtccccaaagttgcatatttaacatggtttgcatatatggtgtccacctgccttgtggcagggtcctgtgctttgtgggtacctgtgggggcaccttg

SEQ ID NO: 1895 - DNA, 1553 bp, Artificial sequence
  DNA replication origin
gtcctccttccagccctttccggccgtgcctccgccggccgcgggcatcgcgcacctgcagcctgtggcgacgccgtaccccggccgcgcggccgcgccccccaacgctccgggaggccccccgggcccgcagccggcgccaagcgccgcagccccgccgccgcccgcgcacgccctgggcggcatggacgccgaactcatcgacgaggaggcgctgacgtcgctggagctggagctcgggctgcaccgcgtgcgcgagctgcccgagctcttcctgggccagagcgagttcgactgcttctcggacttggggtccgcgccgcccgccggctccgtgagctgctgagggcggccggcgcccgcccggcgtgccggagaggagaaagggcccgactgcccgccggaccctgcacccagcgactgggccccgcgcgcgccctccgcgagggtggaggcggcggctgtgtgcgcagggcccggcaccggactgggaccctggcgtccctccaggccttgcctcctgcgggaggacagtttggcttcacttctctgaccccagcctcggccgtaaagtgaaagagaccggaccagcttcagctttcggactctggttcttggatcgtgtcctctccccctcgccgccctcttcccccaatctgagccattgcaggcctctgcctgctgccccctctctcctcgggatcgggtccccagagccaccatctcctgagcctcccaccccgctgcctgggccctgtggttgctgggcctcccacctcaaggaggggaaggttgtacagcccgaacccgtggagcaatgccctgtctggcctccaaaaccaaaataaaactgggtcactttacagtcttgccgttttcatttccttatcaccccgagccctgactatatttagcttccaaagtcccaaggttgctgaagacactggatggcatgggggccacagtccccagcagtgcccaggagaggaaaccgacagtttctttcaaaaatatctcgtgggttgtgcaattgttatgtcacaacctggagggcagaggctgccactgggtggtggggtaacccactgggcttcccagctcctagggtagggtggggggagcttggtgctctgccagagaggagctgggtggcaccgagttcagacagcctagctttggaccctgactctctcctttgcccaagacaccatccgttctgatttttgaggcggtttcccagagggagatggtccccgtctcctcaggtagttacgctgcctttagcacagtgccaaatacctgggcagttctcagtaagtgacggcaattattattctacaaattggtgctgattttattccaggccctgtgtcaacctggtgcatgttctcatggaatcacagcccaggtgggaggaggtgggtgataggcctgaaaacaaactaatcttgctgcaaggaagactgtgatgagttctagaaaacagtgctaagcagcactttgggaggccgagacgggcagatcacgaggtcaacagatcgagaccatcctgg

SEQ ID NO: 1896 - DNA, 1235 bp, Artificial sequence
  DNA replication origin
gctgcggcgcttggcgccggctgcgggcccggggggcctcccggagcgttggggggcgcggccgcgcggccggggtacggcgtcgccacaggctgcaggtgcgcgatgcccgcggccggcggaggcacggccggaaagggctggaaggaggacggcggcccgaaggccccgtacgccagggccccgggttggcggggcggcggcggccccagcggagccccccgcggcctcagcccactgtccaggcccgggcccgcgtacggcggcagagtccggagcgcatgagggccatgggcggccgcggcggacggcggcctctgcaccaggcggtagccctcggcgagcatcaggtggtcggccatggcggcaggccggctgcctgcggggacagcgcgcggtggtcagcgccggctcccccggcccgggccagcggctgctctgcggcgggagacccgggcaccgtgcggtccctgcagctcggccgggcggagcaaaaccaaacccgactggtgccccggcccagcccactactgcgcaccttgcggccgcagcctggggtcacaaaggcccgcaacctgtagtgctccgaaacctccgcgtcgcgtagctgggctcggcgtattcttatacccagaggcggggcttccccgccctcggacgctcattggctgggcgagacgcttctgggcgggccgcgcacgcctgcatctaggtcttggccccgcccctcccactggaaccccgccccttgggactccggccacgccccaggctctgagcaccgccctggggcggggtatttggcactttcggagggattcggtctggccctcagggcttcggaatcggacttggctggggtagagcttgaactgaccagaaggtggggtgggagggccagagttttaggccccccaagagctgcaggatgtcaggcctacgcaaccttttaactttccaggtagagaccgaggctcagtggcggaagaggcttcctggaaatacacagcaaagccttgatcaaagtgagactgcacagctacacagggcgcatgcaccttagcggtgcagggtccccgcaggaggtcagctgtccattcccataacccccaggagagcctgttgctccccctctagttcccactgcaccttgtctgttgaagcatgtacttagttgttattaatttatgggcacgtctcctgaaggacttgttcatcttcttcttctcagcact

SEQ ID NO: 1897 - DNA, 1152 bp, Artificial sequence
  DNA replication origin
gggcgcctgggaacctcctcgcgcgtttggccactcgctgctcctggcagtaggggcttcgggccccgccgctgtccccacccaggtatggggatgcggagttgatgggtgcggggcgctgggagggggcagatgaaaggggcagtcgaaagggggccatgcgcgccgagcgcagccgggtcattagccgcgggtgtgagcggcggggcaggcttatcgcccatccaggcctggcgggcgggcgagtccccgacgcggctgccgccgccgcccgcggcagagggcacggcggttcccacgctcgggccctggttcgggggcgttctcgggacggcgtggccgcgctcaccaccaccgcggaggccgggctgtaattaggataattgcgctgctcccagcctggggcagctcaggaccccggctgcaccgcgctggcccgggacgggcgggggcagggggtggcggggcccgagcgatacagcccctggcgcagtccgttcctctagacaggtgagtcagcacacctgggcggccccagccaccaaggggctttgtggggaaatgagggaaggggagagaactagcctggacggagcacctaatgtatgccggcggtgtggattaaactattccattacggctcaacattggggtattgcgggagtaggtgagaacatctgtcctgcccggtggtgcctgacccagagaagatgtgcaagacgaatagcatcttcatctgcacagcagtttagcaggtgggcatcaggaggcccagaggttaagtctcaagactacacagccgggagatgcatgcttcagaaaggaggacgatgaagacctgcctggagtggtggcccacaactgtaatcctagcactttgggaggcctaggcgggggaattgtttgagttcaggagttcgagaccagcctgggcaacatagcaagacccaggtctcccccaccactccatctctacaaaaaatacaaaacaggcctggcacgatggctcacgcctataatcccagaactttgggaggccaaggcggtcagatcacctgaggtcaggagttcaagagcagagctggccaacatagtgaaaccccatctctattaaaaatacaaaaaaattagctgggtgtggtggcaggcgcc

SEQ ID NO: 1898 - DNA, 945 bp, Artificial sequence
  DNA replication origin
cgaccgcatgcgcccggcagtctttcacggaggcgggctctaggctgtgcgcacgcagaggttggagggcgggccgggcctggagggcgcggggcggggcggggcctggagtgcgcaggcgcgggacaggaccgctgggccgcctccgctgaactgtgccgccgtaggttcgaggccgggcgggtggtggcgtgtctgcccctctgcttccgtcccagcctgtggcccaagcttactctcttgaaggggaggaggctgtttgggaactcacgcctggcctattcgtcacctggcctcgcgtcctcccacagcggtctcctggagttctgggcgtcgccttccatccgatggtctttcactgtgggctcctggcggtgatgcgccagcgcatctctgcctccgggcgagggacggcggcagcgccaccctggcctccaagacggaagtgcggagggtcgcgcggcgttggctcctcgtcggcctccctcctccccacacctgccccgaaggcggctgctttggatggactaggatcccgaaaagtacggtttcatctagctatcgctccctgagcaccgactgtgccacgcactgtgctgggcaccgagggaccctctcctcggactaacgatgtagggaggcacactgagcagctcattacactttatggttgttatgggtgcttgctgcagagatgctggtgccggggcagtgagtgcccagcgcggggactgacccaagtccggtggtgattgggaattcaggcgggaagcccgccctgaaaaagtaactttgaagcagagacctaagtagacggcaaagatgggaaagggagaggcggggataagaaagtgagacatgcttgagcccaacagttcgagaccaacttgggtaacatagcgagaccccgtttcttataaaaataataatagtaggccgggcgca

SEQ ID NO: 1899 - DNA, 762 bp, Artificial sequence
  DNA replication origin
caggccccgcagcctctgaagccgccccgcgccccgcttggcccctctccccagcgccgcccggccacgaggcccgcgcgcgggagccggcagctcgccggccggggcgcccgccccactcccgttaggcacacagcccattgggcaggacgccgagtcacctcgcccctgattggtaggagcgacgtccgtcaccgcggcggcggggctattcggcgccgggctcagctcgcgccgctgactcctgcgcgggagaacagatcccccccgggatccctggagtcagcctacctgcggccggcttcagatcctcccgtcagcgacagagctgggccggcgacgcgcgcggagccccggacagccagtgaacaaccccgaccgcatgcgcccggcagtctttcacggaggcgggctctaggctgtgcgcacgcagaggttggagggcgggccgggcctggagggcgcggggcggggcggggcctggagtgcgcaggcgcgggacaggaccgctgggccgcctccgctgaactgtgccgccgtaggttcgaggccgggcgggtggtggcgtgtctgcccctctgcttccgtcccagcctgtggcccaagcttactctcttgaaggggaggaggctgtttgggaactcacgcctggcctattcgtcacctggcctcgcgtcctcccacagcggtctcctggagttctgggcgtcgccttccatccgatggtctttcactgtgggctcctggcggtgatgcgccagc

SEQ ID NO: 1900 - DNA, 1293 bp, Artificial sequence
  DNA replication origin
acacttggcagggaaggaagaatgctcagaagtcttccccgctccaaaggctctttgcatcctctgctgcagcatttccaaaagcatgctccctggtttcaacaaaatgcacatgggattctcaaaaagggtgttatggatataaatcagagaaacgctgattaaaccaagtcatttaacgcaagaatcctgggagtgtttagcaagtaaactcgcactgtgatcactgctatacagtatgcggtgtctccaagcttatctgaccctaagtctctcactttacagttccttattgacacatgaaaatcagtcttaggtacattttagatatgttctaaccagacatataccttactgagactataccctggtctccctaagttttggatgatcctagaaattcctctgccaccgagtgagttacttctacaaaagattcatctcatccaattacatttgatttgtcccaattttactctaagagtttaacatctctctttacgttctttagtttctctctttagattcttgcagtctcagtgcctggcaatacatatgccagtgtacataaagatcaggcgggaggctcattcattcatccttatgggctactgacttacatgacagctactgtgcttggggactgcaaacattaatcagatttgggcccatatctcaactttctggcagtccagttggagagatgaaacattaacaaataaatgagtaattcagtgacggtggaagcagacagaaaacatgtttagactataaagggggacgatgagagcagacgctttcagtaccatggccatcagaggaaggtgagacaagtcctgggggtagtgggcggatccaggcggctcctgttttgtagatatgacttgcaatgggccttgaaggactgactgcacgactcagagcacaggaaagggaacagggtgaacaggcaggtgcagggcagctacagagaacagaggtaaggccgtgagggggaaggcggggaagcagggatatacagtggaagataaactggaaaggtaggcaagggccagatcatgtgcaaactggcatgcccaatctgaacttaatcctgaaggtgacggaaggcgcaagaaggttttccggcacagaagtaacgtaaatcaagacgcatcagagaaattcaacaaagactgaggggggaaatgctttttctttcaatgttatgagatgaagtgccagcccccatcactagtgtgcagacctcaatcatgtcacttgagctgcctgcaacgcgggttctcacctagg

SEQ ID NO: 1901 - DNA, 876 bp, Artificial sequence
  DNA replication origin
aggtgctcagaaatgccactcctccttcttgagtaacacatttgtgtagttttcaaacagtcttggtgaccttggggcagctcggggggtgagcagcaggagtttggtaacctgccaccatataggtgtctgtgatcacattggtccctaaccagcatgaatggcagccgaggcaggggttgtgtgctctttgctaagtgggaaaaccaggtctcagagcagttgtgatcacccagaaaatgtcacctggctggtgagtggaggggctgggggttccaaagttctcatctgtgtctgctgtggatgtggccagggtcttcaagttttaggggatcaactgaagtgtgttctgtggaacactagtcctgtgaaatgccctgttcaacaaggtttggtgattttctggtggctcagaccccaaatttaggagtatccttaattgtctcaccagcaggtatttattgggtgtctaccatatgccagccatacccaaacccctgtcccccagagcagttattcagtgggggaagcaccaaatataagctacagagtgtggtagttcatagatggagaccaggggtggaagtgagcaggggagtggcagtgctgggaggtggtgtctttaaaatagggtgggtgggaaattaagcatggacttgaaggtgaagaggaaaggaaataggccgctatgtagcgcagaggccccgaggcaggagtgcaaatgaaacaagttggtgggcgtggctgaagtggcttacataaggggcggaagacattgaggttgggtgggctaggtggtggagaaccatgtaggccatcaagtttgggctttgctcttgaagaatttggagggctatgggtgcaggtgtggcgtga

SEQ ID NO: 1902 - DNA, 830 bp, Artificial sequence
  DNA replication origin
acttgggggctgccactcaaatgaccatggcttgcggctggtactgccagctttctctgggaaaaacagtttgcctcaagctcaagcccgacgtttgtgtgaagaaaggccacgaggggacctcctctccttaggtccttttacattccagcctctgggcctgggagaccctagaagacacaggggccccgattttctccttggcccaactcatttgttcaattgacaaacatgaacaccccctctgtgccaagagtaaggcagggatgagaggcccagccaggcccccaggaagccctgcatctgtggccagagctggacagccacccaccgagctgcaaggtggctgcgctcagagctgtgagagaagacaggaaggtttgccctgctctctggggacagattaacaggggaagtgaaatccaggccgggacttagggagttggacaggcacttgcaagggaggacattccaggcaagggacacagaatatgcagaggaacctgggggcttagagggagtgtcatgtctgcagaagggcaaaccatttggtgtccctggagctcccactaaaggctgcagggggtgctaaggaaggaagttgggccagaaggtagggtaggggccaggtcaccaaggctatcatccaaggcaaggctgaactgctggctttattgggtgggacatgggacgttaggataggtcactccatgagacaggtgattttggtttcttttggtgtgaaaatgatggtgtttaaactgttgcagaactaaaaggctctgtggcttacatttcaactcaatttcacatttgtatgaagtttatcc

SEQ ID NO: 1903 - DNA, 1006 bp, Artificial sequence
  DNA replication origin
ttctcggccgtgtcagcccggccccgagcccggaggccggctctgcatctgcggtcgggcgggcggggcccacggtccggtcgcggccctgacgccgccaggactgcccgggggccccggcacgggaaacccaaggccgggggccctttggagggtcggcgtgggggcggtccgtataggtcgccgtgtctggccggcggggccgggtgggccggggcaggctggctgggggccgagggccgggcggcggcgcgaccccgtctgcgcgggtcagtcggtcccctccggcgccagaggtgggaatgcctgtgattctggctggccgggtcccggttcggggaaggcagagacagaggtcgacggggcggcgtggcccccaccgagagctggggcgcctagggcccggagctgtcagcagcgtcctgggggctgggccccggctggccgactcacgtgtgccgcctgccccagtgccccgccggaaacgggcagggagagcggccccgcaccgaagtgagccacagcggccctgggggccagacacgtgggcacagttgtgtgccagcccgagagcatcgaaagtggtatccagccgatgggtgaaccccggaatatctcctgactggaagagaatttaaaagtcatctaggggcgctttctcccatcccatgccaaagtgactttgaaaatccccaaatccccccgataatttgacgagcccgtttggaacctcttccagtgatccgaagcgaatctctttaaaggaaacccattctgttcctggacacatttggttataagttgaaagaaacagctggctcccatccttcctagttcttttcccttatgggaagctgttaagatatctgaagatagtaatcatgtcccctgagtcttcacttccactttcttcagttgtctctcatctgctgtggttctctaaactgtcctctggatgagctttagtttcccccatccccttaaaggagagtttcttaaaagtgat

SEQ ID NO: 1904 - DNA, 1614 bp, Artificial sequence
  DNA replication origin
cttctggccccaggcggcccctcagggcacgagctcttaggcgggcggaggcggccgcgaggcgcttacctgagggcgcggcgggggcgcggggcggctcactctcttcccgccgccatgtttccgctgcgcagggagggagcggagacgcgggaagggggcgggcgggcggctcgggagagcggcgggcgggcggcggggggctccaccgagctggcggtggcggctgaggcggggggcggggcgggggctcccccggcccctcccccgcgcctcccgctgcgaggtggcgcgcgcctcggccgttgggctcgcgcggggggcggggcggcgcgctggaggagggagggcgcgcgggaacccggcccggccgtaccccgccggcctgccgacccgggtccgggggcccagttggcgcccggaccagctctccggtctgcgtcctgtagatgggaaaactgaggcctgagagggcgcgagggcggggacgaggccgaggactcgggttcgaatctcgaggacgccagtagcccgctctgaggccgcgtggggctggtggaggagccaccggtcgggcccccaagaccggctgacgtgggcctcgcctcgggcgactcccgccgggctagtggctggccgtgtggtgaccttgggcgagttacttcgcacagccacccaggggcctcttctccaacacgatagcactgcacccggagggtaggtgagagatgagttggtgcttggatgccctagggagtgtcagcgtcctcggtcctccctgtggtgatcccttcaacgagtacgcactgagcccgtgatgggccaggtacaatgcacaggctcattcttccaggcccaccagccatgttggctacacaattctatttttgttttgttagagatggagcctcactttgtccccaaggtcggagtgcagtggcgccatcatagctcactgtaacctcaaattactgggctcaagtgatcctcctgcgtcagcctcccaaagcgctgggactacaggcgtgagccactgcgcctggcacacaattggtttaaccaccacatcattttagcagcttaggaaactgacgtcttgacttctgttttggctgcttgaaaatacagtgcaatataaatcccgagacctctgctgagctggatgtggagtgggtgtgggcatcatttagaacatggcaatcctcaggtcacacaggaatgtcttgttaatgatccttctgtgaacaatgttccttggagggaagtccacttaagcaaggctggagcagcagatggggcagctgagcctggattacttgccttgcctctagaataggtcttagagctttggactgaaggggggccgcctccttgtatcctggtattggtgtcagtatccgtctgcccattcttgagaaatggaaatggtcagaatctatccaggttctgatctgcatccctgttgtctaatttaaactttcattccatggcgttttggggagtacctgtctcatgaagagccctgaggttacaaggataattagagcctaaatctaaggagcccatatttggggaaactattatgtcaatagctaatgagagcacagtgttgta

SEQ ID NO: 1905 - DNA, 1578 bp, Artificial sequence
  DNA replication origin
aactgatccatgaaattcaaaagtctgacagccactgacagctggagcagggagggcattctaggcagagaactgcatgtgcaagggcaaagttggcgggagaggcacaggctggtctggaactgcaaataagtagcaagagcagtaagggcagctgggaggtccaacaaggaaccaggaggccccatcctggggtggggtggtcaccctgtgaagtccctaccctctcttcctgctgcccagcatggcaggagaattccctgtgcactaaggctgctccccagggcatcccatgaccatgtgcaatgtgtgcgtgtgtgtgcatgcgtgcatgtgtgtgtgcctgcatccttggtgaggcaaggaggccagccatggactgacggggtcttgcctaataaatcttgaagagacatacaggatggaaatagagatcaggaaagacactggggagaaagacaagaaaacccgggactatctgagtagaaggagcagtgtctgcatgttggggcacatatgtgcatgtgtatgtgtgcgtatgtccctgagagcatgtggaccggtgtgtgtgtgtacatttgcattgtaagaaagtgtgtgctatttctgggttatccatgtgggcagggggaaaatctctgctggctctattaggctttggcttgagtgtatgtccagtgtatgttggggtgctttgctgctggtgcaaatgtggcactgttgtgcatactgtacatatacagatatgagagataggtgagaggtgtcaatactgtgtagctcagtgtgtctgtgtgctgttaggtggtctgttcaacatgggtaatgtctctgggctgtgtgtgtctgtgtgtgggcaggagccacggtgggcgtgtactgatggtactgagtgtgaactgtgtgtgtctgtatgtggggagggagtctatggtgggtgtgtgctgatggtactgagtatgaactgtgtgtgtctgtatgtggggagggatcccatggtgggtgtgtgctgatggtactgagtgtgaactgtgtgtgtctgtatgtgggcgggagtccatggtgggtgtgtgctgatggtactgagtgtgaactatgtgtgtctgtatgtgggcagggagtctgtggtgggagtgtgctgctggtattaagtgtgagctgtgtgtgtctgtggggagagagtccatggtgggcatgtgctgatggtattgagtgtaagctgtgtgtgtctgtatgtggggagggaatccgtggtgggcgtgtgctgatggtactgagtgtgagctgtgtgtgtctgtatgtggggagggagtccatggtgggcgtgtgctgatggtactgagtgtgagctgtgtgtgtctgtatgtggggagggagtccatggtgggcatgtgctgatggtattgagtgtgggctgtgtgtgtctgtatgtgggcagggaatctgtggtgggtgtgtgctgatggtattgagtgtctgttggagcccaggctcccctcccttcccccactcttctgatgacccaggctgccagtcttgtttatttccatatgttgtctgtctcttccaggcctatgt

SEQ ID NO: 1906 - DNA, 699 bp, Artificial sequence
  DNA replication origin
ctctctgctttcagccgggggtatgaggaccagggcacacaggtcctgagcaagtggcagcagccaatcccaggatggctgactttttccaggtgggctctggggatgcagcgcagctatgcccatcaagcctcagagaagcgcgtcctcctgtcctcacttgccctgagtgagccgggaaagctggcagcaagcactgggaagcaggctctggcgggccctgatggctcagcggtggcagcagcagtggtggcaggggctattctgagcgctgggaggggctggggagctgagactggaggaggggaagtgacagggaggagacagtctcttgagggcgaggggagtgccaccttagccccgggtggggggtgtctgccgatggcagtgtgtgttgggagaattgtgtggtgtgtgctcctcactgggagtgggcgagtcagctgaggtattgaggcatgcgctgggattgtttgagtgtatgtgtacaagttttgtgatccaagcacgagttgagtgggtaacgcgcacatccacctgcctgtgggcaagtgagtgcgcgtgcactggaatgcgagcatgttccagtgtccagggaggtgtgagtgaagaatatgtgcctgcatgtggaaaaacgaggaatgaaaggggaagcaagtgggggcttgtttgtgaacagaaatgaatgtgggcgtggta

SEQ ID NO: 1907 - DNA, 640 bp, Artificial sequence
  DNA replication origin
cgctgggaggggctggggagctgagactggaggaggggaagtgacagggaggagacagtctcttgagggcgaggggagtgccaccttagccccgggtggggggtgtctgccgatggcagtgtgtgttgggagaattgtgtggtgtgtgctcctcactgggagtgggcgagtcagctgaggtattgaggcatgcgctgggattgtttgagtgtatgtgtacaagttttgtgatccaagcacgagttgagtgggtaacgcgcacatccacctgcctgtgggcaagtgagtgcgcgtgcactggaatgcgagcatgttccagtgtccagggaggtgtgagtgaagaatatgtgcctgcatgtggaaaaacgaggaatgaaaggggaagcaagtgggggcttgtttgtgaacagaaatgaatgtgggcgtggtagggagggtggatgggagcttgagagccagcctgggggagcggggaagggtgagagctggtggtcaagggaactgtaggtagaaaccatgggtctgtgtaattgagacacaagcgtgaggcacgtggcgagtgtgcttgtgagtgagcctacatgtgtgagcggctgtgagtgtgtgcatggtaagagcaggtgggactgtatgagctggg

SEQ ID NO: 1908 - DNA, 1484 bp, Artificial sequence
  DNA replication origin
ccgggcgccggccctgcgcacgggccctgctctcccgggacgaggccggattgcaccatgccggagcccgagccggtgccggagcccgcgccgccgccgcccggtgaatgctgccgccgccgccgctccggctccagcgccagctcccgcgcctgccgcgctcagcgccggctgcacctcgggatgggcgggggacggggagggggcgggcccgacgcgggagggggcggggcgtttcgcctgcggccgcggaatcctcagccagcccaggtgccccgcccgcgggctgggagaccgggcgctgagctcccagctcggggcgaccccgccgcagcccctgcaagcaacagcgccgcctacggagcaggggcggagcggctggcgcgaccccgccccctgctcggcgcggaggcgggggggctagggggcggagccctaacactcccattggtccgcggctggactgtcctgcccatgggctcgacaggatccctcccagaagcgcgtcaccggttattgttacaacccggggtttcccggggcaacgggatggggcggggctcagggcactggccccgccttctactccggagaggactgccccgccctctgtttgtagactcctgacgttcccaagtctccgttccaggactctgacagggaggatgatcgaactctgctcttctttgtgccctggactgagctggggaaaaagaatgggtcaagaatacctgggttctaggctaggctttgccacaattctcgctcctccatccgcaaacatgttcttcatggtgcctgtggtcatagttttagagctccagttctcaaagtttgacgcagagcagaatcatcccctagagcttgttaacattgctggaccccaactccagagtttctgattcggcaggtctgggttggggccccagactttgcatttctaaccagctcccaggtgatgcacgagagaccacaccttgcaaaccattgttttagagtctgtgggaggttcttactgcggttgttggaacaagcacttgtctaaagttcacagtgtttggggagatgcttctcaatcagttcctggatatttattgagcacctctgacgcaccaggcactgtccagggctctacagtgagagcagcaactgaaacaaatgaggtcccctactgcatagactagtcaggagtcagatgctaatcagatcatcacatgagctcagaagggcgaggctagccgagaggttgggcagtccgtggcctcatcctacaggctgctgagctaggtttcccagtcaccactgcacctgctggccttcgctcagggtatttatcccctctgcctagaacaccatttccccgccgcaaggccctcatcagagattctcccactcttcaaagctccgtgcaaatgtcaacttagccctgacaccttctctagccccaactcccaacactttctgttctctgcttgcccagacca

SEQ ID NO: 1909 - DNA, 1186 bp, Artificial sequence
  DNA replication origin
gctagaagcggggctgggcgaggtgtgtgcccgctgggctcccgggccgccgccccctcactgcccaggtctttccctcccttcgtgctccccagcgcgtccagccccctgcctccgcgcctcggcccatggcgccccgcggctgagacagcgccgccagggacccctcccgcgggcctccccggggcgtgcagatcccggagccgcccgcccaccctccgcgaagcctccctcccctcctcgcccgagccgggcgggaccatggctgcgaagctgcgagcgcatcaggtggacgtggacccggacttcgcgccgcagagccggccgcgctcgtgtacctggcccctgccgcagcctgacttggccggcgacgaggacggagcgctgggcgcaggggtggccgagggcgccgaggactgcgggccggagcgccgggctacggccccggcgatggccccagcgccgcccctgggcgcggaggtcggaccgctgcggaaagcgaagagctctcggcggaacgcgtgggggaacctgtcctacgccgacctcatcaccaaagccatcgagagcgccccggacaagcggctcacgctctcgcagatctacgactggatggtccgttacgtgccctacttcaaggataaaggcgacagcaacagctcggccggctggaaggtgggggcgtccggctggggagggggctggggacgccgactggggcttccaggggctgctaggtgtgttgggctccaggagggccgtcagaaggagggctttttggcaccccccggggtcacagagtgtgcgcccagggcgtggggccggccagcggacgggcgggggcgtactgggagcagctgtgtgcgtgctcccttgcggggagggatgcggggtgggaggtctggtagggtgacaagggactgccgctttgaggcgtccccgaggcacgtccccaccctgtccttgggggcatagcagaggaacccattcccaggccgcggacattggggagcctccccctcctcccccaagtctgctttgtgtgactcttgttttaccctttccaccagggcacccttcttagagcgctggaataatgacttggggccaatgccggctttccctcccaaatctctatcattgcgcttcctggagctgtccccagggtgaggagtgtgaccatggg

SEQ ID NO: 1910 - DNA, 1938 bp, Artificial sequence
  DNA replication origin
ctccaggagggccgtcagaaggagggctttttggcaccccccggggtcacagagtgtgcgcccagggcgtggggccggccagcggacgggcgggggcgtactgggagcagctgtgtgcgtgctcccttgcggggagggatgcggggtgggaggtctggtagggtgacaagggactgccgctttgaggcgtccccgaggcacgtccccaccctgtccttgggggcatagcagaggaacccattcccaggccgcggacattggggagcctccccctcctcccccaagtctgctttgtgtgactcttgttttaccctttccaccagggcacccttcttagagcgctggaataatgacttggggccaatgccggctttccctcccaaatctctatcattgcgcttcctggagctgtccccagggtgaggagtgtgaccatgggcccacagttcttcttgtggtgccagagttcaccctagggcaccaaccagcctggagtggggaactcggcaggtgacctgagatctgagttctccatggggtggctgctgccccccttacctagatcaggatgggggtcactggtgatggcccctgctggtgtgaggacagggtgttgagagctggggatctgtccatacccacccaggatgcttttttccacttccctagctgtcggagcccagatccatttaggggctgggggaggggcagggtaccccagggaggcctcagtgccagccagtggaaaggggggagccaccttaggaggggacaggggcttgcttggattgtggcctctcgacccagctcctcccctggccatcttgttggagagtggggatagtctatgcctttgggggagaggaggctggagacccctcctgtgcctaggaggcgaactgtcagcctccctatgggaggagtggcctctgtgagggaggcatgcctatgtcaagggagggggctgtgccctgtggtgcctgtgagctgggtcagaggaaggaggtgtgccagtggaggaggggagacttgtgggcatgaacagctctagatacccaggggcagcattgtagagccagggtatcctgacctgggagcccatggctctcagggttagtgctggcagcttctgtccctcaccggccactgtggggcaggaacacaggctggaggagtagacctgggtctctttccgcatcccctctcccatccccttgggctcaacccccaccagaacacatttcccccaagtgtgtcctgcactccccatgccctggcttactcctccctgtagatgtattcactgtcctcaagggtacagagttcagatgcctcctccaggaagccttccctaaaccctttttagctagcttaggactcccctttctctggccctctccctgctggtagcaggttttagtcatttgtgttctgtctcatttcccctctctaccctgcttttggaagacagtggcagtgtcagaaccattctgtgcccacagcacccagcatacagtcttgacaccaagaagccaccagtgtgtgtctagtgaaagagtagggaactgagtggatggtgcaggatgctgaggcaggggacagtacattgggccagagtggctgggagggcttcttgcaggacatgtagctccagctgggcttgctgcatcaggcagcatggggaaagatgggaagagggaacatgaggctggaagtaagcagagaactgcagttcattgaaggtcttggggccaaacactgtgagaggcaccttgacacatctgcctttaacgctctcagcagtccctgaggtggttttactgtgaccaaatggtctccctccagggtctccaaagccggcattggccccaggtacaaggaaggccctgaggcccgtatttaggagtgaactggtcacacagttagtagatgggaaag

SEQ ID NO: 1911 - DNA, 1499 bp, Artificial sequence
  DNA replication origin
ccctgtgcctgggctcccagtcacgggctgtgtgttggagagggagcctaaggcgtgggctcctgacctaggttttggcagagaccacccaggcactggaaaggggcctgcctgatgctgtccccttccacttcaccctctacccagctccccagcaagcctacttccccacttattcctggagcttcctgcatggtgcccttccccattcccagtcgtttcctccagaggcctggtgaaagagccgtcccagctcccagccaggctcaggttgacagacagaacacctcaggtgccaggcctggggccagggcccactgttctctcctcattcccctcccctacaaatatactgcaattgaatccctggggtgtaccaaaccctgtgttagatggggcaggggaccaaaggagaaggcattaattggatctatttcagaataatcaggacttagccagttccacacccaggcttgtgttttgtagataggaaaggctggggatgggggtagggaaaggtaggggaaggggagttagataccctgggggagccagggaggtcctcacagaggaggtggcacttggactgcactgccttcactggggaggggagaatttgggagatagtcttccaggaagtattgactgcattcccaaaggcagggaggtgaaattgtgcatgtctgatttggggacagtttgggtgtgccagactcaaaccaagggtgtccaggcaagacagggaggtggcatgggaagggtggaatgggccagatcaggaagggatgacatgcttagccttatccctgtggtcacacctgtgatgcagggaggtggctgagtggtgcaggacagcaattggagaagacaagaccagcagcaggcttggggacacccagactatgctgaggcctagagaggctgggctcattgctgggaacccaaccaaaggggctggtcatgttcccctccaggcctaggatgggggcttggataggcggtgcctctacagcgtcccaagactgaatatccaggtagagcctcctactttctctcagatgctccagtctcactttcccttggccctggactcctctgggaagcctttcaggctgctctgagttctggcacaccttccacttagtgcccctggagttgttctgcctgcttttgtgtttcctggctgccagctccactgggagctcccaggccaggcctgggcgcctcccattcctgtccccagaaggagcactctggatgggaacttcccttctctcccaggggctggggcagcctgggtgatgagaggtgggatcaggaggggtggcaccacccccatctggcccagtaagttccaggtggggtggggctggaagagagggactcatctgagagggtgggggcagggtcctgctacagccctgagcagtggctgtcagctgaagccacccgcttcctctccccccagcctgctccagcagggctccctcctcctcctt

SEQ ID NO: 1912 - DNA, 1120 bp, Artificial sequence
  DNA replication origin
cccgcggaccccctcgctcccttccggccccacggcggccgcccccgccacaccccccgcgcaacttagggagctgaggaggcggggctcagggaggcccctggggcagccacgcggcgggagaggagggggcctggaggcagacagaccgacagacagggtgagggccccgcctgccacctggcgccgctccagcgggacgatggcgggcagcgccgtgccaggcggtaattgcagacagactaatttaaagagatgagacggttatttttaactcgcgttaaggtaatgaacggcgcggggggtttgcgggttcgaaagttcagcgcccccagcccccactttctgcgggtctggggggcccctctctgcacgccccgagggctccagccaagggactgactagagggagcagggaggttgaggaactggagaggccctgccagaggggcggagggctgagggggccgtgacagaggcgcccgccggtccagagcactcccatcagaccctcatcgccacccaggcgggctggcacccctgtgttccaggtggggaagtgactttccctgaggtcgctacctgtgaagtagtggacctgggaattggaccccaagctcgagctttttctgttccattgggtaggattgaggtggggcaggggctggagggaagggcttgttttcgactctgaaaggcttcagggcttgttccctgccgcctaccttccctgtctttgagtggcagctagtggtgaccaccacatggggtcctatctgtgacttgtaagggttgaggggtagtcaagtactgggtgggatgtgggtgcatcagctacagcagggggagccccttcctcacctcagtttcccttacctcccagcagactcactagatccccttcccaactcccgtttacccagagttgggggtgcctcggaaacaggagagggtggggctgggcctgcctatgcattggtgcctgctccctcacgttcagatcagacttgggttctccaaagagctgcagagtcctggaacccagtctctgcacccctgactcctccccagctcaaccccctctgacacactcccagcgactggaaactcaccgtctctg

SEQ ID NO: 1913 - DNA, 919 bp, Artificial sequence
  DNA replication origin
aggacataatgacattgataaagaggtgttgcctgagtgacctccagctggagaaatggggaggtgggaggtggagcctcttgtaagccagacagtcctatgggggaggagaactgaggcctcctaggaggctgaacacaggtgttggggaggggctggggagccaggtgcaggggtgggaacaggaagggggtatctacttgagggagcactgctccctgggggcccagctcccctcccctcagggtctccagagaaccaggcagggcaaggctggcaagtcccagctgttgccttcaaaggccagaaagtgccagagacagggagcctggggccctgaggagtcagatcagtgcctggagctgggggtgaggggtgggagggtaccctgggcagcaggaaggacccctcctccaggagactggtgggaaggaggcaggagggagagcctcacagagcagtggctgtgagtgtggctgggtggattcacaggttaagagcaggtccatgagctgggcagagctggagtggtaccgggcatcgttgcctagctgtggggccacgggaagttacatcatgcctctgggcctccggtccctagtgtatgaaattggagaatgccagcttcccagagttgttggtgcccagcacagttgcacacaaggcatgatgttaaagagatggaaacagcaggtctgttgggggaccgaaggggtgagagcttctggccagagtgaggatataaccaacgtttataagcacctggtgtgcaaatacttattcatgcacatgtaatgatcttacagccttaagaggtagttactgaatgtagcccactttttcagagtagttcactgaggctcacaagaaactgagtaaacaccccatggtcacatagctaggcagccaaagagccagg

SEQ ID NO: 1914 - DNA, 1036 bp, Artificial sequence
  DNA replication origin
aggtctgttgggggaccgaaggggtgagagcttctggccagagtgaggatataaccaacgtttataagcacctggtgtgcaaatacttattcatgcacatgtaatgatcttacagccttaagaggtagttactgaatgtagcccactttttcagagtagttcactgaggctcacaagaaactgagtaaacaccccatggtcacatagctaggcagccaaagagccaggcatcctgtcccaccctctgatacccaagcccctgctgtttccatagcagtacctggaccaggaagttgaggccaccaggtgggaggccccagaggtggggtgccgcaggcccagcagaagttctactccagattccagtggggccagtggacttcctgccttcctctgtcctcagaacaggcctggcaaaagcaggcagtgacatggggagcactggagactggcacagcagaattaaaaagaggatgtatggagagatggcagaggtgaagcccagggaggaaccgagggacagcagaaaaggccaccttgggcaagccattcctctctctgagcctaggtcttctggcgtgtgaatggggactttgccacacactgtggggattttgagaaggctccaacagcaaggggcttggagggcaggcaggtgggtcaggagaggagggcagggtgcagcccaaagggcaggcaggagagctgggctggcctgaaggtgggcactgaagagggtgaaggctgaggtctctgtggcaaaaggatgtcttttgaggggcctgctggaatccaaaccctctgtggagttcacagcagctaagaggagttggggtgatacctccgaaaagtctcaggcctggacccaccttggggaccccagcctactctgtttcccctggccaggccctcccagcaaagggttaacagtcttctctacctgcagttgcattttaaagacacgaaattaaagcaggtaatttattctccccacacacgaaagagcaattagttctaaacagggcttaatcagtca

SEQ ID NO: 1915 - DNA, 948 bp, Artificial sequence
  DNA replication origin
cgcgggcggcgcgtacggggccgcccctttgccggggtaggcggcggctgcgcccgccagcgccagctcccccggcgcacccagcaccgggccgggcctgggcgcgggcccgcggcccgtacgcgtcctgcgcgccgtccagcaggccctcgggcagccccgcgccgccgccgccgtgcaggcccagcgggcctcccagctcggccaggcggggcagctcacccggacagcgcgagcccagcgccggcgacagcgcgctggcggggcttgggtacatgagcggcgatgatggcgccagggcctccagggcctcgtcgtcctccagctcggccgcctccccgagcaggggtctcccgccgccgcggaagtcggcccaagcctcgtagtcgtcgctggcgtgcgaggcggggctggcggcccacttggctgcggcaggcaccggccccggggcgggcgcactcggggagctgtcgtccgggcttcgctcgggcgcctgcagctgcttcttcttgctcgccttgcccttgatgcgcaggaacttggccccgttgtccatggacacggccctgcgccgcggggtcttccctgtctttccgccctcggggttcagcatccaccacgaactcttgccggtgccctcgttctgcacgcggatgaaacgggtgtgcagcgacaggttgtgccggatggagttctgtggccagagacaaggacgcgggtgggagtcggggggtgaggaggccatggggagagaggggacgtgatggaaagaagagggggaggataagagagtgtaggaggaggagggagatagggatgaggatgaggtaagggggttgggagagggaggggacaggtgtaagtaccgggttggacaaacccagagtacccaccctctgccccagaactgcaccccccatccctccccactcccacacagagactgcc

SEQ ID NO: 1916 - DNA, 885 bp, Artificial sequence
  DNA replication origin
agctcgacgaagcacatcttcagcacgggggactcagtaggcgcttaaccaatatgtgccgggcagaggagcattagtttagcaaaggctgacgagtacccagacaaaaagccacaatagtgactcaggcacatgaaccctccccctgccccaagttccctgtcaattatcctccgccaccactccccttcctctagcccaaggcgcgggaaatatttaaaacaattttattcatgaaaatatgctgtacaatgcactctacacagcctcgacacggcacacacgcacacgcacactctgacggcacggccacggtacactgcctacgatacgcgccggggacgccgcgcccaccgcccgtcccggccggacacttataaatatgggagaagggccagaactggcgcggagaaaggggcgtcggggttgggggtggacggggctgaggcccgctgcagaagctgagaccagtactagggggtgggggcggttgaagagagggactgactccgacgggggaggggagaagcgagggccggcagggatgggagggggagactgaactgtgggggtggcggtcgtcggagggcgatttgggggtggagggctgctcagggtggatggatataggtaggtgtgagttttccgcagagggttgctggcttcgggtgggtgagactaagaccagtgggaaagtgtgtcaagtgggaatcagatccgtgtttggggtgggcgcggggtcacggctaggcctccgcaaatgaaactgaagatttgtaaacgctccctggcccatctcctagttggcttccccgaccaccgtccacaccaggcggcccaccccgctcctccctactcccagccagcctggaattcagcctcctc

SEQ ID NO: 1917 - DNA, 850 bp, Artificial sequence
  DNA replication origin
ggagatgggccagggagcgtttacaaatcttcagtttcatttgcggaggcctagccgtgaccccgcgcccaccccaaacacggatctgattcccacttgacacactttcccactggtcttagtctcacccacccgaagccagcaaccctctgcggaaaactcacacctacctatatccatccaccctgagcagccctccacccccaaatcgccctccgacgaccgccacccccacagttcagtctccccctcccatccctgccggccctcgcttctcccctcccccgtcggagtcagtccctctcttcaaccgcccccaccccctagtactggtctcagcttctgcagcgggcctcagccccgtccacccccaaccccgacgcccctttctccgcgccagttctggcccttctcccatatttataagtgtccggccgggacgggcggtgggcgcggcgtccccggcgcgtatcgtaggcagtgtaccgtggccgtgccgtcagagtgtgcgtgtgcgtgtgtgccgtgtcgaggctgtgtagagtgcattgtacagcatattttcatgaataaaattgttttaaatatttcccgcgccttgggctagaggaaggggagtggtggcggaggataattgacagggaacttggggcagggggagggttcatgtgcctgagtcactattgtggctttttgtctgggtactcgtcagcctttgctaaactaatgctcctctgcccggcacatattggttaagcgcctactgagtcccccgtgctgaagatgtgcttcgtcgagctctgcacctgtttctgtgaacatgtgcatgcacgaagttttggcccaggaa

SEQ ID NO: 1918 - DNA, 1008 bp, Artificial sequence
  DNA replication origin
caggctctgtgttgggcacgatttttgttcccattgtacagatgagaaaacaaggtcagagagagaaaatgacttgggaaggagggtagagatggtgaaaagagatccctttgaggtgcacagactgctgttggaatccattttctacagtttgccagctgtgtgacctcgggcaaattttcagcctctgaagccttgtcttcctggactacaccatggaatagtagcatccatctcatgaacttctgtcaggcatgaggaaaggtatggaaagtgttcagcgcaggtcctgcactcgttcattccaggaagattcggtgagcacctgttaagttcttataccaagcattggggctgccctagagccacacggacacagtctctactcttaaggaacttagaggctcctggggagaacaggccagcaaataggcgattatagatcaaagctgtgctgatcggaggaggagctgggggctgtcgtgggaatgaatgatggggcagcactcatcttggacttgagtcagggaaggtgcctggactggtgctgcctcagctaagcttggtaggaggaactggcattgggaaggggatttagatgaaatggcatgttcaaaggcccagagtcaagaggtgtgtggattccagaaccaaaagcagttgagtgtggctaaagttcagagagggacagattactgatggcagggaggctaatgggccagagggttcaacagtggaagagggacagtgtggcccagccagaggtgctgatgtggctcaaaccaagttatgggggaggacagtggggctgcaagggaaaggatgaattcacatctactttggatatggagtcattggggacttggttgtggattggacctgggggatgaaggacagggaagcatcaattgatgcttggtttttgtttgggtatctggggagacagggccattccttgagatggggcacaccaaagcaggaggagccctagggaaattgatgtgctca

SEQ ID NO: 1919 - DNA, 1526 bp, Artificial sequence
  DNA replication origin
accctggaatatgttttgctgggaagggggaagaaagatgggtcctggttggagccaagtgtagggcttcagaagggtttttttttttttcttgtttgtttgttttttgagatggggagtcttgctctgtcgcccaggctggagtgcagtggtgccatctcagctcactgcaacctctgcctctaggttcaagtgactctcctgcctcagcctcccaagtagctgggattacaggcacccgccaccacgcccagctaatttttgtatttttagtagagatgaggtttcatcatgtcgaccaggctgatcttgatcccgcccacctcggcctcccgaagttctgagagtgcctgagccaggctgaggtgcagtggtgccatcttggctcaatgcagcctcaatctcctgggctcaagcgatcctcctgcctcagcctcctgagtagctggtactacaggcagctgggactataggcatatgccaccacgcccggctaatgtttttgatttttagtagagatgaagtctcgttttgttgcccaggctagagcatgtttcttgatgcagggaaagagaaggtgaagaagggggatagatgggaggagggaagggtggagtccagggctcagggcacagatgggctcctcggggagggccggctggtttatcccatggttgcatctttgcagagtggcagggagacttttgcagggtgggtgcccaagactatcgctatagaaaggctccttggggtccaggttggagagggagggaagtgcccccaggaggagaaggaaggtgctgtgatgaggtcagagagcgaaggagggctaagtgaaggagggccatggatacaggccaatatggggttgggaggatatggggtgggggaggtagttctgagtgaggatacccaggccatggcatgggtggggttggctgggccaagtacaaaagagggagagagttgttggtgatgagggagaagtagggggttggccaggtcgtcaggggtccagggaactcccaggatgaaggcaggtgttggtggagaaggccaagtcaggcctcaggtcctgggggcgtggaggtgtggagggaggcgcggggaagtggaggaggtggctgagggacggggagagggagggcggggctgaggatgaggggttcttgccccaaagtggtggcagggtgtcctggcttgcagcttgaagggtttttatatttttggcttcttgatgggaatctggaattagtgatggaattgtgtcatggatcaggattctgtattcacagggcccttaatggcccacgttgccctgaatgagtcccctgctgtcttgtctgacttctcctctgggtgaagtctacggggctgggctatgttgtcatttacctctgccgccaccgagcaggcgagaaaaccgcatcggatgaacagttggagagacgtggctaggagctccttcctggaaaacagtctccaggagatgtagcatggtgaggggattgtgggttcccagggcc

SEQ ID NO: 1920 - DNA, 1534 bp, Artificial sequence
  DNA replication origin
cacactgcgagttgggggtggccctggccgccagcctggtgtccttgcctggaggaaatgcgaggtgtcagatgaccctgcccgccctgcccctcccaggccaccctcgcagaggacgcctctccctggcaggacaccctagggccgtctgggcccagcatgcccgctggctcgtgagctggccctggaaactagcggctggcgcaagtgggcgttcggcggcactgctggctgccagctgccagccccacaccccacaggcccctgcctggccagccccggtgcactcctgggatgtcccctgcaggcccaagtgtctcaggcccagccgctgcctcggggctgtgtgccgctggcaggacacacagcctcccgagctcaaaaagcggctctgccctttcttcttaggttcaggctaaggccggctgtgccggaggggcacaacacctgagtggagatgagcagcccaggggcgccctgctggcccgcaccctgcccagaccacatgaaggcgaagaggttgctgagtgagtggcgggggtgtgggatggaattgtgtacgtggtgtggtgtgtgtgtggcgtgtgttggtgcgtgtgtggtgtgtgatgtgtggtctatatctgtgtatgtggtgtctctgtgtagtgtatatccatgtatgtggtgtgtctgtgtgtggtgtgtgtgtgcatgtgtgttttgtgtgtgtgctgtggtgtgtctgtgtgtgttgtgtgggtgtggtgtgccctatgtgtagtatgtgtgatgtgtgtgtggtatgtctgcgtggtgtgtgtacatgtgtgttgtgtgttatgtgcgtgtgtgtggtatgtgtggcatatagctatttgtggtatatgtggtgtgtgtggtgtgtgtgtgtggtgtgtgtgtgcgcacgtgtgttgtgtatgtgcatgtgtgttgtgtatatctatgtatgctatgtgctgtgtgtgtctgtgtgtggtatgtctgtgtggtgtgtgtacatgtgtgttgtgtgtgttatgtgcgtgtgtgtggtatgtatgacgtatagctatgtgtggtatgtgtggtatgtgtggtgtgtgtggtgtgtgtgtgcatgtgtgttgtgtatgtgtgggtgtgtggtgtggtgtatatctatgtgtagtaagtgtggtgtgtgtgtctgtgtgtggtgtgtctgtgcatgtgttgtgtgtgtggtgtgatgtatatgtgtggtgtgtgtgtctgtgtgtggtgtgtctgtgtgtattatgttatgtatgttgtgtgtgtggtgggtgtggtgtggtgtgtgtgtgcatgtgtattgtgtgtgtgatgtggtgtatctgcatgtgttgtgtgtgtggtgtggtgtatatctatgtgtggtaggtgtggtgtgtgtgtctgtgtgtgtctgtgtgtggcgtgtctgtgcatgtgtggtgtgggtgtgtgtggtgtttggtgtggtgtatagatatgtgtggtgtgtgtgtgcatgtgtgttatgtgtgtatgtgtggtatgtatgcatgcatgt

SEQ ID NO: 1921 - DNA, 1681 bp, Artificial sequence
  DNA replication origin
aagcttcacagtagcacgcaataggtgcccaagcacttgcttaaatacttactgtggatttttaaatttttaatgttcttaaaaatggagatggggtctacactatgttgccctggctggtgtcaaactcctgggctcaagcgatcctcctgccttagcctctcaagtaactgggaccacaggcatgagcctacacccagttggatttccttatttaatcctcataaaattctatgaggtgggggccattactgctcccattttatgcatgaggcagctgagggtttgtaacttgtctaagaccctgcagcttgtaagagatggaggcaggataggaacccaggaaacatggctttgaaggctaagtcttcgagtgctggactctggagagggcagacctcagcccaggggccaaggacggcaattggaagagagaatgttcgggctggtctcaaggaggagtttatcaaggagggatgagggccagagccatctgggcagggagtgtctggaggcatgaagcaaggagcatgtttggcaatggggcattgccagaggggatgggtgtttattgtgtgggtagtgtggtgctgagacagtaagtggggatggatgaggaagggccccaagtgctttgtgacttcgtcctggagatagtggaggatgcttgaagggatggtgggtgggtgctctgtcgacccaggggaagatggctgtgtggtcaggaacggaggtgtcgaggaggatatgggcttgggctggctagaacatccaagaaagagagaggaggggaagtggtgggagcaaagggggggagggggaggtccccagtctggatagggggaggcatgtggaaagggttagggccaaggagcgctggaaaagtgggtggagtccaatcatgaggcccttaaattccacactaagagtctgctcctgggccatcagcacaggctgtatggacagggaagcctggtcagctggggctctgcggtgctatgggccaggcacagtgtggttgtagagtaagcaagacagacatggcccctggccttcatggaatttgcagtccaggagccgagacagacatgaatcaagcagcctcaggcacccatggctgactgcaaacaacctggcagctgatggaaaactcaggggccccaggggagtgtgagctggtaggaagtgcagaagcaactctaggctgcatctcttggggatggggagagggggaaggaaaagcattccaggcagaggaaccagcaagcgcacagcctcagaagcagcaaggaatggaggcattgaaagaaaagcaaaaaggccagggaggctggaaggcagagagctagggggagggagatgctgaagatttgggggtttgactggagaagagttgggagatggtgaagggttttaagcagggaaatgaccaaaagatctgtgttgtagaaagatccctggctgctgtaagcagaatggaatgagggggaagtatggctttgagggaccagttaggcagctgctgcagactctcaggagcagctggagagccccggctcaggtcacagtgagggagtcagaagcaggtgggtggcccacacagtgcaggtgcttggaagatggattcagcaggacttggtgactggctggggaggcgggtgagaaagaagaaggggtggat

SEQ ID NO: 1922 - DNA, 1134 bp, Artificial sequence
  DNA replication origin
aaagcaaaaaggccagggaggctggaaggcagagagctagggggagggagatgctgaagatttgggggtttgactggagaagagttgggagatggtgaagggttttaagcagggaaatgaccaaaagatctgtgttgtagaaagatccctggctgctgtaagcagaatggaatgagggggaagtatggctttgagggaccagttaggcagctgctgcagactctcaggagcagctggagagccccggctcaggtcacagtgagggagtcagaagcaggtgggtggcccacacagtgcaggtgcttggaagatggattcagcaggacttggtgactggctggggaggcgggtgagaaagaagaaggggtggatggaggggctatctacggagatgggggggtcgggagggagggggtggtcttgagagaaagaatcatgagacagttctagccaagcttggattgaggtgcctgagagacacctgagtgcaggcagctgggtgcccaggcctggggctcaggaggcgggtgtgggatgatctaggaattatgagctagagatggaaagtcagctatgggggaggctagggagagaacatgggaagagaagagggcccaggacacaacgtcaatgactgttggaagaagaggcaccaaggacaccgagaagctgctggcggagcagtgggggaatatcaagtcagagaatccagaaggcccttggagggtgtggtctgcaggtgtgaggaggccgaaagcccaggcaggttgacgactgtaaaacgccggttggatttagcaaaatggaggtccggggccttgagcaggagcaggttgagtagagggtggggaggggcagagacagcctcgtgggaggtgaagcctaggagatgggacttggagataacaggttactgccaggaactggggctgaaggaggaggaaaggaatgggaccgagttcaattgaagaggatagacaggcttgatttgtttgcttgttggtttttagggtgggaggaactgggcatgtttaagaagagggagccagtcaggagagagaggttcagtgtctttcccagaatagacccttgaggctaagaacaacaacaaaaaatccagtagagccccaggag

SEQ ID NO: 1923 - DNA, 1797 bp, Artificial sequence
  DNA replication origin
ccagagcctggctgacccataaccataaggcaaccgcttctcctggtacctcctcggcctgcgtcagcgaggggctgtggatgcttctgagttcattgcctgccacccagccttggaacccaggcctcaggcacaagggaggtctgtaataatgacccggtgagaatgacagctgtgtggggagctgtgcccacgtgccaagcactcttcttgccttcattcatctggtcctccaaacagccctaggaagagggcagggcctgggagtgagcttcagagaggctgcataagccgcccaaggtcacacagccaggggtaaagaagaagggtcttcagctccacggctatgctttctgccatcatgcagcaaacatgccaagcccactctgtgtcaggcccagggctggggctgtggatctctggcccagctgggatttggggaaaggtaccccaaaggcatcactatttgcctgggagagggagctgggagtgtgtagggcctttccgtgcttggctctttgttggccaaaagggagggacaaatatggacctgcagaaccccggaggaatgagggatgcctctgcctggagactcgggagggcattctagccaaagagactttgagcgaggctgtggaggtggagcgcgcattcctggtagagggatggcccaggcaaaggccggtaggcctgaaagggcatgaagtaccccaggatagggagtgaacagcctgagggattccgtggtaagagaggaggttgaggccagaccacaaggatcttgaataccaagcggaggacctgaccttttcctgagttcaaagtggagtcagaggaaaaggtgagggtgggggcagtggccttgcatctgttctgttgaggcctaggccaggtggtctccagccagtgggcgtggggtgggttcctttggactctcagaagggccccaggtgggtgacgccacagcccagtctgtcttggcatctgagaacaaggccatctgctggctgcctcattcctgcaaactcagggtcagaggacctctgatgagcccagcaccccacagctccaaagaactccacggtctctgaaaccaggctgcaagggcgaaaggggaaaggctggcagagacatcctgggcagggcccctcccactacctcattttccagctctgacaagtgcttaccctgtgggggacaggcagctcacagctcggaagtcgcctggctgccctaaggaggcccatcccagtatggccctgcccggcggggcttagctcgcccttctctatactttggtgttgcccgtatcaccggagggtgctggggacgcaggtttgttaaaccctttccctcttccttccaccagacagtaatacttggatcctcacttgtgattttcccaacaacccctggggggcccccttctgccggcacctacttgatgggtaagagaatggaggcttagaaagggacgcatcccggagccccacggaccagtctcaaccaccaaagggcagggagcctggaaccctgcgggccacaggctgcgcagctcacttgaggggacacatgtagattctgaaaccttacagcccgggttcaaatccttgctctgcagctgactagcacctcacctcaagcaagtcagtgtccatgtctcattccctgcctggaaccgccttgtgcctcagtttccacatctaaaatggtgatgctaatagcaccttcctcggggtaggtgtgcgacttaggtgagataactcataccaagtccttacagccgtgcctggcaaa

SEQ ID NO: 1924 - DNA, 1978 bp, Artificial sequence
  DNA replication origin
cagagatttacaggaggaggactggtgtcactgactccagtcaagagagatggtaaagatgatgtggaagtcactataacactccaggtgcaggcttgcggggactcacgctgactcatcactgtgttctaagatgtttgcatctactgactccctggatgctcacaaaggggagctggccccccaattatggatgcagaatctgaggtgcagagaagtgttgtcccagagctggctgacttcagagcccagcagctaaccactgtgctgtgtggtctctgcctccatgcacatttcacaccctggcagagaggtttgcaaatgaggcctcggtattgctggcagaatgaaagacactctcccaaatgcagggacctctggccccagacaggagagcagcctccccatcccctacagcatcaaccttgcccaaggtgcagccatgctatctatgggtaagaccaccacacagggaggagtcaggcagagccaatggttacggggagggaggggcgggggggcttcagcctcttctaccagtgccagtcacagggggccagctgaggctgggtggagaccaggtcagggtaccaagagaggacagacatgaaggtatgaacaaggccatgaaagataggacctggtgtaaagacaggtcatcctctttagaggacatccatgtcccccatatagaacatgtggcctaagagggacagaagccagagagttccagaatacactgagtcccaggggctggcaaggaccccagtgaggacctgctcaattgcggagtccctgaggccaagggtgacaaaggtggcttcctgcaaagggcccccaggccagctgggacccccatgctccagccctgtttgctgggcagaactgtgggctgctatgccctggtgttagggatcttgcagatgagggggaaggaagacagcattaaaaaattccatccaatcgcttgagcccaagagttagaggctgcgtgattcatgatagcaccactgcacttcagcagcctgggtgacagagcgagacccagtctctaaaaaaaaaaaaaaaaaaaaaaaaaaatcccattccgaggaacctcccgtcctaagctcagacttggccatttagtcgctgccccccaccagggatggggaagctaaaatggaattcctcctgtgaagatagagcagtcacaggagtacccaaaaggcaagtggtgcccaaggccacacagggcaggagggaccccgactccagcagcttccgcaccctctcagagcagcccgcagtggagcctcaagactccccactccctctgccagggctgacggtcggcagcgtccagcagctgtgggagccaccccgccattccccaggagaagggtcttcacccatccaggagaaggggtgcccagtcaaactgccctggggctctaactgccctgccagtcctcccgtggctgggggcagatgacgtcaccccctctgcacctgcatttccacagcagcaatgcccagcactcagcgttaccggtcagatccagacatagcctggcacccgcaaaaggccctctgcgtggccatctggagtttgccaagacttctcaaggtggttacactcctttccaaagcacttttgggctggagacctcgttacacagcccaggactctggggaagagcaagactgccagggtcatcccatttcccactggacaggcccaggcccagagaggggagtggcttcagggaaacaccccgcaagctggaggcaggacttgggggacccagcccccgcttccttcccacaccagcctccatgtggagaaggggtgacgggccccacacggcctccccagggcagcgtcaggtcttgctgtggccgctcgaggtctccgtgcctcccaccagtctttctggggcagctccccccctcctcctgggcagccctccccgcagttgctgattctttgcgagcc

SEQ ID NO: 1925 - DNA, 858 bp, Artificial sequence
  DNA replication origin
cctcgtccgggctgggaagcgggcagaggcctctgccaggcagcccacagagctgctgcggtccagcggcggggtggcagaaggctcggggttggtcggtgcacgcggggactccaagcgggggctccaggactgcgctgcccggcgtccctggggcggccggggcaaggtgtcgggtggggtgcaggggctgtgcgtgggtgtgggctctgcaggtgccccggtcccatggggtgtccagtcaggaggcctgcccgggcctccgccggtcctctccctctccttggggtagtccccgccctccagctctgaggagagtgtgaatttggagaccttagccacaggcgacacggaggctgacgagctctcagtgggactccagcggcctcgctcctgggcctcccgggcccctgtcaggtcgctgccacccccggagaagccactgacccaggctgcggtgggccctggcagcagggtggggtgggctcctggccgggcctgcaccatctggatcccaccgatgggaatcaagggacatggggcacgggtcaagtgctgggagtgcagaggcaggtggctgaagatgttctcctctgtccgggccaggatgtggccgtggaagtcatggagggcggagaagggtcgggaggagagaggatgagcagggccgggtgagcaggagggacttcgggactcggccttctgctggggtcagaaaacaagacaaggtaaggtgaaggttacatgctgggcacatggggagccgaggcctggaagtgggagggggactcgcccaagatcacagagcgagtccagggtcccggctgagctgagcccagaaccaagttcctgactccc

SEQ ID NO: 1926 - DNA, 1103 bp, Artificial sequence
  DNA replication origin
caagacaaggtaaggtgaaggttacatgctgggcacatggggagccgaggcctggaagtgggagggggactcgcccaagatcacagagcgagtccagggtcccggctgagctgagcccagaaccaagttcctgactccctgcccacagatgctgagccagctgccatctctggaatgggccatctccagctcgacagtgaccatgagtatgctcaggccccatggtctccatgcctctagccagcatatctgtcttcaaaggaggggatacttgagcgacgtggggccctgttgtcacccatgagcctggcctctatgtgggtctgctgcctgtcctgttcctaaaatggtcttcacccagcttcactcttggacatgagttcccacctgaggctctttgcccttctgctacctccaggaatttgaatgtgaacccaaaattaaaaatcaaggaaagattcctagatcagtgttcctccaggagtgacagggctgggtcatggcaacacggggacagagaaggtgtcggaagggggtcagctgacaatgatggtgctatcggtggaggggtcatggcagctgaggggacagggatggtgactgtgctcatggggtggcagcagtggtgtgttggtgcaatggtgacagtggtggtgctggccatggggatagtgctgatggttgacaaggatgatattggttgtggtgtctctgagagcactggtgacagtgatattggagatggtgatggttttggttaagttgtgccatctgctcaaagaacacaggcagatggggatggggtgggggatggggaattgcacgagtatttacaacctcatccaaggccacaccccttgcaagtgatatgatatcgtttggatatttgtccccgcccaaatctcgtgttgaattgtaaaccccagtgttagaggtgggcctggtgggaggtgtttgggtcatggggacggatccctcagggcctgatactgtcctccagatagtgatttctcatgagatctggcattttgagcgtgtggcacctttcccccaactctctctcttgcttccactctgccatgtgagatgcctgttcccgcttt

SEQ ID NO: 1927 - DNA, 2982 bp, Artificial sequence
  DNA replication origin
gtgagtgtgagggtgggggtgtggaatgtgagcatgaaggtgagtgtgagggcgggggtgtgcgaaggtgtgagggcggggtgtggagtgaaggtgtgagggtggaagtgtggagtgtgtgaaggtgagtgtaagggcaggggtgtgtgaaagtgtgaaggcaaggtgtggagtgtgaaggtgagtgtgagggtgggggtgtggagtgtgtgaaggtgagtgtgaggatggagtatgtgagggtgtgtgaggatgagtgtgagggtgggctgtgagtctgagggtgaacgtgagggcaggggtgtgagtgtgaaggtgaggatgggggtgtggagtgtgtgaaggtgagtgtgagggtggggtgtgagtgtgagggtgtgtgagggtggggtgtgtgagggtggggtgtgtgagggtggggtgtgtgagggtggggtgtgagtcagggtgaatgtgagggcaggggtgtgagtgtgaaggtgagtgagggtgggggtgtggagtgtgtgaaggtgagggtggggtgtgtgtgagggtgggatgtgagtctgagggtgtgagggcaagggtgtgtgaaggtgagggtgggcgtgtggactgtgtgaaggtgagtgtaagggcggggtgtggagtgtgagggcgagtgtgagtgtgggggtgtggagtgtgaaggtgagtgtgagggtgagtgtgggggtgtatgtgagggtgtgtgagggtggaggggtgtgagggtgagtgtgtgagggtgtgagggtggagtgtgaaggtgtgagggcaggggtgtgtgaaggtgagggtggggatgtggagtgtgagggcaagtgtgagtgtaggggtgtggagtatgaaggtgagggtaagggtgtgagggtggggtgtgagtgtgaaggtgtgagggcaagggtatgagtgtgaaggtaagtgaggggggtgtggagtgtgaatgtgaaggtgagtgtgagggcggggtgtggagtgtgagtgcgggagtgtggagtgtgaaggtgaatgcaagggtgtggggtgcatgtgtgagggtgaccatgtgagggcaggggtgtgtgtgtgagggtgagcatgagggtggggtgtgagtgtgaatgtgtgacgacaggggtgtgagggtgagggtggggaagtggattgtgaatgtgaagttgagtgggagggtagggtgtagagtgtgagaacgagtgtgagtgcaggagtgtggagtgtgaaggtgaatgcgagggtgtagggtgcatgtgtgagggtgagcatgtgagggtgggggtgtgtgagggtgagcatgagggtgggatgtgtgaatgtgtgagaacgggtgtgtgagggtggggatgtggagtgcgagtgtgagggtggggagtagagtatgcgaatgagtgtgagtgcttgagtgtggagtgtgaaagagtgtgagggtgtgggggtgtatacgtgagggtgagcatgtgagggcgggggtgtgtgagtgtgtgtgagggtggtgtgtgagtatgaaggtgagtgtgaggacaggggtgtgagggtgagggtggggtgtggagtgtgagtgaaggtgagtgtgagggcagggtgtggagtgtgagtgcgagtgtgagtgcaggggtgtggagtgtgaaggtgagtgtgaaggtgggatgtgtgtgtgagtgcaggggtgtgaagtgtgagggtgtgagggtgtatgtgagggtgtgtgagggtgagcatgtgagggtgtgtgtgtgtgaggtgagtgtgtgagggtgagtgtgtgagggtgagcatgtgtgggagtgggagtgaaggtgagtgggtgtgtgggtgtgtgagaggatgagcatgtgagggtgtgtgagggtgtgtgtgaggaagagggtgtgtgagggtgagtgtgggtgtgtgggtgtgtgtgaggatgagcatgtgagggtgtgtgtgaggaagagggtgtgtgagggtggggggtgagtgtgggggtgtaagcgagtgtgagtgcaggggtgtggagtgtgaaggtgagtgtgaggatgagtggggtgtgagcatgtgtgagggtgagcatgtgagggtgtgtgtggagatatgagcatgttttagtgtgagagtgagcttgtgaggctgtgtgtgagcgtgttagggtgagtgtgtgaacgggtgtgagggagtgtgggggggtgtatgtgtgagggtgagcgtgtgagggtgtgtgttagggtgagtgtgagggtgagtgtggggatgtgagcacgttttagggtgagtgtgtgagggtgtgtgtgagggtgagtgtgcgtgagggtgagtgtgggggtgcgagcaggtatgagggggagtgtgagtgtgggggtgtgagggtgtgtgtgagggtgaaggtgggggtgggagcaggtgtaagggtgtgagtgtgggggtgtatgtgtgagggtgtgtgagggtgagggtgagtgtgggggtgtaagcatgtgtgagggcaagtgtgacggcaggggtgtggagtgtgaaggtgagtgtgaaggtgagtgtgggggtgtgagcatgtgtgtgagggtgagcgtatgagggtgagtgtgagggtgagtgtgggggtgtgggcatgtgtgagtgtgagggcgagcgtgtgagggtgagtgtgagggtgagtgtggggtgtgagcatgttttagtatgagggtgagcgtgtgagggtgagtgtgtgtgagggtgagcgtgtgagggtgagtgtgtgggtgtgagcatgtgtgagggcgagtgtgagggtgggggtgtggtggtggtggttctgttgctgccagcgggctctctccctcaagtcccctcttccaagcccttccttcccaagtcctttcagctgtaagctgatggccccattggagcagggtggagcccccccgccccgacacgctgtcccttgctcacctcctcccagccacctcctgcccctctgtgctggaaccaggcaggggcaggtggtgcggcgtgagtatgtgaggg

SEQ ID NO: 1928 - DNA, 2074 bp, Artificial sequence
  DNA replication origin
taggctgaaggacaccattaggctgaaggacaccattgcaggtggtggcgggaggggagcaagtgccatggacccgacaagcaaggccaggtgaaggctagtgtccaggaggttgcggggcttccagtgcaaaggggagaccaagctgtcctcactctgtcttcttctagctgggaaagggggccccatctcagccatcttccctggccaccaggtcccaggggcatggagggacatgggaattaagatccaggtgtgagcaactggttttggtcttggagatctgctacgtgagggtgagccgctgtcacatcgaggcagatgcctcgtgcttggccacagagtgcccttcctaagagaaccgagtcatttctgcgtaccgccgccacggccttcagttcgtcctctcggacgcaaggtggcgcgtgtcctggatcccgtggaaaggtgacccccactggggacacggccaaaactggctggtcagggcagccatggtggagaaggggcagttttagactccttggcggcatcagttggccaaatctgaggtgacaaaaaaacagggtccacctgtactggtggacagcagtccatgtgtgaggtgagggtgagtgtgccaggagagtgtatgagcgtgagtgtggtctgagtgtgcaaatgagtctaagtgtgtggtgtgtgtgcatgggtgtgagcgtgtgtgactgtgagcgtgttagggtggggggtgcatgtccgtgtggtggggggtgttggtgtgtgggtttgattgtgggagtatgcatcagtgggagtgtgaggatgtaagtgtgactgtgggggtgactgtgaatgtgggggtgtgtggggtgtgtgattgtggggttatgtgtatgtatgagtgtgtggggatgtggaagtgagtctgggggtgtgtgtggatggttgtgagggtggcgtgtgtatgtgtaaatatggggtatatgagtattcaagtggagatgcaagtgtggttgtgggagtgtgtaggggcgtgagtgtggggtgtgtgagggtgtggggggtgtggggtgagtgatgtgagtgtatgtatgtgtatgaaggtggggacgtatgtgtgagggtggggtgtggggggaggagagtcgggtgtgtgagggtaggggtgtcagcataagtgtgaggatggggtgtggagtatgtgagtatggggtgtgagtttggggggagtgtgagggtgtggggtgtgagcatgtgtgagggtgtgtgtgagggtgtggggtatgagcatgtgtgtggagggtgagcatgtgagggtgagcgtgtgagtgtgggggtgtcagcatgtgtgaatgtgagggtgtggggaggtgtgagcatgtgtgatggtgagggtgtgtcagtggggggtgtgagcatgtgtgagtgtgaaggtaagtgtgagtgggggtgtgagcatgtgtgagggtgagggtgtgagtgtatgggtgtaagcatgtgagtgtgagggtggggtgtgagcatgtgtgagggtgagggtgtgtgtgagggtgagttgtgtgagggcgtgtgggggtgtgagcatgtgtgagggtgtggggtgaggatgtgtgtgagtgtgagggtgagggtgggggtgtgagcatgtgtgagggagagtgtgaggtcagtggtgtgagtgtgagggcagggatgtgaagtgtgaaggtgagtgtgagggtgggggtgtggaatgtgagcatgaaggtgagtgtgagggcgggggtgtgcgaaggtgtgagggcggggtgtggagtgaaggtgtgagggtggaagtgtggagtgtgtgaaggtgagtgtaagggcaggggtgtgtgaaagtgtgaaggcaaggtgtggagtgtgaaggtgagtgtgagggtgggggtgtggagtgtgtgaaggtgagtgtgaggatggagtatgtgagggtgtgtgaggatgagtgtgagggtgggctgtgagtctgagggtgaacgtgagggcaggggtgtgagtgtgaaggtgaggatgggggtgtggagtgtgtgaaggtgagtgtgagggtggggtgtgagtgtgagggtgtgtgagg

SEQ ID NO: 1929 - DNA, 2629 bp, Artificial sequence
  DNA replication origin
gccagggaagatggctgagatggggccccctttcccagctagaagaagacagagtgaggacagcttggtctcccctttgcactggaagccccgcaacctcctggacactagccttcacctggccttgcttgtcgggtccatggcacttgctcccctcccgccaccacctgcaatggtgtccttcagcctaatggtgtccttcagcctagccttcaccctgctgatccccacacaggcccacagccactctgacgtctactgggcctgtgtgccagccaacctagaagcaggtgccagggtccatctgccccagctgctctccgaccccttcatttcctcctccacatcaagcttaaatggtacatggtctttccaaatggagagagagagataggaaggggagggagagagaggactctgagccttcaaggttggtgccttgacttggggcggggtgtacacaaccacgtgcagcaccttgtcacatcagggagggagtgtagcctgctggggaacacgagggaggagcctgggttgggtgaggccagggatgacaggagagatggaggacaggagagatggagaatgggagagaagggaggacaggagcgaagggaggacaggagagatggaggatgggagagaagggaggacaggagcaaagggaggacaggagagatggaggacaggagagaagggaggacaggagcgaagggaggacaggagagatggaggactggagagatagaggacaggagagaagggagaacaggagagatggaggacaggggagatggaggacaggagagatggaggacaggggagatggaggacaggagagatggaggacaggggagattgaggacatgagacatagaggacaggggagatggaggacaggagagatggaagacaggggcgatagaggacaggggagatggaggacaggagagatggaggacaggggagatggaagacaggggagatggaggacatgagagatagaggacaggggagatggaggacaggagagatggaagacaggggcgatagaggacaggagagatggaggacaggggagatggaggacaggagagatggaagacaggggagatggaggacaggagagatggaggacaggggagatggaggacaggagagatggaagacgggagatggaggacaggagagatggaggacaggggagacggaggacatgagagatagaggacaggggagatggaggacaggagagatggaagacaggggcgatagaggacaggagagatggaggacaggggagatggaggacaggagagatggaagacaggggagacggaggacaggagagatggaggacaggggagatggaggacaggagagatggaagacgggagatggaggacaggagagatggaggacaggggagatggaggacaggggagatggaggacatgagaggtagaggacaggggagatggaggacaggagaaatggaagacaggggcgatagaggacaggagagatggaggacaggggagatggaggacaggagagatggaagacaggggagatagaggacaggagagatggaggacaggggagatggaggacaggagagatggaagacgggagagagaggacaggagagatggaggacaggggagatggaggcaggagagatggaagacatgagagatagaggacaggggagatggaggacaagagagatgaaggacggggagatggaggacaggagagatggaggacaggggagatggaggacaggagagaagggaggacaggggagatagaggacaggagagatggagcacaggagagaagggaggacagaagagatggaggacaggagagaagggaggacttgggtaggcaccccccggagcaacggcagagtgttgagagcctggagtatttggttgcagagaggagatgaggctggaggaaaggcaggctggatcaccattggccttgaacaccatgctaagtttgggattgataaaagccttaaagagaaatataaagtctctaagagaggatattccctggccatgggaatggcctggaggaggagagaatgaatccaggcccaggctcatgttctagaacagcgatttgagatgccttctgggcataggctccacaggcctcagtggccatttggatggggcaggggtcagaacgaaggagaaaccaagatccagaagtttcaacttggctctagtggcaccacccccgagcttggggggaagtgatggaggactctagtctttaagcattgagtatgagatgcccatgaggaagacatgaagaaacgtccttgtgtcagaaatcagtgggactgagaaggggatatgtagatttgggaggaggatgaccccacaagacagaagagggtagtgccgacggcagagacctgggtggcacccaaattcaagggtgggcagaacaaatggcaccccaaaccctgccctcaaaaagagaaaggtcagagaagcaggaaactgggagagaactgtggcttagccaagaggagagggtttagaggaggaggggcccatggctggacatcccagagagcttgaggaagacggctgctgaggaccca

SEQ ID NO: 1930 - DNA, 1466 bp, Artificial sequence
  DNA replication origin
caggaactcctggagtgggaaagtcaaggctagaatctgaggatcacaggccccaggaaagaaggcctcgctggtctctctgatgtgcagctaatgaatatgtattgggcacctgctggggatgtcctgacaaatgaggtagatgtggtcctcacccgcgcagggatgatgggggctgtgcttgtgaaaaggccattgcagtacacacagtctgacaagtgccctggagcagaagtgggtgagatccccaggtccagaggaggggtgtgggacaggcctccgaaggacaggaccttggtgcaaatttctggtagagtggaggagctggtcttacaggagagggggtggtgctggggcagggatgcaaggctccaggtgacctttggcatggctggagggggagtgcagcaggaaatggggggatcagtgggaattggagggagatgagctggggaggtggcaagggcagatggtgccctgggcctttcctgccaaggaatgcagggcttcgctccgatggtagtgggagaagcatgaagtgggacctctaggctggaaggagtggtaagcctggatggatttggggacagctcctactggctgttttgtgaagaaaggaggcagtggtataggagagagggtggtggccagggctggtggggacagagaggtggcacccttggagcatgcattgcatgtagcattgatggttgtggtggtggattgattatggagcatgaaggaaatggagccatcaaggatgaagcccagcctgtgggctggccagccacacgagtgcaggtgctgcttgctgagagagaacggggacccaggagcagacactgcaggtagagggacttggaaggctggttctgggcacgcaaggtatgaggtgcctgaaaaccaccagaggtgatactaaggcagttagatgtatagcaaaggcatcggaactcgagagagaagtggctgggggccatcagcacccaggtggagggtcacctggggaaggtgtgtggtgagaagagtgcaggtcggaggctggcaggggccatgtcggcatgggaaagggtgggcaaaaaaggagcttgcaaaggagacacaagcaggagggaatgaggtgcctccagaaggccagcaagagggcggacaggatgaggcaaatggactttcaatggagcaagctgtgaccttggcaagaacagttggtcatcagagctgggctgcagcggctcaaaagcatagagtggggaggaggtgtggacagccctctccagatccgggctgtgcaggaaagagggacagcagagctggcccgggatttgggcccagggaggcttggggctggttgatttgtgatgggaagagagctgggcttgtgtctgtggtggtggaaggggctaggagagggaggcaatgacactgctgggaagctgtgggagaggacagtgggtggggtgggctct

SEQ ID NO: 1931 - DNA, 1920 bp, Artificial sequence
  DNA replication origin
ttcccactctcaggccatgaagggagctgattcgagcacagattggggtagagagaggcagctcctgggagacttgagccccccgccttctccactacagtcctcactttgcacactcaggagggacctcgaacaacttcacctctggggaccactggttgaggtgcagcacgtggtccccagggactgagcctgttccagctgtagtcacccgccctgctgcccaccctccaccccatctgcagtcactgttgactgaaggacttacatgctccaggcacagaagtaagcactaaactcagaggggccatggtcactcaggttgtaaggagcagagctgggattcacactcagccgtgtttggcttcaaagcctgtgtcctttccttcacacctcactgccattaactgggagccctactttctgcattttccaactgtcagctttctgcatggcaaggctctggtgagaccctgttactgttcctctctgtgactagggccaggactggaatgtccagtgaatgctgaggatggtagtggtggtggtggtggtggtgatggtggtgatggtggtggtggtggtggtggtgatggtagtggtggtggtggcagtggtgatggtggtgatggtagtggtattggtggtggtggtggtggtggtggtgatggtggtgatggtggtggtggtggctgtggcaggggtggtagtggtggtgatggtggtgatggtggtggtgatggtagtggtggtgatggtggtggtggtggtgatggtgatggtggtggtggtggtggtgatggtagtgatggtgatggtggtggtggtgatggtagtggtggtgatggtagcgatggtggtagtggtggtgatgctggtggtagtggtgttggtggtggtgatggtagcaatggtggtagaggtggtggtggtggtgattgtagcgatggtggtattggtggtagtggtattggtggtggtggtagtggtggtggtggtgatggtggcgatgatggtggtggtgatagtggtgatggtggcgatggtagcgatggtggtagaggtggtgatggtggtggtggtagtgatggtggtggtagtggtggtagtggtattggtggtggtggtgatggtagcgatggtggtggtggcgatagtggtggtggtggtgttggtgatggtggtaatggtagcgatggtggtagaggtggtgttggtggtgatggtggtagtggtgatgatggtagtggtggtggtggtgatggtagcgatggtagaggtggtgatgttggtggtggtggtagtgatggtggtggtagtggtattggtggtggtggtggtggtagtggtggtggtggtgatggtagcgatggtggtggcggtgatagtggtggtggtggtgatggtagaggtggtagtggtggtggtggtgatggtggtggtagaggtggtagtggtggtggtgatggtggtggtagaggtggtagtggtggtggtggtggtggtggtggtggtggtagtggtggtggtgatggtggtggtagaggtggtagtggtggtggtgatggtagcagtggaggtagaggtagtggtagtggtggtgatggtggtggtagtggtggtgatggtagcggtggtggtacaggtggtagtggtggtggtgatggtagcagtggtggtagaggtggtggtggtggtagtagtggtggtagtggtggtggtgatggtagtagcgatgatagtggtggcggtgatggtggtggtgatggtagtgatggtggtagaggtggtcgtggtgcttcactggggcctatggtgagggtttgctgtggagagacatccccctccctgtccagttattccatgccctagagaatagttctctcactagcaacatcttcaaccatgagagccagaggg

SEQ ID NO: 1932 - DNA, 842 bp, Artificial sequence
  DNA replication origin
gagttgggaaagctctgctttgctcttcacttaacccagaagggccgggcccaacctcatgcacatctgcaccacatacagtcgtcccctttgatgggggttcctcaaacttgggaagtgccacagttgctgagctgccttgggactgggtgaccaagatctgggaaagggtggtgtacattgcgctcccataggacggcatattggtctgaacacggacaggcacaaccagggacaccatggtgtctggacaggcaggcagggccagtggaggagctgatgtaggtgctgaggagctggctgggggagccacagggggtagccggatgtcactgctgtactctgtgctgggggagaggccagcacttcctgttgccagtggggccaggctggttttgatctggggcagatggctttccacatcaccagggagctgaagtgcaaactgggattgcagaggcaggaaaaacccagaagacagtgctgaggaggtcgggtatggcatggggaggaaggaagggggctgcctgaaggggatgttggctgggtgaggcatgagctgggggagatggagttggcctgggtgcagaacagtaggctggagaggaagcggtggggcttgaaataaggagggaggaagtgggggcatggagtatggtgaggacaggaggctggacatggcctgggtggagaagaattctggagactgtcctggctcatgctgcacgagatgctggaaggagaaaagggagactggtgggggcaggtatggcttctcatgcaggggtgtctgggcaacggggtggtggaacacttgcagtgcttctgtgtagggcacagtg

SEQ ID NO: 1933 - DNA, 1275 bp, Artificial sequence
  DNA replication origin
agtggagtgagttccagggtggttcccagtttgtaatgcatcatttgggaccacggctcatgctcaatctgactcttttcagcttctggagatgtgtgggtgcctgcagagatgggctttgcgatctgaagctctgagcagtagtattttttgtgggcttcgtagttatcccttttcttgtaccgagcaccacatatgttacattcgtagatcaccccttttgttttcaaacccttcttggtctttttggtaagctcgctttccttgggttccacttcgtccgagggcttggaggctgtgtctttgctgcttgggccaggctcctcagaactgtattcccctcccaaaggtaattcgattgccggctggcgcttcagcatccgggggtgggaggtaaacacgtgactgctgtggctcagggcttcggagtcggtgatatggtcatcgaaggagtagctacctcggaaggggtggtggggggtgctgatagtgcaggcggcagaaggcattgagtggcttctcaggagaggcacagggggggcggtactgggcgggtgctggaggctcagcagtgattgttcaggcttggttttctcactgtgggatgacaggggctcccggtagaggctggattttggggactccatgctgctgcgcctggacagtgagctccgccttggcttcacgctgtcgatctcgctggtgtccaccacggcctcgttgatggtgatgagcttcgtgatgtgctcgatcacctgcgtccggggtacagacaaaggcaccaggctgggcttgtcttcggtggacaggggcaggaggggctgggtggaggtggctgtcagcatggcggtccgctgtcctattcgcccacacttgccaaagatgatctcagcgtaggacttggcgttggtgtttggggggctgacctgctgctctgcactctcggagcgagagaaatacccagactcagtactccctttgctgcctgggctcagaaacgcctgctcatcgatcaccttcttcctctcgcttaagcggagggccagcttctgcttaatcgtgtgggtgtcttcaggtttatggctcagggggtgctcagatgagggttccacaaatggaggggggtcttcgagtgactgggctgtgctggactgggacagggaacagcgttcgtggctggaactgtggctcccagagctgtatagcccgctggagagaaggggctgcttgggtcttggggagagctctgcagggtgaccagaggtggcactagtc

SEQ ID NO: 1934 - DNA, 1237 bp, Artificial sequence
  DNA replication origin
cgtgggacacggcacacccggcgggagctgctgaatgggtttggcagccctagcttcccccaaggccatgcagtttcagtctgtcagagcccaccagcctggggctcctcggggctcattgggagtgagttaaactagcattgctctggatcctccgaggagcccctcctcccggcataatgacagctggcactgggggtacatcctagcgggttgtacctggcatggtcaggagggtgtggcgactgggagagatctactcccacttcacagcctggatgtttccagagcggcttctactccaggggcatttctgagagcaccctccccaaccccccttaatcagagcagggtgcttgggcttcagacagaagtggtggtggctgcaaaacaggtgcagatagcatcagccttggcatcttgcagggatctctgcatagtggccacagttgtttatctataaaaatataatgtattgattgatgtttcatcaaggacataggggaaactgatagagccaaattatgggtctatcccttagtgactctgggcagactcgttcgtctctttcaggctatgttttatcaaaaatggaatgagtgtccccagaggtatgtttttaagaaagattgagatcacgtaagtaaaaaatgttttgtagatgtaaagccttgtgcacgtgccagtaactgtggtttggatgatttctgggctggtagttgtcatggctctgctctgtgacttagaacaccctttctgttccatcatctgcaaaaaaggggtcattaataagtgtcctgtgtgcctagtagcagattttcccagtgtgttcagtggattgttagttctgaaagctgttccaccagtaaaggtttccctgttagagtaagaatggcaaattgtgcaagctctctattacccttttggccaattacaatccatactggcaaatgaaaggctctgagaagtcctgcaataaaagactctttaactttgtccaacccagcattttttttctagttgcgggcccttttcaagttagtaggcttgctctccaaggaaacagtgcttcaggggctacccatagagatgatgtagtgttgtacagttgcaaccaaactttgagagctaaattctaattggtctgttttaatggagagtaagcagaagcccagaacagttaagaggctcatctgaggtcacacagctaaacagtggcccaagatcacccagtagt

SEQ ID NO: 1935 - DNA, 1165 bp, Artificial sequence
  DNA replication origin
agcagtgaggccgagcggacgggagaggcgccccgggccggcggcggggtccccgtgctcggcgacaggaaactctggggagtgaatggaaagaagtgggtggtccggcccctgcgacttcccctgacatcactgcccaaataaggagcttccaagcggccgcggggcggcccggagccgcgcccgccgccggcgcccgcccgccagcccgccccgcgcccaccccgcgccgcgtgggccgccagcgagcgcctggggcaccgccgggcggagccgagccgggcggagccgagcgcgcgggcgctgccgagccgcgcggaggccgggcgcgcagcccagcgcagcccagtccagcgcggcgcagcccagcccagagcagcggagcctcggccgcccgcaggtaagcaacgagcgccccgcgcgccgcgcccccgccgcggcctggcagcccagggaccgggcaccgccgagcgggcggcagagggaccggagggagccgcgtcggtgggagagggctgggcgcgggcgcgcttgcagtagtgcgtcggtgccaactcccgggacccttggagtgaggggccccggcttcttcgcagcctgcggtggcctgatgcacgcgctctcagccagcgttttccagacactacttctgtcaccaccctagggcgacacaagcgttcccgcgttcacacacttctctggcacactcgcgcctggcacggccgttggcgtgcacagcctcctgtgtccagcgcagactctcaccccggcgcggcgctcacccctcgcacccacgcataccgtgggacacggcacacccggcgggagctgctgaatgggtttggcagccctagcttcccccaaggccatgcagtttcagtctgtcagagcccaccagcctggggctcctcggggctcattgggagtgagttaaactagcattgctctggatcctccgaggagcccctcctcccggcataatgacagctggcactgggggtacatcctagcgggttgtacctggcatggtcaggagggtgtggcgactgggagagatctactcccacttcacagcctggatgtttccagagcggcttctactccaggggcatttctgagagcaccctccccaaccccccttaatcagagcagggtgcttgggctt

SEQ ID NO: 1936 - DNA, 1605 bp, Artificial sequence
  DNA replication origin
cctctggttagtttgtcttaggatttgcccctcaggaccattcattcacttaacaaacatttgtaaacttatcagtcctgggaggggagagggatcaagatggaaagttccctgaagctcccagtctgaggaagaggaggcccccaataactgacttcaatgtgaggtgatgggcaagtctgtagaggcaggaactattgagttgcctgtggcatcatggaaggtgaccaaatccattgggagggtcccttgaggccaggccacctctcaaaggggaggaggatgtcattcaacttggggcaggagcaaggctgtcatctgagcctgtgtgtgtgaatgatagaaagtcacccctcagggcatatgaattataacaaggcacccacctcctctgcctggagttgctttcagacagaaaacgggaagcaggacagtgggggcagggcaggagtggagtgaggagcaggaatctgtcccagggggcaccccaccccagttgccctgctcaagagaaggacctgtatcaagggcaggcttggattcagggtgtgaaggacagctggagggggtggagaagacatttcaaagggaaagcctgtatgaagacctcaagaagtggaaactggtgcaaagtggtgcgtgttgggggtggtggctgggcaaatggcaggatgggctgagctctgggagatgcagctggtccgtggggccttgcatgccagatcaggaagtgtggtccttccctttggggctttgtcagaaggaggatgacccaattagagctgggattgggccctgggagctgatggaagttgagagagactggggtggtggtgatccacagaacagctgggcagcttggcagctggtcagtgggtttgcaatcgtgtacgtgagtgtgcagacccatgtccagctgcaatcacacctgccttgactctctgcaagccctggagccatagcttcctcctctctgcccctaggaatgtagtgcctcttagaaggtgggggttccctccattaaagctgggggtctgggaggagtctatttgctctgatctggctttggaggaagggtggcagctctatcagaggctgttgtataaaggcacacaaatgcccaaggtcactaatccgccctttgggcctagagaagttgagggcatgactttggagccagaggaaacctggagcctccaaggatccccctggaaacttgggtcagcatagtgcttagttcccctgtggggcctcaaactttcatgaccctgaaagggagtgcttggttaaattctgcatcctaggcacttaacttacctcactctagtcctggcttaaccccactctacacccccgacccccagctccattgtctcctcctgaggctgttcctggagtcagccaaacccagggccagccctggttccactgtggcagagggttgacctctgccaaataacctctggtgggcatcagtgaaataacagatcacggagagagatctcagggtcctggccttcccgcagacctgtggaggcctggctgggaactggctcaagtgtgcttgatcctggccagagcaaggaccagagtgactcaggccca

SEQ ID NO: 1937 - DNA, 816 bp, Artificial sequence
  DNA replication origin
gcatggggagaaagtggaaagggcacaggctttggggtcagacagatgccgatgtgcaccccagctgtgtgttcttgggcaactaacttagtctctctaaacctcatttccctcacttccacaaggagatcatgatctgtcccccacagggtttgaaaaagggtaaattaaatgacaatgacaaatcacggagagattggcccaggacaggcagcttcactgatgggaagaaccaaccttgctagggacgaggttgcagatcaatgatcagggaggagagaaccaaagtggagagacaaaaagactggggagcagacgctcagggtctcaaagtgggggccaaggtgggccacagccagttcatgttgtgcagaggcccaccgcagtgaggggagagctgggccagtcgtgggatttgtggggcgtgggggtggggccttggccactctgccaaggctgggggcaggggtgtcaagtgccaaagggagcaccaggtgctgaaagccagtgccaaggggtagtgaagaaaagagagtcaggacacccatggccaaatccagacaagtcagacctgagccaggtgagtgctgagccagagcagggcagggcaaggattgttctgaggctgagttggttgtgctggtttattctggggatgctccttgcctgtcttaaagtggccatggtcagggcccacctcctaaacctgcagattggagcaggccccttgacatccctgcaggaggctctggggaaaggataaggcaggaccttcctgccccacagaggtcaaaccagtgaatagacacaaatgca

SEQ ID NO: 1938 - DNA, 1240 bp, Artificial sequence
  DNA replication origin
ggcggggctgtaaccctatgcgcgccgtgcgctccagcgctgcttgcagcaggctctgctgggctctgcacccgcgcactggcggccggctccataggagcctcggctggggggcttaggcatcgcgttccgtggcaccggcgttttcttgtgctgccttggctgctgctccggattgtttaggcggactgcagtagcctgcttggttgagagtgagattcgtatgatgctggctgctgagacagaggggatagctttctttttcccccttaatcctagccccctgaaaatattcctaaagcaaaatcatttcccaacccccaacctgacccaaccaaacccaaaccaaactcctattctataggggattcttgcctccctgctagcagagagagtgtcccctccaagttatgccccacattttactatcttttaaatggaaacactgatggtgccgaatggtccctaatgatattgtccaggctgctgaggactcctgagtgtggcagtggtgcagaggaacttggaggctcggcattggtttcctttaacgtagctggtttggtttctgttgcaggtcaggaatatttctgtggctaggcccttccttgaacttcgggggcagtggttgcaggaagagggtctgcagatctggtcgctgggtgagcagcaccctggccctctttctggtatacgctgacgtttctggtagcccttggcattgtaaccacagcagccaggtgcccactggctacctggagtgcttcggttttgttaactctggtgtgcattttgggtgttacggggggagggaagaggaaagagggagaatgaggtgtttgctgaactgatctgcatggcagtgttctccagcccatgtttgtgtgattatgtaatgatcagacgtgtgcccaaacagctccccaccatctcctggctctcccccagactgaagaagttgggtgctacagttgtttaagacgtctttatgtaattatgtgtatgctgggggcagggagagagtgggggcaaggaggaataattctagcaacttaaatgtgaagaatacaggtcagtgatcgtgtgtccctctgaggacagtgtggtattagctctgggtcagtgttgatctgaagaccctcctgtgtctctttcagccagtaattgcttatctgaactttcatttggtaatttcacccctcttgcaccctggagacagttggacccaggagaaggaccc

SEQ ID NO: 1939 - DNA, 1271 bp, Artificial sequence
  DNA replication origin
ggggtctggaggcggggcctggggctgtcagtcccgcgcccgccgccgcgccacggctcctcgcatgccgtggcccgggtggctgccagcgctgccgcccgccgcccgccaccccggcatcccaagccgcctcccgccgccccggcccggcgcgcaggtaaggctggccgcggctgccgagccatcgcgcccccctcctcgggctcggtctgacgcgcgggcgccctctccgggccgtgtcagcgccgcagctcccgactgcgcccgggggcggtcccggggggcgggacgagagccctccccatccccccaacgcctccgggcgccggccccctcagctggggtcccccgtctggcctccgcagctccggcgcagggagctgtcccgagccccccttcccgggccgattacacaacctccggtcctggggcgggggcccctcctcagcccgggccccacacctgtccccgcaacgcgctcccaggcagagggcagagacctggcgcgacagcgggggccgggaaagtttcactttgtggtcaggggtttgttgacgtctgagagatgcggggagacggagactgagcggcgaggatgcgccttgccagccgcgttccctgtgcccggggtggccctggtccaggtttcccttccagaagtcctgccggcatcccggctctgggccgggaggctgctgctgcagggcgcccgggtctctccgtctctacgttagcgagctctggattgcagcagtctggggacggctcagtctctcgcgcttgccccctttcttaagttagcattgacatttagaccagttggacaaatttacttagcattttcctgacactttgtattggtgagttgctttcccatccctaattagttaattaacaaggtgggaaagctaaatagatcctggaacgaaatgccttcagtctggcaactctttaaaaacctctgagagctctaggctctggttgcatggagagatgcttttggccaaggtgagagagcgattccatgtcttctggttgctcgaggaggctttggtaataatggcacggctttctctgcctcccgctgattgtgccgtttattgagggtcttcagtttatggtgggttatttggttttcttcattcaagaaaggaggaatcagaagtgttgctgattaactgagtgttcctcagttaagaaaaacactgaggtttaaataagtttggatacttgtctgctttaccaggttaccttcgtgcgcagaaaatctt

SEQ ID NO: 1940 - DNA, 1226 bp, Artificial sequence
  DNA replication origin
gggggatggggagggctctcgtcccgccccccgggaccgcccccgggcgcagtcgggagctgcggcgctgacacggcccggagagggcgcccgcgcgtcagaccgagcccgaggaggggggcgcgatggctcggcagccgcggccagccttacctgcgcgccgggccggggcggcgggaggcggcttgggatgccggggtggcgggcggcgggcggcagcgctggcagccacccgggccacggcatgcgaggagccgtggcgcggcggcgggcgcgggactgacagccccaggccccgcctccagaccccgggccccgcccccttcctggccgcgcggcttgccccgcctcctccgcccaccgccggggtcaaactgggtccatcggcccggagggcggggatgctcgctttcgattggcctcaaaggtgcccgccccgcctactccccgccccttccttggcagggaagaggcgcgtgcgccgtggctggggagggtagcggttacgctgagcgccggcgttgctggtccccgacccctggtacccgggcatcgttttttcatcccgggcagctgggaccccgggatgacctaaggaacaaggattcagacgcagactccacggtgaattggccttattcacgtgtgaacgaacgtccaggagaaaaccaaacccgaatgggccaggctctaaccagaggagaccccaaaactgtgatctgcatcagaaaacgaaccagccagccggttcccggctctgccaggtctaggggtgctttattcaagccctgggttcgctccctggtcagcaagtatgaggtatttgcagagggtctagaagatgtgaagggagattagcccgcatttaggactgtgccaaacagagagtgagtgatgctgaagaaagtggcctcctctgctccagccctccctcctcctccccaacccctggctctaccacctctccctcagcaccggcgccctaccctcagcctgtaaacagtatcaggtctcgcccaacaaaaatcaatggagacccagcaattccactcaagagaactagaaacatgtctgtactaaaacttgtacacaaatgttcatagcggtgtattcagaaggccaaaaaaggaaacaactgaatgtccactgattgacaaatggatgagcaaattatggtctatccatacaatggaatagtattctgccataaaaaataataaggccgg

SEQ ID NO: 1941 - DNA, 1065 bp, Artificial sequence
  DNA replication origin
acacacgcacacacacccgtcaggtttgtttacaggaatgcttccaaggtgtaacacctttctggcctggggttgggtaacaggtatttaacacaaatgtgaatcagggctgccccctggtgatggcagggaagactgcagacggggaatgagtcctaatccatttccctgaggcaccaccttgagagttaatggggtgagcagtcatttctgcgctttgctttgaggggtaacggagagcctccctgtccccgtgtctgcgcctgggggtcctaccagcatgaccgtgacagtcagcatcagcgatgcgccttgggggtgcggggaggggaggtggtgtgcagggtcgttaccgaaaagctcctgctaatgcccgagtcctggggtttgcagagaggagatgcggaggtgaacagtggggctgaggggaggagaggaggaagttcaggccccaagtgggacctgcattgaagtcgggtcttgggggcagccaagggcagagggagaactacaaggaggacacggggcccccagagaccagcttcgccctagtgttctgtgaggaggagaggtgcatggctctgacccggctttctcgcccatggccacacggcaggtgtgaaaggtgtgtgtgtgtgtggtgggggtgggggttgtatctgtgtgtgagcatgtgtgtacatgccccaagccctggtgagaatgtgcgtgggaacatgtgtatccaggtgtgcttttcgtgtccgcgcgtgtccacatgtgagagtgattgtgtatattcgtgtgtacttgtgagtgctctcgtgtgtgtaggggagcgtgttgtgtgtccttgtgtgtgaggatcgtgtgctggtgtgtgggagtatgtgtatatgggagtgctttctgtgtctgtgtgtgtatctgcatgtgagagtatgggcatgtgtgtgtgagcctgtgtcagcctgtgtgcgtggatgtgtgtgtgtgagtggcatatgggagcgtgtgcgagtggtttttgctgtgtgtgtgagtgtgtctgtgaccgtgcggatgtgaggctgtgtggtgtgtggg

SEQ ID NO: 1942 - DNA, 1048 bp, Artificial sequence
  DNA replication origin
ggtgacccctcctgccaaggcggcccaggccccaaggaggcacagtgcggagagcaggaaggcattcatggcagcagtgcccgagagaggggtggctgttctggatgccagggggaagcggcgggacttttaaagagggcaggttactgagtaacctggaagcctctgtcagtctcatctgctcacctgtcaggccttatcagataaggctcgagacagccctaggagataagagccaggcagggggggccccggcccctccctgagcacctactttgacccacagccgggctgggtcctgcattcattcaccaacaaggcacattcactcacgactgccctgtgctgctgtgtggggccggcagaccctgcccttgaggaggggggcccagcccgacagtgaaacgcagggcgattagggtggggtgatcctaggatgaggtgacggggctgcactgggggctgagctctggagaatgggtggaagttttcccagagaagggactgaggacagaaggccatttcatgccaaagggacagccaggaggtgagacgggcctggaatattcagggaaatgtgagaaattccacgggggaggctgcagggcaagtcagggtctgggtttgattgccgcgacctcaaggaagccctccgcacagcctgggttccgttccacctactgcccagttgtgaggcgtgtgaacttgggccaatgctttcccctctctgagtctcgttgtcccttgtgtcccctgtgggaaccaaaaataatacctacctcatggggtaggtgtgtggtaggcattactgtttggagaatcaagtgaggttttaaaaacatttagctcaatgcctggcacacagaaggtgctcagcagaggtccattcccatattattagcagccacagcagctcctggtcctccctggcccctctggtgacctcctgcctgtctgagtcacaggctgtccccatcctgtgctggtccccatcctgtcctgcctgccctgcagcctcagggtgtcctcgaatgagctcctccccaat

SEQ ID NO: 1943 - DNA, 2536 bp, Artificial sequence
  DNA replication origin
ccctatagactctgaccccattcagactgcgccctcagggcagcgtgcattcactgtgtgctgttgtgagcaggaatccccaggacacaggagaaagggtagccctgggattgtcatctttctactcagccaacctggcccgatgccaggacagccctagggcgggaggttgggcaggaattcctgggtggggagagtcaacactgaagagggaattggagagagcagggcctgaccaggagggaactgcagggacaaggccctcagggaggggcaggtagctcctggcccagctcccagggcagtcctcacagctgcactggatttcccacccctttctggtgagtgtgtgtgtgtgtgtgtgtgtgtgtgtgttaagggggggtgtgtctgcggagatgtgtatgtctgtgtatgccaaggtgtctgtatataccctgatgggtgtgtgtagccaaggtgtgtttgtatgtgtgcttgtgctgaaggtgtgtgtgtgctgaggcatgtgtgtacactgaggagtgtatgtgtatatatgctgaggtgtatgtgtgtgtatgctgaggggtatatgtgtgtccgtgtacaccaaggtatctgtgtctgtgcaaggaggtgtgcatatatacatcgaggtgtgtgtgtgtcagtgtgtatatacacaggcgcgtgtgtgtacaccgaggtgtgtgtgtttgctgggatgtgtgtctgctggggtgtctgctggggtgtgtgtatgtgcactgaggtatgtgtgtgtgtatgctcatgtgtgtatatgcactgagatatgtgtgtgtatgtgcactgaggtgtgtgtgtgtatgctgagctgagtgcatctgctgtgttgtgcgtgtgtgtgccgaggtgtgtgtatacactgaggtgcatgtatgcgctgaggtgtgtgtgtgctgacgtgtgtgagtgctgacgtgtgtgtatacactgaggtgcgtatgtgtgctgaggtgcgtatgtgtgctgaggtgtgtgtgtgctgacgtgtgtgtatacactgaggtgtgtgtgtgtgctgaggtgtgtgtgtgtgctgagctgtgtgtgtgctgatgtgtgtgtatacactgaggtgtgtgtgagtgctgatgtgtgtgtatacactgaggagcgtgtgtgtgctgaggtatgtgtgcgctgatgtgtgtgtatacactgaggtgcgtgtgtgtgctgaggtgtgtgtgtgctgacatgtgtgtatacactgaggtgcgtgtatgtgctgaggtgtgtgagtgctgacgtgtgtgtatacactgaggtgtgtgtgcgctgacgtgtgtgtatacactgaggtgtgtgtgctgacgtgtgtatacactgtgtgtgtgctgaggtgtgtgtgtgtgctgagctgtgtgtgtgctgatgtgtgtgtatacactgaggtgtgtgtgagtgctgacatgtgtgtatacactgaggagcgtgtgtgtgctgaggtatgtgtgcgctgatgtgtgtgtatacactgaggtgcgtgtgtgtgctgaggtgtgtgtgtgctgacatgtgtgtatacactgaggtgcgtgtatgtgctgaggtgtgtgagtgctgacgtgtgtgtatacactgaggtgtgtgtgcgctgacgtgtgtgtatacactgaggtgtgtgtgctgacgtgtgtatacactgtgtgtgtgctgaggtgtgtgtgtgctgacgtgtgtgtatacactgaggtgcgtgtgtgctgaagtgtgtgtatacactgaggtgtgcgtgagtgctgacgtgtgtgtatacactgaggtgtgtgtgagtgctgacgtgtgtgtgtgcactgacgtgtgtgtgtgctgacgtgtgtgtatacactgaggtgtgtgtgcgtgcctggacatgtgtgtgtgcccaccaaggtcagccacacactggtcccctcgctgagggcaggtgggagtgggcgtgggagtgagtggggttaggggaaggaatggggctgagggtcggggcgtgggacttggatgctgagcaacaggatgtcgggggatggagctgggggaaaggtgaggggcaggagtttcggaggctggggtggggatgaacaccgggagaagttcgggagtgcggctgagctccatgctagactggagccggggcttgcggagaccggagcggggttgggattggggtcaattcgggcgacactaaagttggtttggattagggtcaggttgagatggagctgaggttgggcaggggtaaattagagttaggtgtggagccgagggcgcagtccagattgaactgatgtggtgcttgtaactgacgtggaggctggtttgggctaggttagggctcattggcaggactgggattggagttgagtttgcagcagagattggaggtgtgactgggttaggtttatgatgggggtgggtctggcttaagtgtgacgctacagctgggttgggatttgactttcagttaaggatggggcttaggtggggccaccaggctgaggacctgttttttctgactcattttggtctt

SEQ ID NO: 1944 - DNA, 1369 bp, Artificial sequence
  DNA replication origin
cccacccgccgcccaccccgcaacgcggctgcggctggaagagagagggcgtctcgcggaggacagcccctgcctccgtcccgggagatgccacagccccgcctcctcgcccgccgcccaggcccggccgccctggcggggggcacttacctcaggctgcgcaggccgggacggcccggccgagcccccggccgctccgtgcgtctccgcccccccgggaaaggtcccaacggtgcctactgcgagcggtcgaggccccgagcagccccgagagcggcggcggcagcaagagcagccaacatccggggccgcgcacccggaactacttcccgacccgcatcccccgcccgccctcgccgccaccgcctcctgcggcgtcgctgcgccgccggcccggcgtcagcggcgtcaagtccctgcgcggtcacggtcgcttcgacgcacgcaggatccctccgctgggacaagtagtgccctgagactcccgaggctctgcatcggcgcagccggtgtcatctagcggccggcagttccgagcgacttggggtccttgtgcctcggagtggcgtctgggagcaaaggcggcggaggcaaccccgcagttgaggacagtagggatcggtggctttggaccctgcccacggatacctggggccccatgccccgaaggaatggtgccttctgccctcccccgccccccaacatccgccacctcaccgaagcgcccggcaccttagcctcctctccaggaaagcggacgccttttccgacctggcacaccgcggattccgggacccccaacaaaggcgccttggaccttcaggacacccctcttttcagaacttcatgagtcccaggtgctagactcatgtctgcggaggcctttcccgtgcctggtctttctttctttcttaaaggagttggacctctaaaggcccttctaattctcaaggtagctacccaggttatggtactactatcagtaggtggagcgtttagaagggtagtttggtcgacgagtgaactttggaatttacttctacgtcagtcttcactgattctttctctaaactattagcactgataatctgccctataatttcacacttaattacattccagtgtagtatttgctgttgcttcattcgcgttagtcacatattcccctgcagcgccaaacacgcttttgaactcacaatgggtggctcaatatttggagacttagatatttgttagatgaatactaggctgattggatgagaggaaaaggagaggcatgagtgaattggccctgggtacttttttgacatagtctcaaagggttcagataaagacctccagcagatctgagcacacaattccttcagta

SEQ ID NO: 1945 - DNA, 1098 bp, Artificial sequence
  DNA replication origin
tagtcctcgcggatgcgccggtccgtcaggaaccagagctgggagcacatggcggccagggcggtgcgccccgcgcggcgcggacccctcggcgccccgggccgctcgctcagtagggcgagcggaggggcggccggcgtccggggcgagcgcgccacggctccgctcccgcgggtgcgccaggcgtctctgcagccctgacccagcgaatccgcccggccactcagcgccgccgtcggccccgccagccaatcagcgcgcggcggcgggcgctggcggctgcagaagcgaccctggcgggcggtgccggggaaggacggcgggtggggggcttgcggcggcgggggaaaggacccggggttccggggagcgagccgccggcgggcgcaggcgaggcggaggagggcagccccggcaggccccggacacccggtggacgtggcgctgcgggctggggtgggacagccggagcaggaggggccggggcggcggccctgtgaggctcggagggtttccgagctgacgggccagagatgcgcagtgggcggcggatgcgtctcccaggcgatcccgggcgctcgggggctgggacacgggcggacgcctgctgagccccggacagggagggcctcggggacgtcccaaaggagattccggggtatggcgaaggtcacacggctaggtccccagttggaccctaaagcattggaaggagagggatttctctgccgaaatcctagcctgaagccccacgggggtgggggaggatgtaggagagggggaagttgagtcttacccacctcccattcagataatttgaaagtgcatttcctggggtctcagattttcttacactggacatcccctcctaggtttcagcaggtctgagccttcacagactcgaggtcataaaaaattgacctagcatccttttcagttagaaggaccactggctggtctcccttcaccactcccgctctccccaggccatacaactgagtcatctttaaacactgtccttggtcctggccaattgcaaaccctgcctgcagacaatagtgtttgaagccagattttcctttctaaataactgcagga

SEQ ID NO: 1946 - DNA, 1322 bp, Artificial sequence
  DNA replication origin
cgcggaagggagctgggtgggggtgacgcgaacaacggcgtgcgggcccgagcgcacgaggccggtcggcggggaggggaccccgtcgcacacgcggtcggcggcgcgcggccgcagggggaggggcgcgcggccgcgcggggtccacagggggcgcgggaggcagtgcgcgcgcgcctgccgggcgggtccccgcgagagggagtgagggggggacgggggggatgggcggccgcgcgccgcggagtcggtgcccaccggccgcgcgcccgccggctcgcccagctccggctaacggttccgctgctgggctgcccgagggccccacccccgtccctgtccggtcctcaccgatgaccttcttgtccccgccggcaggcgccgccgatgtgaggccgcccgggccaccgctccctgcgccgctgcccgtagtgccgggcttggtgtcggcggcgctgagggcgggggcggcggggggggcggcgggcggctgctgggtctcggcctcgctgctcatggttgcggtgatggtgactggggccggctgcggcagctgcggctcctcccggggtgtgatggtaactaggccggcggcggcggtggggctgctcagggctctctggggtccgctctccgctcccgctaccgatcgaactagcgagaatggcgggacaggcgggataagccctacgagcgacccgccctaggcgttgttcactggccagtggtactgtcaatctgcccacctgaccccaatccctagcttctattggctaatattttatcagtcctccattctcattggacctttggcggctaattcagtcgacctacaaccgttcctgcctccgccggccgccatagagaccggaactagaattagagtagtcggccacgaaaaccatagagtacccgagaggacgggcagaaggaacgtgacttccacgaggcagccgccgggctggcgggccccacgttcagggttgtgtctcggctgaaaaaaaggcacgcccgaacgctgggcagggattacccggccggacccgggattggaagggggctcgaagacgccttagccccccgtgaagaaaaggcttccctccctcccagctccaaatacggtccctgtgatctgagaacattacggcgggcatagagtcgtcttttctttaatggccgtgtagtcgcggcacagccgagggtttctggaattgccttaaacgtatgcgtttgaagagcgtacccttttgtcggagcagtcaccttggagggaccacgcaggctatggcagcccgggttcagcatgtttagggcgagggtgt

SEQ ID NO: 1947 - DNA, 1138 bp, Artificial sequence
  DNA replication origin
ggggtcgtggctgggcagaggggctcctcacttcccagtaggggcggccgggcagaagcgcccctcacctcccggatggggcggctggccgggcggggggctgacccccccaccaccctcccggacggggcggctggccaggcagaggggctcctcacttcccagtaggggcagccgggcagaggcgcccctcacctcctggatagggcggctggccgggcagggggctgacccccccacctccctcccggacggggcggctggccgggcagaggggtcctcacttcccagtaggggcggccgggcagaggcgcccctcacctcccggacagggcggccggccgggcggggggctgacccccccacctccctcccggacggggcggctggccgaccaccccccccggcctccctcccggacggggtggctggccgggctgaggggctcctcacttcccagtaggggcggccgggcagaggcgcccctcacctcccggacgcaaactcccatttttttaaagccaccagatctcgtgagacttattcagtattatgagaacagcacgggaaagatccacccccattattcagtcatctcccaccaggtcccttccacaacacatgggaattatgggaactacaagataagatttgggtagggacacagagccaaaccatatcagtcgttgagggcagctgaccatctgtctccttggcagctggggcaagaaggcaaagttcctctgcagagtgcccacctgtactacaacgtgacggagaaggtgcggcgcatcatggagtcctacttccgcctggatacgcccctctacttttcctactctcatctggtgtgccgcactgccatcgaaggtgggcctcattacccctgcagcacccgcccccgcatgctgtacctcagctctgtgctggatgctgaagacacagagagaacaggatgcggtcccttttcttcagttggggaaccaatgtaaatacatgggtggcatcccagtgtgatgcatgccacagtagcatggaggaagttatagtcaacctacctggggatcaagaaggcttcccagagggaaatggggtgcagccagaaagggggccacccgtcacttgtcacacaacgcac

SEQ ID NO: 1948 - DNA, 866 bp, Artificial sequence
  DNA replication origin
aagtgaggagcccctcagcccggccagccaccccgtccgggagggaggccggggggggtggtcggccagccgccccgtccgggagggaggtgggggggtcagccccccgcccggccggccgccctgtccgggaggtgaggggcgcctctgcccggccgcccctactgggaagtgaggacccctctgcccggccagccgccccgtccgggagggaggtgggggggtcagccccctgcccggccagccgccctatccaggaggtgaggggcgcctctgcccggctgcccctactgggaagtgaggagcccctctgcctggccagccgccccgtccgggagggtggtgggggggtcagccccccgcccggccagccgccccatccgggaggtgaggggcgcttctgcccggccgcccctactgggaagtgaggagcccctctgcccagccacgaccccgtctgggaggtgtgcccagcggctcattggggatgggccatgatgacgatggcggttttgtggaatagaaaggcgggaagggtggggaaaaaattgagaaatcggatggttgcggggtctgtgtggatagaagtagacatgggagacttttcattttgttctgtactaagaaaaattcttctgccttgggatcctgttgatctgtgaccttatccccaaccctgtgctctctgaaacatgtgctgtgtccactcagggttaaatggattaagggcggtgcaagatgtgctttgttaaacagatgcttgaaggcagcatgctcgttaagagtcatcaccactccctaatcttaagtacccagggacacaaacactgcggaaggccgcagggtcctctgcctaggaaaaccag

SEQ ID NO: 1949 - DNA, 2108 bp, Artificial sequence
  DNA replication origin
gctggctgtcgtggccgctgcctcccaagccgaggtcgagtccgaggcaggatggggcatggtgacgcctgatctgctcttcgccgaggggaccgcagcctacgcgcgcggggactggcccggggtggtcctgagcatggaacgggcgctgcgctcccgggcagccctccgcgcccttcgcctgcgctgccgcacccagtgtgccgccgacttcccgtgggagctggaccccgactggtcccccagcccggcccaggcctcgggcgccgccgccctgcgcgacctgagcttcttcgggggccttctgcgtcgcgctgcctgcctgcgccgctgcctcgggccgccggccgcccactcgctcagcgaagagatggagctggagttccgcaagcggagcccctacaactacctgcaggtcgcctacttcaaggtgcagacctgcctggaaccaggcggccggggtccttctggggagaggagtgttgcaggggacctgaggagcttgggggatcggggaagtgtccgcagggaggggaaagtggcctcctggctggggagctctcctcggagccggggagagctgctccctggcaggagaccttcctcgcccagttcgcatgggcagatgctaaccccaaaggtccagcctggggttagggcacaggccaagcaaaactcatggccattttgttccctgggaaatctcctggaaggaattaaagcggcagtttgggtctcccattctgatgtcattgtaagtgtccgagtgagaagctagtagcggtctacaatatctcccttccggttggttttccagtggtgcttttcctgctgtttgattcagcagctctctttcaggatgtgaggttgccacgtcgccagcaggggctgcctggccctttctgtgtgtgtgtgggggcgggggggggaccctctggctagtctgccaggtttacaaagaaaatgagtatttttcggaatgccagagtgccatgtgtccaagtgtacacttgggcttggagcgttccaggcttgtttggtggtggtgatggtgacgatgatgatgatgatgatagccagcacatacttccaggcactattttaagcagtttgcatttattaacgcatttgccctaatcttcataatatcttgtcaggtagatgctgttattagtcccactgtattgggggtggggggagaaagagttgtgcattatatctggtatatctgttgtttaaaagaccttcgattcgatctaaagagacacttagagactcttggggacctcagatttccacccctccacagcattctgcctacacagttcccctcatttttcctagttactcggaagagcgctggacttgaaatcaaaataattgcgttatgtctttggttatgtcgcttcatcatagcactttctaaaactatttgacaaacatgtattgcatacctactgcattccagttcttgtacaagtaattaaatgctcgactaacgtctttgctttgtcttgctttgctgttaagagttactgtagtaagggctactgcaagggcatatacttagggctgcgggagcacaaaggagggagactctagctttatctcagagaaattagacttcaaagaagaggtaatattgaagcctgccctaagtattgccagggggagaggaaagaaggctcctccagatagagagaaaagtagaaccaaagcatgatgtattcaggaaaaaaaatgaactcttgtgattgcaatgtcgagatgtgtgtggggagtagtaggagaggcggctagaaaagtcagtgaggccagatttggaagagaattctgcggactgcagggagccatcctcagatttgggttttaaaacgcttattctggaagccatggtgaatgagccttggaagaaggagaaagtggtggcacttgattaggaggcagacatttgtccacaagagaggaggttaagtacctcagtgcttagagagtaaagaaggctgggggtggagagaggagtgaggacatgagggagaacagagaaaggcaggagcagcgctgaaagacacaagagctagagtaattccatgaaagggacagacctg

SEQ ID NO: 1950 - DNA, 1073 bp, Artificial sequence
  DNA replication origin
ggacttgggttgggtggtgctcctctttgggaagcccctctgacatcacccctgagcacgttaggtgcccctcatctgtatggtcttgtcttcttgtgcttaccatgtgacacttggcactctgtttgggcaccgcctacactggctttcctacagggaatgcaatttgagtgctggccgaggtccctgtacccagtatgaggcctgacaatagaagttgttctgtgtttgttaaattaacatcacaggtcactctggtgcttccctgaggtcctctcgctgcaccaaatctattgaccttccatctaaccctgcccagtgtggcctccaagaagcctcagatgaacgctcaacagtccagccccttccgcatacccagcaactacccagttcttatggtcttccacttactcattttttaaaatgcggtttatttattgccaatggctgctctgtgccgggccttgtgtgtggggtgggggatgaggagaacaagagccaggccgcacactccagcagctcagagtctggtagaggaggcagctgtgtgtagggacaagtgtaatgttggacaaggggatgtgcaagctgttgtggagagactaagtctggggtggggcaggggaaggttccactcctgtggtgacatttatcagggtctctaaggatgaacaaagaattaggagggacattcttggcccagggaatgaaccgcaggtgcggaagcacgatgaggagatggatcctgggagggaggggtgaccagagatgacactggcaggtaggctgcagggggtggtcgtgcggatgtgaccttgagtggcagcccgtggcgggcactgtggtgttcagtaagggagcagagtctttgtcagacacgggcaggaagcgcagggcggcttggaggcggcaaactgcagaaaaggaaaccggccaggagacgggggtgggggcgaggagggtggacgtgaggagaaaagcagggctgtggcagtggtgctgcagaggagacgagagttgaatatggctctgaggtttctaactgagtggcggggcggcgcctccgcggagtg

SEQ ID NO: 1951 - DNA, 1411 bp, Artificial sequence
  DNA replication origin
gcttgccccgccccgccctctacgcgggtttccagccatcctctctgcgcacgcgcggccgctcctgcgggcggaagcctcctggcgctcggccctgcgcccctccccccggcgcgcggccccgcccaggacgaggggcggtgggcaggcagcgctgggtccagtggtcgggggaaggcgaggattaccctcccggaggcgttgtctgcgactcggcggaggctccaacttccagtggcccggtcgggaaaggtacagactcccaagcctcttggtcggcggctccagcgaccgccattttcctccaggagagggaagagggcaggaggcgggggccgtcccctggggccgggcgggccggggcggggtcggggggccgggcggtggggggcgggcccggctggctatggggcccggccccctggccccaggagcggctgctgcggcggagttaggccggccgcagtgggaaaaccctgggcgccctctgggtctcagcgtcccattaggacggttccgcgctgggtgccgcacgccgcacagtgggcaacgctttcacaggggtctttgcatttcacccgcacacagcagctcctggagggaggccaggaaaacacttaacccattttgcagacagaaaactaaggctcaaagtggggaggagacttgcccagggacacccagcgaggttgtggccttgggactcggttcctactcccccacatccagcgcccttgccaccagaccactctgcctcacctggcaaaggatggggcggagctaaaggattagaggagtaactggcagggtattttttgttttgttttgttttgaagatctgcctctttctgtaccacccagatcagagcctcctaagaaatatccagaagtcaagccatggatccacctgcacgtaaagaaaaaaccaaagttaaagaatctgtcagcagagttgagaaggccaaacagaaatcagcccagcaggagctgaagcagagacaaagagcagaggtgagattaaggcggaggctctgtatgcctgtagtctgctggagatgatgctggaatagagaaacagcagaaaggagaactgacagcgagccatacttgcctccaggcaggatgggtgttctcccaggtttagaggggacaacactgaggttcagaatggtgaggtggcagcccagaatcacatgccaagttagtgtcagaaccccagtctggtgcggagcttttgtggtaagagacccaagggaaggaagaaaggaaaaaaaatgatatgtaaggggaaagaaggggtcagaatgagagagagcacgcaagtgtcagacacccccagtacagatgttctggatttggtgcggaaagcagctactcatgccaggtagaggcccaagctttaaactcacca

SEQ ID NO: 1952 - DNA, 1046 bp, Artificial sequence
  DNA replication origin
atttttttaaagctcgaatcaagtgctaagctgtggactaaggaccatatatgaatcatctaatttcacttcacatcatccttattttagagatgagaaagctgaggctcagagaaattaagtatcttgcccaagggcacacagcaagtaagtggcagaactggggcctatgcccatcacttcaaagtcagtgcttttaaccattatactattactgaaggaaaaaaggagagaagacgggaaggaaggaaataaaaacagtaccactgaagttcacatgatacagatgtatctccctgatgaaatcagggctgagaagtttcaaggaggagtaggtatttgacctaaggtttgcaggatgggtaagactgggacttgcagagataaagaggcaactacctactgagaagacagtgcagctgaagtacagaggcactttcatatcacactgcagagatctggggggaaaaggggtctattgggctttgtcttcctggtggctcagctgcacagagagaagcaacggtggaaggggctgagaagtggaggaggggccaggtctaagaagttaagagccaagaagatggggctagtgatcacagatgatgaaggtgaagcgcctaggttaaaggcaaggggccaagccatagtgcggtatggaggtccgaagttacaggtctttggggccaagtcaagggctgcagggaggaagaggagagaggagctatgaaagaccaagagcaaggtgctaacagggtaattgtacagggaagctagataacgggtcagagatacaggaggaccaaggaagtcagagggtcgcaggagacggtcagggaagaggaagcaaaggctgccagaagtgtcacaggccagggcccaagagctgagttgtgtgttgcggggcggggagaagccaatggcggaggtccaagggtacaagagctggtttcagagattgccggcgggcttggggccagagaggtgggagaggaggaggggctgatcctaaacgtatggtcagcggcaggaaggctgtatactca

SEQ ID NO: 1953 - DNA, 1036 bp, Artificial sequence
  DNA replication origin
gggcttcggatctagcgggccggagggcgccgcgtgcgtagttggcgccggcactgagcacatggcctccttccgggggcgccgcgccgtccacgcggccctgctggggctggggacacagggcccgggagcggcacgtcgcacacgacctcggcagcagcagcccagcctcggcccctcccggtgcgggggagggggcccgagcgcggcgcccattggctgagcgggccgagcccccggcccggccccggccccggcgcgcggaggagtcaggagccgcccccgctctccgtctgctcccctagcccggacgcccctgtaggtgggcggcctggtgcgaggtgtcccaccggcctcccctactcctcccgccagtcccccgcggtgacgaggccgaggccgaggggagggcacttttctccaggcccgggctcgaacgcgggggttgagatgaacctccggtctcggaggctctcctttgcgaggagtgcaggccccaaagctttggcccagtctcgcggagatgtgttccgcggaggcaggtttaccctcggggccaggcggggagcgcaaccggaggggcgggggatctgggggccaggaaagagccccaggctgaagtctagcgggaagcgcgcacgccacggggttggggaatgagggatggggactctggggaccaacaactccctagataggatttctttttttctgtgtaagtgggcttgtcctgcagggcatctttgtagcgtccgcagagcgatttcttttcaacaaattgtttgtggagcccctcctgtgtgtagggcattgtttctttccacctcctttcctccccctagtctacaatattttcaagtcccctttttcttttgaaacggtccctctttatctattatactttgatttttccatctcgtcagctgggagggcacctggatggcccttgttttcttagctgggacgcgggggtagcactgaattttgaactgcccttcctactggctgtggaggtgtcccgctgagactgagcggg

SEQ ID NO: 1954 - DNA, 1302 bp, Artificial sequence
  DNA replication origin
ggaggccctggccggcgtaaggcgggcaggagtctgcgcctttgttcctggcgggagggcccgcgggcgcgcgactcaccttgctgctgggctccatggcagcgctgcgctggtggctctggctgcgccgggtacgcgggtggcgacgggcgtgcgagcggcgctctcccgctcaggctcgtgctccggtccggggactcccactgcgactctgactccgacccccgtcgtttggtctcctgctccctggcgtgctcactcggggacccgcgactagcgaccggcacgctcgctgttgctacctcttgcctcttgccagagagcgcgcggaccgtagcgtttataggaccccggccattggctggcgacgccggtgtgtcaggggtgtgtgggcaggacctcggggcggggcctggggcccagcctgtcctgggcggcgctctgcggggagggggtgaggggagtggccggggccggggccccccctaaccactgcctcgctcaggctgccgatcggctcgttctctctgcgttgggaccgcggagggcattcgctgtgtgactcagggcaagtgtgcgcacctctctgagcctccgcggccttctctagcaaaatggtggagccggtacccggctgtaaggcaagctgggatgcgcggagtagcgggtggaaagctggactggagttctcactcggccgctgggtgacttcggtgcactagggatagtaacagtaccacctcgtagggttgtagaaagaccaagtgagttaatatttgtaaagtgtttagaacagcgtctactgcatggaaagtagtatttatttgttagagagactccaggaggtcttgcccagggattgacttctcccttccctgtctccaccccccacattcccgtttgtgagccaagccttgcttttgcaccggccgggctctcttgcctggaaatgcatacccatctcaaacctgggctttaaaatcacctcctctgggacgccttcctctacttctcacagttcaggtgagtctatggtgacctgtaagtgtggaaaatatgaaaggcaggctaactgactgacatgataggacattaaggacatgatagacctcgggtttgaaccagctcaactgtatactggcccggccgcgatcctgggcgagttcctggccagtgaggctgttttcgtttttttctttaatttttttttttctcagacagagtctcgctctgtcgcccaggctggagtgcagcggcacgatctcggctcactgtaacctccgcctcccggattcaagcagt

SEQ ID NO: 1955 - DNA, 1386 bp, Artificial sequence
  DNA replication origin
tctggattttcaggaagcacagcttgactaccttgtaaatgtcaggccttgggctgggagtcgaatcagagggtttcctggcccaggggagctgcagtctgaccacactagggtcagagcagtgacaaactgcaagaagccccagcctgggagtgcctagggttttctatccaaatgaattcatggacgtgcattcactcatccgcttatccatctaatctttctgaacactggtctgagcactgagcacctggggctgtagcccgtctgcatctgtgtttgtgcctgttgctcagcgccctcgacacctccagggcaggggcctggtctcatttctctttagctgacatagaggagactgggccagactattcggcgcctcagagcctctctctgctgctctcagggctccctttccaggaatgggggctctaggccaggctgccagggtaggggagagggcgtggccatgtcggcccctatccccaggtcggctgataagctccaaagcagtcgggactgagggccttggagcacagccatcagccaccccgtgccccacggtactaatgaggcagccacctccacgcccaaacgctgggatgggggcctggcctcttagctctctgctccccctctctatcctgggtggtcttgcccatttgttagctttggtggggggatggaggattcctctgcaaaggactgagctgtggggtccctgggggagggcagctgattccagtagagaggacacttccctcccaaagtgtctttgttccctaagagtctgacccaattcttttcttccatctgcccctggattgccctgcacagaggacaaaggaccccggcgaaaggggtgggggaagagcaagaaggatctcaaagggtcattctagggttcactctccagcaccccttgacaggatctcttgcgtgtggggagcacaagccgacctgtgcacgtgtgtgaggtcaggcgtggacaggtctgtgggaccacacgtacgggcacgcgcacggggatagtgagttccatggaggcatcctgtagtagggaacccgcgacggtgacgccacagatggggtgcggaggctctggtggcccccaacctccatcaggccagccctcctcgcttcctttgatgtggacaagactgccttttttttttttttttttttttttttgagacggagtcttgctctgttgcccaggctggagtgcagtcgcgagatctgggctcgctgcaagctccgcctcccgggttcacaacattctctagcctcagcctcctgagtagctgggactacaggcgcccgccaccacgcccggctaattttttgtattttttagtagagacagggtttcaccgtgctggccag

SEQ ID NO: 1956 - DNA, 817 bp, Artificial sequence
  DNA replication origin
actgagggtggggaaggcggccattgcaagcaggggggtcgcaggggacgggaaggcgaagtctggcttctttgagggtggccgagcaaggaaaggggcgagatgaagtgggcgaagggcgctagggccccgaccccaaaagcccacgcaggagaggggtgccagagtccagcttcacaaagacccgcctggagctgccgcagccccaggcccgggaatgtggggcggggacggggaggggaggggaaggagggggccgcgggccggcagcacgtagcgctcgtaggccgggcgcgccagggcaggtaacaaagctgccagtgtgccggcggcggggcggggctgcccgatacctgtctggcggggggccggggccccaaaggggagggcagcgggggctgctgggcacagtaggccgcggcctgcgctctgccgagccttcccctgccgcagcctccccagcggagccgcagcccgagaaaagcgacacagtcggttttgcagactagatgcccgaagcccagacactaatagggcctggcccggggtcgcgcaggagtcgtgagatgcacagctctgtgccaaggagggctggcgaggaaatcctcacccaggtcccggccacatgctcgttcgctgggtggggcggggagtctgccccaggcttctgagcggagttggaattcggatgcatggatattcgggtgcacggctctgcgccccgtaatttcttctctaagaggcgagaagagtccccctagacgggctgatctccaagtggctctttccaacaaggttaaaaagcagtcttgtcggc

SEQ ID NO: 1957 - DNA, 1369 bp, Artificial sequence
  DNA replication origin
aggtttttgtatttcttcagtgaactacgttaatcatcctttgcgtgtgtccactggtcagttcctcttattgttaagggtttagcaggacttgaaagggccgctgcagatgggagcccacgggcagcttcctccccacccttctgaccctcctcctcccacattcccatcctctagagctttcctttgctctccagggaacctttgtcattcaaacaggccgctgcttcccagggccctgggaaagccacctccggaggccctctccacttttgactgctttccctccggagccccacattcctgcctcacctctccccacgccctgcacatcctccctcgaaattcttcaaggaggcccaaagccacaggggacccagcccctggcctagccctagagcaagaatcccaaccccgccctgctccagcttgaaagcaggagagacggggctaggtggggaggaacatctgtccttgggggaaggcctgggagagaaaggccacagcacgcggtggaagaaagaacccgtctttgatgtcttgtgaagtctgacgtcattctagaaccaaggtcaaatcccaggccagccactttcgggccacatcgcatcactagtttgcagggctgcagtgaaggtcaaatgtaacttacatgtaatgcttctggaacaaaaagtcaggtgaactgattaccgcaaagccccaaggatcaggcacggcttctccaggagagatggcccttggagaggccggctttgccctagtggctggagagtgtatccggcagaaggggcagcctaggaaaaggctgggaggccaggggtaccgggtgtgcagtgtggctgggcatggacacgcgaatgaagggcctcagggcacacacggagtcccgagagggaagctcagacatcagcccagacggtggacgggactccacgctagacttgggagacctcggtttccatccctatcggtctccagcttcactcatcctatcacccacagaagactttcctgggcggccaggcagtatgccggccccacccaggacctggaggggttcaaagacaagcgatcagggcaaagcgggtgccccagggagagtgattaaaactgggaatcagcggaggcttctgagaagcagcctttgaactgggccttagggtgcgactgagggtggggaaggcggccattgcaagcaggggggtcgcaggggacgggaaggcgaagtctggcttctttgagggtggccgagcaaggaaaggggcgagatgaagtgggcgaagggcgctagggccccgaccccaaaagcccacgcaggagaggggtgccagagtccagcttcacaaagacccgcctggagctgccg

SEQ ID NO: 1958 - DNA, 1696 bp, Artificial sequence
  DNA replication origin
gttctctgggaaacagttcaattccctgtcataaaacagcatgcaacacatcttggaagaagcatgggttctttccacatgctgttctgccctacgggaagtttaaaattaagagagcaaagggaagaaaatctacattggaggggcagagaaatctgcagtggcctggaatgtctggagggaggtgggagggagaagggtgtgttgggagctgggcttactgatgtcacaggcagtaggggatgagtcccatgaccactcccgtgtttttcaggcaggcatggctgttcctctatgaatcactaaatgaaccaatttagcgaaacaatcatgtctgttcaaagggggatattaagggaaagcaagtgtgcatatcattgtatgatcagaacaataagttagaactttccttttttctctcactgttgtgacattcggcctggcatagaaacgggtacagataaacagcaacagtttctcattctaatggagagctacggtcatggtgaccgtgttgggggtgatggtgtgttcatggtggtgggggtactggtgacaagtatatcgtggttatagtgatggtggtgttggttgtggttatggtgacactggtgtcggttataactgtggtggtagtgatactgatggtgatgtttagtggtgatgctgactgcagttatggtaaggatggtggtggtgggtagtgtgacaatgatggtggtgtcttgcttacggtagtggtaatggtgatggtgggggcacaatgatgtcgatatgggtaacagtggtaaagatagggtgacgatgttggtgttgcaaggaatggttatagttttgatggtaaaatgacaattatgtcaatgtttatagtggggttggtataaggaggtgttgttggtcaaaatgattttaatgatgcttcgtgttggtgataatggtggtattggtgttggtgttagttacagtaatgtttttaatggtattggtgacacctgcctgtctcagtaggtgacattgatggaagtgctagtcgcatgggtgctagtgtgatggtgaacttgatggtagtcttgcagtcatggctgatggtagtggcagcagaggtggtgttcccagcgataatggcagtagtagggagggtggtgggaagtcggtggtggtagcggtggtagaggccgagatgatgaccaggaggttggggattacacggagagcggtacgggttctggcaatgatacccttagataccgtgagtcgactgcaagctctcttctctggagctgacagcatgctggacgtggggaaaaaggctcaccacattctccaaaagcccttctttccacctgctgcaatcctggtgaggtttaattctctgtgcaggcagagatggctgctttctgggggtctgtggggatggtgctgaaaaacaggtctgttgctgggaaagtggacagagagggaggctcaggattgctgagctggagggtgctttaggggcaggtcagcaggaacgaggcacgtgagggtgtgctgatggatggcaggggccgcgctggggctggggctggggcggcagggaggcagtggtggccggcgtgcaggggctcacgtagctggcagagccagggctgtacttcctgctgactcagcagagcaggcaggaactgattcttttcgactaatgtgtcttctccca

SEQ ID NO: 1959 - DNA, 836 bp, Artificial sequence
  DNA replication origin
gggagtgaggctgggactggagcccaggactgcctgctccaaaacatgggggccaggcagtcccagcagacccctgaccccaggtaatcactgacaacaagccggaggctctgccatgggcccgtcccagggtccccctgctcatggccttctgtctggttggttcagtgtggtggacccgaggaatgagttccgttaatctcctggaggacagatgtggggctgaaggagggagatggggtgagggtggaggcgccaggtggctggagaggggactggagggcaatgcatctgggaaatgactttccagaggtccctctgccctccccctgcagctggggacggagctggaaccccagaggccatgagggtgggctggggaaccatccaggatccagcctcaccctggcctcccaggaacaggatggggattgtcccgtgaattctatggaattaaaaaatggcaccttctcagcgggaagggagctcggctggttcccgggactgtctggcttctgtcctgactcctacaactgcggcggcttgggactttttccattccttgaccaagatttgacctagacagggagtgtgggggctcaggggaggagggaggatggcaggcgcatgggggcgactgctgagtggacacgtgacctcccgctatgcatgtgcctgtgtgtctgcacagaatgaatatctctgtgatgttcttatgcacatgtgcctctgagaacggatcgtggtggctctggcggggtgggcgtattgtatctgtgggtgctgtttgtgcctgggcaccttgaccctgccaggatctgcgttatctctccgag

SEQ ID NO: 1960 - DNA, 1059 bp, Artificial sequence
  DNA replication origin
ggggggtaggggggcggtgggaggtggtgggggggcgggggggtggtgggtggtggggaatgggggggtgtgggggtggtggggggcgggggcgtggatggggggtgggagactcaggcatggcgggctgcaggtcccgagccctgccctgtggggaggcagctaaggcctggtgagaaatccatcgcagcgctgtgggccagcactgctgggggagccggcgcaccatcggcagctgcttgcccaggtgctaagcccctcactgcctgggccagcagggccggccagccactctgagtgtgaggccgccaagcccacgcccacccggaactccagctggcccgcaagtgctgcgcgcagccccagttcctgcccgtgtctctccctccacacctccctgcaagccgagggtgccggctctggccttggccagcccagagaagggctcccacggtgcagcagtgggctgaagggctcctcaagcatggccagaatgggcactgaggccgaggaggcaccgagagtgagctttggggctgcaagggctgccagcacgctgtcacctcccaccagcaggcccctcctccagtactgggaattacaatttgacatgagagttcagcagggacacaaatccaaagcatatcattctgcctgcggcctctactaaatcacatgtccttctcacaccgcagaatccaatcatcccttctcaacagtcccccacattttaactcatttcagcattaactcaaaagtccacagtccaaagtctcatctgagacaaggtaaatcccttccactgatgagcctgtaaagtcaaaaacaagttagttgcttccaagatacaacaggggtacaggtattgcataaataaacctgtttaaaaagggagaaatcagacaaaacaaagggtctacaggccccatgcgagtccaaaacccagaagggcactcatcacatcttaaacctgccaaataatctcctctgacttgatgtcacacatccaggccacaatgatacaaagggtgtgctcccaaggccttgggaagctctgcc

SEQ ID NO: 1961 - DNA, 1240 bp, Artificial sequence
  DNA replication origin
aaatttgaggcccaagggaggatctccactgaccaagtctaagggtattaccggtgaagggaaaaatataaaggtcatgacattgggagacctggctttgatctggctccccattttataggctcacagagcctcagtctcctcatctgtaagatgcagatgatgctcagcttgttcagctcagagtcatgatgaggctcaacatattcatttgttcactcaacaaaaatgtattaagtaccccctgtgttccaggcacaaaatagacacgcacatatgcacataaaatgctgtcctcacagtgcttccattctaagaggggagagtgacaaacaaaataaaaagaagtacagtctacatgctagatagtgatagatgctaataagaacaaacaaagcatggaaagtgaagccgttgggggagtaagaagttgtagatagggaggctggggagggctcactgagcagtgatttttgagtgaagactgaaggaaaggaaggagctggctgtgctgatgtgggagggcagggggagtagccgagagactagcaaaggctcagagttaggagggtgcttattgtgttggaggaatagctgggaggccagtgtggctggagtggtaagaaccggggggtgaggagcaagaggggaggcaaagaaagaatggggagcaacaccacagaggggcttgcagttcatgagctcttactcagagtcaaatgagaagccataaaggggtgcgttctgagtggcaacatgatctgtgtttcctcaggttcattctggctgctgtacagaggacagatttaaggaggagaaagaaaggaagcagggagaacagctgagggatgattgctgtaattcaggtgagagataatggcacttggagcaggtagaggcaggcgacagggtggtgtgaagagatcaataatggatatgctttgacagatttcttcatagacaccatgtggggtggaagcaggaagaagcaaggttttgggcctgagcatggaaagcatggagttgctgttgattgtgatagaaagggctaaagaaggagcaggttggttttggacctgttaagattgatgtgcctgctagatattttcatggagatgctcagtaagcaggttgatttcaggtctggatttaagggagggaagtccaggctaggaaaggaatttgagggtcatcagcctagaggtgaaatgtaaagcccttagagtagatgagacttccc

SEQ ID NO: 1962 - DNA, 986 bp, Artificial sequence
  DNA replication origin
atctagcagggaatgacaggtaaatacataataggcaattaagcatattgcagtaagagtagttgttggggaagcacaggggccatgggtgcaccaaagaggcacctctaaaccagcctgcaagtcagggaaggcttcctggaggaggtggcatctcagttgaagaatgcaagttgcccagactgaggctggggagtggcaaatatcccaggcaagggagaactcttgagttcaaaaactggaagggcagagaggagggcagggtgccagtggcaaatgactggcctggtgtatatggcaggggctttatgagccttgtgaaggagtgtggcatttcttctgaagtgtttattctgggagttcctgtctcctgcctgaaaggccttcacccctcctccctgttcactcaaatcctgcttccccagtaggatccagtctgtggggctcatttgagggagaatgagcacggggcttttggaggctgcagcctagggccaagggatggaggtactggggctgtgtttgggggtccgctgatgttggaatttggggctaaagctgggtttgaggttggcgttgggtttgggggctggattcaggaacaggagtcgaggttcgggctgagcgtgaggttgggatctaggaccttagtccagaatttgagttggagttaggagttgggggctgaggtttctagccagattaggggttggatttggagttgggactggaattgaatttggaaatggggctgggggttggggctgagatgtgacgcaggagctggggcaggggtggaagctgggagttctagctagggtttgcagctgcagctagagttaggggttggttttgaagctggagctaaagctaaatcggggtcggagctgtggaatgggttggcgcccaggctctggggcagatagacgacattcctcctgctgcccaggtctgcgaattgtgttccgagccctaactgcagcgga

SEQ ID NO: 1963 - DNA, 1548 bp, Artificial sequence
  DNA replication origin
cgttttcatgtattcaaaaagcacgctttgagcatctatgcaggctctaggccccactggaattctgaaacgaagatgtcaggtgactcatccccacccctcaagataaatgttattgtcttcacttttcagacaaggagactgaggctctaagagacgaaccattcaggcttcctggcccctcccccagacccctctcctgggctctgcagggctctgggctgactaacccacacccacacttagcacaggcactggcctgcttgcttctgtctctgtcttctgctgcagactggggctccttgaaggcagggacctcatgtgctttatttttgcccaatgtgagacatgctttcctctggaggacaggttaaatcagcagccactgttaggtgcctggccatgttcctaccggtgggaaggactggagctggggttcaaatccagagccctcctttttcctttgctccactttagagaaatcgtggaggaggatggcatgggggaatggcgagtgtggagaagagcaaggggagcagaaagaccagtgaggaggtggaggcgggagccaaggatacgagagcagggaactggctagagaaatgtttagaggtggagccccagggacaggacgtggattagatacagcagagggaggaggagctggctgagagggcagtgatgccatgcctgaagtgaggaacgcagaaggaacaggttggagtaagacaacgagcttgggttgggacctgttgcatcacagggacatcaaggtgacaattgactcaggacggagatgtaggttggagagaggaatttgggaactggcagcttatattaccaaactcatggctgtgagattggatgggatgttaggggagggagggtgttaggggtctggtcctaacccacagagaaggaggagacacagccctaaaagagaagtgtcaaggtcagtcaggcttctggttccagaagggttaagtcataagcgccccctccatccccacagctcctcccgaggaaccagtggtgacagctgaggccatgtgagtaggatcctgaatgaggctttatctctggctgttcgtcccatcgtccaccgtggcaccagctccctcagccagccgggatgggaccagcgactgagagagccagaggcagagaggtcagggcctgggtgaggggattccctggagggttttagggggtaccctatgggcagggtactcccctggggtcattggagagccattcccaagggacagtactgcagagggggctatcccaggggagattcgggggaacactggggtggattctcagggatcatccccaaggctcccaggtgggaccgtgggggacaggtgggctgggaaggtaagactgtgatccttcccctacaggtgagggtgaccatatcctggactgtgagaggaatgggactctgggcctgtagctgccaagcaggtggcaggtgctccaggctgtgatctgaaccctctgacccctgacattgacctcctaccctgacccctgcctgaccaa

SEQ ID NO: 1964 - DNA, 1005 bp, Artificial sequence
  DNA replication origin
cctaccctgacccctgcctgaccaagccatgtctgaacaggaggctcaagccccagggggccgggggctgcccccggacatgctggcagagcaggtggagctgtggtggtcccagcagccgcggcgctcggcgctctgcttcgtcgtggccgtgggcctcgtggcaggctgtggcgcgggcggcgtggcactgctgtcaaccaccagcagccgctcaggtgaatggcggctagcaacgggcactgtgctctgtttgctggctctgctggttctggtgaaacagctgatgagctcggctgtgcaggacatgaactgcatccgccaggcccaccatgtggccctgctgcgcagtggtggaggggccgacgccctcgtggtgctgctcagtggcctcgtgctgctggtcaccggcctgaccctggccgggctggccgccgcccctgcccctgctcggccgctggccgccatgctgtctgtgggcattgctctggctgccttgggctcgcttttgctgctgggcctgctgctgtatcaagtgggtgtgagcggacactgcccctccatctgtatggccactccctccacccacagtggccatggcggccatggcagcatcttcagcatctcaggacagttgtctgctggccggcgtcacgagaccacatccagcattgccagcctcatctgacggagccagagccgtccttcttctcacagcggcctcagcgtccccagagccgagccagggtgtgagtgcatgtgaacgttgagtacacatgagtgcgtgtatgcccccaggctgggtcagctcttctgtggattgcatggcgtgtgattaaaagcccatgtgttcccacacatccacatcatgggaaggttaatgtgtgcctccttggaactgggtgttggtgtccatggaacttcctctctgtatctcaggtcagtaggcgcagaaacgcctcatgatgaagattcttgagccccatttccaagacccctcacatc

SEQ ID NO: 1965 - DNA, 1304 bp, Artificial sequence
  DNA replication origin
aatgaactgcttgacagtcagctacaagagacagagaaggaagggcttggctggtggaggggttctgggtcctggagctaaggcaggctcgcaggctctccaccgtccagactggactctgactccacctgatctctcctgcctcagcctcacattttgtactccagtcacacaaacctggagagccccctccacctgccacaatattgccactgcaggcctctgtccaggctgttccctctgtctaggatgccctctccctgcccctgatttctctccctccccattgtcctcacgccaatgtgccctgctccaactgtacctcccaggaagcatctcttcatctccctgagctcccccaggctggagcaggggtcccttctctgtgctcaaaagcacagcgccctacatttggcagctgtgttcatgcctgttcctccaactagggcgtgagctctttggaaggcaaacaaagaccaagacctacctcgtgtctgtgtctgtctgggctccaggccttgccctggggctgccctccctggctctgggcccagccccaagcttagctccatttctttttgtttttctttttctggagaatggggtcttgctatgttgccctggctgatctcaaactcctgtgctcaaaggatcctcccacctctgcctccttaagtgctgggattccaggcgtgagccaccgcacccagccctagctccatttctgtgccacaaccttctggctgcaaaactcagcctctcccacctcaaatcccagcccaccagacatttctagatctccatagtgacagagagggggacccatgggacacttctgttctggctggctctcctggcctgcactctcgtggtggaggcagggagaagtggctcacagcaacctttgcagggcagttttagagacgagtggggaaacaggactgatagaaataaagtgaggaaacggagacagggagcatagatcattctttccgaaagctggggcgaaagggaagccatctggcaggagaagggaggggacacggccagagaaggattcgtggttttgtttttgttcttttagaatgaagagacttgagggaaagaggccagtgcgcatggaaggggaaaggagggggatgggaatgcctgataaagtgaggcctgtggggtctgaagaaccgggcaggggaaggaagaggggtgaaggttggagaccctcttctgagtggacggtggatcagtaagaccagagggctggggctgggggctctggggcactagggttggctgggactacaata

SEQ ID NO: 1966 - DNA, 1132 bp, Artificial sequence
  DNA replication origin
tcttgactcctaacattcctgaattcctgaatggattgtttctcttctagaaacacccttgtgtttcagaccctactgctcttctcagtccctcctcctggaaggcccttccttccttttctgccttctttgtcttcccacttctcctctgagcacaattcaagtgccatctactctagggtctctcccctgagcctctccctcttagaagagtgctccagtcgctgccccacccgcttcttgcctctttgctcagggctgaacagagagcctagagacccaggtctgcctgtgcctcttcacatttcctgtcaattcacggggtccagagctcaggaggcagcccccttggccaaagggaagggtcttcctccctcaggagcccaggtatgcaagagtcagccaaggggttgtgaatctgaggactgaggcaggaatcttggggccacataggaaaacagcttccttctatggggtggccaaagggtcagggtggaggacaggcctgggactgagatcccacgggtctacccaggcctcagcatgaggctgtcttgggcatcaaggatctgggctggacagatctttgggagaggctagactctgccctgcctgtgttgggcatgatgttaccagttctcttcctcctcagggggactgatgcggtctgccaggtgggctatgtgacagcacctgctaactcccaggggagagatgagggtttaacatcgtgctcatttggggctaagagggaaggggcagctgaccacaggctcctggccctctgtgtacagaaggaaggcagctcagaactacagataagatgggtgcaggcacatcccatgggacctggtccactacagaggagaggccctggaggtcgggtgtgtcaggggccaaagctgagggtcccatgggtcatgaaagtgttggggcctcagaacgatgggtctaccctccccaccagttcaaatgcccctctttaccgttgctcttccagatcacgtctgtctgcttctccttgtgcacacgtgcagaaagtacagcggtgtcacctttgttcacagtgtgtgtgaccttgtctggaagcaggtgggctgcggggtggaaggtgggtcagcggcctggtttt

SEQ ID NO: 1967 - DNA, 879 bp, Artificial sequence
  DNA replication origin
ccctttggccaagggggctgcctcctgagctctggaccccgtgaattgacaggaaatgtgaagaggcacaggcagacctgggtctctaggctctctgttcagccctgagcaaagaggcaagaagcgggtggggcagcgactggagcactcttctaagagggagaggctcaggggagagaccctagagtagatggcacttgaattgtgctcagaggagaagtgggaagacaaagaaggcagaaaaggaaggaagggccttccaggaggagggactgagaagagcagtagggtctgaaacacaagggtgtttctagaagagaaacaatccattcaggaattcaggaatgttaggagtcaagaagggtgtgaagacgaatggggctggatggcttggccacggccaagttggtgaaaatgatgtctaaggagctggatttttgtcctgaggtcactggagaaccaggagagtttcagcagaggagttagagaggagtctgttgtaaaaaatcaccctggctgctgggtggaggagggacaagaaagggtgacactggaggcagaggagccttgtgaggcccctggaggctaggaccagggcagtggcagtgggtgtggggagaagcggactgggttaggggatgaggaggagatggactgagcaggacttggtgatttactgggtggctggtggagcatgaagaagagggcacttctgagctttctggcgtgggcataggctctcgtggtgccggccctaggtctcatcactgtgcatggggctcattgatgtgagctgagcagaggtggacagagagaggtgacacagccctcatgtagtgctgaggcccctgacacattcatgtcccccaggatcctact

SEQ ID NO: 1968 - DNA, 860 bp, Artificial sequence
  DNA replication origin
tactggacagttctgacccctgacctctggccccagagcctttgttgcagccgtggttggagggctggcatgtggaaggcactgaccggctgcgagtgagctggtccttgcccttggtgcccgggccactggtgggcgacggtttcctgctgcgcctgtgggacgggacacgggggcaggagcggcgggagaacgtctcatccccccaggcccgcactgccctcctgacgggactcacgcctggcacccactaccagctggatgtgcagctctaccactgcaccctcctgggcccggcctcgccccctgcacacgtgcttctgccccccagtggtatgtgcaaggcgcaaggatagctgggggttgggggaggacgtgggacacagggacacatgagacctaggagacacgggaggctgtaggagattaatggacatggagaggacacaggacacacatagggtattaggcagacgtgaccccagcggggacatgggacttggggaagatccagggtaccaggaggacacagatcaccaggagcatgtggggagagcatggggaggtcagggttcatggcgagaaccagggtcatgggagggcatgagacttgcggaacacagggcatgggcggatgtggagaggacttgggatacaagaagtacaaggagaagcagaagcttgagggtgaaagtggcctgggggaatggagaggaattcagtctggtggggaggaggaagttggcagggtggcccctgtgcttggacccacagaggagggagcacagctagagcagatgtgtccagccccacagctacatagcccggtcctatctgagccttgccttcccccaccatct

SEQ ID NO: 1969 - DNA, 890 bp, Artificial sequence
  DNA replication origin
actgccacctcagcagcagcaggcccaggacggcgctgaggcccagcactagatgcagagcggtcaccaaggagatccaggctaggagacaaaaagggtcagacttcggcccacccgggccggagccccgccctcatccagccagcccctactctggccccgcccctcgccgcccctgggcactgcgggcacctgcgcagccgtcggcccgcaaggtcagggccccgcccctctccgcgccccgcgcctcgcccctctccgagccccgccccactcgcacccggcgcccagtccctggcgcaggcgctgtgcggctttggtgcggccggggcttgcctcaccggtctcggtggcggtctccaccctagttgggtccgaccacgagctccagggaccttggtaggtggggccgttgagcctggcgcgcagctgtaaacggtagcgagatcgcgggcgcagctccagggtccctcctcgggccccgagaggcggctccagcacctgagcaaagaagcgtgcggtggcccggcgtcggggcttcgatagcccagcgtctgtttgacccaaatcctgcagctccgaatccccaggcggtcggagattcccacaaagagccccaccggcagaaaacacgcttcccagcaacaggatagagcgccctaaccgagagcctctccctaacgggatcacgctctgcccgagagaaacgtgccaggcccacctcctgagacacagacctcacctcagagagctacgtatcctaacaccaacacccaggtacaccctcggcagggatcccggtacacgcacaccctaccgggtgttctcacaactccaggtcgggcgatggacacccccagaaacagatatattcagagccacacagacca

SEQ ID NO: 1970 - DNA, 1171 bp, Artificial sequence
  DNA replication origin
tggaggctacctttcagtctgctcatacgtatgggcagattaaaagttcaaagagaggtatgttcagagggagatggtagcccatgagagtggcacctgaaccagcccaggaccatcagaagacaccatctggaggagatgacttctgagctaagtcttaaagaagcagcagatgaaggatggaggtgggatgcattctacccttcatgtttatagcctccaatggcatttctcctcagccttcgtcttcccacataaatgagtcactcattaataacatttatttaagggcctgctttttggcaggcactgtgctaaggatttaaagatgaccaagtaaggtataatagggaagatatataaagaaataaacacagtaaaacactactggtactgtattggagcacagagcagcggccaaaagggggagggtcaggaaaggtttcttaagagttggtgaagaaagttatttacagatgaatgggtttagtgagacagggaggctatttcaggcagagcggacgttatgtgcaaaggcactgagaagtaaaacctgacttgtggagaaaaccagtttggaaaggctgatgcacagggtagaacaggctgaagtgcttgctggcaggggccgattttgcagagcctcgcttgtcatcatagggagcctggactatatcctgggagctattgaaaggatttaaggagggaattgataggttcatgtgcgcattttagaaagattattctggtggctgtgtgaggctagatcggaggggcaagaggttctgtttcagtgagtcaggtcgtgtctgtagggctagagaaagggggccattgtttggactaggtttaggaggtgggacctgacggcagattggatgggggtggagtgggcagtttggctgaagggtggacggtggcctagtcgccgaggtgagcagcaggaggcggggctgttcgaggtgggcggtatagtgggcgtgttagagtgtaaggagccgcggcgagtcccagaggtgacgtgcaggaagtggcgaagccgtaggtgcgcacgggcggtggacggagatctggggtcacagagcgaaccaagaatgcctgtttacaggccttcggctccacctggtccaccgccagtctcctgcctggcgggggcggtacctgtagtgtg

SEQ ID NO: 1971 - DNA, 1194 bp, Artificial sequence
  DNA replication origin
ttcactagcaaagtgtagtaggggaactaattgaagtagtctcaagagtaaatgggaagtgtggggaagtggaggcttgttttcaaggcgtttgacatcaaagaggagagagaaagtaaaggaggagcttagtgaaatgagcctgcctgtggagaaagggtcctggttttatgtcagcagcagtagagtaagatcagtgcaatgaagcctaattgtgagggcagacagagggggatggaggtgaggtctggggtgcttgtgttgtgggggtagggtagggaagttcacagagaagtctcgagagtttagctctgtccagggaactgggagtgaggagcctgtcctcaaggctgctgccaatagcttagtggtaggtaggaatggttggcaatgtgggtggtacagcaggaccctgactcagccatgggtgggcacacagacaggggcatggtccccaggcaagaaggctgcaatcttcggtagtccatctgggcctgggaggaacacaggggcaaaggagtcctctctgaggacttggggaggatttcaaggaggctgggttccacttcttcacaggtatctgagactgtggccttgggctgggagagatgaggagaggcgctggattaaagcagatcctgtgggaggaggggctggactgtacaggaaggagaagggctggggtagtgctggggtagtgcctggggatggcacactggtagggcaaggaccttgaacaagttgtattgttggggcaaggatccagtaccaggcagggttggtggtgggcacaggggagggaagcacactcaccgggctcagggctgcagtgtccctaaggtactggcctaggacccggtgcaggtctggaagtgagggccacagggcatgcctcagtctcctgggggagaaggaagagaagcagactgagccatggcagtggattggcagggaggaggacagcagttggggtgggggagcagtgaggccggggagtaaggcttggagatataagagcatggtcaaggcaataaagttgggcaggggagtagagtaagaagaaaacctcaggtaggggagggaagtcagtggtgggcaggttcaacaaagggtgctgcagtttcctcaaacactccaatgtttgttctgtctggaacactggattcattccctcacctcattgtaggcctctgt

SEQ ID NO: 1972 - DNA, 1376 bp, Artificial sequence
  DNA replication origin
aggccctgagggggagggggcctagcccaacggggcccctccctgagggaggggaagattcctgcgacctcccccactccccaaccccttcacatgccactggcttccctgcccttcccaggaagggaagagtgattgtacccattctgaagtaggacaaactgagcagttatggccggcttaggagaggatgctgggtgtggattttcagcagtgctttgggccagggctggggctggggctggggtcagaggaggtttctggctcagaatctaggaccttagctcatcaggctggtcccacgtgggtgggtgggtggcgagtctggggctttacttggctttcccaatcctggtgggtcctgctcccccaggcactgacctgtggcccggacccaccctccaccccctgcacagtacagcaggggcgggcagagggcggggctgctgccagatctagtcagacaggtggagccgccggggcaggagtctcaaagagccaggctccaggagaggaagggctctgcgagaggagagaggagagcgctggagaggagaggctggaggtgagagtcccaggaaaggcagaggagaatcgtagggacataagtgtcccagcacaggcaaggaggaatccgaggataaggttctggagggacagaagggcccagagaggtgagagtcctggcagggacaggagggaccctggggagaagagagttcaggaagggtccagagggatgggaagaggagagggcaggagaggagagattgaaggggagaatccctggagagaagaaagacccagagctggggaggtgagggactcgggtgaggaagggagacggagttcaagagctccctgttggtgagaaggtaagattctccagtaagagacctggaattgagagttatcttgtggaggaagaggggaagggaggccaggaagtaaaactgtggagaggagaggagagtaaggtgtggagaggaagggtggaacagctcttcccaggcaagcaggatgtgtggggagcagatgcctcaaccaaactgcctcctccccctagttcccagtaattccttcctttcactgttctgtcctttctgcaatgaggcattgcaggtgtcttgtctggttctgtgtcttatctctgtgggatgggggtgtgcagtgggatctgtctgacatccgccctctgtacctccccagagtccttagccaggatggaggctgttgtgaacttgtaccaagaggtgatgaagcacgcaggtaagacgctatccaccagccctttccttccttctttcccgggatccctggatctacggctgtcttctaatggagagttcctatgaaacccttgatcctgtgacctg

SEQ ID NO: 1973 - DNA, 1306 bp, Artificial sequence
  DNA replication origin
ccgggcctcgccagcaccctccctcccccacacccccgtctctggcccccatttgcctacacccgggccttcctccaccacccctgcatttacctctctccctcctcctctcccctccctccccccgctaccctaactttgccaggcaccttttcccttccatccatcttaaaggaaggaagggacgggctgagttccccgacgagagacacacccagattttcctgcagcttggggagaggtcctcccaggagccttggtccctcctggcctgccgggtgtgtgggttgatattgggggctggtggttgagagataacaggctggctggctcccatgtgtcagggaggaacctgtgttggcgccctcgccccggcctgggccctgccggcgatgggcggccagcaagcccgatggtgggggagcaagtaaggaggggatccgagcgtggccaggcagcgcgcacacgtgtgtgagtggccccgcgggtgagcccgtgcgtgtgcctgggcggtggccgagctgcgtgagggccgggagccatgcgtgtcagcccacggaggtgttgcgtggtgtgtcaggcaggagacgtgtgtgccagccctcggcgtggcaccttcgctgttgggggtggagagctaggtgagaggtgggtgtggaccgcaggcttggggcctgaccacggtgggcctaaagaagccgggcctcctggaggtgaggggtgtgcggggcagggaggtgtcagaggtgcgcctcttcacttggcatctgcagaggtgcttctctggaagcagggagtctggggcacctgctgccctgggccctgctctgttccaagaatgccttgtccctcagggactgtcagtaccatgctctcctgggtctggccagaggcttttgtgtccctgggagccttcccccgacattccttcaggccctgagggggagggggcctagcccaacggggcccctccctgagggaggggaagattcctgcgacctcccccactccccaaccccttcacatgccactggcttccctgcccttcccaggaagggaagagtgattgtacccattctgaagtaggacaaactgagcagttatggccggcttaggagaggatgctgggtgtggattttcagcagtgctttgggccagggctggggctggggctggggtcagaggaggtttctggctcagaatctaggaccttagctcatcaggctggtcccacgtgggtgggtgggtggcgagtctggggctttacttggctttcccaatcctggtgggtcctgctcccccaggc

SEQ ID NO: 1974 - DNA, 1210 bp, Artificial sequence
  DNA replication origin
gagggagcagggccagagagaagtccccggggccagcctgcctgcctgccacttcctcatctgctgggccgactttctgtcaccagagggggaggggcgggccgcgcggggggcgcccgctgattgggcggccggcagggccggaggccggcagcgcaggctcggccggggcgggggcaggggcgtgccgccgggtcccagcaggaagcgccgcggcccgggcttcccaccccttccctcgccgcccgggcccgccctggccagttgcagcggcctggccacctcaggagcacgctgtctcttcccgacgtgcagcccggggcccggccctgtccccgggtgactgctccccggcaggactgcacatctgtggcggcaggcccagctcagggctcgggggaggttcggccttgccttcaaagagctccctctcctgcagggcgagcgcagagcggcgggcgagaccacactgcgtgtgctgagggcgcactggtcttagcgggagggaagcctcacgagcctgtacacttggaggagccctaagcgttaggatctgctgcgagggctgcctggaacggaggtgagaggatacaagtggcccggggcaagcatagtgaatcactggctaatctggccttcgaggtagtgaaaggaaaaaagggaaatgaagctgactgtggctgaatgtagtaggtcttgaaggccaaatggggcgatctgatttttattctagaagcagaggagaaactaaagatttttttaggagactatattcaagcttgtatcattagttcatcagacgtttatggaccacccaccgtccgtgcactcacggggcttgcagtctatctggctgaatcactttggcagccagtgtgaggagggcacagaaaggagaccaggtgagaaagccagcctgaccaaagaagatgtggcaactgatgggattggaggaggcggacaatgtcctccagacagctggactggctctctatatatttatttatctcttctacacctccagcccccacctccacactcactaactggactcaactagtgggggcaaaggacagactagattttagtgaaatggaatttctacctccagcggcccctggaacagtagcacacaacgatctaacaactgcttgtatgattggatggtgtaagtgcggacagaattagggaatttgggctactctgggca

SEQ ID NO: 1975 - DNA, 989 bp, Artificial sequence
  DNA replication origin
gggtggagcttgcctgacaggagacagtcgggctaaatccggagggaggaggcagcacctgtttgcttggcgtgggaaaggattaggttgtaatacggggaggctgagatgcagtccaaggaagacggctcaagaaggtggtgggttggctcaggccctgtcctaagctgctggatggaggctgttggttgccgatatagcaggggatctaattggaaagaagcccaagcagtgagggaattgtgggccgcgatggctgaaagctaagcagcttataatcagaggccatggtggaacccgggatcaagtttctgtcaggcaggtttgcaagacagttttgcatccctcttcccagcctgtgccctatagttgttaagggtgaagaaatggagtaaaacaggagaccaccgatgggaaggaaatgctttgcagacccccagcattttaatttgtttgtccagtgcttagaagcatgtgtggtttttgtttttcatttgtcacttagtttcttgcagctggtagtctcaataaatgttaatgggttgactgagcttgtgaaagaggcacgggaatattgacacagagatagatgattgcatattaattcagcaaggagaaggttgaaacaaaatgatgagagcagatggaaagctggagtcgttggttgggggagggaaaggggagagcaggactggtgttcagagaagtcttcatgagtaggcagatttcccagagactgacaagacagccaggctcacagatgctaggatggaggaagctggagtgcatgtgctacagaggtgcacatgagagaatgatctcctggcattaggtctgtcgaaaatgtctcagtgagggagtgtagggtgtacctaacacagagaaaaaccaggcatagattaggaggtgatggggaaaaggaatcagttggtggaaggacttggggtcaggcaaacaggttggaaggtctcagggttgatgctgtctat

SEQ ID NO: 1976 - DNA, 1053 bp, Artificial sequence
  DNA replication origin
attttcccctcagattgtgtcaggcttgagggaagagatcctgcggctgcgtttcccccaccgggtacaaagcaaggagccaacgcccaaggtgaaacgaaaagggctagggggtgctggtgggggcagctctccctccaagtcaccccccgtgctggggccacagcaggccctgtctgaccggccctgccttgtggtcctgcataagccactggacaaactgctcatcaggttggtacagaggtgtggaagggcgtggcttagcagggtatgagtggtacagaggtgtggagggcatggcttagcccggtgtgagtagtatagaggtgtggagtgcgtggcttagtggggtatgagtggtacaaaggtgtggaagggtgtggcttagcggggtgaggtgtggaagggcgtggcttagcagggtatgagtggtacggaggtgtggaagggcgtggcttagtggggtatgagtggtacagaggtgtggaagggcatggcttagcggggtatgagtggtacagaggtgtggagggcatggcttagcccggtgtgagtagtatagaggtgtggaagggtctggcctagtggggtatgagtggtacagagttgcagaagggcgtggcttagcggggtatgagtggtacagaggtgtggaagggcatggctcagcgaggaatgagtaggtcagaggtgtggaagggtgtgacttaggggggtatgagtgatacagaggtatggaagggcgtggcttagcgaggtatgagtaggtcagaggtgtggaagggtgtggcttagcggggtatgagtggtaaggagtgtggaagggtgtggcttagcagggtatcagtggtacagagatgtggaagggcatggtttagcagggtatgagtggtacagaggcatggaagggcgtggcttagccgggtatgagtggtacagaggtgtggaagggcgtggcttagccgggtatgagtggtacagaggtgtggaagggcgtggcttagccgggtatcagtggtacagaggtgtggaagggcgtggcttagccagctg

SEQ ID NO: 1977 - DNA, 905 bp, Artificial sequence
  DNA replication origin
gggctgggggccgtccccgggagacaggcggccttccgagagggactggagcaggccgtgcggtatgccaaagccctgggctgtcccaggtaccccgctccaccccacccccacccctgtgacccatgaccctgatgcaggttcagggagtcgaggacgccagatctgagacgctcagaagtctgagcccactggtttatctctgcctctgcggtcctggtcctttgtaaattgccttttgtattttatctgtcttatgccactctgtttgccactctttcatgctcaccccatgctgggatcccatgctgggagctcagtctgcctaggcagataggagagtaaatatatacagtgatgcatttgaggacaggcctattccaggaagctgtgggagcagggtaggcacctaaccctgtctggatcagagaaagctgcttacaggtagtgatgcttggactgtcttcaaggagtgggcattgcttgatgggcaggaagttgagtgttccttgcaagggtgctgtggcaagaggaggcctggtgtatttggcagcgttcctgaggctggacatgtatgtagcctgttgggatggggaggcctggaatgtctgcttggagctggatgtggctaagatcaggggatgatgggaggaggtggacggctcaaagtggggctgattcaaatgtcaaatcctgcagaggccaaacaggctcagaaggaactggcaagaggggatcactactggtcaatggtgggggcagaaaacagatgggaaaaggctaagtagatgcgaggagaggaagtagagacagcagcatggaatacctgagaagggcaagcaaaggtcaggacaatttttaaaggtgagaatttagcaggttacaggttgcggagaaggaccgag

SEQ ID NO: 1978 - DNA, 1211 bp, Artificial sequence
  DNA replication origin
tccgatttctcaatcttttccccacctttcccccctttccattccacaaaaccgccattgtcatcccggcccgttctcaatgagctgttgggtacacctcccagacggggtggtggccgggcagaggggctcctcacttcctagtaggggtggccgggcagaggcgcccctcacctcccggacggggcagctggccgggcggggggctgacccccccacctccctcccggacagggcggctggccgggcggggggctgaccccccacctccctcccggacggggcgtctggccgggcggggggctgaccccccacctccctcccggacggggcggctggccgggcagaggggctcctcacttcccagtaggggcggccgggcagaggcgcccctcacctcccggacggggcggctggccgggcggggggctgacccccccacctccctcccagacggggtggctgccgggcagaggggctcctcacttctcagacggggcggctgccgggcgaaggggctcctcacttctcagacggggcggatgctgggaggagggtctcctcacttctcagacggggcggctgggcagagacgctcctcacctcccagacggggtcgcggccggccagaggcgctcctcacatcccagacggggcggcggggcagaggcgctccccacatctcagacgatgggcggccgggcagagacgctcctcacttcccagatgggatggctgccgggaagaggcgctcctcacttcctagatgggatggcggccgggcagagacgctccttactttccagactgggcagccaggcagaggggctcctcacgtcccagacggggtggcggtcgggcagaggctgcaatctcggcactttgggaggccaaggcaggcggctgggagatggaggttgtagcgagctgagatcacgccactgcactccagcctgggcaccattgagcactgagtgaaccagactccgtctgcaatcccggcacctcgggaggccaaggctggcggatcactcgcggttaggagctggagaccagcctggccaacacagcgaaaccccgtctccaccaaaaaagtacgaaaaccagtcaggcgtggtggtgcgcgcctgcaatcgcaggcactcggcaggctgaggcaggagaatcaggcagggaggttgcagtgagccgagatggcagcagtgcagtcc

SEQ ID NO: 1979 - DNA, 931 bp, Artificial sequence
  DNA replication origin
gaggagcgcctctggccggccgcgaccccgtctgggaggtgaggagcgtctctgcccagccgccccgtctgagaagtgaggagaccctcctcccagcatccgccccgtctgagaagtgaggagccccttcgcccggcagccgccccgtctgagaagtgaggagcccctctgcccggcagccaccccgtctgggagggaggtgggggggtcagccccccgcccggccagccgccccgtccgggaggtgaggggcgcctctgcccggccgcccctactgggaagtgaggagcccctctgcccggccagccgccccgtccgggagggaggtggggggtcagccccccgcccggccagacgccccgtccgggagggaggtggggggtcagccccccgcccggccagccgccctgtccgggagggaggtgggggggtcagccccccgcccggccagctgccccgtccgggaggtgaggggcgcctctgcccggccacccctactaggaagtgaggagcccctctgcccggccaccaccccgtctgggaggtgtacccaacagctcattgagaacgggccgggatgacaatggcggttttgtggaatggaaaggggggaaaggtggggaaaagattgagaaatcggatggttgtgtctgtgtagaaagaagtagacatgggagacttttcattttgttctgtactaagataaattcttctgccttgggatcctgttgatcggtgaccttacccccaaccctgtgctctctgaaacatgtgctgtgtccactcagggttaaatggattaagggcggtgcaagatgtgctttgttaaacagatgcttgaaggcagcatgctcgttaagaatcatcaccactccctaatctcaagtacccagggacacaaacactgcggaaggccgcagggtcctctgcc

SEQ ID NO: 1980 - DNA, 1309 bp, Artificial sequence
  DNA replication origin
ttaccacgtgatccctgaatccaggcacctcaacgatctccaaattttatttctcacctgactccaaacttacagggttatcagaaagaccccacagaagaaaccccacagaggagaaacctcatctctttttctgctcagttacctgacccagggcagtgggggtaggtcccccatccttcatggtgaagcctagcaagcggcggggggaggaggggtggggtagataggaaagagctggtgtggctttggctgactcttaagtggttttaacacggattgcgtgggggcggggtctggaggcaggggcgcttggattgaagctcatcaaatccctctgatcagtaggtcttggaataaatcttcaggtaggttattggtttcacccagaaatttctagggtcattatttgagtttggtatgagaagtcagaaactcagtactgacatttaaattacatttagagggcattatcatgtctttaattccgaggccaatgtaaggttcacagctggaattggtataatattggggtattagtcagtctctgcttggggttgacactaggtcagagaagtggagggtgaacatgaggatgaaggggctttgtgtggagtttctgcaaagccagtcttatcttgggttccaagattattattaaagctgggttggtttagggtcctaaatggtctcaagtttgggtggggtttcaggtcagtatctgtgtttgggggtccttttatggtgacccaatcccaactctggaattgagaatcgaattcagagtgcattggtgttgatctgggaatgggagagcagtactggagttttatgtaaggcttggggttcagaagagagataactggggtccatagcaaggtagcttttggactttagggttcatttagggactgggggctgagcattagtacagggttccatttaaggtccagcgttggtgctagcgtcactatcaaggttagggcaagtagaagtaataaagagatttagagtcagaattggtatttgggatcagtatagaggttcacaacaaaattactacttgtgctaatttgggggcagattaagggctttggactcaatattgggtttagggcaaggtgtgggctcagtatcaggttcagatctgtatggggaggaaatggggtcctagagtggtattaggttcatgctagggctgggagccactagaaggatctggatgtagtatcagagtttggtctgtctatgttcattattggggttcgggttcaatattgaggttccggtcggtttcgacttggcgttg

SEQ ID NO: 1981 - DNA, 950 bp, Artificial sequence
  DNA replication origin
cagtaaaaaaacagggattttcatgctccctgaagcaagagttaataaggagctaagcacagaaatttccttagatagcctgtcagaactctcttctggatccctcagatccccgaagcctcccaaaggattccccaccagatcttcccttctcagcagattcctccccatgagcacccgcctggaaccaccaccccacatccttttctacgcctctcaccccagtgcacttccctgcttctcaggccagatccgacaccagatcgctctggatccctgcccctgttccttcaaaagtggagccttcctcaacctaatccagcctcccggccctgccctgtggcccctcagggagatccagacaacccccaggctggggcagcctccctctcccatttcacagctcaggcaggtagcgctccccacccccaacctgctccaactcaggggccgtgcactggggggcaggggggcttgaaatggggagaaagtctagcccctccccctccggggtggaagaaccagaggggcagcattccagggaaatgggggggcgcctagcacagagagtgcagagacaccaagagatgggtgagagacaagaggcagagacttaaggagggagacagagacccagggagaggaaatagagagacccaagcggagagaacagactcagggacagggaacaagacgacccagggagacagaatcgagagacctggggagaaagaacagagtgacctggggaaaaagaatggagacagctggagagaccctgggattgcaggggcgtgagattgggaggcactgacacggggaggcagagacgccgaggaaaacagaaagcagccgagacagagacgccggcacggcgatggggagccgggacgggacgggacgggacgcggggcggccactgagtgaactttcggagagggtccgagtgg

SEQ ID NO: 1982 - DNA, 1862 bp, Artificial sequence
  DNA replication origin
ctttgcacctcgcatctgagcaggattgttattcccagtgtggcctccccttgacacccccgccaggactgcatacgaggtgggggtgcccagcacaagctggccggggtgagcctgtcctggctgtgatgagcgtggggcccgccgcccagcgttcctgtctgagtggtaattgaagccattagcgcgccagcctctccctcgccgggtaatggcaggaaaagctcttctcgctccgcactcttgaggcggcggctgaatcactccccctccaacccgcccgctgccgccactgagacagggaatctgacattttccctcaccagggagggggagccctgggggaggggagggaggcaggcctggattcctggcctttccctccaggaggttgaggggcagtgaaggtcttggagctcagtctgtaagtcatggattcacctggggccgcagatttcaggcctggaaggactggccgggaaagcccaggaggccgccagacattcagtggtgtggggagggcactgatgactttgggtaggttctgggagggacaaggaggcggggagaagaaagaagctgtggagcagagatgagctgttttggacttctcctggggggcttagctccaagggttctgagtacaggtagcattacttgtcttggggtcattgatagggcagataacgtgcactgttcgtgtggtgtgggtgccctgtgtgccatgtttaaggcagtgtttgtgtgaagtgtgtggtgcagtgtgtgcagcaggggtgctgccttgcaagctgtgcgcacagaacggggtgtgcagcggtcagcgcacacgttaccatcaggcagtggggaaggggcagtgtgtgcaggaggcactgcatgctgtatgggctgtgtatgcagcgcgcagtgtttgtgtgcacgtgtgtgcgtcaggcagtgcgtggtgtggtggtaagcaggtagtgagtaccttatgggctatgtatacagcaaggcatatgcatcaggcagtgtgtgggcagtaggcagtgtgtgtgtgtgttatcaggcagtatatgtgtgcggtgtgccgtgcggcaggctacctgtgtttatatcgggtagtgtgtgtgtgtttatgtgcagcaagggtgtgcagtaggtgtgcagtagactgtgtgcagcaggcgtgtgtgtgtgtacagcaggtggtgtgcagcaggcagtgtgtgtatgtatcaggcggggtgtggtgtgtgtttatgtgcagcatgcggcgagtactttgtgtggtgtacagcaggtggtgtgcggcaggctgtgtgtatgtatcaggctctgtgtgtgtgtgtgtgtgtttgtacagcaggtggtgtgcagcaggcagtgtgtttatcaggcagtgtgtggtgtgtgtgtgcatctttatgtgcagcgagtagtttgtggggtgtgcagcaggtggtgtgtagcaggctatgtatgtatcaggctgtgtgtgtgtgtgcgcgcgtgtgtacagcaggtggtgtgtagcaagctgtgtgtatgtgtcaggcagtgtgtttatgtgtgtgtgtccagcaggtggtgtgtagcaggctgtgtatgtatcaggcagtgtgtgtgtgcgcagcgggtagtttgcaggggtgtacagcaagcagtgtgcatggtatgtacagcagatggtgtgcagcaggcagtgtgtgtgtgtgtgtgtgtacaataggtggcatgcagtgggcagtgcatttgtgtgcatgcagcaggctgtggtgtgtacagcaggtggtgtgcagcagactgtgtgtttgtatgcatcaggccgtgtgtgtgtgcagcaggcagtgtgtgtgtgtgtacatgcgcacacgcaa

SEQ ID NO: 1983 - DNA, 1818 bp, Artificial sequence
  DNA replication origin
tggatgacaagagtctccctggagtaggactgaggttggggagccactgaaggagagtccagtgtgggcccgagtctggaactccagtgtgggtcgggtgtatgcgcagggcatggcccctgggttcttgtggtggggaggcctcaactgggttgagtagggcgatgtggggtgccagggaaacccgaggaaggaggggatgactgggagggggacgccgtgcctgccaacaggccccaaacagctcagattgaaaaacaaaacaggcttttaagatgccaagtttgatgaaatctgagtgctggaagaggtgggagtttgctcttggaaaaacagctgaaaatcgagactcaaagctgcgaagggagatgggcccaaggctccccaggccccccttactgcctggaagcctgggggtggggctgggctctctgggagagtgtgggagcgtgcagatctggcagccttcgacttttggaaggcgtctggctctggccctgctgaggatggagctgctggaggtggccttggcttctgtggagcggctgaagggcagggggagccagcagccctgccacctacgaggttccttcatgtgtctcgtccctgcatgtgtctccaggcgcacgtgttttggcataggtgtgtctggctgtgcatgtctccacatgtgtgtttgcgtgtctctgtgtgcaccgcctctggatctgcttgcatgcgcctgtttccacaggtgctagtcactgcaggtgcccctccacatgcacatgtaggtttctatttttacacctgtctgtttctccatgtatatttctgtgggttcctggctgtgcatgtttctatggtgtctgtgtgttgagaggcagggtgaggccaggcccaacactcaagcttaggggaggcggtcaggctcacagacggtgccaccccagggggcctgtgtctgtgtgtgcgggtgcgtgcctgcgtttgcacggagacgccacgaagctgggtaaacatgggtgaaaaggtcatactgacagacggtgctgcctgccccaggaccctgcaaggcgtctccatctgtcagcttccctggtgcagccccctccctctggcccagagactcaccctcaggcgtccaaggctgagctggacaaagagacctgtgtgtactttgtagggggcctcagcagcctccacccccatcttaggctcctctgtcaggaccccaacacatgccccagctcccaccagactcgccttggtactgtcatcccaccaccttcccccacaacagcctttacaaaggcagttttcccctcctccctggaaagctttctgcctcccatgctcatgtgtttcctgttcttgaatctccctcctccaggaagccaccaagatagcaagtgagctgtggagtcaaaccgatcagctccaacactgctgtgggaggttagccaagcgctcatccacttctgaaccttggattcccaccatcgacccccgaccctcccctcgctagggcttgtcatcgtcttctgcccatggggcaaccaaacctctccacggaaggggacaggtctccttgctgcagtgggtaaaggccagcgcagttaggtgcaggaggcattcacacacacgtgcacactccccaccttgcacacatatctgcgtgagccggggagaccctagggaatgtgtgtgcatgttgtctatgcatgcgggtagaatccgcaaacggtgtggagactcgggctcttgggtacctctgaaggcccctgaagtccccatgggcttctccttccgtccagggcaccctcttatcaggccatg

SEQ ID NO: 1984 - DNA, 1126 bp, Artificial sequence
  DNA replication origin
gggcacccggttgggggtggaggggagggccgcgtcggtgaagcgggaaagcctagtgggaggattccctggagctgaggagccggggcctgggaaggggcgcagaggctccacccaggcgggggcgggaagggcggtgccagggcggacagcggacgcgcgcgcctgcacggactcgggcacacgcagcccttccgcggcagcgcccgccgctccaccgtcgccatggctaccggctggcctggagcggggaggggcccttcctccccttcggcgccaacaggaggcgatttgaggggactcagcgtgactggtgcatcccggggttggaaaatgggtgggtgcttgcgactgtccacgtgtgggggaccctggggttcgctttgcggtagatgcaaacgccgcggcgcgtgtgcggggctctgcagtggagcctgagccgtgccggccgaggcgtggtgtgggggaggctgccggccctctcgcgcgcggggtgttcacgcctagagcgctggggctgggggcctaccacccggtctcctcccagccccacctccgatttagctgtgtgaccttgggcaggtgtccagatgtctagatctctctcagcccctggttgcccatgtacctcataagggtttggtaaagatttaagtcattttgtaaagcattttaacatagtacctggaacctagtaaatgcttcataaatcttactgtccctcatacctgggtctcagttttcccagttgttgatgggtttggagtgatcatgtgacatcatctgaggagttgcccaggtcctcagcctgagtgttgaggctgcggtagacccagcttccgcgggtgcccgtgggggaaggtggtaagtgtgccagtctggctgatagatcagtttacaccaggatgcccagtgctcagccaggccaggcgcatggtgggcgtcaggaaagggctgctgtacttggctgagttgaatgttcagaggcgcctggatgggagagaaggaagaggcagcagcaagtcgctcctgaggggctggagccctcctgtaagacccacttcccttcccgggtggcagagtggcagacttccgagtgctgcctagaagcctagttggcacaggg

SEQ ID NO: 1985 - DNA, 1165 bp, Artificial sequence
  DNA replication origin
gagggccatcgcccacggcggtgaaggcaagcacgcgcaggctgtaggtgatgccaggcagcaggctgcccacggtcgtgaggagccccgcgtcggtgttgtgcttgtgccaggcgttcggggggcggcgggagtccggagtatagtagacgcggtatccccgcaccaggccgttgggctcctcgggaggctcccactgcaccagcatggtgctggcgctcagcatgcgtgcctgcacgcggcgcggtgggctggagggcgcctgttctcccgtgcgtgcccgcactgcctcgctgggcggccctcgcccgatgctgttcaccgccagcacgcggaaggcatattccgagaaagggctgaggccgccaatgctgtagcgggtggtggccacaccatccacctcctgaaaggggccctccgtgcccgctgcgcggtactggatgccatagtaggttacaggctccgagttcccagagtcccaggtgagggtgacactggtggcagttgtctctgtcaccacaagatcaatcggaggctttggaagagctggagacaaagtggaaggctcaaagctgcccgaggtcaagatccttaggaaccaaccctagacttggggattatccaggatatctggtggggtcacctgagtgtggctgatacccacagcctaccttgaaaaatggctggaaaagcttatggtgacctctgaaggcacaagtgagggacagtggccaggcctgtcagtgccccacccagggccttgggtcatttagtatgtacacatatcaactgtgggattcactggaccctcccatcagcacaccagactcatctaacaaacagacctggaggtgatgtgacccttgcagtcccatgtagatgaaagacacccagactgggtagcagctatgtgcctctgcaggtcacctgagcccacctggtggaaagtatgtgtaataggcaggggaaggggagatatttccttagggactggcccggatagaaagagtgatggggctgctggccccacagaccctgcagcttggctcaaattgaagtggaaaggtcctgagtccacagtcattcaacaaataattaacaagcacccactcaatgccagacattgtgctggggctacaatgccacacagtcacatccctgctct

SEQ ID NO: 1986 - DNA, 2044 bp, Artificial sequence
  DNA replication origin
tgggaactcggagcctgtaacctactatggcatccagtaccgcgcagcgggcacggagggcccctttcaggaggtggatggtgtggccaccacccgctacagcattggcggcctcagccctttctcggaatatgccttccgcgtgctggcggtgaacagcatcgggcgagggccgcccagcgaggcagtgcgggcacgcacgggagaacaggcgccctccagcccaccgcgccgcgtgcaggcacgcatgctgagcgccagcaccatgctggtgcagtgggagcctcccgaggagcccaacggcctggtgcggggataccgcgtctactatactccggactcccgccgccccccgaacgcctggcacaagcacaacaccgacgcggggctcctcacgaccgtgggcagcctgctgcctggcatcacctacagcctgcgcgtgcttgccttcaccgccgtgggcgatggccctcccagccccaccatccaggtcaagacgcagcagggaggtaggtgggggcatgccggctgggcagccaacagcagagaaggggaggctgaggttgtggcggtgcctttccccctccctcggctgtgaggctgggggctcttgggaggatcaaggtgccgtattccatagatgtgtggtcagttgggatgtaggataagggtgtgaggttaggacctgacttcctcggctccctcctccctgggcacccctgacctcacgcagatgaggctgacctgcctggtgtggggtgttgcagtgcctgcccagcccgcggacttccaggccgaggtggagtcggacaccaggatccagctctcgtggctgctgccccctcaggagcggatcatcatgtatgaactggtgtactgggcggcagaggacgaagaccaacaggtgtgcagcgggcagagaagcactgagggggtctcctggtccctgagggtctgtgatgggcttaacccaggagggtattttctggattctgtggcttatgtgggcacagcctctaaggtttctgctggaggcttagtggtgcatgcgtgtcatgtggcccgcacagcctgtatgaatctggagtcattgtcaccctgtgctaggggcaaagtccccagggtctgccttgggtttcctaggctctgtggctcatatgactggcagagccctgaagtttccccagaagccatgcgtcccagatggctcctgtggtccatgtggtctgtgaggtgtctgtggcatgggctaagccctgagttccttttgtgctccatgtggccttatggtgtggagccagtcctggagccgtggtgggtccagaggtgtcacattgcagcccatgttggggaacaacctgtgagtgactttgagctcagagctgtcagtgagtgctccctgctcttcccagcacaaggtgaccttcgacccaacctcctcctacacactagaggacctgaagcctgacacactctaccgcttccagctggctgcacgctcggatatgggggtgggcgtcttcacccccaccattgaggcccgcacagcccagtccagtaagtgtctcccaagtccgctgcctgttacacctgggctgggacacacacacacacatgcacacacatccttccccctcgaccaggcaggtggggtggtcaggtctgctggccaaaccgaactctggcctgggctctgagtctgggcctcgggagagggccaggtaagtgcctcccagtctgtccagtccaggcggctgctgccctccctgctccctgcccagcctcctgcccctcctcccgcccatgccccacacactgcccaggtaagttctgtgtctgtgcctcatctccgcccccactctgtgctggtcacactagcttagctgatgggccatcctcggtgggtctgccatgtcccagacctgctttggcggctgtttctcctccctatggccccgcatctcgtctccccatcacccacattcccttcctcatactccccatgaaagttacctgagagccatgtgatcaccctgagctgact

SEQ ID NO: 1987 - DNA, 884 bp, Artificial sequence
  DNA replication origin
agtagctgggtttataggcgtgcccgccaccacacccagctaattttttttttgtaattttagtagagacagtgtttcaccgtgttagccagggtggtctggatctcctgacctcgtgatccgcccgcctcgacctcccaaggtgctgggattacaggcgtgagccaccgcgcccggcctgggatttttcttttaagatgggaaaatttcaagcatatttaaatgctattggaaacagtcaataggaaaaaaagaaaccgtggaaaagagggtaactggtggagccttgggaggtggagagaaggggaacagtatgggtggtgagagagcttagccttggacagggtggctcaactctccattctcatgggtggaaaggagagaattgctgcagatgcaagtacggtgggggggttgtagcaagagatggagggagctgctgtgaaagcctggtcttctctgcagtgtgggagacatggtcatgcgccaagaggaggcaggcaaagggagctggaggtctggggagcatggaggagggggactgtttcatgtgaggtggcagagcgagccaggcagggggcagaaacaggcagcatggagagtcctggaggatgaggcctctagggacgtgtgcataggacgccagcctgcctcagtgccgctgtagagaaggagggggagagctggattcatctagggcttggcagcggccaggaaggagcatggaaagatcaggaggcgagggaccttgcgatattggtgagagtgtggtaggtggtagaccgtggaagctgaacatggagggtgggaaggacaaggttgatggacaggcatcctgaggagctggcgagcaggctcagtgcccggggcctggagtgactgag

SEQ ID NO: 1988 - DNA, 1123 bp, Artificial sequence
  DNA replication origin
gctgttgcaacccagcatgattagatctctgaagaatcaagcaccaggatgctgggacctggagtgcagagaagcctcttcggggatgggatgctgagccatgtggttattggtctggaaaagaaggatgggagagagctcctcagtggaagcatgtgcagaagcttgggcagattgcatgtgcgtcaaattatgagcacctgagggtttctgcagcatgagagttaggggcttggggaatactgagccaagagaagactggagggctaggcagaggtccagtcaaaaggaccttgaatgtcaggctaaggggcttagacttcctcttcaggatgccagggaggtaggtattaaaggttttcagcgggggagccaggtggtcagaaccatgctttagaaatgtcactctggctccttgaggagactggattagagaggagaaattgaggcagggagaccatttaaaaggccagcaaccaagtgaaaggtggcagtgggaacagaggggacagacttgggaaacgtgaaggaggtgaggacagcagagtccgggcttaagcccacttggggagaggtaagggtggctctgcagttgctggctgaatgagcagggggtaggggtgtcctggggctggtgggtctgtgggtctgaggacttctgagctgacatcagggctgaagccctgtgggaggggccaaggagcatgtggtagtcaaagcctgagaatagatgggctctcccagggtgagggccagaaggagaccgggaccaaaaagcccagggcagggaaggtggtgcagcattaaggaaagatggatggagagcagctagggagattgagaaggagcagccacagccagacgagagcaggagcgcagtgtccctgatgccagggttgggggagttgtgcaagggacgagaggacttaatgaggtagggcagtggggacacccagtgggaggaccgttggctttggcagatggggccttgaagagagggtggtggccacgtcctgtgggcagaagtgttgcagtgagcagcgtggcaagtgggggctgagaaagtggagaaacccctttcaaagatcctgggaagatacctgggaaggaggcaatgagcagg

SEQ ID NO: 1989 - DNA, 1290 bp, Artificial sequence
  DNA replication origin
tgatagatgccagctactgtggctgttatcactgatctatgtctgtatgcctgtggccttgtgtctgcctgtgagcacttgagcacgtgtctgagtgtccagaccctggtgtcactcacagccttttgaaaccatctcctaagggtgaccccaagaaggtgctgggccaggctatggccagacccagcatctgaggcacccggttcccagctgacccttaccactgccaaccctcctctctgtgctcctgaaaaagctggacccctgcttcctcacccaccacagctgggacctaggacaggacaggagctggtttgggtaggcctgggccaggcacatggtagggggcgggaacatctcacctcatactcctgggagaacttgaggccatcgttggctttgaggcgctcgatgttgtccgccaggtcggtgatggggatgggtgggtggtctcgcatacctaggggaggtagggcatacacaggcagcattagtgtgaggcttgagcagtgtggcagagaaagccccaacgcatgtatgtgcacatgtgaacatgtgtgaccatggagcacttggaactggtggcatggagacagcagcacatgcggcgacagggatggcggagggtgggagaggacagagggcggtgttgtgccatgagcatgtggagcctgttttggtggcggggtgctgagtgggggcactaggccctgcctggcaggtctctcaagatggaagagaggcttccttcctcccaggaggggtgggacgcccaggtcggtggcagcagacgtgacaggagctgggctccatcgcatctgcctgcagacagccctcctgcccctcaccggtggcagtcaccatgggagactcacagccatcgtcatcccgggcaccaagtgtgtagatggagtggtcatgaagtacagacacaatagagagagaagcagagaccaggaggggggtgtgagacagaggagaggagatgagaggtagaggcacgcagaaggaagggtgtcaggccgggactggaggccagagaggcagaacagagacggggccggtgggagagaaaacaggcctggaggaagcaaggtgggcagaggggagggtagggaaggaaaaaggttaggagacagtgggattgggggagaagaaagggaaggggagagaagaattcaaggaaggatggaggcgatggggtaaacaaaagtaaggagtggaaacagacacagaagccaaagtatcccccaaacacgggaactttgaaaactaacttgaggtattcgg

SEQ ID NO: 1990 - DNA, 998 bp, Artificial sequence
  DNA replication origin
ataggctgagcacactgaggtcgggactgggaggtggctgcggcgcgtgctcattggctggtgtatggcttgcagccacccttgaattggttgactctgtacggctgcgcagatgccgactttagaggaggcggagtttcggccttcgcctgctggaaaagcagtaggatcggccagtggcgacagcaggagctgagcctaagccctggcggggctttgggctgtaggtgagaactatagggttttggaattctcgaggatcattgccgctgtagcagtgaccgtgagttttggtgggggaggggcggtgggggtgggtcttccagcggtgagtgatcggcatgtttctcggccaataggagaaggagcttccagaatgggttctgagattggtcctttccaatcttcaaggccaatggacctcgggagaggggggcgggtcatctgggccttattttcttcttcctgcggccgagcttcactcgccaaggcggcggggccgggaggggccgaacctgtgcgcggtgaggttcggggacggtggggagcagggtgcgctgcctttggagtgatgctcgcgggagcggctgcgagggaagggtgcgggagtccgagggggttgttagcaacagctagctttattgagtgggtaagtaccgggcctagtgcttagtgcttcgcttgcatcatctgagctaatcacagcgaccctgcagggcagggggttgggatccccattttacaggtggagaaactgagactcaagtcagctcacacagccaaggtcacatagctaataaacggcagagaccggatctgtattcagagttttgacttcggagccggtgttcttgaatctctaggctttgttactgattgggagggaaggtgtcatgaaacgggagctttccccagggaacagatttgggggaagggaatcctagggttgaagaagggatgaacaattgaggtgagggtgaggaaatcagtttttcaac

SEQ ID NO: 1991 - DNA, 1767 bp, Artificial sequence
  DNA replication origin
acccaggagaggtcatccaggtactgggcccccagcccgaaggacgactgggccgtgccccgaccccgccttcccgggcactagcgcgcgggctccgcgccccgcccagcccgggacccgcggccggcgggggaggggcggggcggagcggcgaccgttattcgcggtcagccatcgcgccccgaagcgcactgggcaggcccttaccacagcggagagggaggcaggggggaggtggcgcccggcccgacgcggggcaggaaggcggaggcagcggcgtaggcggcggcgacagccgcgggggaccccggcgggagcccacaacgcgctgggctgcatgggcgccgccatagtggggacgcagcggcgggcggagcgcgcggccgcgacccggtcgggcgcctgcgaccaatgggctcgcggaagccgggcggagcgagggcctggccaatgcggagctgcgctgccccgagcagcccaatagacgcaggagccgcggatttgccgtcccgcccaccccgcctaccacgagagcagtgctgcggcgagtgcggggcgagaggttcgcgctggtggagcaccccagcttgcaggttcagcgtgggtgtctctcccgggcacatcgagctgtctagaggaaccctcttcccctggcttcacggcccagaggacgcacggctctctcccctcgagagcgtgtttcgtcgcccgcgcggggaacgcaaagtgctagggtagtcacggccacttcacgccgagggacatctcatctcgccctccaggtcgtgagcgcacccattccgctcactgaggccgaaagcttcggacctccgtgggccctggtgggtaagggggcacgggggtgagcgttaagagactcgtagaacatttttagtccgcgcgtggcacaaggcctccaagccccacgtacactttgcagccctcccactcctttttcattcctgcggctgagccctggtgttatccgcctggggcggaatttaaaacttaattcctcaacaaagtcggggtggtctttaaactgcaaccttggatccaaaggccctaccttacaaagggaaggcagtttgccctacaaaaaggcttctgggaggagctgcctaaggcaggaagggactggcaggccgggaggtgccgcttttggctggggccagttctcttgaggtcgacccgactgcataggcagccagtaggggagagaacgggccggtctgtgtgatttggatcacctgagttgcagtttcctaagagttattaggttgaccaaaaaaaaaaagtgcagtttctggaaaactggtcagctgttgagtaaaaactgctgggattaaacccagcgcccacccctggaggcagtggggtcatcgagaaaggtagggatcctgtgtaaaaaggctggtgaagtgttcctctcttccaaagatgtatggattagtgttctctcaccaatccactaaggcctggttctgcccagcctcccttgctacatcccctgggaatccccaagtggagtgtgggcaaagaaaaaaaaaggccaacttccctccctgggccccaggagggagctgacatagaaaagatcacctcctgcacctccctttctccacaatgagataccaagtagcaaccacctctcaacccccagggacacaaggaagcatccagagcagctgaactgacctaagcctctcctgcacctggacagggccatgccacaggaagtgcctggctgtttaagggccagccggt

SEQ ID NO: 1992 - DNA, 3091 bp, Artificial sequence
  DNA replication origin
gttaccaccttggctgtagcttctctcccatgggtgacattcagtccctggtactggactggctggatctgaaggaaagcactgggaaagggagctgtcgagtgagtgagactgtgcttgaagaacgggactgcacatgatgttggtgattgctttggatttgctgaatcaatgaataaatgggaggtgttatagtgcaatggttaaagtgaaacaccttcggtccaaaatgcggctctactgcttactgctactcatagtatctgccttgtagggttgtggagatggctggctgagatgatgcatataaaccacatcgtccagggcctggcatggagaagagttaacagtagttcttaccatcctcacagaccatggcagataggagctgactgatggaggattctaaccaggaaggtaggtggtcagatttatttcttaggaagatccctgaggcagtgagatctgagttttaattaggctctaccacttaactagttgtgtgaccttacacaagtaacatatcctctctgtaccctagtttcttaatctctaggatggggataataacagtacctagctatagggtcattatgagaactgaatgaattcaaggaaagctgataaactgaagagcttaataagtgacagctataatgataatgatagtgatgacagaaggaagaggagaacaaaaggaaggaaaagcagcaaggagaggaacaggaggaggaagagtggcgggaagaggagcaggaggaggagggggaagagtggcaggaagaagagcaggaggaggaggaagagtggcaggaagaggaacaggaggaggaggaagagtggcgggaagaggaacaggaggaagagtggcaggaagaggagcaggaggaggagggggaagagtggcgggaaggggagcaggaggaggagaggggagagtggtgggagaggagcaggaggaggagggggaagagtggtgggaagaggaacaggaggaggtggaagaaaagtggcgggaaaggaaacaggaggatggggaggaagagtggcgggaagaggaacaggaggaggagaaagaagagtggtaggaagagaaacaggaggagggggaggaaaagtggcaggaagaggaggaggaggagtcaggggaagagtggcaggaagaggagcaggaggagggggaggaagagtggcaggaaggggaacaggaggagggggaggaagagtggcaggaaggggaacaggaggagggggaggaacagtggtgggaagaggagcaggaagagggggaggaaaagtggcaggaagaggagcaggaggagggggaggaaaagtggcaggaagaggagcaggagggggagggggaggaagagtggcgggaagaggaacagaaggaggagggggaagagtggcgggaaggggagcaggaggaggagaggggagagtggtgggagaggagcaggaggaggagggggaagagtggtgggaagaggaacaggaggaggtgaagaaaagtggcgggaaaggaaacaggaggatggggaggaagaggaacaggaggaggagaaagaagagtggtaggaagagaaacaggaagaggggaaggaaaagtggcaggggaagagtggcaggaagaggagcaggaggagggggaggaagagtggcaggaaggggaacaggaggagggggaggaagagtggtgggaaggggggcagaaggagggggagaaacagtggcgggaagagaagcaggaggagggggagaaacagtggcgggaagagaagcaggaggagggggagaaacagtggcgggaagagaagcaggaggagggggagaaacagtggcaggaataggagcagaaggagggggaggaaaagtgacaggaaggggaacaggaggacggagaggaagagtggtgggaaggggaacaggaggagggggaggaacagtggtgggaagaggagcaggacgagggggaggaaaagtggcaggaagaggagcagaagggggagggggaggaagagtggtgggaagaggaacagaaggaggagggggaagagtggtgggaaggggaacaggaggagggggaggaaaagtggcaggaagaggagcagaaggaggcaggagaggaagagtggcaggaagaggaacaggaggaggagggggaggaagagtggcgggaagaggaacaggaggagggggaggaagagtggcaggaagagaaacaggaggagggggaggagaagagtggtgggaagaggagcaggaggaggaggaggaagagtggcaggaagaggatgaagggtaggaagagtggtgggaagaggagcagggggaggaggaggaagagtggtgggaagaggagcagggggaggaggaggaagagtggtgggaagaggagcaggaggagggggaagagtggtgggaagaggagcaggaaggggaggaagagtggcagaaaggaggaaggggaggaagagtggcgggaagaggagcaggaggagggggaggaagagtggcgggaagaggagcaggaggaggaggaggaagagtggcaggaataggagcaggaggaggggaaagagtggcaggaagaggaacaggaggagggggaggaagagtggcaggaagaggagcaggaggaggggagagtggtgggaagaggagcaggagggggagggtgaggaagagtgacagggagcgggaggaagagtgacgggaaggggagcaggaggaggagaatgacatggtaataattatgaggcagtgaccaagagcttacagaagacagtgaggaagaggagctgagggagtccccattcttgagcatttttatctgggggtagaggagcaatggttaagatatggcaacaggcagtgacgtgaaatctcctggccctcccagggataagaggcatgggagaaagagctgcggccactggtgatggccgcaaaggaaatggtggagaatcctcgaagagctggtctcagaggcttggtgagaagcctgggctgggtggtgaatgctggctcgggagcaggaggcctgcactgagtctcccaggacagagtccacgctaaggctctgcat

SEQ ID NO: 1993 - DNA, 777 bp, Artificial sequence
  DNA replication origin
cacttgcaaacacgggagtcactggggcacagcaggggcagtgttggcagaagtgggtactgagggctgaaggcaggggtcacagaggaggaacatctgagctgagtcttgaagtaggtagctggagggcagcatttcagatgcctaattatggcaatttggcaggtgggttgagggctgggtgagtaacatggatggaaagatcctaacactggggaccatgggagggttttgagcagaatggtgtaatcagacaggcattttttgtggatgactctggctgtagtaaagaggatggggttggagagaaaggtggaggctgctgtggaaagaggatgaggtctgatgcagggcatgaggggagcgtggggctgccaggccccaatctggaacacgcaattttgaaaattcattagtgcctgactggatagggtgaggaggtaggtagaccctgcaaaagtgtgcctttggcggggtgacctgggggaggggtacatcccggctcctgggaggaaaggcaggggctcatgagttcggtgttggacatgttgagttggaagggcctgtggattatccaagtggaaatgttcaggaagccggtgaatttgtagcctggaaggaagcagagagagctgcgctggcaaaggcaatttgggaattgtcaaccaactggcaattggaagctgtggtcagggatgagagtgctggggatgtgtgtggaccagctgtaccctggctatgcttctgaaccactagggacctttaaaaactacccac

SEQ ID NO: 1994 - DNA, 1233 bp, Artificial sequence
  DNA replication origin
ggactgaggggctgggaggggcggagaactgtgccgagggcccaagagagggaggatgcaagaaaggagaggaggggggtggtcctgtcctctcccccagcccaagagcgtccatccagggctgggaccagaaacaggcaagtgggctggcttacctcgggtgtggggctccaggcccgggtggcagcgagggctggggcccgagggacctgctgctggcggagcccccgggccttgtctgggggccgggcccaactccatccctcagcagcctcctgcccgccgccgcagccgtccggtgtcaaattccagccccagcgtcaccagatcccggggtggggctgggagcgcccctgccccgccccacctttcggggctcacctggctgctccacccgtcggatccagtcccccctagcttggctaggtcccccgaggttgggaggggggtagatgctgggaggggcccctcggatatggagagtagagaactcgagcggtggagaggcacggaaaccgggagttgagtttgtagactcgcgaagtagagagctgggaggccgggccgagggcgggagaaagtgagtgagggcggggagcgaggggtaagccggtccctgcgtggggcggctgactgctggtacgtgcagatttgggggtccggctgtctgccctgcagcagctgctctctgctccacccgattcttctctcagcggccagttcacctgccttgttgggttgcttagcctctgcgcagctttcaggatctgactctgctctagtctccccacagctcacctcctgtgctgcttagggcttggagtacggacacacttgcaaacacgggagtcactggggcacagcaggggcagtgttggcagaagtgggtactgagggctgaaggcaggggtcacagaggaggaacatctgagctgagtcttgaagtaggtagctggagggcagcatttcagatgcctaattatggcaatttggcaggtgggttgagggctgggtgagtaacatggatggaaagatcctaacactggggaccatgggagggttttgagcagaatggtgtaatcagacaggcattttttgtggatgactctggctgtagtaaagaggatggggttggagagaaaggtggaggctgctgtggaaagaggatgaggtctgatgcagggcatgaggggagcgtggggctgccaggccccaatctggaacacgcaattt

SEQ ID NO: 1995 - DNA, 1519 bp, Artificial sequence
  DNA replication origin
aggtcgtgtggagagcgcgcgcggcggcaggagccgctgcagaagcggaaacgcaccagctcgtcggagcggtggcccaggccgagcgcgcgcaccggcaccagctgcgagcgcaggcggcagccccgcgcccccgctgcccgagcgcggctgcccgggcccccagcccgcgccgcgcggcccccgcggggaagagcagatgggggtgcaggcggcgggggcgcgggccgagaaggctgcggcggcggccgccgggctcttccactgcaccagcgggccgtgcgtccccctggaatgagacccagtcacgcgcggtgtcccgggccagccccgccccgccccctcgccctctcacctacccggcaggtggccggcgggggacgccaggacaggcggggggccttcgcggggggcagggctgcggggcgcggagcccagggaggcctctgcgacgctgctcagcagagccagagcggccagggtgggccacagggcaggctgcgcggagagaccaagtggagcctcagggagaaagagggcacccaggtgggcttggggaggaaggacctcaaggaggggctgtcctcgggctgagatcaggccgggcatgggctcctagctgtgtggaggggaaactcaggaagggcctaggttccagtataatgggtttgctgcctctgggagcccaggggaggaatcacctgagtgcaccgaccattcagagaagtcccgctcctcctcccattcacctggtccctccctgaccattttccctcccacacctaaccgctgcccaagccaagccctgctctccctcaccagtcaagccgcctttcctcagtaccaggtaggagtcactgggagaaccactcacctgctgcctaggccaggggcagtgggacagcgtggagaggcctccaagtccaagttccatctctatcaacaccaggagcgcccatcagccattgttgagctgttcccccaccctcctgttgaggcagcttgcaaattaagagatgagttatcttttgtgggggaccggcctgccaccccagtttctccaggtgaggaacaaggggcctacacagctagactcaacccagcagaagtagctgcactgggaaccttactatgtgttaggtgctttgcagctattctttcacaactccatgaggtaaatggtttaatcccctttttccagatgagcaaacaaggctcagagaagctcagaggttgtctaaggttacaaggtcacacagctggaggggagagaggggtcctcttttcccagaaccttcctgctctgcgttgtaggtctggagatgccagaagtggctggaaggagttatagctggacacacttggtcctacagaggccttcaccccaggctgccggagaggaagctgagggctggagaagaattagggtgctagctggtcactctaagagttatctaatgatagtgagccccaagcctcagcctgtgctgcccacccagagctgcttcacctcgcccct

SEQ ID NO: 1996 - DNA, 1405 bp, Artificial sequence
  DNA replication origin
cgctggtgcagtggaagagcccggcggccgccgccgcagccttctcggcccgcgcccccgccgcctgcacccccatctgctcttccccgcgggggccgcgcggcgcgggctgggggcccgggcagccgcgctcgggcagcgggggcgcggggctgccgcctgcgctcgcagctggtgccggtgcgcgcgctcggcctgggccaccgctccgacgagctggtgcgtttccgcttctgcagcggctcctgccgccgcgcgcgctctccacacgacctcagcctggccagcctactgggcgccggggccctgcgaccgcccccgggctcccggcccgtcagccagccctgctgccgacccacgcgctacgaagcggtctccttcatggacgtcaacagcacctggagaaccgtggaccgcctctccgccaccgcctgcggctgcctgggctgagggctcgctccagggctttgcagactggacccttaccggtggctcttcctgcctgggaccctcccgcagagtcccactagccagcggcctcagccagggacgaaggcctcaaagctgagaggcccctgccggtgggtgatggatatcatccccgaacaggtgaagggacaactgactagcagccccagagccctcaccctgcggatcccagcctaaaagacaccagagacctcagctatggagcccttcggacccacttctcacagactctggcactggccaggcctcgaacctgggacccctcctctgatgaacactacagtggctgaggcatcagcccccgcccaggccctgtagggacagcatttgaaggacacatattgcagttgcttggttgaaagtgcctgtgctggaactggcctgtactcactcatgggagctggcccctatttattatttctaagttatttatttacttctgtggcttgtcagatcctttcctgggcagcagggggttgggaagaagaggctggatggagatcatgccttgctgatcgcactcacacacctcaggctgactcagcaatcacagacctggcctggatcttcggcccccacccagcagctccgggatgggaggcatggaacacaggcaggggcagggcgggcagcaagggtgcagtcactagtcctggcaggctgctcacttgggcctgggcttacctctggggaaagagactacagaggcttctgtggagaaagccctgtctctgtgacctctggcatctttgtggcccccgcttagtgggtaaagacacagagaagcacccattgccccaccccactgtcattgatcagtgtcttaccatccagggaattgtcttgagggtgccttgtcagatatacacatgcctctgcttgcagacaggccagcatggttaactcactatccaca

SEQ ID NO: 1997 - DNA, 893 bp, Artificial sequence
  DNA replication origin
tgcctccgccccagtgactgacaagacaagccaggccggccgggacggggcagggacctcggcaaggcgcgggctgccccgagcgcctgtccccggcacctccaactcaggcccccactcctgccagttctggctcggcacggcccggtacaggccggcacggcccagcggaactgcgcggaaactcattccgggtccttagccctgtcctcgcgccagctcgcactcccctgagcaggcggtggagcggctcgccgccccaggccgcggccgagtctaggccccgccgctgttcaccctgggaaatgtagtccgtgttgcgcctagccggaaggcggcgccctgcggaggaggccgggagcacgtgggttggggacctgcagagccccgcctgtcctcggcctaccgcggcgagcaggcattccgggtcagaccggcgcggggcgctgcggcccaactccttagtaggacgacgtgactcgaggggccggaggacggaggtgggagcccgggctagagggtggaggctggggaggttgcctggtcactctggcgctccgctgccgggggcatcctccggcccagcaaaggtgcagcctgggaagaaggcgtcagcaccacccagagaagaggagaggggacttggcacgcctcaggaaggaaaaaaggaaggctctcgggaccacccaataagcaaccgggaaaccacataccatggacagtgctcggggaatttcgtaaggtttttggaagtaactttatgtgtaactagagtaagagtagcttacatttaagtgctaggagcaggactttgcttaccttaggttcagttttcttaatagctctgaggtggatatttttattcatcattttcagatgagatgaggaaatcg

SEQ ID NO: 1998 - DNA, 921 bp, Artificial sequence
  DNA replication origin
tcgtcctactaaggagttgggccgcagcgccccgcgccggtctgacccggaatgcctgctcgccgcggtaggccgaggacaggcggggctctgcaggtccccaacccacgtgctcccggcctcctccgcagggcgccgccttccggctaggcgcaacacggactacatttcccagggtgaacagcggcggggcctagactcggccgcggcctggggcggcgagccgctccaccgcctgctcaggggagtgcgagctggcgcgaggacagggctaaggacccggaatgagtttccgcgcagttccgctgggccgtgccggcctgtaccgggccgtgccgagccagaactggcaggagtgggggcctgagttggaggtgccggggacaggcgctcggggcagcccgcgccttgccgaggtccctgccccgtcccggccggcctggcttgtcttgtcagtcactggggcggaggcagcggctgtagcggggctgtagccgggcgttgagcacagcgcgggccaggccgaacggaagggacctgccacagcccctcaactccacggactcttcgccctagactagcggagctgcatctccgcgcttcgttggacgcctccgtaaccacgaagggctctctctctcccgtgaccctccagccccatgacctgttcatagcagccgagagctcacccaggcgggggtgttgtgggtacaggccatcgaccctgtgacccctcaagagccagggactcggtttcccccgcaggcctccctcccctgtgactccctccacacagattctggggacagagctgttacctgccactaggatccccgcctgagagctcctcactgacggctccctcctcggagtccccttcattgggtctcctaagagcaccaattttggtctctggcaagc

SEQ ID NO: 1999 - DNA, 1023 bp, Artificial sequence
  DNA replication origin
gttaaatacgcagtcagtacacagtgaaacagctctatctgggaggagggaagccccagggacagctggatcccacaggagatacctgacaaggactaagaggaggcttcccagagggcataacacctatgctggatcttttggaggaaaaaataattgtcaggagaaaaggagtgaaaaagacctttgggcttaaacatgaaccaacatggcggatgcttcaagcaagtggggttgctgggccctaaaggtggagaggggtgaaatgaaaagactcgcctcttcttccccacatttgttgagaatctggtcacagtggcattgtcgagggtattgaaggtgaacaaaggagatgtggtccctgccctcagggaatgcctagtctaatggtggaggcagagctgtaagctaacaaggtaacccagacaaagtgggcatcagtcatgtgttctacaaatatgtactgaggacacactctgtgccaggtactggaaatacagcagtgagcgacacaaaagccatggtgcttccactcttccaggggagttggacaaataaaatacttagtatgccaaatggtgatcagtaagtaccgtgagaaatgtaaagctgggaagcagaggagcgtttaagtggggtggaatattaaacagaatggtcagagaaggccttttcaagaaggtgagcaaaaactgaaaggaagttacaggatgagccgcatgtatagttaggagaagcagagagagcaagtgcaagggcagtgaggtcgcggtatggttggcacgttcaaagaaatagcaaggagggcagtgcagccagaggagggagttagtgggggaatattagaaggtgaagtcagctgaggggcgtggggagcctagcaggctattgtgagaactttggcttttctcctgaatgaaatgggagccatcagggcatttcgacagggtagtgacatcttactgaagcttaataagcatcaccaggacatcgcgggagcccagcaaacgcgcttccctgcca

SEQ ID NO: 2000 - DNA, 823 bp, Artificial sequence
  DNA replication origin
gagggcagcactcccccgtcctgccactatcgctgtctcccctcgctcccacgtctcactgctgtcccccctttcttgctcctgaccggcccgctcggtcacaagccggctgctccggttcctcttttcccagtcgctttgccctcccccacccacagcttgttgggtaaacagcggaacggactgggccggcgggatctggctggagcgcttgctccctcggtcccgcctcggattcgggcttgcgggtggcgaccctgcctgcgcaggtgcttggtctgggaggtggttttagcgagggaatggcagaaaatggaggcctaagcagaggaatctgtctacacagctgtactgtcacctgggggcagcctgaggacgccccttcagggaggtggcccttcagctcggcagctactttaggttgaagaacttctctctaccgagcagcccgtaaccccctttttctccctcactgctgcaggagtctgctacaccatttttgatttgggcttccgctttgatgtggcatggtaagggagggcagggggaggattccccttgaagcttcttccctgcagcctctcttcttttctctggtctgagtccctcccccacaccactgcctgcctgggacatggacctttgggaaatacgcggtcagttgttgcctgtagaactggtggtggggttgaagggggtttgaggggttaagattttgtgctccgcttccctgctagagctgaactgctttcttctctgcttccacaacaggttcctgacggagacttcgcccttcatgtggtccaacctgggcattggccta

SEQ ID NO: 2001 - DNA, 1150 bp, Artificial sequence
  DNA replication origin
aaggacggagatgatggtgcccgactgtacaaccaggtaagtagatgctgtcagacaattcgggcatggtggtcagtcagagccctgagcaaacgggcctagaaggactacaggcacaaacacacccaggggcccctatctgcacactccctcatccccaaacaagtctgtttgggggttagagtccacccagcacccgtgcctccccacctaggagcaagctctgtgcagatcagaagtgtgcagtcagaaagctgacaagggattggcatgaggctgaggcgtacaggcctctttacccttcctctgtgaacggtgacgcaagagggcaacagaagctgcactgacccagacaaataccaagtttatttcacaaacactaggaagatgggttgagggtggaggtgggggacacaggtgcgcagctgcacagagtcagcagcagcagcctgctccccgcactgaggactcggcctggactgcagtgcctccaaatcaacacgcagcaagaggggagtgcagggagggccctgaacaccaagcctctgaaaggctaagggacacagctccagctgtcccaggaaaaccagcaataaataaaagtgaggcacggccccacccacacatatcatctagtcacccatcttcactctggaggtctgcaaaaaaagaacaggagaaatcaggcagggacagaggaataggtaaggcagtgacaaatgatagaagatgacatctagcacatggttggatggacagaccacaagagatatatgactaaccaggatggacacactgtgacagacaaggcagacagggacagacaaccacagagttacgctgtgggacagacggagagaagtggcatatggataaagctagtcactaagaatcaactcagtcaagcacccacagtcacactcagaccctcaggctgatccttagtcacaaactcacacactgtcagacagactagacacacacaatttagacaatggtgtcctactgacaggcatgtgagagggagatacacatagctccgagagacagtcaaacacaccatgacagactgatatagacagacaaaattccattctagtctagatcacaaatacagactggagacatgaaaagcatggcagataaaatg

SEQ ID NO: 2002 - DNA, 1328 bp, Artificial sequence
  DNA replication origin
ggaatctcggggccctgggtgggggccgcgcgcgccctcctctcacccggcgctcggggctcagcaggggacgccgctccgacttgggcagggctcccggctccggcggctgcggacggttccgtcccccatggcccggccccgccgcctcccgccgcccggtcagcggccaccgcggcccccgggtcgcctcccgccgccgccgccgccgccgccgccgcgggccatggagccgagccgccccggggggcagggcggggccgggcggccgggcagacccacggaccggcggacccacggaccacagcgccgccgcctccctcccgcgctacggcgcctcggaggggcaggcccggcccgcgcgcccgcgcgcgcgcccccgcggcccccgcctccagcacgcccgcacccgccgcgcgccgctgcgagcccgccctgccggcggccgaacccgggcacccaggaggcacggacctgggagcgcgggaggaaatgggtcaggctcgtccaaagggtgggcttagaggtcggaccggcgagcgggtgcagaccgtggagtcccttagcggggagtggggattgcattggagcgcgaactccccaggaaggggacctggaggttgggcggactcaggctgcggggctagggatttgtcaactctttaattggaccaagattcaaggtcggccagcagagagggggcaggacccttaaaggcgtgggctggaggtggctggggcttctggggtaacaggaaacagggtcagggaaggagaaaacgagattggatggggtgggaggagctgccctgggccctgggaacaaggatcagagtagaggtttctgggaggggctgctgctagaaggacaggaccatcactggaggcagagaccactgcctaggctccaggcctcacaaggacggagatgatggtgcccgactgtacaaccaggtaagtagatgctgtcagacaattcgggcatggtggtcagtcagagccctgagcaaacgggcctagaaggactacaggcacaaacacacccaggggcccctatctgcacactccctcatccccaaacaagtctgtttgggggttagagtccacccagcacccgtgcctccccacctaggagcaagctctgtgcagatcagaagtgtgcagtcagaaagctgacaagggattggcatgaggctgaggcgtacaggcctctttacccttcctctgtgaacggtgacgcaagagggcaacagaagctgcactgacccagacaaataccaagtttatttcacaaacactaggaagatgggttgagggtggaggtgggg

SEQ ID NO: 2003 - DNA, 973 bp, Artificial sequence
  DNA replication origin
gccccgccctgccccccggggcggctcggctccatggcccgcggcggcggcggcggcggcggcggcgggaggcgacccgggggccgcggtggccgctgaccgggcggcgggaggcggcggggccgggccatgggggacggaaccgtccgcagccgccggagccgggagccctgcccaagtcggagcggcgtcccctgctgagccccgagcgccgggtgagaggagggcgcgcgcggcccccacccagggccccgagattccagacccagccccgcgaggggcaccccgagcgcggccccgagatcccaacccaggagccggtgagagaggcgccggcggccagaccccggcctggctgcccccaccccgcccccactccggcgcccctcctgggcttctccgcccgcgtccagccggcctccctcattgtcctcgctcgccccggcctcgtggcgcggggaggcgttccatacacgtttccccttggcctttgcctcatccgctgccctccacccactccccctgcccccaggctccacacccacccggtctgtgcggcctgcccgtccgcgggtgccacgtgttcagcctgccagccccgcccaaacgcacccctcagcctggccgccagcctgacccagaacccctgcgccggagggagggtgggaatgtctgcacgtgggtctgggtgtgagctgtctgagagtctggatgtatggctgtggaagtccaggagcagtggccttgtttgtgagtgtgggacttagtgtgttactgtcacccgggtgtgtctgtgactgtagttctctgtgtgtctgagtgtgggtgaccagctgggaccagggtgtccctgtgattctgtgtgcctgtgagactcaccctgctccctgaagcactgccagaagtggctgccgctctcttggaaccacagctggagccatcgcccaggcaagacccccttcctgccatgccc

SEQ ID NO: 2004 - DNA, 908 bp, Artificial sequence
  DNA replication origin
cctgctccctgaagcactgccagaagtggctgccgctctcttggaaccacagctggagccatcgcccaggcaagacccccttcctgccatgcccagtgctgtgcccatctccaggcccaagcatcccgttccgggaatcagaaccagctgtgctgggcaggacccagagtcttggtcccagtcccaaggggctggctttgaggtcttaagtgaggggtgtcccctgccttgccccgtattttgacgttttgctccagtgggaagggattctgtaaacatccagtctgtatttgggccccccggatgctgagggcaacttcccagcctggtcccagttggcctggcctgcttgtcgctgggatctgaatgaccaaaccacttcccaccatggctcctggaaggactaaatgaagtcatgagtataaagtgctcctgcatggtaggtgcacagtattccgtctcttccctcttccccaagccatgagttctgggttaaggatgctgccatgtgaggtgtctgttctcaggggcacaggggcacatgggggtctataggtaaacatgtctccatgcttaggtacaaaccagtgtggttagagttcacgtgtctgtgttcctgggaatgcgtgagtgtgtgtgtagagttgtgcaataagggtgagtgcctgagtgtgtgtgtcagtgaggtggaggaaggtaaatgtatgtggcttagtagtggggtgtgcttgaggatgtgagtactgagttgccgggaactgtgcctgggtgtctgtttggaggtaaattcttgagtctgtgagtgtgaaagggtatgagcaggtcagtgtgaggtgtggcccacgagtgtgagcagctgagtgggaggtaggtgggcagccttgcctgtcctgccctgacctgctgga

SEQ ID NO: 2005 - DNA, 691 bp, Artificial sequence
  DNA replication origin
ggagaggggagattagagacagcgtggcccgtttggaagagaggacgatgcccaggaaagaggcggtgaccctgcggatgtgtggggcgggagtcgcggggaagaagtggggttgttacgcaagtagtggagagtgagaaaagagcgacgtcaggacagcgcaagggtttccgccttggctgttggctgtggggatggctgtgtctgagtgagatggggacacaggagctgggccagctctgggggagtgtgactctgaatcctttcttgcgtgtgatgagtttgagcgcctgtgggaagtacatgtttagcaggcagttagacaaatgagtctggacccagaagggaggtctgcagtggagagagggatctgggagcaccaggatgaagacggtctggtccctaaaaccaacaacgtctgacctgccagggagcaaggggcatgagaggaggaagccagcacttcagggatggagggagaaagaggccgctacagaggccgagaggcttggccagaagggctggaggagacccaggggagtgtgggatcccggaaacccggcagtcagtgtcaggaaggagacatggcagctgcatgggcactgtgggggtgtgaggagggatgtggaccaagactcgtccagtggatttagcaacaaggtgggcccagcgagagccatttcaggggcat

SEQ ID NO: 2006 - DNA, 1101 bp, Artificial sequence
  DNA replication origin
ggaggggcagggccaggggagcgggtaggcagagcttcgggaggagatgaggtgaaagtaattgacgctgcccagcccggcagtgggagaggcaggggatgcgtcagtgtcgcgctggagctggcagaggtgtgaatgagcggcggagacacgcgggctgcgatcgctcgccccaggatggccgcggctcatggacctgtggccccctcttccccagaacaggtcagtcaccttccaggaagttgagccccctccttggtgccaggcaggctgagaggctgggctgcggatggggagaggggctgagtggtctgtgccagggaggggcaggcacagccagcaagcaagacagacaccagccaaagtgacccagaaagttgcaactgtgcaaaggagtgtaggaagagttagctgtgtggtgggggtgagggggaggagagtgggggtgtgagggctcccccagcccaaggacctgctgagaatctgctctgtgtatcaaagctgcattgtcctagctcccggggagacgggccggaggtgcccaggaattgtactaatcaatacagcctcattgtctgtgccacggcagttactcctatgggaagagtgggtgagggggcaggggaacgtggtacatggtttcagtggcaaggggtgggggaaggggatggggcaagagtctcagctgggaagagagagaccccacagaacattttccagggtccagggcaagtgcccgcatgggctgggagccggtgtgtcctcatccctggacgccggggacgggtggagatgtcagcggatggcagcgagggtgaggagactcgaaagctacacttctcccctgtaggacatcctgacttgaccttcaaaaggcaagagagggaatgtcctctgaggcgatgtgggatgggtctgggaggaacagtacgcagggctgccctcaagcctcagtactgctagggtcaagaaccaaagccactttccagagtgcctgcctgctgctagccagtgagggtagacgccgcccccagccgctgcagcacaggacatgaccattgcctccagtcttccctcctgggcttgtctggggtgggaagc

SEQ ID NO: 2007 - DNA, 1730 bp, Artificial sequence
  DNA replication origin
ccggcacacctagggcggggccgggcggccgcaggtgagggcaggggcctagcagccctggagagcccacccccggccggcgctccgcacccggcagccactgcagatctcgagcaggcggcggggccgggccgggcgggagagtggggcttgcccggagggccgggaggggccggtgccggcccgggggcggggccgtggggcggggacctcggcgccccggtacttttccaccgcaggggccgggggcggggccgccgcctccacgccagcttaggcccacacgtggcggctgatgtaacgcccgtgcccccacatctctctccccgattaaagcggacgcgccccacttcgaggaaccgggacgctgcgggcggtgccgctgctcccagaccgaccgcgcccctgcccgccggccggaggcctccgcgcctcgggccggcggatacttaaaggagccgcaccccctttcgggcctgctctccgcaagccacaccccctcgcggatcactcttaaaggagacgggacgcttgctcgctgacagcttccgcacaaagcgcggtctatttctccgctgaaaggagcgtgagggtgcggccgttgggaaataaaggctgcagggcgaggagtggggaaagagaaaaacctgaaaggttaaagactgccaaagtgagggagcatcagaaggttggagagtagtgggtgaggggactggttctagggactaatgggcgacactgagcatgcccaagtgtttccaaggaccgcagagaaaacgccccctttacttggcctatgcggcgactgcggctgtacctgctcagttcccggctctggggacacagaagaatcacgcctctgccctggtagaactctccatctagtggggagccagacttgggcacaaggaagcatgcctcaattgctacgtgtggcaagcgtgggggtacagtaggaaggctgacagcaacggggaggacctaggaaggcttcatgaagataatagcattgggataggttttgaggatgggtaggatacatacaggtggaagtggagacaagggtgctcaaaaaacatggaacgggtgccggggcaaaggcatgaagcaggagccctctgcaagtgctgggtagtctcacgtggcggcagatggccgcaggctgctgacctgggctcccaggtagaactaagggctgtttcctgctcccacagctcctccacttcctccaacacagtgaatggaaattatgcttcttcctctgtctactaaactgtgcggtccttcaagctaggaaaagagcctgtcacctttccatcccccgtgaggactccagggcttggccaagatggaccgttaaaactgattgacctgacagtcctgtctgatactcagcggtgagactgtcaaggtgggccagggttctgtggctgatgtctcaacatctggctcacaagcagctcagaccagcttgtccaagccagccctcctgtccccgcaccaaacctgcagcctcaccagcattcgtcctctgggtcgggcaccggtttcctcccactgcaccagcagaaaccagagactccttcttatccctccccctacccagtccgattcatcaccaagtctcgccatgttgccttttatatttctctgaaatctgtgcacctctcctcaccctattgtcaccttcctaacctgagccccttcatttttggcctggctccttcctt

SEQ ID NO: 2008 - DNA, 1208 bp, Artificial sequence
  DNA replication origin
ttgtggaatggaccgcgtgtggcctgagagagctcgcatttcagggaatgcctgggcttgatgcctgttatcttgttcagtgcctctgataaattaataaactggaatctcactcaacaattggtttcacgtgagtttggcatgtgtgcactcgcttcttggaggctgactgtcccaaggaaaaaaattaaactgtttcctggccagaaaatggtgaggactcagggtccaaagtagaaattgcctctgtgggctgggccccttccctgagcagatgccctactcaggttggggcaaaaaccagttcctctgacagaactaactggccactctccatgaaaggtggtggctctcacaaggtatgcaaatgtgggaggctcattccaaatgccagccaccactccccagaggcagcctggagcaatgggctttatatacacacacatgcatttccttagccccttctctctgtttcacagaggaggaaaccgaggctcaccatgctccttttggcaaagactcttttttagctgagattgtaacccaggtctgtctcaccatggaaggaggagggatcccaggttggtgtctgcagcccctgtaacaccacctcaaaagtagagctgaccaagccggtggtccaggagggaaatttgagaaagggctaccccgagccctccagttccaaggagtaggacctaggccttacccagcaatgcccacagtctctagcggctctgctccaaagggaatggaatttgctctgacttctctctaggggaaacgcaggcgcagaaggccaggggcctggagggctaactccagcctcagccccccatagtgccccaggccttctggcttcattccagcctagcccgaaggggcccacatctgcttgctcaagggccccagctggagggcagcgaggcaggggcggagaaggggactcctttgtggcgctcactcccaggggttcgtggggatcaatcatctgaaagctggagagacttgtaattttattccctgggaggaggagcctgagaagtcggcacgggaggaggggatgggatggagaggggaggacggccaggggagccgttcgggtaggggagggacttggctagatctcccaagccttctccactcttcaaactttcaccaaactcttagcccccgcctccccgaaaccaaaacacaacaggctgtgg

SEQ ID NO: 2009 - DNA, 2192 bp, Artificial sequence
  DNA replication origin
gagttggagacctgggtgtcctcagtccccacttgggtgaaacagttgctcagactgaggggtggaatgggtcggttgggtgggcggaccaaattcctttaagaagcgttcaaggcctgaagtggctggctgtccgtgaggctgccttggttggggcatggtgagggtgggtggcagcctggggcagggctgcgagggcggcgcagggcgggacgggtggggcctgaccccgccccttggcgcagctgtaaataggtaaatagaaggtgattgtggcgtggcgatgtaccgatacccgcctgcgacgccgtggtggctggttccctgtctcttcagtagagagtctagaccccacccagtcttcatgtacggccgaccgcaggctgagatggaacaggaggctggggagctgagccggtggcaggcggcgcaccaggctgcccaggtgagtcaggtgccagcccctggcaggccgggcgggcccaggctagggggcggcggggaggggaggccttggaggagaggtgaggcggagggaagcagaaacccgaggggtagaaatccgaggggaggggtggcaaaggaaggaatgggagattggggaggggttgcaaagggagggatgggagattggggaggggttgcaaagggagggatgggagactggggagggattggaaagggagggttgtgagattgagggtgtaaatcatacgtcgtttattccaacaatgttcgcccagcagtagagcttgtgttggccgcgtggcgggtaagagggttctaggcaactttctggtgagggacttgagtaggcaggacagcaaagaccaagttaggaagtgagcaggaaacaacaggaaaaaaaaaaaaaaccccaaaaatgttaattggagccctactaagtggtaggcttttcccagaccctggaaatacaatgatgaatttaccatgaaacagatatatataaaattgtatgaataaatcgttaactgaatgattggaattgtacagcgttacatgaagaagaagtcaggggcgcgtgggagcagataccagaggtgtttgacccgatttgggaggcttaggagacagctgagactctgttctgggactaaagaacccgtcaggtgaaaggttcccaggtctgagaccacaggctgcatgcttcctcttaggaggaactgaaagaccagggcctagacagtgatggaagggtggccccagggacaccattgagatcattcagggcttgtttattccaagaacagtgggaagccattgatgagtttaaacataatctgtctcaattagatttgcattttcaaaggagtgccctggtggatgtgggctggattcaaggcaacagttagaaagcttttgtgataatccaggtgagaattcaaatggcggcctacctgcagaagtgagagtggagatggagaagctaaatatatcatagattgtggagatgttttggaggcagagaccacaatcattggtccccgggtggtgagggagacatctagagtaacagatttcttgcttgcacaattgggtgacaatagtgacattttctgagagagagtgaaggatgagaaggacaagattaatttgttgtttgagggaggtgggcaaagatgctagtgaattttggccatagtccattagaagagcatgtgggccatccgaaaggactcaaacaataggtagctggaaaattcaggagccatcttcgccagagcgaagattccagatttaggaatagttggactgtaaacagaaacaaaaccactggcatggggaagcttgcccagagagagcagggaaagggaaatctgcaaaagaaactgtgaaggagggggtctgagagaagggaaggagaaaaacttggaaagtgtggccatgcgtgttagagaggccaagcattctaagaagggtgtggccagtggtcgtataagctcctgagagttcaagcgaggagtctggaaagtgctgcttggtcatagtgggatggaagtcatcagtggtgacctttatgaaagctggttctgtggagagatagaggccagagcaaatttgggagactcataaggcaaagtagtggtgaaggcatgtttagacaacttaatttgccatgaaggactgggaaaacaagagggccattgctgagagttagggaggagaggctg

SEQ ID NO: 2010 - DNA, 1077 bp, Artificial sequence
  DNA replication origin
tttattttttttctgactggcttatttcaaatgacctgacttcaagttctgaaattctttcttgtgtttgatgtagtttattgttaaagctcttgaatgaatttttttattgattcattgaactgtttggttccaggatttctgtttgttttttatatctttgttgaattttatttctttgttgaatttctcattcagatcatgaattgttttcctgatttctttctatcatttatctgtgttctctcgtatctcactgagtttctttaatatcattattttgtattctttttcaggctattttatagatttcctcttcttcgtgttgctactggagaattattgtcttcatttggaagcatcatgtttccttgctttttcatgtttcttgtgtccttatattgatatctgcacgtctggtgtaacagttacttattccagttttacagattggctcttgtaggggaaggctctttcctagagctgcttctacagttggttggcagggtactttggctttgactctgggtggatgcagtagtgtagtctccatgtgatgtcttcatctataatcagcatcagtggtggttgtgggttcctcggtggcttaggatgtggttattagtaggggctgtgacaagactttcctgcggaaggggataccagttgagccaattctcaactgccagtggtggcagtggtgggccaagtgtgccagtcctcaggcccttgatggtgtatgtaggtgctggcagtggtgggtatgagcagaccagtgtttaggcttccaggtggcatgcttaggtaccagcggtggcagtagtgagctgagtgggtacgcccttgcacccccaggtggtgtgcgtggcattggtggtggtagtagcagcagtggacaacccttaggccctggagcaggatgcatagcagtcagtgctggtggtgagctgggagggccagtcccttgtcccctgagaggtacacatgtaatctggtggtgggcgggcctgtccttatgcccctagatggcatacacatgcaccagtggtggagggcagggtggccaaattatcccca

SEQ ID NO: 2011 - DNA, 655 bp, Artificial sequence
  DNA replication origin
cggaggcagacttggggtgacgggtgtggggaaggggctcaggctgtaggggagggggctactaggatggttgtgcgtgggaaagctgtaggagtgttttgggcaggggagttacatggtcagtgttggcttcagtcagaggatgctcatagtttgtaggggaaggactagtgaggagagactgcagacaaggaggctgaaggggaggggcagcaaggtaagcaagagtgcatcggccctggaaatagaggtaggacaccaggtaaaactttctttcattcagtacacactaccttggacctaccatatatcaggaaccatggtaggtgctagaaatgtattggtaacaatggcagacacagtgctctgtcaccacagagctcacaaatggagttgtgggcttggccctggggactgagggtgaagtcaggtttagggatggccaaggagggtctggaggtgatgcagcactggacagaaaggctgctggaggcttgtcagcgtgacatcatagtcaggggagggcacttcctcctggggtagcggatttggccttgggagactggtgaacagcatggtgccagagcaggttgtggtgagtagggcctgcatgcatctagaactgctgactccagggctgccgatggtctctgtc

SEQ ID NO: 2012 - DNA, 780 bp, Artificial sequence
  DNA replication origin
ctttgaatgaagagggctgccctgccacctccaggctggctctgaggtgtgggtgagggtgcttggaagggagggaggatgcagggcattaattgggctgggagaggcggggaaggggaggcgtgggttttgagcagtgaggttaatggccctcgcaccaaagagacagctttaatgagcttcagctggcgatgccccgagttactgtgcgtgctaaaagggtcgcgctgtaagagtttgacgtggactgcttcccagccctgggggtcagaggtcagctcctgtcactggccactcaggctggtccttagtgacatggtgctaattaactgtgtgaggagctgccagcctggagtggggagtggtatgtgtattggctgggggggtaaggcagcattgggtggcttccaggcaagggtgctgcagatcccacagctgagccatgtccagggtctgctcagtcctcctgcagtgccacaggggtgtggcatgggtggtgtggaggtgctgagagaacacggaggcagacttggggtgacgggtgtggggaaggggctcaggctgtaggggagggggctactaggatggttgtgcgtgggaaagctgtaggagtgttttgggcaggggagttacatggtcagtgttggcttcagtcagaggatgctcatagtttgtaggggaaggactagtgaggagagactgcagacaaggaggctgaaggggaggggcagcaaggtaagcaagagtgcatcggccctggaaatagaggtaggacaccag

SEQ ID NO: 2013 - DNA, 1155 bp, Artificial sequence
  DNA replication origin
tgactgcagcccattggtcaaaggggtcggcagcgggctcagcggttggccacagcgcccgcccgtccgccgcgtcggtcggggtcagagtgcgcggaggtgagtcggtgtgttgtggactcgtggtgctggctgccgctgttcaggcggccgggaacgggcggtggggagcgggcggagctggccctgcctctgcctggccggcgccgcagtcggcgcgggccgcgcccgccgccgccaactgccctgagcgcttgctgaggccgagggagacgtcggggcctgcacctggagggagcctgccgcgctggccccgaggagggggcgttgccatggcgacagcctctcccgctgctgacggggggcgggggcggccctgggaaggagggctggtctcctggccccccgcccctccccttactctcccctggacttggatgggcccgagttgggggcaacaccccggggtgggtgatgctgaatggccccgccaagattgggccctggttaatgcatgcggggtgagggtcgcggtgcgcagaatttatgcaacctggggtgctggcccatgtgcttaccctggatgcttacttaatctactgagtaatgttctggcggagggggagcggggcagagctttgcaagacaggatgggtgagtttattaagggggttgacttactgggattactagagaagaaaaaggtttgactagagaggctagaaatggagcatggagattgtgggtagaacattcccttgaccctctcgccaacacatgcccacacaccaggttagcagtttacctctttgtaaatctgaagcggtggtagtagtgatggtggaaggagtgaataagggcctaacctggctagctttctgtttgcctgtcttgcaaatggtccagcaacaggtgttttcttaaaaaaagcatgaacttggattgaggcttgactgcgagttcttgcaaaatataactgctccttgttgacttggaagatgctggatgtggggcccctcaatgggggtttggattttgtccttagagctggattttgcaacaaatagtgcccatcgttgtgtctgcgagaggtctctggccacttcaatggcatttactcttgtcagacatttaatcagtctcccagcggaaggg

SEQ ID NO: 2014 - DNA, 1603 bp, Artificial sequence
  DNA replication origin
ggtgggggaggagggatgtaaacaaaagccaacgctctctttagttcacaatggctcgcgaccccaagacttccaagctctttggtgagggccagcaggtctgttctccaggagtgccctgggtctggacttcatttcccagagtcccttagtgccctaatgtattcagtgctcagagtgcctgtatgtgtgtgagtgtgagagaatgtgtgcgtgcgtgtgtgtgtgcgcgcgtgtgtgtgtctccgagtccctgggagagtggaggctcattcactgattagatccagcgctgagaggcagcactgctccttctctcacgccaactgagtctcttgatctgtacatgcaatcccaggcagctcgcgaacacaaacccggggccagccgcctactgctgctgctgctgctgccgctgccgccgccgccgccgccgctgcctccgccggctctgcgaacccgggacttttcatgcaccacactctccgcctgcttccctccgtgtcctgaaaagtgcgaccgttctcccaaggaatttccacggcaagtatggagatcagaaaggggtgtggacgtgtgtgcgtacccaagaggggtgggtgcgagggcggccggcttgttcaggaacctggctaactttccgggtccgtttcctagggattcgggcggttccctctggacgggggcagggactgggactcggactggcgcgtcttggatcatcgcgacggagcctctcggcatcggcgccctgcgcgctccgtgcgctgcctcgctcaaactttccgtcttgagttttccttaatgtgttttatttggggagggggggaggtgcaagggggagggaccagacgcgggaattggacaagttgggagggtgagggcactgcaagggaagggagcaggacttcttttctccgtctcttaataagccccattcccactttgttcgggtcgatatcgagaatgccttctcgccgggctctctggtgcaccccccggtgatttccgggctcccctatgtaccccgcgttgatttccggcgaggccagggctgggtggtactcagtggggagcccgaggcggcgggcggatggagaaggggcgagccgaatgagaaactaccccgacagcctccaccccacacacagccggctccgcgggatacccggggagtggctgtttagccctggaccccgggtgctcggctgactttttcctagcgggggcgggtgtgaagggtgtggagggagggaggtggggtaggatggatggatcctctgcgggcaggaaggaggcaggtgctagcatagaggcggaccgttctaaacgccaccggtaaactccccactcctctgggctggaccggcctggccgtagagtagcccgacacgtgggatctcccgggattttcggggtcgggaccccctctcccagcggttctactgagcaaggcgggaggacgatcgtggagacgagggctacttgactactctacttgtagttttatttttatcttagacctgccttaaactgagtaacaatttctcttctgacttaagaacaaaacttttcagtgagcacgccggtcgctgcggtcctg

SEQ ID NO: 2015 - DNA, 848 bp, Artificial sequence
  DNA replication origin
cccaacccggggcttttcagggctcggcctgggcgtttcgcctttgtgctttgtaagagaaagccttttcttccagggcacaacaaacttgggcggagagcttccgtgtggccccccgggcgaggccgcccacggtggtgaggccatccgaggggatgcccggttcatcccccagtccaggagcctctccgagagctcgcggcccaggtcgaccccagctggcgagggcgcgcaggagtcccgaagtagcggggactagggcagccaggaggcagggggaaagctctcgcttcccgttaagcacaccctgcattctcgggtcgtggatgcagctccagcggagagcccgtgttccggccctgagccaggcgcgcgtcgcactgggtgggtgcatggggcccgggccataggtgtgggggcacagccctacctggccggcccgggtcgtctggggtctgcgccggcccactggcccgggagccgccgagggggagagcaccgcactcgctgcccacgacgcccagcagccacatcttgcctctcgcctccgctccggactcggcttgaggggcaaaggggagagaaaggaaaaataaagaaaaaaaagggcggcagtgaggaagcagcgaggggactggggggagcagagtgggcaggggggctttgccttgcctggcctcctctttccgtctcgcgggctcttcctgcaaaggggaatgagcagaggggggaaaggcagaaagagcgtcgaggaagagcggtgctggcgtcttccgtgccgatccctcctggcccgcagagacccggcaaaagtggcgtgagttcgcttgctgcgcttcgaggcaagg

SEQ ID NO: 2016 - DNA, 869 bp, Artificial sequence
  DNA replication origin
ggaagagcggtgctggcgtcttccgtgccgatccctcctggcccgcagagacccggcaaaagtggcgtgagttcgcttgctgcgcttcgaggcaaggctggggaaggccgaggacggggcggcgccgcgtcgcgccgctggtggccgacagggccggggccgggcgcggagcgagcggggacacacacctgttctgcgagccgcgcggtgtgcggcggccggacggccgcggtgcgggccgcagaaccctccctcccgcactgcgcatccgcagtccaggagctggaagggcccggcagccccgcgccggtccgtatttgcaggagaagcgggagtggaggagtccgcggctgcccgctgaagcggtggtgcgcgcggcggcgggacccgggtgacccccggggcggggctgctcgggggctggaggtccttggactttggtcgaaggctggcagctctgagcccctgccccgcgggccccgcgcggctgcggaccaggggcccttgcacgtgtcggttcttcctggactggcgctttggttgcccaaagttgggcgcagattgtttcgtgcggaggttgttgggacccagagtattctatatacaaaggcaaccgagagccggagggagaggtcgggccaaagagtagtgggctcggctccgcgttgggcccaagtttatgtaggtttcgccttcacctcttcttcccccgttttccctaaaagagttgattttttttcccagtcgagactcttccgagctgaataatgcacccgctcgctgagccagtatcccgcgaccccgcactctcggactggcccgggctgtctcggattcgcaccctttggccaagctgggcctgaacccgg

SEQ ID NO: 2017 - DNA, 1206 bp, Artificial sequence
  DNA replication origin
cgcgacgggccctcgtgtgtgcggccgcgggctgggcgctcccggccctcgaggcggcgcgcggagtcctcctgcggcctccaagtgctgcagagcgacggcgagatcaccaacatttctgaaaccacttgcaagccgcctcggtggcggaggctgggggtcccttgcaagtaagcgaacggggcccaccccgtggcctggcctccccggggccagttctcgcgcctctccgcgccccctcccccagaagatcaattaccagccacccttctgccggcagcggcgaggggctggcgggcggccgcgagaaaacggcagcccggatcacttctgcatgacaattgatgggagggagggcgcggggcgaggagggaggacggctgcggtgtccgttttctcaccatggtgattaggcattccggccgtaagaggaggcagccgccgcacagagcggcgcggcgtggagcgagggcaggggaagagcgggagcacaactacagcgagcccagccgccaggcgagcggcgcgccgagccaagccaagccaggccagatggctctgcagccatcagggactgctcccgtccagcctggccccactttagctgtgcaaacatttctttatcccaacaagacaattaaacccagcagcatgaaaaagagtctccatgactgtgttgggagtgaacaaccagaaacaaccacacacatcacaggagttcttgcccccggggagtaggggagaacccgggagcagctgagggagagtcaggctaggtctgggcagtcaggacagagggaagcatctgacccaggtcttctggcgatttgctgaccctttcccagtggtcatctgtcccagctgcaacccagaggtgcagcctggccacctggcatgccccaaacattctccctagcaagaacaactctcctaaaagcccagtgtagagtccctgcccaccccagtcccagagcccttggaaagtatcccccctcaccccagccctccccattccaggctgcctttggcctaggtgggctcagctgatttgattgttagaacacagggtcttcaatgatacatgcctttatataaagacacagagtacaaaataccatctcctactcagggcttttgggacccaagaatggctgttcaagtacatcaaagatgagagcaaagcagaacatccaggagctgctgtga

SEQ ID NO: 2018 - DNA, 1015 bp, Artificial sequence
  DNA replication origin
acgccgcgccgctctgtgcggcggctgcctcctcttacggccggaatgcctaatcaccatggtgagaaaacggacaccgcagccgtcctccctcctcgccccgcgccctccctcccatcaattgtcatgcagaagtgatccgggctgccgttttctcgcggccgcccgccagcccctcgccgctgccggcagaagggtggctggtaattgatcttctgggggagggggcgcggagaggcgcgagaactggccccggggaggccaggccacggggtgggccccgttcgcttacttgcaagggacccccagcctccgccaccgaggcggcttgcaagtggtttcagaaatgttggtgatctcgccgtcgctctgcagcacttggaggccgcaggaggactccgcgcgccgcctcgagggccgggagcgcccagcccgcggccgcacacacgagggcccgtcgcgccccccgccctgccccgcctcgccctccacgtccctgcacccccaagtcgcactaagaacccagtccccgatcggtttcctctacgccgtctgagcagaagagagtgggaaccggggtgacggataaggggggggcgcccacgcgacgtcggggtgcatgggagcgcgcgggaggcgctagtgggtgcacggggcgtgagggggacacagcgcgggcgtggggatggccactgcgcggggagggttctgcctggagaaggagggatgggaggaggttgggggagcagggcgcgtggaggagggaggttggacgtgtgtacagcgcctggggacctcgctggccccttggtgcccccaggactctgaggcttctcctttcggcttgaaatgtttttcccttcctgcttttcaaatctgtaaaaatgttccggggaatgtttccgaagtccagggctccgtccttcggcgggattgctggcattcgggcaaggcgagtcgcggtggcctctgaggctcgcagccagcacagcggggctcgttaaagtctgggcaa

SEQ ID NO: 2019 - DNA, 1600 bp, Artificial sequence
  DNA replication origin
aatggaagcgtgtttagacctttcctccccagcggctgcagctctgtacaaggaggtgtcccaggctgcctgtctccattctctaatagcctcctggccaccacctgggcatccccctccccagagcctgccagaccattctaattgccgctgctgctgagggagggagtctctaaagagagaggagggagggaggagctccatctggtgtccaggaaaataagggagccagctttggtctgcggctccaggtccaccctggagtccacaacgtggggctcgggagccaggggcgaagcacccttcgggcatagacgggcccttggctcttctgtcctgtcagagagtgggcctgggggccccatagaggcccctcgatttggccaactgagcgggacccagcacaaggcctccaggctgcagaaggctgtgggggtgggggtgggggtgggggtatcgggagacaataggagagcccagagccagctctccctttccaccagcccgagtgacacagtgacacaaagggagagtcttgtgcttgggggagggggtggggagagccctttgtcccgctattttctacattgctgggggtggggagtgggaagggtgtgggggggtgaccagcggctgtcagtatggggaggagtagagagtggtgcagaggccctggaaagtttttgaatttcaatcaggttggctttgaaagagtttggcttttgttgaaagaaagagaaaggttaatgctagagttgagggggagggggtggattctgcagatagagtcctgtttgcaggccggtcagctgtgggacacccaggctggcagaaaggctggggatgggtgagcagaggaggagcaggcgtcccatttcccttcccgggcccaggtggaggaaggctgggcagagaagcatggggttattgggtgtgggcagaactggtcaagaaaggaaagcaatgcggccaagcaggacaatttctttcttccttttgcatgccttacagagcctttgactttttaagccaggaaagaatgaagttccctccctctctcccctccgtttctactccacccaagcacagcggcggcggcagagcacttgtcagggctgactttgtgacaagtgcaggcttggttggtgcaggagaggggggctgggtggcttgggacctcttagtgctcaggaatcagctgttttctccgctcttaccctctgctgaccctcctctgcactctaattgctccaaaaagaagcataaaaatgtggagctattatactctttgaaataggcagcatactgctttctcaatgttgggagaaaaagaaggaggaggaagggagctacagccacgcagcaggctagagatctgcaattccaagttggggagtgggcacctggcattccccagctgacttcacaccactgaaacacacacacacacacacacacacacacacacacacacacacacacactttgtaaggctcctggctgcagtatgatcctttgtctctctctctctctctctctctcacacacacacacacacacacacaccatacacgctcacacacacacatacactttatga

SEQ ID NO: 2020 - DNA, 949 bp, Artificial sequence
  DNA replication origin
gggtacggaatgaagccccgccagcacagcagttggtggtgagcagtgaagtggccggtgtgggcggcttgggcgctgggcggctgtctcctgacaccagaaactctctttatgaaaggatcaagtcggtagcattgttctctggccagggaaccaagggctcagaatgctcttttgtgtggaggtgcccccccctcaccacactcccccttctttttctccctttgagccactgctggctgtgcctctgcccccatgcttggggcgggaggcgatggagtggtggagatgggctcgggacagacagtcctgggggagccatctgtgctggggtaggatccactggagctgaaaaattaaacagcattttcaattaacttttcctctcttgtttgggggtgggcgtgtgggggtggtggagcaggctggttgaatttaacctttgaaaagctgtgtggagcagaggaggagggaatgacctttctttcccgaggcagggttgggcgggggtggggagcagtggaactgtttcctcgggccaggcgggggaccccctcctggtgaatattccagaagctcttggtgtccttggcccctgaggtcccatctgtgtagagagagggtttgctagtgcatctccagggtgttcgttgtaaggagagatgggcgagtcgtgtggggtcagcaggtggatgaaggcttactgccgagcaatggaaatctttttcacctctccctcaaaggctgccccttttctctacccatcttcccttctgctgctcaggaacgcctgcatcttagtttccgctcttgggctgggtgccccaaaagatggaagaacatccgtagaagggactctgctgtaggtggcgtttgctctaaaggcctttctgttcctgtctcattggcaccacagaacgtaacacaaccagaagtcagagtcagagtc

SEQ ID NO: 2021 - DNA, 1188 bp, Artificial sequence
  DNA replication origin
caccatgcctggctaatttttgtatttttagtaaagtcggggtttcaccacgttggccaggctggtctcgaactcctgccctcagatgatctgcccatctcagcctcccaaagtgctgggattacaggtgtgagccaccgcacccagccctgcatttaaatttttaattcatctatttaatgcattacttaaaaaaaaaataagacagggtctcgttatgttttctgggctggtcttgaactcctggacttaagcgattctctcatctccgcatctcgagtggctgagattacaggtgtacatcatagtgcctggcttaattcattaattctgatataaggtacaaggcaaggaactcacttctctcctacttcccaagttttacttatttactccctccctcccttccttccttccttcctttcctccttcctttggtgaaagaggacagataacggggaaagaaaaagggaagactctaggtcaaactaggtttctgcttgtgtggttagatggtgctgatggatcatttaagttgcaggcttggaagaatataatgatgtcagtattgaatatgttgagtctggaggtgctctgcaaggattcaaggagagatagtgagttggcagctggaatatgggcatgaagctcaggagagaggttgaggctgaagttgcagccatggtattcatcagtgtttaggtggcaggtgaaactacaggcatgatgagctcaccccgggaagatgcgtaagtaaggagagaagtgaagcagtgtactctgggaagcagcgatactgaaggggcacatcaagcagaagctggggaaggagaatgagcaggagtagaagtagataagatccaaagagatgagtcagagaagctaagggaagagcggctttgaagaaagaagaggtgatcagaatgtcagtgaagaagtgggatagagctcattgagtgaatgggctgactgaatgggaggtggggaagtggaggcaatgtgagtgagatgtcttttgaacaagtttatcagtaaagggaaagaggaagaggggagagtaatgtgcttggaagttaagattaaaagaagatttaaaggggagatttgagggtgtgtgaaggcagagagaaaggcattggtaggaagagggatatttaaaatgtgagagaagagatggtggtgccagat

SEQ ID NO: 2022 - DNA, 977 bp, Artificial sequence
  DNA replication origin
ggggccggagggtctgcgcctcccctccctgccccagcccctcccaggcccgctccagggccagccgcactgggcctcattcctggagggccctgtctctcggcagtgttgctaggtgcggtgagcccaggcgcctgccaccggctggccaaggctctgcctggagaccatcggagagctgggaagaaggagctgcattatttggttgatccctccctccctcccccagcctcagcacagtgagctttccggagggatggttctgagccagcccatccccaggccttcctctttgtgcagagacctccccgtcagaccccccaccttcgccggctaccccctcccccttccctccggttgagcagagccagagttaagcctggggttaatgcccagtgacacctgcaggttggctagtgttgttgacatggggctggggggaggggagggggtgatgggggagatcgttggtggctttattatggagaactcagcaggcctggggccttctattgtccaagtggcaaataaataaataggagaaagtaagtcttccccatggcttaccgacgggaggttaacagctggacatgacatgacaaattgggcatttttctttggggactgatccttacagcagctagcagggagaatgagagagagagagggagggggaagtagagagagcaaaagcaagccggagcacggaaggggctagtcacagaagtcaacgtggaagccgtgtgtgcatgtacaagagtacgtgaccggggtgtacaggaaacattgcatcatgttttgggcattaaaaaaaaatacatgcaagcatttcacatgtaacgacttcaggagtcaatcccagaaccccaaaagctgggtatctggctgtggggggagatatctctgggatctgccttcttgaacccctcccccgtcctgccaaatggaaaaaccaaaaggtcaacgccagctctgat

SEQ ID NO: 2023 - DNA, 913 bp, Artificial sequence
  DNA replication origin
agcttccgtcctgagcccctaaatcaggaaccaagatgggctattgtcacttaccgcattagcctcgttagcggaccaggaggggtgattaatagcaatacacacacagccatcttgctcgcttgcagctcctgctgctgctcatgacctggggaggggtggggaggagctgaacctgctccagaataactgaggactctgggcttagccccctccctgtttccccctccccatcaccaggcaggaaagtccacatgaccattcaagatctggggacagttcaaagattagcaagcctagccagagagagcacatctggaggcctgactcttggagggggcgggcagggggcatgagggggctggtttcaggatatgtcccaaagtgtacacctgtgttcgagagagaacgagagagagagagagagagaggtgggtggggtggggtgtgaggagacagtggggggttgtatgtgaaggaggtagacgggtgtatgtttatttcatttcccaaactgtctttgagactggagatagcgcactgaggaagacagacaagggcgccgggaagaggaggcgtgtacatgagagaaagaggtccatgtaagagtgagaaagaccaagaagtgtgcaaggagaaataaaaaagtgtggctgagagaggggtgaatatgtgcatgtgagaggcttctatgagacagagaggtgcgtgtgtgccggagccatctgggagacattcgtgagaaacggtgtgtgtgcaagagtgggtgtgtgaggggagatgagagaaaggggtgcataacagacatgttgtgtatgaaaagaacgtgagaggtgtggatgggagggaggggcacagcgtgagagagggaggtgagggaggttcgtgtgtgtgtgtgtgtgtgtgtgtgtgt

SEQ ID NO: 2024 - DNA, 977 bp, Artificial sequence
  DNA replication origin
acagacggagggggcatgggcgtaggggtgctgggctgggccgcgacgtgaggggtacagatgcagggacgcaagacatagccgtgagaagcatggagcttggggtggggaaatggacacggggatgctctgggaggatgtgagggataagggggttgtgcagagtcatgggtgggggtgtggaaaaaggaaggctgttggcagaagtgcatgccctggacattgcaggtgtggagcacctgggactgcactgtagtgtggccctcaccgaggaggcagacagagagctgggggcccgcattctccaggcccttagggggcacactgcttttacaaggctgggcatgctcctctagcctctacctctattctctgaccctggtaggagaagtcctcctctgggagcaaattacacaggactcctcctggacagccaaaatatggaacccagctgcagaaggatttttttttcccactttctgccactggcaggccaatcccaggtgtgtgtgggcggggggtagggatggggagtgattaagagcatgggtactggagtcagattactttaggtttgaatcttatcttcatcacttactagctgtgcaaccttagagatgtcacttaactcctctgcacctcagtttcttcctctgtaaaatgggagcaattattgtcacctacttcagagggttgttgtgaagattaaataaattaatgcaatgtaaagtactcggcacatagtgagcattcaacaaggattattattattatcactggtatagtcttatatgcccatggattctttcatactcctcccttcaatgggtagagcttctagagcttaattcttctcccttgagaatgagctggacttgacaacttgctcctagtgaacagaatagaatagaatagagtagaagcaacagtgtgtgacttcccagactagatcataagaagcactgtggcaccctcct

SEQ ID NO: 2025 - DNA, 912 bp, Artificial sequence
  DNA replication origin
aagggcagccaaggctggggccctccccgcgctccccgctgaacggccgtcagcccggagggagctgacacgctccttgggaatttatcacgcacccaattacaatgttaattggcaagttcctgaaatcaattaattcgcaaattttttccaattaaaaatccagataaatcacgagggcggcggcgggccggtccagcccacagtccggtgggcgcagcggccgcagggagggagggcgagagaagcgaggggagggggcgcgggcgcggctgcccttgaacgcctttgccggccggtccaactgtcagcgcgccgggcgcggcggggccgagacagataaaaccatcgacccgtcgccgccagcgtttcggctttatcgatccgacgggaatttcacttgctgtgcagatcccgctgtccggctgtcagacacccggttggaggggggcgcgtgccgggggcgcagggcgcgcacagacggagggggcatgggcgtaggggtgctgggctgggccgcgacgtgaggggtacagatgcagggacgcaagacatagccgtgagaagcatggagcttggggtggggaaatggacacggggatgctctgggaggatgtgagggataagggggttgtgcagagtcatgggtgggggtgtggaaaaaggaaggctgttggcagaagtgcatgccctggacattgcaggtgtggagcacctgggactgcactgtagtgtggccctcaccgaggaggcagacagagagctgggggcccgcattctccaggcccttagggggcacactgcttttacaaggctgggcatgctcctctagcctctacctctattctctgaccctggtaggagaagtcctcctctgggagcaaattacacaggactcctcctggacagcca

SEQ ID NO: 2026 - DNA, 836 bp, Artificial sequence
  DNA replication origin
cacacacaccctgaaagaagccttgtcccatgggtgtcattcccacaggtacatgggtgcacagacacttacaggaagagcaatcagaacttcctttggcaaagtccttacacttttcaaagcacttttccatttgagatcagaggctgtgctaacactctctccctcaccccatcctttatctttccccttctcaaccccttcacaggggttccatcagaccccagaacttggccaggtagaacaaggagggcaaagttagatggaggacagattgtggagggccttcaatgctggaggacgtccttgatggggtggagagtaagccgaacattcatgagccagggtgaagcctggtcagagagagacaagtgggaggggcatggttgcaaggccagtgtggagtgtgggttgggggaagaaacaggaggcaagggaggaggtcggccagggtccaggggaaagttggtgaggccgacccaggacagtggcagtggcagtggggatgcagaagagggaatgacgacagaccaggtggaggaagaagccacaggacttagttggggtgcttattgggaggaagctttctaacttgaatgattgggagagtgatggtggcagagaagcaagtgtctgagggaaggaggggatgttgggcaagctcagcctaagatgtctctgggttggtgatgggggagggactggatgtgtggagagacaggcagggacatagatagatgggggctggaggttgaagggcgggggtggaggaaggagttggcccccagacttcccagtggccctcaggcaggagtttccatccagagagatgaagt

SEQ ID NO: 2027 - DNA, 1952 bp, Artificial sequence
  DNA replication origin
aggagaaaatcagagtaagcttcacacaggaggtaatgactgaaaacggactcagagaaggaacagaagttcacttggcagacaaggaagaaaggttactccagatataaagacaacactatgtagagaacatagaggtgtaacagaatgatgtatctggggacctgctagcagtttgcttttgttagaaagtagaatgcaaggaaagttagtaggtgaagctggaaagcaacccagagactagctgggtatcccatcccttgctctttacacaaggcctggcatgtagtagttgttcagctatgtcggatttttaaagtcactgagctaggccttgaaaccagggggtattggtttctggggttttgtttttgtttttcatagagacagggtctcactatattgcccaggctggtcttgaactcctgggctcaagcaatcctcctgcattggctttccaaagtgctaagattaaaggcatgagccttggtttctggtttgaattctcatttacttagcccctgctgactaactaaccctctttatcattacctcacttaaacctcatagcaactgtattcatcatgcccagtctattaccaaggaaacaggcctagaaagaggtgactcttctaagaacacataaattgtaagtaacagaattaggacttgaacttgagtctgtctggccctaaatccgagattgtttcccaacccatcactgggctcagggcttatctcataaagtctttctcccgttcccactggtgtctccttcatgcaagacgctgtgctgggtaaatggctagagatgaccttccaagtacaagggacagatatgtaaacaaacaatcaaaatatacatgatcaaagagaagcagtggaactgaaaactcagaggaggcatcaaacccaggcttgggggacaaaactaagtcttgccagagtcctgaaggatgaacaacagttaaccaagcaagggatactggagggcatggaggctctctggcctggagtgcagagcatggagtgctcaaagagctagttagctctgcaaagctgagtgtcaggaatgtaaagggagagaataggagtgagagaagagtctggcaaggcagacagggaaggcctatatgccttgatggagaaccactgaaggatttaaagaaggagagggttaattttgtccaatagaaagatcacattgtgtgtagtgtggaggatgggttgcagagagagaagctagagaccaaaagatgagacgggaacagctgcaaatttcgagagctcgtaagattatgtatgactggagcacaacgacaaccaaggtaggtacaaccatggaagaacaactcagggctgacttgcctttgcccagtgccatgctgggctctgggttcacccaaataattcacacacggccccaaccctgaagtggtcagtccactgataaaaacttcacaagcgatgataacggcgcagagatgaatgtactcttacacaaggcaaagctatttttcagttagacctggaaggatgagtaggagatacagaggtggagatgagaaaattagcgacctttcaatgtacactttcaggatctagaaaaggattgagtgtgagggatggagaaagtggggtccaggacgactctcaactttcttctgtgggcacacctgagtagatagtggcttcctcttatgaacagggaacccaagaggaaggcctctgtttggaggatactgagttccatgttggccatgttggccgtgtgggtatgcagtgcctatgggagctccaggggccgtgcagcagacagctgacatgttgggagtcctctgataacagaactggatggcctaggggttgggcggggatcgcccacaggcgatagggaattcggacgccttgtcccctgtaaagcacccaacgcgatgcctctgccctaaggg

SEQ ID NO: 2028 - DNA, 1777 bp, Artificial sequence
  DNA replication origin
ccaacgcgatgcctctgccctaagggcagccgcgagaaaggcaggcacaggaggcgggagccggggccgggcgatggggcggaaggagccccgcagcgggaggggtcgtggagtggggtggaaggacttcgcagccgctaaagattgggtgggtaggcttcacgggcggtgggagggaccccggggaggcttctgccggttgctacccgagtacaaacggcagcttcctggtctctgtccggccgcccccgccgcattgtgaactttcacccccagcgcgcgacggcggcagatcacgtgattagggccaacatggccgccgccgccgcttggagctgaagtgccgccgccgccgggcagccacggggaatccgcccgcatcgccgccctcgccggccgggcggccgtggggcccagagcgccggaggccagggctggggcggcaccgcgcagcggccacggggtcccgttagagcagcgcccggcggctatgccgagagcccggagcggccggaggagcagaggggccggcgggagggaggaagtaggtttgtttacgggctgtttggggcggagcagctttggtcgggggtccggtgctggggcgggggccaggactgcaggccgcgcctgacgctctcttttcttttcttgcatctgcccgcgatcttctcccagacctttctgcgagtacgagccaaccggcagacccgactgaatggtgagtcctgcccggcccctccctccgccccacccccggcctcctccctccctccctcactgcctgccgctcctggcttgcctgggtctcttcgactctggggcccgttggcttcttcgcagtcacggcgcctgagtatgtgcaaaccaaagctgccgctctcagtttccccgtctgtctaatggaggtatggcgcccagctcttgcccaaacctctctaaaggccctgaagaaccctgggggggcaataagtgccggagaatgaggaacgagctacacaattctactcgggagctcagctttgaatttgcaaactgctgggacctcactatacaaacctgcagggcgctgagaatgtttttcttccagtttttaatcagtgcccagtagtgtgaatacagcccctctgctgagacttgacaatacagtgagatctggagttcccacggcaacaggaactaactcatcccagggctctttgagttatcagtcggcccacatttcacaaaggtgatcagcgtgggctcgacagctcttagaggccttctctgaaagcaggccgtgtatgcactacctagcagccccccttttggattcaaacctctggagcattcctgtttgctgaatacaattgaatgatcctagctttttgtgcttactggggtgtggtatctggggggtggctgtaaggggtttagggtctctgggtcagctggtaagtgagagaggccatggagttcaagatccccagctcttatcacttggtttctgctgccaggctgagccctagtctggaaaagggagaaattcatgatgggctggcgccatgttaagcaccattctcacaacgcctctgagaagagtattacacaccttttgtgaataagaaaacaggctctgagaggtgaaagtggtttgtttaaaagtacacagctgggatgtaactgagccatgattcaattgaagtttgtttcccaccaaagcccgtgtttctccaaccatgccatgctacctccttggcaaatgctttgattcttcctactcgtacgtagcctc

SEQ ID NO: 2029 - DNA, 1362 bp, Artificial sequence
  DNA replication origin
ggccttggcggccgcggcctgctgcaaaaacatcggcaggctgggggtgagctggagaaccgaggggtctgaggagggggcagccgtgaggcaagagaccgccctcccgtggcccaggcagccccatttgagcaggtccttaccactgaggatcttggcctgcagtttggagatctccttgaccgacggtatcagcagcgccacgaggcccttgagcagcgcctggcgcacatcgtaaccgaccaggtctttgatcaactcgatggctgcggaagggcagaggtgctggagagaggccccaggcccctccgccaccgaggaagcaaagaaccccgtgaaccaagtcgccactcgtcagtgtcctcctcttttactgatcagcactgtgcagggcgtgggggagctgggaaggcgaacctcagttgaagagcaggaggagggggctgaagggggaggaggaagggttggatggtgagcccacctgtcgaggcggcctaggatgtcagcgctggaggctgagaccccagagaggggggccttcgccttggaggaatccaggtttcatggaggagggaagggctgggtctttacgggaagacaagatggagaaagacaaggggtgagagggagacagagaaagtgggtgggagacttgtggcaggaaatgagaaaggggaaggaaggtaggcggcagtttagagaaactctccttctaaccatcatcgagccctctccaccaggcagggtgccaggctttccatacagcacccgtggaagctcaccagaaccagatgaggttcacttccccattttacctttgccgaaattagacacagagaggtaaaccactttgcctaagttacacagctaggaagtgatggaagcagaaggaggggaggatttggttaggaaggagaaggggactagaatttatggagggcatttcctgcagggctttcctgtagatattttacaggcagtcattcattcagtccagcattcactcagtctttcggcacggctgcatgtgaacgcctatggtgccaggcgcggcattgggtgttgaggatacagactgaattcattcattcgaccaaccctccttaagcgtgcacaaacaggcagcgatgatatggtgacaggtgctgtggaaggagtcagtgattgggctgtgggagcacaagagaaaatcggcaaggattgaatgtttttgtaaagaagagaaaggaaccacagagctagagggggcaggaggagaaggagatgctaagatgatggcacaccagcataaatgctaccttttttttttttttgagacagagcctcactctgtcgcccaggctggagtgcagtggcgcgatc

SEQ ID NO: 2030 - DNA, 865 bp, Artificial sequence
  DNA replication origin
ggaagggcgcacttaccaggaagagctggtagagttcctcccccatgcacttgcgcacgtgctccgccaccaaggggaacatctgcacgaagcactgcgccgcgcgggcgaggcggcgtgactgcgggggcgacggggctgcgggtgccgccgcccttcccgccccctaaccagccgccgcgcgcacctccagcgtgaggctggccagccgctggctgttgctgtggtccgtgttgcccatggcggccattaggccacgcaccacgcgcaggtacagcagctcctcggcgatgctcatgtcgttgcgcgccaggaccctgggccgggggttcgggctggggcgacgccctggggctcacccggcgcacacccccgcccacccggcgcacggagcgctcccggggcccgccggcagcgccaagccaggcttgctgcagctacccactaacccctgcccgcttacccgatggccttggcggccgcggcctgctgcaaaaacatcggcaggctgggggtgagctggagaaccgaggggtctgaggagggggcagccgtgaggcaagagaccgccctcccgtggcccaggcagccccatttgagcaggtccttaccactgaggatcttggcctgcagtttggagatctccttgaccgacggtatcagcagcgccacgaggcccttgagcagcgcctggcgcacatcgtaaccgaccaggtctttgatcaactcgatggctgcggaagggcagaggtgctggagagaggccccaggcccctccgccaccgaggaagcaaagaaccccgtgaaccaagtcgccactcgtcagtgtcctcctcttttactgatcagcactgtgcagggcgtg

SEQ ID NO: 2031 - DNA, 1644 bp, Artificial sequence
  DNA replication origin
acgggagggcggtctcttgcctcacggctgccccctcctcagacccctcggttctccagctcacccccagcctgccgatgtttttgcagcaggccgcggccgccaaggccatcgggtaagcgggcaggggttagtgggtagctgcagcaagcctggcttggcgctgccggcgggccccgggagcgctccgtgcgccgggtgggcgggggtgtgcgccgggtgagccccagggcgtcgccccagcccgaacccccggcccagggtcctggcgcgcaacgacatgagcatcgccgaggagctgctgtacctgcgcgtggtgcgtggcctaatggccgccatgggcaacacggaccacagcaacagccagcggctggccagcctcacgctggaggtgcgcgcggcggctggttagggggcgggaagggcggcggcacccgcagccccgtcgcccccgcagtcacgccgcctcgcccgcgcggcgcagtgcttcgtgcagatgttccccttggtggcggagcacgtgcgcaagtgcatgggggaggaactctaccagctcttcctggtaagtgcgcccttcctgccccgccgcaatgagcagatggcggctcggacagtgtgatgccccttcagacagtccccatcctggagcgcgccacatgcagagtggacctggccaccagctgcaggagggactgctctggcgtaggctcctccacccgccaccttcctgttccctttcctgccctttcggtcaggctgccgacccgccccccacctgcaacatccctctgccaagcccaactccaagtccagactgccctggcaccccagccgggtcccccttgctcctgtcctcagagcaacgctgaggacttgtacatgaaaatagacagcattcaggcggacatcttggcggccaacacagtcaatgttaccaaaggtgagtgtgggacgagggaagccgggcgcaggcgccgccagcacagcctcacgcccgcctttcctgcctgcagccctgtgcctccatggcagctcctacagcatgaacactctctatggctcgcgcgattcggctcagatggcctacctcacacacttcgaggaggatgtagaatcaaaggagtaacagcccctgtggcaaaccaggaaggccaaggctgcggggcagggaagcctggcaagaggaaggcgcctggggtcaagctcagagccactccacttggctccaggggggagacggggattaggcatcccagaggggcagaggaagagccgctggctgcgaagagtcaataaacagccttgatacctgtctgttctttgtgtgtgtggagggggaagggaggtcaagtgagagctatgatgctagattgtggtgcctgtgctcctcaagttaaaaagcaggtccaagtttaggacggtggcttgcacctgtaatcctagctactctgcaggctgaaggaagaagatctcttgagcccaagagttggaagccatcatggacaacaaagcaagaccccatcacaaaaacaggccgggcacggtggctcacgcctgtaatcctggcagtttgggaggctgaggtgggcggatcgcctgaggtcaggagttcgagaccagcctggccaacagggtcaaactccg

SEQ ID NO: 2032 - DNA, 2139 bp, Artificial sequence
  DNA replication origin
cacatcccagacgatgggcggccgggaagagacgctcctcacttcctagaccgggtggcggccgagcagaggctgcaatctcggcactttgggaggccaaggcaggcggctgggaggtggaggttgtagcgagccgagatcacgccaccgcactccagcctgggcaacattgagcactgagtgagcgagactccgtctgcaatcccggcacctcgggaggccagggctggcagatcactcgcggtcaggagctggagaccagcccggccagcacggtgaaaccccatctccaccaaaaaatacgaaaaccagtcaggtgcggcggcgcgcgcctgcaatcccaggcactcggcaggctgaggcaggagaatcaggcagggaggctgcagtgagtcgagatggcggcagtacagttcagcctcggcttggcatcagagggagaccggggagagggggagggggaaagggagaggttttttttttttttaattagagacagtgtcttgctatgttgcccaggctggtcttgaactcctgggctcaaagatcctccctccttaacctcccaaagtgctaggattacatgtgtgaaccaccaagcccggcctcctgttcttgacgatctgcctgcctcagcctcccaaaatgctggtattacaggcatgaaccactgtgcctggccaggaaaggtcttgtttgaagaactgatgactggaaggcagtgggggagaggagcatcagaagaagttgaagaggtggggaggggcaaaatcatagagcatcttgtggcctgtagtaataattttggcttttatgctaatgagaagtcattgaaaagttttaagcaggggactaacatgatctgatttacattttacttttttttttttttttttttgagacagaatttcactcttgttgcccaggctggagtgcaatggtgcgatctcggctcaccacaacctctgcctcccaggttcaagcaattctcctgcctcagcctccaaagtaactgggattacagagatgcaccatcatgcccggctaattttgtatttttagtagagacggggtttcaccatgttggtcaggctggtcgtgaactcccgacctcaggtgatccgcccacctcggcctcctaaagtgctgggattacaggtgtgagccactgcgcccagcctacattttacttttatgtcagtcaaacttgctattgtgtggagagtagatttgaaaggggcaagacagaaggcagagaccgcttagtaggcaagagattatgctggcataggccagggtagtgatactggattggaagtatggctgaaagaactgattcaagataccccatgtttgggaagtgaagtgaatgggttttgctgatgagttggatgtgaatgacaggggtggtcatggatgactcctggtttctggctagagcacctggctggatgatggaccatgtcctgaaaagggaaagtgggattgtgaaggaatgagttgggggttaagtccagggtttcattttgttcattttgaatttgagatgtctacaagacatctgagtgtaggtgtcaactgagcagttggatatacaaactgggagctaaggtagaggtcaaagcaagagattgagatttggcagtctgcattatgtagatggtatttggagtcatgagctgaatactatctaggaaaagaatatagatggagatgagaggaacatgtataattgagccatgggacttgccaatattttgaggtagggcaggggaggaggagccagcaaaggagatgggattagggtggtttgaagggatgaagaaaacaaaagagttggggggagttccttagaagtcaagggatggaatgaagaaggtgaaagtaactctgaagagctactcaagaggccaaataagatgaggacattctagtatcctttggatttattagcacctaagtcattgctgaccttgtgcagtcttggtgaactattgagggtgagaaccagactagagagacaagaatagatggaatattgtttagggatatgctgtggtttgaatgagtcccccaaattttatgtgctggaaacttaatcccccaattcacatattgatggcatttggaggtggggcc

SEQ ID NO: 2033 - DNA, 1450 bp, Artificial sequence
  DNA replication origin
agaccctcctaggctcgtggccctaggcgcggcagctgacacgtaagtctcgtcgcccgacgttgtttcggcgctcagaaacaacgtaaagtaaaggggcggggcagcgttttacaaaccgaaccgtgaatctttgcggtttctctttccagccagcgccgagcgatgggtgagtgtcgctctgcattgaggcgggtgaagggaggttgagctcaatcaggccccatcctgcttcacagcctactgaggagtccagacgccccgacccccggccagggacagccacgaggagtggtggccctcgggtttcggccgcccagcccgtctctgggggctgcgaaggctctgggctccgggttccgggccgcgggctgcgggctccgagcggcgccaacatggctgccgcgaggaggaggccccggcctggccgcacgtgtatgatgacaactcggtaatgctgcatactcccgagtgcgcggtggggaagccaaccttggagagctgagcgtgcgaccggcccggcgcgggggtctccgggagctggcgagtcgctagcaccgagtcacagtggctcaagcttccttccccgcttccacatgcaggcatctctcgggacaactggcacaagcgccgcaaaaccgggggcaagagaaagccctaccacaagaagcggaagtatgagttggggcgcccagctgccaacaccaaggtgggtgcgagcgtgggcctgtccgcctgggaggtcgccttcccccgctctccagcgtgctcgggtctttccgtgtgacagttgtgcgttctttcttgggctctgatttctctgtagtagggcctgggtgtcctgtccccctttagctgttggataagtaagtaccaaagagggaatgctccctcaggcccccaaacctggagcttaggatttcagagagaaggatactgtgtggggacttgagcttctggagagggtggcgcctcgcgtcatagtcagaagcctagtcttgttttttttacagaggcttaattttcagcatttggggtcaggctttcctcttggaggcaagtagggtgatgaaaaagaatccttaggcgtggttgtggccgtcttggtcacctgtgtgccacttgccaatgcaaggacttgtcatagttacactgactgttgcctcctcccggcccaggttcctctccctcacttgccttgctctccttggtaacctagttcctgtaaccttgtgttttccagattggcccccgccgcatccacacagtccgtgtgcggggaggtaacaagaaataccgtgccctgaggttggacgtggggaatttctcctggggctcagagtgtgagtgaggccctttgggagtgggtgggaaaacgcacctaaacggtcttaagattcaccaagtgggcctggcgcggtggctcacgcctataagcccagcacgttgg

SEQ ID NO: 2034 - DNA, 906 bp, Artificial sequence
  DNA replication origin
ggctccaccttcaacctgcggtgagtggcttgcactgggcctgacccggcacgcgggtcctcgctcagcctctggggcaccgatgcctcggtccttccccgagagccgatcccgcgtccccgctcccgccctgtgccccggctcagcccgccctcccgcccgcagcatgagcgacgaccctgagcagagcctgcaggtggaggcgtcccccggatctggtcggcccgcgcccgccgcgcagaccccgttgctcggccgcttcctgggcgtaggggcgccctccccggccatcagcctccggaacttcggccgcgtgcgaggcaccccccgccccccgcatctgctgcgcttccgggcggaggagggcggcgaccccgaggccgcagcccgcatcgaggaggaatcggcggagtccggggacgaggccctggagccctgaggtctcgcctgcccccgcccggtttcccccacccactgccctccttccctcccgtgcccggtcctgccagccagctctattagagcagcttttcctgtgtgccttgaaggccagagcatttagggacagaacttgaaagagaagatggcgaaaagggcctgagccagggctgggaatgtgtccactttggtgggagagaaggtcggttgcttgggggacgtgaagctagaaaaataaatgagcccaggcatagaggactagagcccaggtgcacggttagcttcacagcaacagggagctaggccattggttctcaaacttaaggaaggatcagcatcacggaaggtcttgtcaaaagagtgctgggcaccactcccagcatttctggcacgttagatttgggatggcgcccaataacttgcatttctaacaagttcccaggtgatgctgtgctgcttgtccaggaa

SEQ ID NO: 2035 - DNA, 975 bp, Artificial sequence
  DNA replication origin
cacaggaaaagctgctctaatagagctggctggcaggaccgggcacgggagggaaggagggcagtgggtgggggaaaccgggcgggggcaggcgagacctcagggctccagggcctcgtccccggactccgccgattcctcctcgatgcgggctgcggcctcggggtcgccgccctcctccgcccggaagcgcagcagatgcggggggcggggggtgcctcgcacgcggccgaagttccggaggctgatggccggggagggcgcccctacgcccaggaagcggccgagcaacggggtctgcgcggcgggcgcgggccgaccagatccgggggacgcctccacctgcaggctctgctcagggtcgtcgctcatgctgcgggcgggagggcgggctgagccggggcacagggcgggagcggggacgcgggatcggctctcggggaaggaccgaggcatcggtgccccagaggctgagcgaggacccgcgtgccgggtcaggcccagtgcaagccactcaccgcaggttgaaggtggagcccaggaatgagggccgcagagactcggccgccgtggccacagtgtagggtggctgcggctggtcctcatcccagtactggtccttctcagcggggggaaggttctggtacatttcgtccacggatagcagggacacctgggccaccagcaagttacaaggatcctcctctcctctccttcccacggccgggctgagagctgaccgggagagggggcccaggagctgccctggactcctgatcctgatgcttgctcacctgcaagttgcggtctatgagctgatttgtctcaaagtcgtcatcatcctcaccaaatgggttgatgatctgttcagccacctataggtggcagagacagggttttctgggttcagagccccactctttttccccaaagtcggggcagcccctctgcccacatctccacagagcaggctgg

SEQ ID NO: 2036 - DNA, 1065 bp, Artificial sequence
  DNA replication origin
atttcgtccacggatagcagggacacctgggccaccagcaagttacaaggatcctcctctcctctccttcccacggccgggctgagagctgaccgggagagggggcccaggagctgccctggactcctgatcctgatgcttgctcacctgcaagttgcggtctatgagctgatttgtctcaaagtcgtcatcatcctcaccaaatgggttgatgatctgttcagccacctataggtggcagagacagggttttctgggttcagagccccactctttttccccaaagtcggggcagcccctctgcccacatctccacagagcaggctggcatgcccatctgcagtgcccaccttgagccagccagcatagaagaagaactgcagcagagtggtgagaggcacgtacatgtccgggtctcccagggctggggctggctcctggcctggcttcagaagcttctgaggtttggcagcccctgcctctggctccacaaactggcggccaaccagggagagggcaaagaaagagtagacggctatggtcaccacctggagaatgaagagccaggctcagtgcaggatgcagcgggccaaggagaaatgctgcccctgcctctgaggatctatgggaagtctgacaagtaatcaaacatgtatcctggtgtggcagtaccagtggggacagggtcaccttgttgggggtggtggggggcttttaggatgaacccggtgcctcaggggactgaaatggccaggcaagtaccatcgctaattcttctcatctcacacacagcacaggacatacagtaggcactgggactcgggaggggagaggcagttacttgggtgtagacgagggggatgctgatccagtcatagtggaatagcatgctgcacttggctcggtacttgttcagctcctgggggaacagcaggaacaggaagtcagcagaggtgaggaaggaacaggggtgcccagcacaaactaggcctgggcctggccaggaggctctttctcattctgccctcagaggtgtattaagatggggtgcttgaatcccagctc

SEQ ID NO: 2037 - DNA, 1094 bp, Artificial sequence
  DNA replication origin
cggcgaggaggcggggtctggcagtgcgttgggtgggggaggagcttctgggtgatgtaaggccgggaatgggagtggcctctcctcgactcgctgctaggaagggggcgggactctcggtgaccagacgccggggagggggcaggcgttcattgataaaacgctgggctcccctgggcgccagcgcagcgtagcaaatccaggcagcgccacgcgcggccggggccgggcggaaccgagaagccgggaccgcgctgcgacgcgccggccgcatggagcctgccgccggtttcctgtctccgcgccccttccagcgtgcggccgccgcgcccgctcccccggccgggcccgggccgcctccgagtgccttgcgcggacctgagctggagatgctggccgggctaccgacgtcagaccccgggcgcctcatcacggacccgcgcagcggccgcacctacctcaaaggccgcttgttgggcaaggtgggccgagggacgtccgcggggtggtgatggtggaggtgggggtcccggccggcctcttttctggcgccgagcagggcgtgggcacttgacccccaacgcggggacgcccgcgggccagactcggcccccctggaacaaccagcctgatgccccctcttcacaggggggcttcgcccgctgctacgaggccactgacacagagactggcagcgcctacgctgtcaaagtcatcccgcagagccgcgtcgccaagccgcatcagcgcgagaaggtgggtccaggctcagcgggcgaggggtggggtggggacggtggcatgggaaccatggaaggatgacgactccgcgccctcatcgcagatcctaaatgagattgagctgcaccgagacctgcagcaccgccacatcgtgcgtttttcgcaccactttgaggacgctgacaacatctacattttcttggagctctgcagccgaaaggtgaaagatggtgattcccgcagggatgagagtgagggagagaagacagtcttttttttttttttttttttttttgagatggagtcttgctctgttgcccaggctggagtgcagtggcgcgatctcggctcac

SEQ ID NO: 2038 - DNA, 1969 bp, Artificial sequence
  DNA replication origin
cagcctcctgagtagctgggattacaggcatgcaccaccacgcccggctaatttttgtatttttagtagagacagggtttcaccctgttggtcaggctggtctcaaactcctgaccttgtgatacacctgccttggcctcccaaagtgctgggattacaggcgtgagccactacacccagccgagaagacagtcttaagacccaaagctggggccctgtttcttcctcagggagcacagatggagggggagggggagggagggctcaccaggggctgaggcagtggctctctgcagtccctggcccacatctggaaggcccggcacaccctgttggagccagaagtgcgctactacctgcggcagatcctttctggcctcaagtacttgcaccagcgcggcatcttgcaccgggacctcaagttgggtgagactcctgagcctggaggatgggaggttggggagggagggagggagggaggaaggaaagaatctgacacacctctcttgccccatctaggaaattttttcatcactgagaacatggaactgaaggtgggggattttgggctggcagcccggttggagcctccggagcagaggaagaagtgagttttgaggaaaggggccctgtgtgtgatacagatgacatgcgtgatagacagtgcatatgtatgtgggaggcaaggtgactgcctgatgtgtgcatgagataaatgggaagggatgatgggctgttcatgcatgtgtgaaggtggaggtggcagcctgtgttaccgagaccggtggagagggggaggatcctataggtgtatgacacagatagggtaggtgactctgagtccctgagacagatgggggtatacagattcttggaggcacatgacttaccctttgtgtggatgggggaaggtgacaggcagcgtgtatgtgtgtgtgagagacagactgagagtgtggaaatggtgggatatgacattgtgggtgtaagaagaccctgctgtggccatcatactttgtgtgtgtgacacagatagcgtatgtggcagatgagtgtttatgggggttgtgacagctggtgttggtgtgtgtgtggcacaaaccgtgggaggtgacagcctgatgcctgtctgacagacaggagtgcaggaagggggaagggatcagctgtggactctctgtgttgaccctagaggagaggactgggctgggggtcaggccctccccctgtcatgaagagcagctgagcagctgggccaggcgggtgggcggggactcagctgccatccctggcatccattgtcccaggacaagcaggagttctctggcctttggtgacaggcagctgctttgtctggactaacagtgggggaaggagtcggggggctgctgggctgggtctcagccttctctcctcctccccaccctctttcaggaccatctgtggcacccccaactatgtggctccagaagtgctgctgagacagggccacggccctgaggcggatgtatggtcactgggctgtgtcatgtgagttgcagggtccaggttcagcagcagacaggtggtgggtgtgtgggtggagcatctcctccactttactcctgaccccttggccctgccctataggtacacgctgctctgcgggagccctccctttgagacggctgacctgaaggagacgtaccgctgcatcaagcaggttcactacacgctgcctgccagcctctcactgcctgcccggcagctcctggccgccatccttcgggcctcaccccgagaccgcccctctattgaccagatcctgcgccatgacttctttaccaaggtctgtggctccccagacctctaagtccatctgtgtattcccagggattgaaagggggcaggtgacaggacccctggagcctctcttctctgttcacatggttcccctccctagggctacacccccgatcgactccctatc

SEQ ID NO: 2039 - DNA, 877 bp, Artificial sequence
  DNA replication origin
ttctggcccagcccctgtcagcctggtagagacagcacctgaagacagctcaccccgtgggacactggcaagcagtggagatggtgaggagccagggaggatgagaggtgatagaggttgctggagctgagatcaggggcgagagggaaggagtgggcagaggggcctggcctgggtcctggggtgctaattcctaaatctcagtgccctgtctccttcaggatttgaagaaggtctgactgtggccacagtagtggagtcagccctttgtgctctgagaaattgtatagccttcatgcccccaggtaagggtggggtctggtacatgctgctgtggtgggagttctgtggctgggaggccaggagcaggtgctgactccctcctctcccatgacagcggaacagaacccggcccccctggcccagccagagcctctggtgtgggtcagcaagtgggttgactactccaataagttcggctttgggtatcaactgtccagccgccgtgtggctgtgctcttcaacgatggcacacatatggccctgtcggccaacagaaagtaagtgctgttatggggtgccttgtattcaggccactaatccagcagggccgcaccctcgtgagtgctcctgggctcaggggtctgggtttctcagaggaggggcattggtgcagggctccctctgacctctgcctccccattctaggactgtgcactacaatcccaccagcacaaagcacttctccttctccgtgggtgctgtgccccgggccctgcagcctcagctgggtatcctgcggtacttcgcctcctacatggagcagcacctcatgaaggtgtgagggctggggctgtggtacattgaaacctaaccc

SEQ ID NO: 2040 - DNA, 1538 bp, Artificial sequence
  DNA replication origin
ccttgtattcaggccactaatccagcagggccgcaccctcgtgagtgctcctgggctcaggggtctgggtttctcagaggaggggcattggtgcagggctccctctgacctctgcctccccattctaggactgtgcactacaatcccaccagcacaaagcacttctccttctccgtgggtgctgtgccccgggccctgcagcctcagctgggtatcctgcggtacttcgcctcctacatggagcagcacctcatgaaggtgtgagggctggggctgtggtacattgaaacctaacccatcctggccgggtgcggtggctcacgcctgtaatcccagcactttgggaggccgaggcgggtggattatgaggtcaggagatcgagaccatcctggctaacaaggtgaaaccccgtctctactaaaaatacaacaaattagccgggcgtggtggcgggcgcctgtagtcccagctactcgggaggctgaggcaggagaatgggcgaacccaggaggcggagcttgcagtgagcagagatggcgcaccattgcactccagcctgggcaacagagcgagactccatctcaaaaaaaaaaaataaagaaaagaaaactaacccatcctgatccctctgattcccccttggtggtggttggggttgctgaaagctagaggataaggcatacactaatggggagggggctgtctcacgctggatcagtgacctgccctgatcctgctcccagggtggagatctgcccagtgtggaagaggtagaggtacctgctccgcccttgctgctgcagtgggtcaagacggatcaggctctcctcatgctgtttagtgatggcactgtccaggtaagagcctatccaggagttgcgggaaggtctgggaggcccagggtgctggggaggaagctgggcccggagcctaggtcctgaccactgtcatgctctgtgtgcaggtgaacttctacggggaccacaccaagctgattctcagtggctgggagcccctccttgtgacttttgtggcccgaaatcgtagtgcttgtacttacctcgcttcccaccttcggcagctgggctgctctccagacctgcggcagcgactccgctatgctctgcgcctgctccgggaccgcagcccagcctaggacccaagccctgaggcctgaggcctgtgcctgtcaggctctggcccttgcctttgtggccttcccccttcctttggtgcctcactgggggctttgggccgaatcccccagggaatcagggaccagctttactggagttgggggcggcttgtcttcgctggctcctaccccatctccaagataagcctgagccttagctcccagctagggggcgttatttatggaccacttttatttattgtcagacacttatttattgggatgtgagccccaggggggcctcctcctaggataataaacaattttgcagaattggactccccctcactcgcagtagagcccgtggaccgtggccaccgcgaagagcgaggtgttggtgta

SEQ ID NO: 2041 - DNA, 1273 bp, Artificial sequence
  DNA replication origin
aagtcatccaagccccaccctaactctgcgccgggagcggaaatgtttgtccttgtcgaggccgatggggagacaacagagccatgacgtgttccttcctgtgggcccagactctggattcctgagccaccacccccgcagcctcaagatctccccctaacctaggcctctgtgacttgttcacgaatggccagtcatctggccattccacaaggggagaaaatgggccctggctcaagagtcctggggtaggacaaagcctttctgaccacagccttgctctacatctgcccctctgttgcctgcgcttaggaagtttgcctctaagctgcaagaccctgtcggccgctctccctgatgactcaggggcaccccatgctcagcacatgctcacagcaacaatgctctcaggttaagccagagccagactggagggagggatcctgggagggaggagtgtttgctctagcaacccatggcaactccacaacacaggtctttcccctcccacttgcccttcaggccagcggggccagggctgtgcagccaggacagaactcagaagccaaagcctgcgggtgactcaggtgcctgagggagtttcgggagcagagggcagccatctcagaactgattctggaggaagtgggatcagaggccaaaggcagaaggtggaagggggcttcatgagtcatctgccctcagcctgggccaggtgtaggggagatctttgtgccagccaccctagagtagatctgggtggaagatgactggattcaacacccccagggctggaaggatctgtggggttgaaggagctgagtctgtcagtccttcctggttaggggttggaggctctgcctccacagtccaggctgaggcagaggcctgcctctccttccagagaagtcgggtggaagggagaaatggcagtctctaagactccgagcgtacctggctaacttccatagtgcccagagaaggagctcagtcggcaaggactagccgaggatcccagtcctagcagcctcctgtcccctgctcatgtgtctaacagcctttaaccttctcagcacctaggaacccaggcagcctgggactatctgatccacttgttctaaaacacaggtaagaagggggtagaaggtaaaaacccttgacatcactgagcaagaggctggggtgggtagacagatgcctggtgaaggccaccctgagtgtggttcctccagccagcaggtccatggccagcaggcctctgcccccgggacgc

SEQ ID NO: 2042 - DNA, 968 bp, Artificial sequence
  DNA replication origin
accaggaaggactgacagactcagctccttcaaccccacagatccttccagccctgggggtgttgaatccagtcatcttccacccagatctactctagggtggctggcacaaagatctcccctacacctggcccaggctgagggcagatgactcatgaagcccccttccaccttctgcctttggcctctgatcccacttcctccagaatcagttctgagatggctgccctctgctcccgaaactccctcaggcacctgagtcacccgcaggctttggcttctgagttctgtcctggctgcacagccctggccccgctggcctgaagggcaagtgggaggggaaagacctgtgttgtggagttgccatgggttgctagagcaaacactcctccctcccaggatccctccctccagtctggctctggcttaacctgagagcattgttgctgtgagcatgtgctgagcatggggtgcccctgagtcatcagggagagcggccgacagggtcttgcagcttagaggcaaacttcctaagcgcaggcaacagaggggcagatgtagagcaaggctgtggtcagaaaggctttgtcctaccccaggactcttgagccagggcccattttctccccttgtggaatggccagatgactggccattcgtgaacaagtcacagaggcctaggttagggggagatcttgaggctgcgggggtggtggctcaggaatccagagtctgggcccacaggaaggaacacgtcatggctctgttgtctccccatcggcctcgacaaggacaaacatttccgctcccggcgcagagttagggtggggcttggatgacttcctcagttcagggctatgtgcgggggaggggaggcccactggctcagctggtaggcaccaggccttataaagtggcagtgactcggcagtgaaccccgagtccagcctcgtgacctttgctgaccc

SEQ ID NO: 2043 - DNA, 996 bp, Artificial sequence
  DNA replication origin
aagaagcagggtgatggaagtcaccaccctttggggaagagctcagatctgagaccatgaggacagagaacttcattctagctctcctgagcagcccggcctcctgtaaactctacccctggtttcagacaccactggcatcccggccagcagggagcagccagcacccccgaggcttcctgtcagggactatggctcaatctctggagctttgttcttcttgtgaagcctcagttcccagaacaggtcatctgttcctcttcttctagcagtgaggcctcaataccaagctgagtgagtggagggaggaggggaatcatgacccaccatctctaaggatcccaggggctgagaatcattttcttctgccaggggccaaagtccaaagaaggaagggctttgcctgagctcacacagcagctccaccccgccagccttgcctctggccctcagggtctcacagacactgagtgaccagtagccatgttccacatttgacctccccatagcctaagttcaccagggaggatggccaagttctaattcccagcctcttctcaccagggcctccttagagtcctggggcccacagagccagctaagaaaaacccgcaggcagggcccacccctcacctgtatcgcgggttgttgacaaggcttcggagtgctgcggaaaaaggttcagctttcccatgcacgaccagtcccaagggctccatgagtgagaaggggttggggtggaggagggagcctgggaggcctggccaggccctagagctggtgaggttagcaaggcctgagagggagaagcagggacttgggaggcctgtttgctgagaagctgaagtttaggagtggagcaggagaggcccaagctcctgaaggcatcagaggccagaggctcggggacaggaacagacacagggagggggccaggagaagctgaggctggagtggcctatggtcctgggaagaagctggctggctggcggcggc

SEQ ID NO: 2044 - DNA, 1406 bp, Artificial sequence
  DNA replication origin
gttaattgcagctacttgagaggctgaggcacaagaatcgcttgaacctgggaggcagaggttgcagtgagctgaaatcgtgccactgcattccagcctgggtgacagagcaagacttgccctcaaaaaaaaaaaaaaaaaaagaaagtgtgatagagaagcgtgaatggtgccgagactgtatggggggactctccagtcccgccactagggagaggagaagacttcccagaggaggaaacatttgtgttcgatctggtagaacaaataggattttgttcctaggggaagtgggaagatggtattctagtcacagaggcaccaaaggagctagtgagacatttggtgtgtctgaactgtgaggagagggcaagacgagactgcagaggacgccagggcctggttcatgtagggccctcaagcttttggacttcttttaagcagagggcagtggagattcactgaaggtttccgataagggagtgaagaattggaaactcaggggagaagggattggaagaggtggagaggactcgctagtccagtcaggaggctagtgcagcagtcaagagatgagagatgtcacggatgaaattcaagtttctgctaaaaatagaagtatccttgagtcaggaagggaacaagtggaggaagataagcatcctgaaagaaggggagaattttgcatggcctttatctggttttgattagtggcgaatgtactagaaggtgggtggctgggcttggttttgctagtctccagttcctgtaagcctgctgtctcaggctctagcaattccctgcctcccctggcctgggtcaggatgggtctggggctgctgggtgactcaccgctccaagcctgctcactgcttctggggtggaactagtgtcttggagcagggacaccgccacccaacccacattcatttctgttcccagctgtgcctgcagtttgtggtgaaggtgctggatgtggacttggtttgtgaggccctgcaggtgggtgctgctggacaggcatggtaggagtctggctctgtgtgtggaaatgggctcccagcacctgggagcctgggcctgctgtgtctggcctggaaataacttgggtacatggtggtggtgggggtgctccaaggatgtttataggatgaattctgtgcctagatctgtgggatcctgggtgtatcagcagggtcaggtgcaggagcaggtgttgaaggggctggaggtctttgctggtcttctgtctgtcagggctggggaatggttctcagcttgacttggggtagggaaagggtggctgtagactttagaagtcaagctgggtcaggcacaacggctcacacctgtaatttcagcacttttggaggccgaggcgggcggatcaagaggtcaggagatcg

SEQ ID NO: 2045 - DNA, 893 bp, Artificial sequence
  DNA replication origin
gatgtttataggatgaattctgtgcctagatctgtgggatcctgggtgtatcagcagggtcaggtgcaggagcaggtgttgaaggggctggaggtctttgctggtcttctgtctgtcagggctggggaatggttctcagcttgacttggggtagggaaagggtggctgtagactttagaagtcaagctgggtcaggcacaacggctcacacctgtaatttcagcacttttggaggccgaggcgggcggatcaagaggtcaggagatcgagaccatcctggctaacacggtgaaaccctgtctctattaaaaatacagaaaattagcctggtgtggtggcatgctcccagctactctggaggctgaggcaggagaatcgcttgaacccgggaggcagaggttgcagtgagccgagattgcgccactgcacactccagcctgggcaacagagtgagactctgcctcaaaaaaaatcaagcctaggtcccaggtggggtttgaaggccatggcgtggtctcctgtagggaagagcaggttgtagagtgagtccacgtgtgtgtgtgtgtgtgtgtgtgtgtgtgtgtgtgtgtgtgtgtgtgtgtgtagcaggctttcattgggtctagtttcctggagggctgagggccctgtcagcctccccagctagggctagggtcaggcttgcagtggtgggtcccagtgagcaggctgggctacggcctctccagtctccaacctgatctccctcattctgctcgcaggtggccgtaacctttggcctggggcagctgcaggagcgctgcgtggctttcatagaggcccacagccaggtactgctcccttcatactcctcaccctacgcaccgcattctgctcctccctgacccatttgc

SEQ ID NO: 2046 - DNA, 973 bp, Artificial sequence
  DNA replication origin
tgcagtgagccgagattgcaccactgcactccagcctgggtgagaataaggttgtgtcataaataaataaataaagtcatttacttaacatttacatagcactgattatctgacagagactgaggaagcagaaacgagtaagacaccactccaggccccagggatctttcttgagggagattcacatcctcgggaaaacaagatgtatagtgaatgaaggaggtagcagaggggtctgcagtaactgagtaaggtatggagctagaggactaatacctccaggataaatgaatttatacaaagattgtatttgagagaagaggtgaggaaccactcactagtagttttgagtgccctgaaagtgaaatagattgaattttgtcctggaggtcaatgggatgttccaggacttaagccccataggactgacaatcaaaaacaggtctggctgcactgtgggaaatggattgagggggcgctggagtgaaggcaggaaggctgtgagacgtgtcagacaggacaggttgaacctggggctgagagaactgaaccaactggaaaggtctcttaaggtctcttacaaggtaaaaagagacctaaggcaggtgtgaagagcgataaggcaaggatgagatccaggtttctggcgtgggtgtccacggaaatgagaaacacgatgggggcagagctggggaaaagctggggagatcaatttctcgccgagcctgtggtgtctgaggggcattcagggagcgatctccaggggggcaggtctggaatgaaagaaggagctgaggccgggcatggtggcgcacacctgtaatcccagcactttgggaggccgaggctggcggatcacatgaagtcaggagttcgagaccaacctggccaacatggtgaaacccccgtctctactaaaaatacaacaattagccgggcgttgtggtgcatgtctgtaatcccagctactcag

SEQ ID NO: 2047 - DNA, 1445 bp, Artificial sequence
  DNA replication origin
ctattcttcccaatttccaatcctttacaccctgaattctgcaactcttagtgactcactcaacaattattaagcacctatttattgtctggtgaagaaggcagactttcaagtacataagtttttgtgtcataaatgcaattatacatatataaattgagttgttatgcagagcacaaagaagcaattatctgccaggagagagacatgaatcaaggaaggtttcaaagagggggtaggctgggtacagtggctcacgcctataattccagcactttggaaggcccaggtgggcagatgacctgagcccaggagtttgagaccaacctgggcaacatggcaaaaccctgtctatacaaaattacaaaaattagctaggtgtggtggtgcacacctgtagtcccagccatttgggaggtcgaggtgggaggatcccttgagactgggagctcaaggctgcagtgtgctgtgaaggcaccactgcactccaacctgggcaacagagggagatcctgcctcaaaaaaaaaaaaaaaaaggtgggttttgggggtgattcaagttcagtttttgaagattatctgccaagacaaaaggaccaaaacatgtacaaaggcaggaacgagggaacactgatgtgagggaactatgggagagaaggctttagctagatcacacagggccctgtgctccaagtgggccttgtgctttggagctatcagatttgcatgttagagaaatgactctggtctcagtggagagagtggactgaagagggcaagaatggaagccgggaagagtgaacagaagaaatcttgggctttgattgggtcggaaagaaagtgtggccctacccactttgatgccatctctaagacctactgctacctgacccccgacctctggaaggagactgtattcaccaagtctccctatcaggaattcactgaccacctcgtcaagacccacaccagagtctccgcgcagaggatccaggctccagctgtggctacaacatagggtttttatacaagaaaaataaagtgaattaagcctgaaaaaaaaaaaaaagaaaagaaaaagaaattgtggccctaggccgggcgcggtggctcacgcttgtcatcccaacactttgggaggctgaggcgggcggatatcctgagctcgggagtctgagaccaaccggggcaacatggcgaaacccgttctctaccaaaaatacaaaaagccgggcgtggtggtgcatgcctgtgatcccagctactcgggaggctgaggtgggaggatggcttgagcctggaaggcggagcctgcaagccgagatggagccactgcactccagcctgggtgacagagtgagaccccgtcttaaaaaaaaaaaaaaaagtgtatccctaacagagcccgcaaaggccctttctcagcgtaagcctctggacttaca

SEQ ID NO: 2048 - DNA, 1677 bp, Artificial sequence
  DNA replication origin
actcttaacgagcatgctgccttcaagcatctgtttaacaaagcacatcttgcaccgcccttaatccatttaaccctgagtggacacagcacatgtttcagagagcacagggttgggggtaaggtcgcagatcaacaggatcccaaggcagaagaatttttcttagtacagaacaaaatgaaaagtctcccatgtctacttctctctacacagacacagcaaccatccgatttctcaatcttttccccacctttcccgcctttctattccacaaaaccgccattgtcatcatggcccgttctcaatgagctgttgggtacacctcccagagggggtcgtggccgggcagaggggctcctcacttcccagtaggggcggccaggcagaagcgcccctcacctcccggatggggcggctggccgggtggggggctgacccccacctccctcccggacggggtggctgccgggcggagacgctcctcacttcccagacggggtggctgccggacggaggggctcctcacttctcagacggggcggctgccaggcagagggtctcctcacttctcagacggggcggccgggcagagacgctcctcacctcccagacagggtcgcggccaggcagaggcgctcctcacatcccagacggggcggcggggcagaggcgctccccacatcccagactatgggcggccgggcagagacgctcctcacttcctagatgggatggcagcggggaagaggtgctcctcacctcctagatgggatggcggccaggcagagacgctcctcacttcccagacggtgtggcggccgggcagaggctgcaatctcagctctttgggaggccaaggcaggcggctgggaggtggttgtagctagccgagatcacgccactgcactccagcctgggcaccattgagcactgagtgaaccagactccgtctgcaatcccggcacctcgggaggccgaggctggcggatcactcgcggttaggagctggagaccagcccggccaacacagcgaaacccgtctccaccaaaaaaatacgaaaaccagtcaggcgtggcggcgcgcgcctgcaattgcaggcagtcggcaggctgaggcaggagaatcaggcagggaggttgcagtgagccgagatggcagcagtacagtccagctttggctcggcatcagagggagaccgtggaaagagagggagagggagaccgtggggagggggagtgggagaggtagagggagagggagagggagagctacctaaggtgttttctgatctttagtgaccaaatctctgtccttaaggtgcccaaattgctgtctgctctctgtccagaagaaccaccagtccattcgtcagcccagattgtcagcaaacacctggtaagtgctagtgtggccaggacgggcatgagatgttctttgggagcatcgagacttgtttttgagaagccggattgaggcctttaagtcctgaacctcatcagccccagggaaatcacagtgggttctgagaataaaatctcactcaacaagactgcctgggcaagtaatgaccttgtaaggaagggtccattatagtgttgggactcagacacaggagctctcaatctcagcctgaaagactctagtcatgggtaaatgtgggactacctatgattctc

SEQ ID NO: 2049 - DNA, 932 bp, Artificial sequence
  DNA replication origin
cacaccgtctgggaagtgaggagcgtctctgcctggccgccatcccatctaggaggtgaggagcacctcttccccgctgccatcccatctaggaagtgaggagcgtctctgcccggccgcccatagtctgggatgtggggagcgcctctgccccgccgccccgtctgggatgtgaggagcgcctctgcctggccgcgaccctgtctgggaggtgaggagcgtctctgcccggccgccccgtctgagaagtgaggagaccctctgcctggcagccgccccgtctgagaagtgaggagcccctccgtccggcagccaccccgtctgggaagtgaggagcgtctccgcccggcagccaccccgtccgggagggaggtgggggtcagccccccacccggccagccgccccatccgggaggtgaggggcgcttctgcctggccgcccctactgggaagtgaggagcccctctgcccggccacgaccccctctgggaggtgtacccaacagctcattgagaacgggccatgatgacaatggcggttttgtggaatagaaaggcgggaaaggtggggaaaagattgagaaatcggatggttgctgtgtctgtgtagagagaagtagacatgggagacttttcattttgttctgtactaagaaaaattcttctgccttgggatcctgttgatctgcgaccttacccccaaccctgtgctctctgaaacatgtgctgtgtccactcagggttaaatggattaagggcggtgcaagatgtgctttgttaaacagatgcttgaaggcagcatgctcgttaagagtcatcaccactccctgatcttaagtacccagggacacaaacgctgcggaaggccacagggtcctctgcctaggaaaaccagagacctttgttcacttgtttatctgctgacattccctc

SEQ ID NO: 2050 - DNA, 1319 bp, Artificial sequence
  DNA replication origin
ggcctggggctgcgtgtgggcgccgcaggcccagcccccggtaccggctccgggcccctccgcgccgcccgcgacagcattgagctccggcgcggcgcctgcgtgcgcaccacgggcgaggagctgtgcaatggccacgggctctgggtgaagctgacaaaggtgcgctcttccctgcccaggacccggtaaaagacccctggggccagagaaacctctggctgtttgccttttctcccctgtattgagttggcattgcgttcggcgccctttgccctgggctgggcacgacaggcggctgggcagttccctgacggctgtccccatcctacgcgtcccggcaggagcagctggcagagcacctgggcgactgcgggctgcaggaaggctggctgctggtgtgccgcccggcggagggcggagcccgcctggtacccatcgacactcccaaccacctccagcggcagcagcagctctttggcgtggattatcggccggtgctcaggtactgcacttgaaggagcggggctggctgtcagaaggccgggccaggagggcttgggaacacttcagccacagcctggggtgggtgggatactggagcggaggcagggttaagagcagaaaggggcgggacgtgaagggggctcggagggagactgggagatagagccctgaagaaggctacacggcatggaggtagtgtcttgctgaccgctgatgtctccccatcccactccctactctgtgcccacaggtgggaacaggtggtggacctgacatactcacatcgcctgggatcgagacctcagccggcagaggcatacgcagaagctgtacaaaggctactgtgagtgagctggaatggggtggggaggaaggagctctgcgtctgggcccagtctaattaggggcttggggttgcttagctatgtacccccgacatggacctacgagtgcgacgaggacctgatccacttcttgtatgaccacctgggcaaggaggatgagaacctgggtagcgtgaagcagtatgtggagagcatagacgtttcctcctacacggtgggtgctggggctcctcccaccccaggcaagatatagtcacacccctcaaggctagatccagaaagaacccccacctgcaggccaggactaaaacagggtccccacaggccacactcagttcagctccccatcttggacgtctataggaccccttacatacccagcggccccctatcccataccagttgcctgttagcccaacttcactatgctttctctctggtgctcctggcccagagcacaagcccagt

SEQ ID NO: 2051 - DNA, 700 bp, Artificial sequence
  DNA replication origin
ctgggaagtgaggagcgcctcttcccggccgccatcccgtctgggaagtgacgagcgtctctgcccggccgcccatcgtctgagatgtggggagcgcctctgccccgcgccccgtctgggatgtgaggagcgcctctgcccggccgcgaccccgtctgggaactgaggagtgtctctgcccgaccgccaccccgtctggaaggtgaggagcgtctctgcccggccgccccgtctgagaagtgaggagcccctccgcccagcagccgcccagtctgggaagtgaggagcccctccgcccggcagccaccccgtctgggaaatgaggagcgtctccacccggccagccgccccatccaggagggaggtggggggcagcccccgcccccgcccggcagccacctcgcccgggaggtggggggcacctctgcctggctgccccatctgggaagtgaggagcccctctgcccggcggccaccccgtctgggaggtgtacccaacagctcactgggaaccggccatgatgacgatggcggttttgttgaatagaaaagggggaaatgtggggaaaagaaagagaaatcggattgttactgtgtctgtgtggaaagaggtggacatgggagactccattttgttctgtactgagagaaattcttctgccttgggatgctgttgatctatgaccttacccccaacccc

SEQ ID NO: 2052 - DNA, 1191 bp, Artificial sequence
  DNA replication origin
ctctttccacacagacacagtaacaatccgatttctctttcttttccccacatttcccccttttctattcaacaaaaccgccatcgtcatcatggccggttcccagtgagctgttgggtacacctcccagacggggtggccgccgggcagaggggctcctcacttcccagatggggcagccaggcagaggtgccccccacctcccgggcgaggtggctgccgggcgggggcgggggctgccccccacctccctcctggatggggcggctggccgggtggagacgctcctcatttcccagacggggtggctgccgggcggaggggctcctcacttcccagactgggcggctgctgggcggaggggctcctcacttctcagacggggcggccgggcagagacgctcctcaccttccagacggggtggcggtcgggcagagacactcctcagttcccagacggggtcgcggccgggcagaggcgctcctcacatcccagacggggcgcggggcagaggcgctccccacatctcagacgatgggcggccgggcagagacgctcgtcacttcccagacgggatggcggccgggaagaggcgctcctcacttcccaggctggtcggccaggcagaggggctcctcacatcccagacgatgggcggccaggcagagacgctcgtcacttcccagacgggatggcggctgggaagaggcgctcctcacttcccaggctgggcggccaggcagaggggctcctcacatcccagacgatgggcggccaggcagagacactcctcacttcccagacggggtggcggccgggcagaggctgcaatcttggcactttgggaggccaaggcaggcggctgggaggtggaggttgtagcgagccgagatcacgccactgcactccagcaaaaaccagtcaggcgtggtggcgcgcgcccgcaatcccaggcactcgcaggctgaggcaggagaatcaggcagggaggttgcagtgagccgagatggcggcagtacagtccagcctcggctgggcatcagagggagaccatggagagagggacagcgagacagagagggagggggagggggagagggctctatatcttttctttttgtagccaaacattaatcaatcctgtatcactctgttcaacaaaatgccgtatattacagcaatgagtttca

SEQ ID NO: 2053 - DNA, 1098 bp, Artificial sequence
  DNA replication origin
gctgggccacgaacactgccgcttagccggagagaccggtgacggcgagagcagctcctctcgctcacctccgtccgccattgctggggactgactgactgactgaggcggcggcggctgctcgggctgcggcggagaccctggccacggccacgcgccccgcgcaagcgcccagcggtggcgccgaggggggcggggcgagagaacccgcgagccagccggcccgagtggggaaccgcggccgggcccgggagcgcgccgcgagggcagacgcgggcggcctgcagggtagcgtgaggcggcgcgcggtgtcctggccgccgcggacgcgaagacaggcgggagcgagcgcgggcccgcggcgcgctccaggcgcaaacagcctagaacgcgagccgagcgctctcgcggatccggcgaccgcggaggggagaggagcgccggacgctctcgcacgcccgcccgcccgcccgcgcacctccaacccacctgccgccggccagacaggaatggactgtgtgactgaatgaaatggcggggccataagccatccaaggagccgcctccgtgaagttataggctcgcggggtacaaggagaaaaaaacaatccagctccaacggtactgatgtgacaggaggttgtcacagcagagcggaagatctggcagaaagacgctgggaaagaagacactaggggaaaacatcagaaagttcggatgatgaaaactcacctcacgccacaacaatgtaggataaagccggcggtcaccccaccccagagtgggacaaagtcgcaccaccccttgacaatggggcatcaagatcttatcgccacgggggttgcatcctggtggggtcttttggagggtttagcaccttgcatcctagaatacaaaacacttttgcgtgttttttggtagaattctctgatcccctacctccaatctgaattaggtctttcatgttttcctcacttggctcagtcttctacacctttacatagttgtatttttatatatttgtttaatgtctgactgtcaactccatgagagtgagaatcatgtctatttccttcactataatttatcctctgcctg

SEQ ID NO: 2054 - DNA, 958 bp, Artificial sequence
  DNA replication origin
aatgcagtggtggttcaagaagttttgcaaaggagacaagagccttgaagatgaggagcacagtggctggccattgggagttgataatgaccaaaagagcgcaaacatcgaagctgatcctcttacaactacacaataagttgccgaagaaggccgcccctactgggaagtgaggagcccctctgcctggccagccgccccgtccgggagggaggtgggggggtcagccccctgcccggccagccgccctgtccgggagggaggtgggggggtcagccccccgcccggccggccgccccgtccgggaggtgaggggcgcctctgcccggccgcccctactgggaagtgaggacccctctgcctggccagccgccccgtccgggagggtgggggggggggggtcagccccccgcccggccagccgccccgtccgggaggtgaggggcgcttctgcccggccgcccctactgggaagtgaggagcccctctgcccggccacgaccccgtctgggaggtgtgcccagcggctcattggggatgggccatgatgacaatggcggttttgtggaatagaaaggcgggaagagtggggaaaaaattgagaaatcggatggttgccgggtctatgtggatagaagtggacatgggagacttttcattttgttctgtactaagaaaaattcttctgccttgggatcctgttgatctgtgaccttatccccaaccctgtgctctctgaaacatgtgctgtgtccactcagggttaaatggattaagggcggtgcaagatgtgctttgttaaacagatgcttgaaggcagcatgctcgttaagagtcatcaccactccctaatcttaagtacccagggacacaaacactgcagaaggccgcagggtcctctgcctaggaaaaccagagacctttgttcacttgtttatctactgaccttccctccact

SEQ ID NO: 2055 - DNA, 1130 bp, Artificial sequence
  DNA replication origin
gaccattagacccctgaaaacttcactgatgtaagtctttgtcttttattttttttccaaggcagaagaatttttcttagtacagaacaaaatggagtctcccatgtctacttctttccacacagacacagtaacaatccgatctctctttcttttccccacatttcccccttttctatttgacaaaactgccatcgtcatcatggccccttctcaatgagctgttgggtacacctcccagatggggtggcggccgggcagaggggctcctcacttcccagacggggcggctgggcagaggcaccccccacctcctggacggggcggctgctgggcagagacgctcctcacttcccagacggggcggccgccgggcggaggggctcctcacttctcagatggggcggccgggcagagacgctcctcacctcccagacggggtggcggtcgggcagagacgctcctcagttcccagacgaggtcgcggccgggcagacgtgctgctcacatcccagatggggcggcggggcagaggtgctccccacatctcagacgatgggcggccgggcagagacgctcctcacttcctagatgggatggcggccgggaagaggcgctcttcacttcccagactgggcagccgggcagaggggctcctcacatcacagatgatgggcggccaggcagagacgctcctcacttcccagacggggtggcggcccggcagaggctgcaatctcggcactttgggaggccaaggcagtcagctgggaggtggaggttgtagcgagccgagatcacgccactgcactccagcctgggcaacattgagcactgagtgagcgagactccgtctgcaatcccggcaccttgggaggccgaggctggcagatcactcgaggtcaggagctggagaccagcccggccaacacggcgaaaccccgtctccaccaaaaaaatacgaaaaccagtcaggcgtggcggtgcgcgtctgcaatcccaggcactcggcaggctgaggcaggagaatcaggcagggaggttgcagtgagccgagatggtggcaatacagtccagcctcggctaggcatcaaagggagaccgtggaaaggggagatgagggagaggga

SEQ ID NO: 2056 - DNA, 2235 bp, Artificial sequence
  DNA replication origin
gatcctcacctgggctcagcggcaagtggcaaaagcccaggcagtcgtggaaccagcgcaaaagtgtgggggagctgccgggggtgcaggccaaggtcaggtggtccacgcggctgacccacccggggccaggcgcagaggacacgggcctgaagccgggtaggaagggtccgcggtagccagcgcgctccagcaaggtcaggctgaggatgccggcaggcgagctgaccacggcgtaagtggcggcaccctgcgcgtcccgcacgcgaacgggagggacaggcacgctgcagcccagcgctgccagctcccgggttgcagcgccggcgtccgccacgtcgaagcacaggtttgtggcgctgggcacggcgtgacgcggatccaggccgtacagcggctctccagaccctgcgccctcgttcaccaaaaagaccgcgtcgccgctgcgcagggctagctgccgccagccgtccacctcccgcgaagccaggggctggaagccgaagaggcgctgcaggttccgggctaggggctgcccggcgggcacgtggaaggcgatgtggcacaaacgaagggcgggcgcggccatggcgctctggacggcgacctagacttgtccttctggggccgcttacttgtggttggggacttcggggctctcagtcctgggctgatcgtccggagttggggagtccggctcaccccgcagagcgcgttcctcgctttcttccggaaagaagtcacccgccgacccctgagagctcgcggttctccctgcagcgccaccccagccaggagcagcgtctggaccaccgggtctcagtgagccgagctgctggttgtgagaaccacgcggtgcctgtgctcgcgccaagcaggagaaagagggcggagcccgtgactccgcctttgactccccaccccctcccccacaccctgtcgcctcggatactgcggggtcgccgcgctgctctttccccgggcctcacgcctggtcacatccttgggcactgagcctcccttccccagcccaggaactcacaatggctgccttcactcggcgccaggcactgggctcccactcatccccccaacctcacagcgaagggactcagcccgggttcagggaaagagttggaattctctctccacaagcacggaattttttagcactttcatgttttttctttaagttctggagtttgcctctaagtcttaatgttccctggaatacacacacacacacacacacacacacacacacgtttatatgttttgagacagggtctcactctgtcacccaggctggagtggcacaatcacagctcactgcagcctccacctcctgggttcaggcgattttccttgcctcagtgcacaaatagctgggaccacaggcggacgccaccacacccagctaattaaaaataatttttttttttagaaatggggtcttgctatattgcccaagctggttttaaacccctgggctcaagccatctttccacctcagcctcccaaagtgttgggcaatctctcaaccagtcctgtctctttcttcaatcacccttctgtcaacatcatttaaccccttgtcccaagcaagatttggaggaaaaatctgacggttcgggatctgaaaggaacagctgcctggctgtcattccccttccccatcctttgaggactggaacacaggccctccttgctctttgcagcttcctgacttggcattgagccagagatttctgtggtgggggcacttctggctctgaaacccagaattgtgtgagatgactggattgaggaatttgtagtcttctggaacttcaactgagtggcccttgaagggttagggaagggcatccaagaagggcaaagggcataagcaaaaactcagtaagagtgtgagccagactcttagaggagcaatgggccatgctgttagggaggcatttaggatgaatgccacagtccaaggcatcacaagaaatttttttgtcaggcagcctgatctactgggtttcattggcaagagggagaaggatgtcataggggacaggggctagctggatgtcatggtgttcaggcctgcaggcaggagggcagtacccaggagctggtcagggtggtaaaaggtacttggtgctactctgcagaccagtgaatgtgaggacatgagttccaaaagccagacggacctgggtttgaatcaccagcaacacttactgtctg

SEQ ID NO: 2057 - DNA, 1718 bp, Artificial sequence
  DNA replication origin
ctgcagcgcctcttcggcttccagcccctggcttcgcgggaggtggacggctggcggcagctagccctgcgcagcggcgacgcggtctttttggtgaacgagggcgcagggtctggagagccgctgtacggcctggatccgcgtcacgccgtgcccagcgccacaaacctgtgcttcgacgtggcggacgccggcgctgcaacccgggagctggcagcgctgggctgcagcgtgcctgtccctcccgttcgcgtgcgggacgcgcagggtgccgccacttacgccgtggtcagctcgcctgccggcatcctcagcctgaccttgctggagcgcgctggctaccgcggacccttcctacccggcttcaggcccgtgtcctctgcgcctggccccgggtgggtcagccgcgtggaccacctgaccttggcctgcacccccggcagctcccccacacttttgcgctggttccacgactgcctgggcttttgccacttgccgctgagcccaggtgaggatcccgagctgggcctcgaaatgacagcagggtttgggcttgggggactgaggcttacagccctgcaggcccagccgggcagcattgtccccactcttgttctggctgagtcccttccgggggcgacgacacgacaggaccaggtggagcagttcctggcccggcacaaggggccaggcctgcagcacgtggggctgtatacgcctaacattgtggaggccactgagggggtggcaactgctggaggccagttcctggctccccctggggcatactaccagcagccaggaaaggagaggcagatccgagctgcagggcacgagcctcatctgcttgctcgacaggggatcctgctagatggtgataaaggcaagtttctgcttcaggtcttcaccaagtccctttttactgaggacactttcttcctggagctgattcagaggcagggggccactggctttggtcagggcaacatcagagctctgtggcagtccgtacaggagcaatctgccaggagccaggaagcctaaggatgcccagggctgggtgcagccagctgtcctgcagctctggggagaccagcacagaactgaggaacatctgcaggaggcccaactagtgaaaggctttgcctccggggggcaggtgtgacttccatttcatcagtgcctgccagaagctgtgtctctcattgggctccaaagaggtgggattttttaaaactaaaacatttcttatatacagtctataataaatatgtaagatacaaagaacaataaaagaattacacactaggaaatagaacataaccaatactttcgagtcctccctgtgtcccgctgtgattctatttcctcccacccactcctcaaatcctgtcattattagccctttgcttttctgtattgtttcactccgtatgtaacataaccctaaataaattatttcgtatttgaggtaggaatttaaaacagaacaaatcttctcctgtgcttcctctccccctagggagcgaccactcaggtggggaggggctgggtgagagttgagcccaactacctactccagagtgatgccaccactccaattagagctgacctgagacgtaaacagagggtgttgtgtgtcagccactggcaggttctccctgtagctgccttgcctttctcctgggggttggagggcagatcagtctggacagaac

SEQ ID NO: 2058 - DNA, 1117 bp, Artificial sequence
  DNA replication origin
taatagctttaaagcgtctaatcacggtacccccacgagtagtagtcacacagcaaatcataggcaggagtggacaaacagcgctgggagcattaattctggtagatttggagtctgggcagggcctaagaggatgggatcagcggattgggccagccaaagggggcgggttcagagggaggagccagctgcctcccgctgcaagccccgagctttgaatcaagcgcggtagtttcagctgtagccaatcctagaacaaaatctttttgcgtcagttgttgctgaggcctagatctcacccagatcagttctagtcgctgctgcttgtacccgtcctcggcccttgcgtgtccgtccgttacgactcagaggacggagagaaagtctaagtcaccttcctcagtatccaggccggaaggagactctcagctactcgccctgaacatgcagagcagcactggcttccctgtctctggatgccgcaggggcgtcctgtcaggagttgtagtgtcaagattccagttcttcttatgcgacttgctggagaagcaggaagttgctgtttattggagaagtcgggctagggagggaaacaatcccgcggagccatatggagagggcaggaggtgtctagatagtggtaggccggcgggggacggagggtatgggtggtgagtcctggccctttaaacccgagggggaggatccggaagtggatgggcggggcgaagggtcctcgtatataaaagggccccggccgcgcggggtctctaatctgccattttctgtccctgagtgagtctctggcgtcccaaattgcctgtttttctcgcaggctctattccgttcgctggttcgccacctcaggggaacgatggccatggagtccacagccactgccgccgtcgccgcggagctggtttctgccgacaagtaagcgggactgtggaaagcttaaggcactggccagtccgcggggagggctaatggacgggggctccggagaaggggcagaccggtgggcgggagtacttgccttcccaagagcagctgtcgctgttcgggaaggcctggtcactggagcagtccttcttttgctgagagcctcgcgcagcag

SEQ ID NO: 2059 - DNA, 974 bp, Artificial sequence
  DNA replication origin
gcagaccggtgggcgggagtacttgccttcccaagagcagctgtcgctgttcgggaaggcctggtcactggagcagtccttcttttgctgagagcctcgcgcagcagcggtaacggcggtcggctggcgccccctgccccgcttttcgcggccgccatcttgccgggggcagcggcggctgtatccttcgcctgcccctctccttcctcccccagcccggggcggttggccgggaggcggggccctggcgcgcgggttggccttcacgccccttctgtccccagcgtgtgcctctggtagaacccctggataacccgggaatataaccaacgaagatttggcgccaaaagggaaaaaaaaccttgcacgaggaaggaggctggacctgaggggtcggggtgggcggggccttgctgagggcggggttttgcgcgcgtgcgttcgcttccctcgccggccctggggcagggggcggggccttgaggaggcgggaaaactccattgtttggggccgctgcggctccagcaggagctttggactatctccgtggggccggcgaggctagttccccccgacacctcgctcacgtcttgtgctgggagatagttatcgctccccgcgactccgtgagcccctgcctgtggtggggaggattgtcgttctttagactttggaggtggtgtctgtttggggggaacattaccggacgtaaagcgtcttcaggaagcgctgtctggagctctcaccagcactgtttggttgctaggtgaatcggcagtagtatgcacgaagtggagaaggactggagggaaacaagataggattgttttgaaagcggcacagtgccactcaggcgtaatctgttttttgaacagtggagggaaacactacacgagttcaaggaaacaagtgctgtttcccatacagtaggtctgatttcccaatcttgccatatttttttaggcatctggtt

SEQ ID NO: 2060 - DNA, 1217 bp, Artificial sequence
  DNA replication origin
atcgcaggaagggcaggtgccacctcaggggagcttccagtagtggaggctgaaaaccggcgcttggaggcagaaatcttggccttgcaaatgcagaggggtcgggcacccttgggtcagtgagcaccccaaccctatcccatcccacttatctctccccagcaggcctggctcaggcagacagtgcatggggaacaagacccgtgtttgtgactcccctagttcatgtctgcacgtgtgtatccctgtatccacagggctccgccaacccatttgtgggcccaactcttgggggaggggtatctcagctaattacctgctttgtccaacttaggggcaccctaactcttctgctcctagggccccaggatctgcgactcctgggggatgccagcctacaaccgaaggggaggagagatcccccactcctcccgccaccggtggcaccaccgctgccaccacttccaggcttctcggaggttcagttcttgggtggggcaaaggctgtgaggacacggggtgggttgggggaacaggttggaggcagctctgctctgagcagttgggggaacatgagcagctacaaggctttctggaggagtcagctctcttccccacagccacagcttcctggaacaatgaccagaaacctgggcctggactcacacttcctcctgcccacatcggacatgctgggccctgcaccctatgatcctgggtgaggcccgtgccaccttcgacagcctctgtgacttggccagcactgctggttaagggagcccactaggaccagatagggttagggacctgcctgagaggagggaggttgaaaggagttgggtatttctgtgctaagacttgtgttccccagggctggcctggtcattttctatgatttcctgcggggccttgaggcttcctggatttgggtgcaactaaggactggcttggcacgcgatggacgggatacaggaaggaccacagcgttgcccccagccctttgcctgcccccacctcctgctcccgggcccatgggcaactgtgccatccttgccagcaggcagcctgtgcccaggtcagtaggtggggatcatgactctggtactctgccacagttgaggcttatccaccattctgctaagttttctcatctgtatacagaggccgctggctctaaagggctaagtcctagaaagggactgtagctctggcttccg

SEQ ID NO: 2061 - DNA, 1616 bp, Artificial sequence
  DNA replication origin
tggggattcaaaggagccaggacctttatgattcctcatcctactacaccctatccccaggttgtgccacaagaacaccagggcgtgccacaagaaccccagggcctcccagaccagcaggccagtagatctgctctaaagaggttaacagaggaggtagagctacctaccttcccccagggctcaaaacgttgagcgtcttccccaaacctgtagatcatacttgggacagattctgcccacgcagagatcgcggatcgctgttacctccaggtgcagtggctgcggctatccctacaggaaatgcggccctggataacagaggtccccagggtgttcgcggggccctggacacgttccgaggcgcggcctcagagtcccatgtccgaggcggtgggaagccccagcgagcggctgcgggcgctgttcaggactcgcgcgaggcgcgtggcggagatggaagcgcagagccgggccctgcagctacgcggcgagggtgaaggagatgggggacggggaccaaggacctcctctgccctcgccgtttggcttaagcttgctcgggccggttctgactcggcccgcattccctcagaactgagccgacgcctccaagttgtggcctgtacgcggggcgggatgtcccgcctcttcggcctggagcaggagattcgagaactacaagctgaggccgggaggacgcggggagctctagaggtgttgggggcccgcattcaggagctgcaggcggagccagggtgagacccgactaagcggatccccggaacatgcggctccggggtgggaggggcgggctggctgcagccccggggcctctgatgcgttaccgtctccctgcgcgtcgcctgccaccccaggaacccgctgagctcccggcgagaggcagaactttattctccagtgcaaaaggccaacccgggaactctggctgccgaaatccggtgagagccggggccggagatgggcatagggcgaagcgctgagcagttctggaaagacggccttcctgttccccactccctagggcgctgcgggaggcctacattcgagacgggggccgggaccccggcgtgctgggccagatatggcagttgcaggtggaggcgtctgcactggagctgcagcggtcgcagacccgcagaggtgaacaggagggcctctcgccagcggtggtcagtcctgggaggagaaaagaactcgagggagggcctgtggctgtggatggcatgtgagctgacaagtccagccttatccgaagagccttagcgctggagagctgctcacagccggacgcggccagtcaccagaggtcaaaggtgacaggtcacacttgttcatcgcaggaagggcaggtgccacctcaggggagcttccagtagtggaggctgaaaaccggcgcttggaggcagaaatcttggccttgcaaatgcagaggggtcgggcacccttgggtcagtgagcaccccaaccctatcccatcccacttatctctccccagcaggcctggctcaggcagacagtgcatggggaacaagacccgtgtttgtgactcccctagttcatgtctgcacgtgtgtatccctgtatccacaggg

SEQ ID NO: 2062 - DNA, 1316 bp, Artificial sequence
  DNA replication origin
gacggggcggctggccgggcagaggggctcctcacttcccagtaggggcggccgggcagaggcgcccctcacctcccggacggggcggctggccaggcggggggctgacccccccacctccctcccggacggggcggctggccgggcggggggctgaccccccaccccactcccggacggggcggctggccgggcggggggctgaccccccctcccccctcccggacggggcggctggccgggcggggggctgacccccccacctccctcccggacggggcggctggccgggcggggggctgacccccccacctcccacctggacggggcgactggccgggcagaggggctcctcacttcccagtaggggcggccgggcagaggagcccctcacctcccggacggggcggctggccgggcggggggctgaccccccccacctccctccccgacggggtggctgccgggcggagacgctcctcacttcccagacggggtggctgccggacggaggggctcctcacttctcagaaggggcggctgccgggcggaggggctcctcacttcttagacggggcggttgccaggcagagggtttcctcacttctcagacggggcggccgggcagagacgctcctcacctcccagacagggttgcggcccggcagaggcgctcctcacatcccagacagggcggcggggcagaggtgctccccacatctcagacgatgggcggccgggcagagacgctcctcacttcctagatgggatggcggcggggaagaggcgctcctcgcttcctagatgggatggcggccgggcagagacgctcctcactttccagactgggcagccaggcagaggggctcctcacatcccagacgatgggcggccaggcagagacgctcctcacttcccagacggggtggcggccgggcagaggctgcaatctcggctctttgggaggccaaggcaggcggctgggaggtggttgtagcgagccgagatcacgccactgcactccagcctgggcaccattgagcactgagtgaacgagactccgtctgcaatcccggcacctcgggaggcgaaggctggcggatcactcgcggttaggagctggagaccagcccggccaacacagcaaaaccccgtctccaccaaaaaaaaccgaaaaccagtcaggcgtggcggcgcgcgcctgcaattgcaggcgctcggcaggctgaggcaggagaatcaggcagggaggttgcagtgagccgagatggcagcagtacagtccagctttggctcggcatcagagggagaccgtg

SEQ ID NO: 2063 - DNA, 891 bp, Artificial sequence
  DNA replication origin
cgggagggaggtgggggggtcagccccccgcccggccagccgccccgtccgggaggggggagggggggtcagccccccgcccggccagccgccccgtccgggagtggggtggggggtcagccccccgcccggccagccgccccgtccgggagggaggtgggggggtcagccccccgcctggccagccgccccgtccgggaggtgaggggcgcctctgcccggccgcccctactgggaagtgaggagcccctctgcccggccagccgccccgtccgggagggaggtgggggtgtcagccccccgcccggccagccaccccatccgggaggtgaggggcgcctctgcccggccgcccctactgggaagtgaggagcccctctgcctggccagccgccccatccgggagggaggtgggggtgtcagccccccgcccggccagccgccccatccgggaggtgaggggcgcttctgcccggccgcccctactgggaagtgaggagcccctctgcccggccacgaccccgtctgggaggtgtgcccagcggctcattggggatgggccatgatgacaatggcggttttgtggaatagaaaggcgggaagggtggggaaaaaattgagaaatcggatggttgccgggtctgtgtggatagaagtagacatgggagacttttcattttgttctgtactaagaaaaattcttctgccttgggatcctgttgatctgtgaccttacccccaaccctgtgctctctgaaacatgtgctgtgtccactcagagttaaatggattaagggcggtgcaagatgtgctttgttaaacagatgcttgaaggcagcatgctcgttaagagtcatcaccactccctaatctcaagtacccagggacaca

SEQ ID NO: 2064 - DNA, 1024 bp, Artificial sequence
  DNA replication origin
cgcgtgaggggcggggccggccgaaggctggctgtaggcaggcggctgagccggcggcgggtggcctgcccaacgtgtgctgggtgggagaaggcgaggcgtcagcgatgctgtctcttccgtgaggagcgcagaggaggtcgcggcgccggaggccccagaaggctcgaaggcgccgcgggctggggtcggtggcttagggagcccgtccggccatggtggccgcgggtggtggttggcgcggctgcgctgcggcccggggcagtgcggagccgggacagtcgcggcgctgacgcccgcgggccccagctgcagatatgaagcggagccgctgccgcgaccgaccgcagccgccgccgcccgaccgccgggaggatggagttcagcgggcagcggagctgtctcagtctttgccgccgcgccggcgagcgccgcccgggaggcagcggctggaggagcggacgggccccgcggggcccgagggcaaggagcaggtagggcgggttgggatccgggagggtgaacctgaatggaagccgtgggggaggggatcttcggcgggaggacccgggctggagctttggaggggtggggtctgagtagttcgcggggaggagtgggaggtctggggaggccgagaaatggggagtggagaaatggaagtggtggcctggggttgtattggaaatgggggtgtagaagaatgaaaaattggtgcaagagatagtcaggggttctggatggggcgaaaggacgctggaatgtgggctgagtgtgtgagctgcaacgagtaggcttactaaagaggcgttgaggagttatccataggagtaaatagagtaagatgtaagtcaatttgatgtagtgttatcctgttttctagaggttgtccttaaaattgtaaaaacggatgacactcccaagcattctctgatttggccatcattatacttttgtaccagtgtgttcacaatcattgttaaggctctctttaccaaccatctatttcacaagaaagcacttg

SEQ ID NO: 2065 - DNA, 2376 bp, Artificial sequence
  DNA replication origin
caggactaggtaacggccttgcccaggacgggtatggggcgggtggtgtgtgccctgtgtccaagggttgcagcccctctgaccctggcgtgccctgtgatctggtccaaggtgctaggcctctgactggagtcgggcttgccatcggcggtgctggggagcgggctgctctcgtgcaggcagccccaccagccagccgggctgcgaagctgcctagcacggtctgagcattcgccttactcgctggctgcttacaccccgacgccgctgccgccaccgccgccgccgccgccgccgccctaagcaccgcccgtcgccctctcaccccgcggcagcggcggcggcggcggcggcggaagcgggggggcgggccaggccggggcggggccgcaagcggcatggaggaggcggaggccgcggcgagccgggccgagcagtgagggccctagcggggcccgagcggggcccggggcccctaagccgtgagtgcctccgcgtgggtgtccggaacgggtagcgctgccggtgcaggtctcctgagccctcgggcggctccgggccctgggaggaggagagaagctggggcagataggatgggacgagggttgaagactggggcaggagaggtcgctctttgctcaccacaggcttgggaaggcctggaacttggtccttgtaggggctaacgaactttgagccgattatttggcctccacccttggacagccttgattcagagagttactccagtctcagggaatttccaggtgatccaaccccactgaagggtttcctgccagcccagagaagttgagccactttccccatgtcacacagtatgggtgcttgcagggaagagttgctgggaggtcctccctcatctccccagaaggcatcagactttgggaggagcatcttaccccatgtggccctctggtcccttcagattcctgaagtcatgggctggccaggacattggtgacccgccaatccggtatggacgactggaagcccagccccctcatcaagccctttggggctcggaagaagcggagctggtaccttacctggaagtataaactgacaaaccagcgggccctgcggagattctgtcaggtatagagatgtcccaaaccctccccaccgagcgctccctcccagcttcctccccacctaaatcaggcactgggacccctgttggccagccccagtgggaaaggggcagcaggttcctagaggggagacctctatgtgtcatgtccctataggtaatgatttgaacccaaagttctggaatcggaacccaagtacaacttctaagcttctgacggaagcctgaagtctgatcaggctggctttgcagagaggcacacccctgtgaggcagttagggccaggacccaggtctgatcccccgcttgggtccctgggcctggctccatctctagaaaccaacaatggaggggaccaaggaaatcaaggtctcaaatagaagaatacaggagcactgggtagggagggccctaatggagggggaagtgtcaggggaggttccctggggaaagtggctgtgaaactaggccctggtcaggggagtagagctaggcagacagaggaagggacaggacccagtttctctggatgtcttcactgcagccagggccctcctttcagaaagaccctctaggatctgaaggaggtgctcctcttaatcatccctacccctcccctcagacaggggccgtgcttttcctgctggtgactgtcattgtcaatatcaagttgatcctggacactcggcgagccatcagtgaagccaatgaagacccagagccagagcaagactatggtagggctaggctaaggatggggtagggggccttggatctcacagctggagtggcaggcagaccctaagcggtgagactctgctgaggagactatctccatgacctgttgtaccccacagatgaggccctaggccgcctggagcccccacggcgcagaggcagtggtccccggcgggtcctggacgtagaggtgtattcaagtcgcagcaaagtatatgtggcagtggatggcaccacggtcagtgggccagggtctggtgtacagtcactctattctgctcagggcatggtccactggcagcagggtctactgcctaagtgggaactgcaactctgccagtttctagctgtgtgactttggagtcctcgattccttatctatagactgggactaatgatttctacttgtcaggattcaatgaaaagtttgtgaagtgtcttgtatgtagtgggatctcaaaagtaatcattcataatagtaggcagtcaattcattgatttattttataaccatcccctggtccttt

SEQ ID NO: 2066 - DNA, 910 bp, Artificial sequence
  DNA replication origin
tgaggggcgcctctgcccggccgcccctactgggaagtgaggagcccctctgcccggccagccgccccgtccgggagggaggtgggggggtcggccccccgcccggccagccgccccgtccgggagggaggtgggggggtcggccccccgcccggccagccgccctgtccgggagggaggtggggggggtcggcccccctgcccggccagccgccccgtccgggagttgaggggcgcctctgcccggccgcccctactgggaagtgaggagcccctctgcccggccagccgccccgtccgggagggaggtgggggggtcagccccccgcccggccagccgccccgtccaggagggaggtggggggggtcagcccccctgcccggccagccgccccgtccgggaggtgaggggcgcctctgcctggccgcccctactgggaagtgaggagcccctctgcccggccaccaccccgtctgggaggtgtgcccaacagctcattgagaacgggccaggatgacaatggcggctttgtggaatagaaaggcgggaaaggtggggaaaagattgagaaatcggatggttgccgtgtctgtgtagaaagaagtagacatgggagacttttcattttgttctgcactaagaaaaattcctctgccttgggatcctgttgatctgtgaccttacccccaaccctgtgctctctgaaacatgtgctgtgtccactcagggttaaatggattaagggcggtgcaagatgtgctttgttaaacagatgcttgaaggcagcatgctcgttaagagtcatcaccaatccctaatctcaagtaatcagggacacaaacactgcggaaggccgcagggtcctctgcctaggaaaaccagagacctttgttcacttgtttatctgct

SEQ ID NO: 2067 - DNA, 1227 bp, Artificial sequence
  DNA replication origin
ttatccatcatcttttgcttttatgatagttttagcatacatataaaaatcactaatacagccttggcaacagagtgagaccacctcaaaaaaaaaatcactaatacattgtttaattggttctttgaactttaaaaaatggtgttgggtgggcatgttggttcatgcctgtaatcccagcattctgggaggccaaggtaggcggatagcttgagctcaggagtttgagaccaacccaggcaacatggtgaaaccccatctctaccaaaaatacaaaaaaaattagctgggcatggtggcgtgtgcctgttgtcccagctacttgggaggctgacatgggaggatcacttgagcttaggaggtggaggttgcagtgagctgagattggcaccattgcactccagcctgggtgacagagcgagaccccgtctcaaaagaaagaaaatggtgttaaaatggtgtgtaatcctctgggactgtttcattcaggatttgttcaaagttgtcctgtgtaactacatggcataagtgcagttgtgggagtgcacaacaggagacctatgggtctggagattggggaagacctgcctctgagagatgtgctgttaagtcctgaaagatatgaggggttagacaggtgaagggagtggaaaacattctaatagaaggaacagcttattggaaagactggcagcaatagaggcaggtactgaaaagagagtgtggggagttgggggatggtggtgagagatgagagttggagagctgtgcagtggctaagagtggaaggcctttcagaagccatgctaggagagtctggactaaggtcactgaagagctttagaagtgttttaagtgggggtaggaggtaacagcagtatagaatatttgttggatggggagagactggaggtagggaaactagtgagaaagctattgcaggtggccaagcaagagaggattatggcctggacatgggttttaggggaatggggaatgggaagaagtgggtggattttgagagatacttaaaaattacaagtggaaaaacttgggattgattacatgtggggagagggaaaattgaggatgaagttgggattttaggctttggcaaggtagatggatggtggtgtcatttgctgagatagggaacacagaagaagaatggcatttggtgggagggagatggcaggcactgtaatcaggaggcccatgaagttcaat

SEQ ID NO: 2068 - DNA, 2132 bp, Artificial sequence
  DNA replication origin
agagcgagggaatggggcagggggagaggccgaacgaaagggtcggggcgccgcggcctgtctgacggcccagggctgacgggagcgaaccgacaaccggggtctcgggtgccaaactgactaagcgaccgagcgaccgtgcgacccgcaggacagggagcgccggaggccactcggatcggctcgagcggcgaggagggaccggagagcgagtggaggggggcccggagcggcttaaacaagcgagggaggctcgaatgacggacaggcgggaagggccaaggaggccccaagcggggcgacggcccggggatcccggactgccgggctgccgtggcagggggcgcggcgccgccaagaggccttgggctgaatgggagtgaacgggggccccaggcctgaaggcggccgggaccaaagggccgggcctggatggagggcggcctggggcgccgggatgaacggccggggagggcgaaccggccagttgggctgggaggcggggctgtgggttggggaccgctggccgcggcctggccgctgacgagggaaacttgggtccgacgtggggcaagtgaaagaggggaaagtgaggctctgccaagcaggcctagccgcgctggggacaggggaggcctcgggcctgagaggctgctggctctgtgagggtggggtcgggaggccggggttggagttgggcgaagaggtggcaggcccggccgaggcctgctggggaggggggcaggagagcaggccccgggcctggaagcggcgcgggggaggttccaccaggaggccttgcgggtggccgtggcgtctttgcaggaggaaggccctggtcaggacaggagtgaggactttgaggactcgaggttgcagggcgcggagtttgagttatgccatgaggagggggtgtggggaaaaggccctggagtttggggggactgaagctccgggataagctggagggtggtcggggaggcccttggctgtgggagtggagcccagtaccatgaggcctgagtgtcctgcatagtggtggtggaagaggcttttagaagtcggccggtgtgcggaggggacagtggaggccccaggccagccagcggctgagaagacaaggggcaggccgacccatggggaacaggaggaaaggctccgtagagctgagcagggagctcagaaaagtcctagggcatggggaagaaggcagagagggtctggcttttccgcctggagcttctgggatgctaagactggctaaaaaggaagatgactgggtgcggaggcccaggttgggaagcagcagcattaaaggtgcaggctagaaagaagcaaggaaaatcccggcttaagaagaatggagaaaggaagagaggagtttgtgggtaactggggatgagaattcctgtggctgcaagaagagatggctaactagaggggagcaggttggagggaaaaggggtaaggctctggaggaacttcttcccgtgtggcctcttccccctaaaacaattgacagtttactgaatctccctttccccttctccctcccctaccactgctgtacataccaccatcccattactggctgagcccccagccaagttgagaggagacaggggaggaagagctcctgtgggcctagaccagaaaaagctgaatcaagtgaggccttttaggagaatagccaaggaagaggcctgctaagcattgctattttagaggaaggtctgtgtgggctaacagccaggaaaggcttcctggaggtagtggactagcatcgctttgtgtaaggagttggggcagcgggtgtatagaggcagcaggaaagggtacaatgaggaaactttaaaataaggtatattataccttgaataccaggatatggagtttggactttatcatgaatgcagcagagagacctccaagggttttgaagagggtagtgtcatcaccaagagcaggatgaagagggactggatggagactgaagtgaaggagagcagttaggctgttgtaatagaccagatgaaaggtgatgtggactacattcgtgtaaaagcatagggaattaacactttcattcagcccgtacatcgaggacctactatgtacaaataattatacta

SEQ ID NO: 2069 - DNA, 820 bp, Artificial sequence
  DNA replication origin
cagtaggtcctttccaggagtggggaagaggactcaaaagaccatctccctgagtgcgaggaaggttgtgggggtggaagagatggtggaggtggcgagggaatcggctggggtgggcaggggggcgtgccggtcatagaagaaattccagggcttccagtgaggcaagaaaaagggtctctggagaagcaaggagagtccagaggatgagaggattcgttgcaccttttgccagggtttgggccggcagtatggacagggtggtcgctgtaaccttgcccggtcgccagaggcagctcgaggttgaggaaggggctgaatcctttcctgcaaggcggcggagacccaggagtgcaggcaaggtcgctatggtattttccgaggggtgagggcgaccgggctggaaaatcaatgaggaaaggagaagtcatgtgggggaagaatgggcaagggaaagggggaggggagggagggaagtaaaagggggagtgggggacagaaaggtaggtggacacagctggggaacaagagacagtgacatcactaaaagaatgaaggcgaaggtgatgacgcaacttgggcggagtcaggagactgcagacgtaacaagtggaagacactaacgctcgggacatagagtgcggacagaggcggtgacggaaaagacgagagagggaggtgcctaaggacgttccgtggagtgcttgggaaagacgctaggcgttctagagggccgggaaacggaaagactggagaagtttccaccctcacttttccctcctgcgcccccagccggaccttacccatttcttcttatatc

SEQ ID NO: 2070 - DNA, 2380 bp, Artificial sequence
  DNA replication origin
gcttctgctaggatagggactgcttttctgacttggacttctgctcagatgatgcctcttgctccagctctgacttctgccatcatggggactcttgctttggctccggctttggctttggtgggaactcctgctctcgctgtcactactctggcatttgctaataatagtcgaactacagctgggattggtgctacagctggaatccttggatgaaggcaaagggcagctgtaggggatctgcagaggctctttgcaagggccttgagaggccacagggtagatatggaggccacaggggacagtatcagggtaggcccggactcgggggacaatgggtaaactttgaggatcaaagggtgttctcaaagggataaaagaatagatgtgggtagaacaaggaggcatcacaggctgacaacgaggttggggtgggcccctgggagtgctataggtgtcacacaggggcacaatgggaggggggcctgtcgaatgattgagggagccagacagtgggcagggatggggggtggagggaaccacagagcatatatgggtattgcaggggggccctatggagggtccatggcggctgctctgagcataactattggccgagacaggatcacaaggaaggcagaggggaaaagaagtggggataacacttttgagagctctagggaccacagtcagtaaggtagtccctgggggaagttctttggggctggaatttgaaggagttgtgatgtatggctgcatacaagaaggaccagagaggcaggagggaggtgggggacaggtgtgggccttagcgggcttgggctggccagaaggggtgtgctggggagtgttgactagggagagacatttgtggggagtatgtgactgtcttaactctggggacttaggggacttcggttggggggaaactggagtgggaagagggggttcattatagcttctgcggggaagtgactggggtggagatataaactggttgcccaggggtgaagggaaggaaaggacagaatgaggaccatggggacgagatggttcctgggaacaggggggaccagaagttgtggtgtccggggttaggatgaggtaagagttcccagttgcctcccaggagagaagggactcaatgcaagccttcctgggagcctgggactggggtgagcaaggagaatcagtactcccggggcacaggcagatggcatagcaaggactcccaggggtaggtatgtaggcctctgaggaaagatgggagtaatgataagagccctcctgaggtgagctgggagagccaggcatgcctgcctgagaagagagtgggaagccacaacaatttttctcaaggggcaggtcaagctgtggtttgggttcacaagagtctagaggcttaaggctgccatggtaaaagctgccagtaggtggggaagatgctggggagagaagggggtcattataacttctccctgagaaccagtgagagggcagagagatcatcagcccagtttccaaaactctgtgagaaagggttggggaggccataggactagtttccaccggccggcgagcaagaggaggtgaaatcgtgaggcaagttcccggggtcctatgtgtaggaggaggcgaaatcatgggtccagtttccaagggtacatgagtgagctgaggggaggtcactgggctcgttcccggggactgatgagcaaggggaaaggaggttgccgggctggttccaaaagctgaaggccatccgctagagtaacagagattagtgtgctggtcacagtacgtgccttgaagacagggacgccgcattctggagggactcatccagctgcaataaggtgtccgctgacagagagggggtgaccccggaatgctgaactgctcaaaataagggctggagagtggggaacccgagtggcagggctagcggcagtaggtcctttccaggagtggggaagaggactcaaaagaccatctccctgagtgcgaggaaggttgtgggggtggaagagatggtggaggtggcgagggaatcggctggggtgggcaggggggcgtgccggtcatagaagaaattccagggcttccagtgaggcaagaaaaagggtctctggagaagcaaggagagtccagaggatgagaggattcgttgcaccttttgccagggtttgggccggcagtatggacagggtggtcgctgtaaccttgcccggtcgccagaggcagctcgaggttgaggaaggggctgaatcctttcctgcaaggcggcggagacccaggagtgcaggcaaggtcgctatggtattttccgaggggtgagggcgaccgggctggaaaatcaatgaggaaaggagaagtcatg

SEQ ID NO: 2071 - DNA, 905 bp, Artificial sequence
  DNA replication origin
tcacgcacacacacatttagccctccagaatttgaccaccaaggaagtaccttaccggctccctcggcttcttcctttgtctgtgcacagagttgtctctgcagtgtgtgaggatgctttaccctaggttgcctgctggtttcttttcacattgctgagagctcaggttatttcttgcactgggtgagtcctgatttctcacccctgaggccatcacaagagggtggggcatacctcctcaggagagagaaccagagactgcccctgaaggggaatgtaatcacgagcaagcccccaaattgttataaataaagtttccccccagtgccgcaaaagaaatagcactcgaatataaaattttcttttttttcttctcagcaaggcaatttacttctatagaagggtgcgccctcacagacggagcaaaggtgagcgcacacctggacaagggaggggaaggtggttcttatgcctgacccacgtgattcctgatgctgtgtccttcccctgttggctagggttagacctataggctaaactaattccgattggctaatttaaagacagtgagggggtgagtggtttggcgggaaaaatggttaccgcagagcaggaaatcggaatgaaccacggtgaagaatgagtgagggaggagcaggtaatcgaaaaatgttgctttatgaggaagttaagtttaaaagtagaaggcaaagaattgaagatactgacatattgattcttttaagataaatttagaactcatatctaacagctggcatgtctggcatggggctccggctggggcgcagtcttcagcatttggggctctggggtgcagggggcagaggacggccggggctgtggtgcccaaccggtgctaaactcaagcttgggaggtcgcccac

SEQ ID NO: 2072 - DNA, 1005 bp, Artificial sequence
  DNA replication origin
ttccctcactgggtcaaagaggagttttgctttgtgccaaagaatctcacgattgctgcctattggaatgcgaaaacgcaagcgtgacaaccagtgggatgccaggggttgaggactttggaatcgcagagtgtaatggccaaggggatctggagagcttagagttttgttttttgtttttttttgttttgttttgagacggagtctcgctctgactcccaggcaagagtgcagtggtgcgatctcggctcactgcaacctccgcctcccgggtgcaagcgattcttgctgcctcagcatccccagtagctgggattacaggggcccgccactacgcctggctaatttttgcatttttagtagagactgggtttcaccatgttggccaggctgatctcaaacgcctgacctcagttgatacacctgcctcggcctcccaaagtgctgggcgtgagccaccgcgcctggctgagttcaagcttcttgatttgtgcatttggatcctaagagggagccagaaagaaacctgccaagtgcacagggagatcttggcaaagccaggctagaagggaagtctctctggctcctgctgtggtgtccaacccctggcaagccctttccatgagcaggtttagttccagccctccgtgggtggtctgtcaacaagcttttctccctgcgctgcctttggatcacctcagtatgtgggtttggaggcgtggaagggcctggctgagggtttggaagatgtggcttgaagaggggcttttcctctgggtgtgtgaaacactgaccccagttaaagccttcttatgtgctgagagagggagggcttgctgtatctgtgggacctgacaggtgggaaggctttacaggttgggaaccgcaggactcaggagggtgtgcctgggtgggagacagaaagagtcacagaaaattgtgttcagcagatgttccgcaagtgatttttgagttggggcagagctggaactagaacctaggtgc

SEQ ID NO: 2073 - DNA, 1126 bp, Artificial sequence
  DNA replication origin
ataatgaaaacaaaaataaagcaaaatttgattttcattgtgagatgggaaaggcaagatgcagtactgtgtgtatagtatgattcctttgtgcaaaaaagaatatatatagacaactgttgacatggtgggtttttcataaatattttcttttcctgtaagagtacaccagaaactgttaattatagttttcctttatagaggagggactgtgcaaggagaaccaggggtggagggaatgctcacttttcattttgtatacctttaaagaatatatcaagaggattatctagtgtgtttggggagaagtcttgaacccattttttcttctttgtagctccttgtgttagaaaaaaaatccaaagtaagtactctatcagttcaatgaattcagggaagtgctcctgacactgaggacatcagggggcagaggctgtggcatgtgctcggagagggcaggcgccaggctctggggtgtggggggtgggagggggcagtggtgcctgggtggggagaggtgcacatgagtctgagaggaccacagcttggaagcacctcctggaatatgctctggagcctgtggtgtgatgagatggggattttaaggggagaggcaaggccaggttgggttttgcactgtctggccctagtggaaagtgtgggttggaggtgcaggacctgggcagggcagcagttgggtggccgcgtgtgacctaggagacaaggatgagtctgaggcccggtgagggccttggtagaggggatggagaggtgaccatttttcagagctacttagcttggtgactggatgcaggtggtggtgggaaggaggagccagaaagacacctgtttcatttcctgaacacctggatggatggcggggcctcccctgagtacagggtacaggatacataaggaggagctggtcaaaagtcgggcaggtgatgagcttagaggaaggacagggaaggtggacaggtgacaggaatagcccagtgagctggtttgggctccattgcctcgggctgggtaggggatctgggggatgtgggatgagtggagagcctggagtcagaggtgcttaggggaggagtggaagccagggtaggggaggagggtaagaggg

SEQ ID NO: 2074 - DNA, 979 bp, Artificial sequence
  DNA replication origin
tgagactggcaggcgaagtggctgagccatagatgtatcagcaaagcctgccccaggtggcagagagaagggcgggaaggagggacatggagacaaacatagactgagcctgggatttgctgtgtggcctggaggatgtgacaacccgtctctgggccttggactccccagctgtctgaggggggatgggctcatggtctctcggggtctccagctttggttgatgatggtggactcagtctgggagcccggaggtaggggctggggctagtgcctgaggtgctgttcccatgctttggagttcctgagtgtcctctgctgtcccctggatggtgattgatggccccaatgggcagcttctctgtctgagttgctgcagttgctgagtatgtgtattaatattaattagggctaattagttggataaatcaatctgcccccagagagcagctgcccctccctggttgatgaggaggaagtctgggctaatgggttgcagtggtgaatgggcatgatggaggcgtcctgtgtgcgtgtggaggccccatctgtgtgcggtggtgggtatagcttcctttactgcggacgagggcctgctttcttgtgcctcctgctggcatttcattgtgttgtggttggttgtgtgtctggtctggctgtgtggttatgtgcctggctgggtgtgcatgtgttgggttattggttggagtgtgtacatctagctatgtgtggctggtgtgggtctgaatgtctggtagagagtgtttgtgtgtggttgtgtgtctgatgtgtgggggcagctggtttggtatgtgtctgggcatctggttggtgaacatgtggatgtctgggctgttgggctggggacctggagggggtatatgtctggatggctggaggagtggaagaggttttggggtgaggtcactcatggtgtctccagcctcccattgtggtttcaggcttcttggctctcagc

SEQ ID NO: 2075 - DNA, 820 bp, Artificial sequence
  DNA replication origin
tgctccaatggttgtccatgggatggtgggaattgaggaggggcatgaggctagagctggtatccactaaggggggatctatttagatttcggactctaattagggttttaggatcatgcctgacattagcttagattgagacttttgattggtgttgggactttatttggagttaagatctgaattaaggccgggtgtggtggctcatgcctgtaatcccagcactttgggaggctgagcggggaggatcacttgaggccaggggttcaagaccagccaggacaacatgatgaaaccctgtccctactaaaaatacaaaaatcagcgggtgtggtggtatgtgtctttatcccagctactcgggaggctgaggcacgagaatcacttgaacccaggaggtggagcttgcagtgggccaagatggtgccactgcactctagcctgggtgatagagatagactctgtctcaagggaaaaaaaaatctgaattaaggctaggttgaggtaaaatttgggactgaagttgagattaggttttatttggggatgggcttaagactgaggctggggttggagttggtttgagttggggttggtggggcgaagatagatttggaagagggttgggactgaggctggagttggggtggggctagagttagggttagagatgaggttgggagaggctggtatgggcttgggtttgctgttgggcttggcctggtggggttggcatgaagatgctgggcagaattgggctggagtggactgagggctaactgggtgcctcacagattagggtaaggagcctgtggcctt

SEQ ID NO: 2076 - DNA, 1738 bp, Artificial sequence
  DNA replication origin
gccttggctcccgtccggccctccgcgcgtctcgctgaatctcggtctctccccgcctctccttcgtgtcccagactctccagtccctgcctctccggctctctcccggtctcgggctccgtttctccgtctctctccctcccgaggccccctccccagccgggcggggtagatcgctccgtaaataggcggatggcccggggcgctgcgagcgcagacactcgtttttagagccggtaattgactcctttcagttgataattcatggcttgcatatgcgctttaatgcgggcgccccgggaggcgcggcaggcggggcgggagcggggcgcgggcctgcgcggccgcccgtccatccgtccgtccgtgtccgcgggagacgtgggcgctcccacccgggctgcctgcccagcgctcccgaggccgcgcgcggcggaaggggcttgagctgggccggacgcaaaggccgggcggtccctgggcggcgcagggcctactggctggtccttcgaactgaatgcgggcgggggcatgtgggcaccccttccctatgcagccaaaggggaaactgaggttcaaaaaggcgataggtcttaggcagaaacgagatcagaattcaagacccccttcccgtaacgtcctagtcagggcccttagtcccagcttttctagagcccctcaccctgggaatgctcctgtttctcagctaaattcctccgctggagtgacccaccctgttgctctctcacaggcacccgcatgaggggctggctcctccccgtgaattctgggcacagacacccagacctgagcaggcccctcaccccacagcgactggggagccggagcccgagtccctcccacctgctccctcggtttctgagggtctgtctcatcctgcagctggacagacgtgatcttcagccccaagttacagacgcttagagaagctggagacttgcacaatgtctcagaggaaagagagccagaacctggacccgtgttgtaccccaaccaaaccctccatggtggaaggaataggagtgggaaggggaggaggagacatatggtccaggaggttccatatgtacccacacatggacctcaaagaggcccccacagcaagacagcaaatgacatccacagtcacagatcacggagtgatttcagatgaagatggtgctggcaggtagttgtcacgagtcagaggttaggggtcagcactggagctggcgctggaggtggggaggttgatgactccaaacatcagctcaggagatactagagaaagcccaagccgaaaagaagtctgcgcctagcatagggcttcccatttattcagtccttcgagctggtatctgccaccacttttccccaggctaattccagccaaaatagaattctacctccatcttaaaatctgcaaatatttaacctaaagccaaagtgcctgctaattcctgcatccctctatctctgtccttccactcgctagtttccccatcagcgcaatggagtttgagcaaaggatctcactggagaagtcgcagcgacagtggatctaagagcagagggcaagggctgcctgagccttgtgaagctcaattctgccccctggtgcccagaatgccgcgccagcaatgggatgcaggaagaagaggcaggagacacctgaggtctcttaccttttccaagctactcagacctccctcttacagggcagggaacacagggcacc

SEQ ID NO: 2077 - DNA, 955 bp, Artificial sequence
  DNA replication origin
gcctgccgcgcctcccggggcgcccgcattaaagcgcatatgcaagccatgaattatcaactgaaaggagtcaattaccggctctaaaaacgagtgtctgcgctcgcagcgccccgggccatccgcctatttacggagcgatctaccccgcccggctggggagggggcctcgggagggagagagacggagaaacggagcccgagaccgggagagagccggagaggcagggactggagagtctgggacacgaaggagaggcggggagagaccgagattcagcgagacgcgcggagggccggacgggagccaaggcggctcagttcctcttctcccccgagcaggcgaggagaggtggggtctcaggacctccaaggccctgttccccttccattggcatttgtgtaaggacgcaggccctccgcactgctgactgtggcactgggcagggagtcccctagactaggggtttggggttagatctggggctcaggcagcgctgggctgggcgtagtttgcagagggaccggccgtcctggcaggaaactggggaggaggccgcggctttgtccagggtggaggtaagaacgatggttggacagcatgaccacgagtaaagggaggagggcttgaggatagggacaaagtgatgtggagcttatgtaggagatgatgcgcagcctttcagcattgagagagaaaccgggagaccagccagcctcagtgggcccaggaagtcctgcttcctccccacccgctcaagctgttccctcctctggaaatgcttttcctgccttccctctactcattctgtgattcctgccctccccagcctctgtgctaccttagcctcaacacaatacactcattattattattattattagtgacagggcctcactctgtcacccaggctggagtgcagtagtgcaatcatagctcactgctgccctaacc

SEQ ID NO: 2078 - DNA, 1798 bp, Artificial sequence
  DNA replication origin
tcctgcaggcgggtcctccattcacccggctgggagaagtcccggccgcccgcccgggggagtctccgccccctccgcccgagtaaacttttcccaaatccgagagccgcttagggcgaagccgcccccgaggcctaatccgcgccccccgcggatctgcataatcgggttagcggccgcgctccctcccgctcccgccgccgccgtcgccgccgcgcgcgattctctcgctgtcacttagggaggctcagcgcgatttgcggcctaatcccccgggatcgctcggccgccgctccccgaggggccgccagattgttcccttcataattgattgactctatttgccggattgggacttcaaagcgccggcggcgcgggggcgcctgggaaggagcggggcccgaggagggcggggcggggcgggggcctggcgggcctcgccgggagctgcagccccgcggccgcatcgcccggcctgggaggccagagcatgaaatgcgcaagtgacaaggcggtgaccacgtccgggcctggcactgcgctcagagctccccgggtcccctctctgaatccccctcacaaccacctcagagactgcagggttatgtgattagccccactttccaggtgagggaacaggttcagagaggcctcttccttctcccagcgccttctgtgtgtccagcgctgtttggggttcggcagatacccctgtgagccacaccgaccccgtctctgcctccgtggaatttgactctagtgaaggaggcaggcgacacacaggaaacaagaaataaatgaacggaaaataaagcaaggtgatgtggcagtgactgtaggggaaggggaggtaaatgagactgagtggtcaaagatggcttcttaaggaggtgcgttttggctgaaatctgcatggcatgaaggaacctgctctgggaatgtctagaggacaagcattggggcagagggtaaagcattttggggggagccctcagccaagggcacactattagcaaatagtaatgcagagactgaaactcagggctgcctgactccaaagcccagaggctgaaatgccacatttttttttcactcacccagcgtggactgatcccagcctcgacacaggctaagcccttcacaaaaatgtcccagacccacaggcacaggcacctgttcagttccacacagcccaccccactgctggcccttgtgagggtttattttatttatttatttatttatttatttatttttgagacaggatctcattctgtcacccaggctggagtgcagtagtggtgtaatcatggctcgctgcaacctcaacctcccaggctgaagcaatcctcccacctcagcctcctgagtaactgggagtacagacagctgccaccatgcccaggtaattttttgcttttgattttttgtagaaatgaagcctcaacatgttgctcaggccggtcttaactactgagctcaagcaatcctcctgcctcaaccccccaaagtggtaggattacaggcaggagccactgtgcccggcccccactgtgtggttccatatcccattgatctgaggttgccttagtggatggacagccctttactcagaaccttcctgcacctagggcctgctgtttccccaactcctgaggagccaggaaagggtagggggtagctagaggggccccactcctgcccagccatagccaggctcccaggaatccctagcctagacttgggaatccccagaaacgcttaattaattcttgattactcactgtctctgcagctg

SEQ ID NO: 2079 - DNA, 1154 bp, Artificial sequence
  DNA replication origin
gcgtgcacactcacacgcacacccaggccacaacagccgtgtctgcaccagcccacgggcgcacgcgcgctgcccacgatcaccctcccaagccacaaaacactcgcgaacgtgcgaggccgcaccagcccacatagccagacccacgccggctcacacgcgcacgcagcactgcctcgtgctcacacaagcatgcacgtactcacagacacgcaatttgatgttcggatacctgcctcctgtggttccagcagaatccctcagtgacacaaggtgtccctgccagcctatgtagacgtaggactggtgcacggccctgcacctgtgctctcccacggacctccctgcagctcctctcctctgaaggaccttgaggacaagtgtgtgttagtgtctgtgagtgtgtgtgtgtgtttgagcgtggcctgtctctggagtctgggcccagttttggcttctgcaactggggccttctcagggtaggtggaaaagactgaggcaggacgctgggatggaaacaggccgagtcctcttggtgactctggctaaggggtcctctccgcagggctggggatccaagacattcctcaccaggcccctctgggccagccccttccctgaggtgctatcagggaggaggcaggggagagggagagtggcttccttttacccatctaggaaaacgacacagaacccagttccaagcctacccaatgcaggatgtgggaaaggctcagtcagactcgtttcatttgtaaaacgcccattgtgtgtgatcagtgtgtgtccatggtccatacatgtgttcatgctcagtgtgtgtccacagtctttgtgtatgtccatggtaatatatatgtttttatacagcatgtgtttgtggtcagtggaatgtgtatctctagcctcacaccccttgcacaaacatcacatcacacacaatgactgtggacacacactgaccacagacaggcactcatcatggacacatacaatggcgatggacacactgttctctctctgacacacacacacacacacacacacacacacacacacaactcccgatagagaccaatcctttgaatggacagatggtggacattgaattgttgccatagtggcacagggcattgggtgtggtggcttacacc

SEQ ID NO: 2080 - DNA, 1015 bp, Artificial sequence
  DNA replication origin
agttcaagaccagcttggccagtatggtgaaaccccatctctactaaaaatacaaaaataaattagctgggcgtggtggcagacgcctgtaatcccagctactcaggaggctgaggagggagaatcacttgatcccgggagatggaggttgcagtgagccaagatcgtgccattgagctccagcctgggtgacagagtgagactccatctcaaaaaaagagagagagagagagagatccagatccagccaaaagccctcttacacatctgcctctccaggtgggaggagcattgcttagtgggaactccttatctcttggtctcctttacttcccagagcaagtgcaaccggagaggaagcccaggccttggccttcctgcagtcagcctgcctagacgtgggttggggggctggaactatgctcaggagcgcctgagccattgccccctagctggcacggggtgagtggagttgaaggccaccttacctgcccttcacagtacagttacttgtgggcaagagtggtcagaagaaactcagcatgctcaaaggcactacaggagaccccccactccaaagctgcgaataaatagggttttccaatctctgctgggggtggctggcgggaggagggtggagagggcagaaatgaggaggtcctctgggtgtcagcaagttctcgaggtgagaaggagatgggtcaggtagcattgggggaaaggctgggagtattgggggaaaggctgggagcacgtgcggtatttgaagaaccggggttggagggtgggagtggagcaggtagcggctggagtaagggaaggaaggaacgtgcatgcaactaacagggtgtgtgtgtgtggtgggggcgggggtgacttttgggtggtcggagagggtcaggaacaagcgggggtatctctgagcggtgaaggggagtagccgtcggagggcggggacagagcggtagctgccttgcgctgggattgggggtgggggtgggagtggggagggctc

SEQ ID NO: 2081 - DNA, 1157 bp, Artificial sequence
  DNA replication origin
cggagagggtcaggaacaagcgggggtatctctgagcggtgaaggggagtagccgtcggagggcggggacagagcggtagctgccttgcgctgggattgggggtgggggtgggagtggggagggctctttaagcggcggccgcgctaataacctgtccaggagatggctcgtggcaaattgctttgttagtcttgtcagcgcggccggggccgccgtcagcgcgcgccatggatcaagatgatgaatcgctgcggacggcgcagatgcgggcggcccgcggccgggcccccgggtaggggtgggaggtggagggggccgcggggggcccggccgccgccattaactccggaattaggtctaagccgcccaccacccagccactgccccggggagcgccagccgttggggcgggagcgggcccaggatggggactgagacccgcgtcccccacccgaacctggacctagcctcctctgaacgcagagggcagtgggccgcccggaaggggcggggaggggccccggccctcaagccgcacagccaggtgttcccgctcttcgaggacatcccctgcccgcctggaggttgagagggcggccgcatggggcattcgccaacccctctcacccgccccaaaccctcgctgtgagctgctagggagccttcgtgggggtggagggggaagctaaggagaaacagagagagagggacagacagacagacagacagacagacagacagacagacagacagacagagttggggtgtgagtagggtggttgggtttgacattgctactctaaactgagctcagagaccagcgatggtggggctggggcctgccctgggacttcaaggggacctaggcccctaaagtggttccgggcagacagctgggaccctgcgttctttgcatttccagaccagttggaaacggtgagcacctagttttcccaagttcctaaattaactcaccccttacccacctcccccttggtccaacttagaaacatctccccccaaaacacacacacaccacacgcacacctaggaatttacaaactcacacaatccacataagcacagtctacattcacatgtaaacgtgtatacgcatatattacacacaaatataggagtatatacttaaatgtat

SEQ ID NO: 2082 - DNA, 1158 bp, Artificial sequence
  DNA replication origin
gatgcaggggtgacaagttgctctatagagattctgggaggctctgtggatgtggctgtgtggaggtggctggagaggccttggccaagtgtgtgtgggggggtgtggggtaggtggggaggggacactgtgcaaccagcctttggcctcagtggctgcaactgtgactcacatgttgagtgtgcccttgtgactggtgctcccgtgaccacgaatccatgtgcagctgtggggtttcatatggtggtgactcctttgtgtgtgtgtagcgagcccttgtgcaattttcagctcaaacgtagctgcaaatccaggtggctgcgcgcaggatgggcacagagtcttgggaccagagcagagggaccctgcttctggcagtccctctggtctataagcgaagctctcaggtctacctcctgggagctgggctgcttgcttaggggctcaggcaccgggaggagctggtgctggctggccaatactgccagtagattttagagccccagcctgggttgagggcgtcaggaattttgtgctgggtggggcagaaggggccacaggcagagttgagggtccgggtcgatcttcagtcagagttaggggctgggtgcctcgggggggtggggggagcagtgggcctcagaagggagaggagaggagaggagggggcggtaagaggattaggccgcttagacccttctctcccaccaggatcccccacccccaccccaaagctccagaaaagatttcttctgccaaagcaaaaccgtttaggctcgatttaaagggacaagaaaggcggaggcgggggctttaaataaccttttaatttctcttcagggatcctggccctgtgcgggaggggagtggagaggaggggagggaaggggagccaaggctgtttctttggcttagataattgagactgcggctagagctccacacaagctgaggagatggtgggaaggacaatgcgcccccatctggctgccctccacacacaaacaggcacacagatgattctggagaaagctataaccccctgcacacacatagcatcattcagtcacacacacagacatggggccaggtgcacatgtggaagggtcacatatggagaaacaaatgagggggcaccaaagtccctccctgccatcc

SEQ ID NO: 2083 - DNA, 978 bp, Artificial sequence
  DNA replication origin
ctgtgcgccgggctcgcgtccgtcacctctcccgaatctctgctcctcgagctctggctcccggtccagggatctctgcctctcttgggtccgcggaagccgcaggccgatccctggggtgttgaaaggtcttgagaaacctccccctcgccggtcccaccccgacgcttggcagctggagtccgtagaggtgacctgggggagccccgacggactcccgtccccactgtcccttcaaggttgtgcgcacacacacgcgcgcacacatacctcttcccatcagttccacaccacctgcaacaacactgccacccccgcgccaccatgcagcgccacagccagtactctgaactcgccgcccacacaccccgcgggtgcgctggtttgcgctcctagcagccgctcacctgtctagcacctggatgttggcctctgggccgggaggccgcgggctggaactcgcggcttcacacacagcacaggcacctgtcgccgggactgggggaacaaacacactcggcgaccggtccacttcgggaaaatcctgggcctgagatggtcctgctcttaccagcgctctgctccctccaggcgggaaccggctcataggaagaggacgttctggggccggctctcaatcaggcagaggctcggcttcccaaaaggtgtgtgtctgagctgtgtgccagggggcaggtgtacgcccacactgccagtggatgcaggggtgacaagttgctctatagagattctgggaggctctgtggatgtggctgtgtggaggtggctggagaggccttggccaagtgtgtgtgggggggtgtggggtaggtggggaggggacactgtgcaaccagcctttggcctcagtggctgcaactgtgactcacatgttgagtgtgcccttgtgactggtgctcccgtgaccacgaatccatgtgcagctgtggggtttcatatggtggtgactcctttgtg

SEQ ID NO: 2084 - DNA, 822 bp, Artificial sequence
  DNA replication origin
gggacagtggggacgggagtccgtcggggctcccccaggtcacctctacggactccagctgccaagcgtcggggtgggaccggcgagggggaggtttctcaagacctttcaacaccccagggatcggcctgcggcttccgcggacccaagagaggcagagatccctggaccgggagccagagctcgaggagcagagattcgggagaggtgacggacgcgagcccggcgcacagacccaccgactgtcgggccaccttggtcgggagctgggctgcggcaccagcggggcggggcagggcggggcgggagcgaggcgtgattggcagccaccagggccattaggaagcgcccgggcccgcgccgggcgcccgggaaacgcagtttaaaactccagcccaggccccgtcgcgcgtagatggcagcggaggcggcggcgcgggccggggtgaccaggtacgagcgggcggggctggcgggccgagccgggagtagtgcgggacagtcgctgcagggaggacgcgggccgtgagaacccggggacagcctcccctcttgcggtcctgcagtcccggacccactgggcggatcagaaagtttgcagggagccagggactaggagacagacagacagcgcagggacagagaaagcggagggatgccagaaagaccgagtcggggacagacagagagacccagggtgagacagaggaagagatacccggggctgaaaacggtggcagaaagtgagcaacttagggagacagaaagagcgcagaactcgaaattccgaggcagagagagcggagggcaagccgtgggtag

SEQ ID NO: 2085 - DNA, 900 bp, Artificial sequence
  DNA replication origin
ggagttgcggagccctgggcgggggctggggagggggcgcggccggcagcccagttcccagcctgcggagcgcagaggccgcccacgccctcccagcttcctggtccacgcgaaccccgcagtgctccgggcattgcccgggtctggctttggtctcgcccgcgcagatcccgttcaaactcagctgccaccaagtgcgccttttctctctggattgcgattctgcacgaattttccagttgagggtggttcggcgctcagccagcctctgccctcgaagacgcggccttggtctaggaaccttcaggtgggtgtttggggcgcagtggccctagttccctagaattcgttttgcctcccgcggcctcagccggcgtgggtcaggcgagctccggcgaggaacggcaggctggggccagtccccggagcggctctcggggcgcttctaggggagcagtcaaagggttgcgaggactgccagggtctttcctccctaggcttcccacactggatggccgtaactcagtcgttgacggcgacaggccaggggccctgatggactgtgcagggtcccgggcaccaccggctgaactttctggcggtcacaaattcccggaacctgcgcaggggcttcgttggcactggtggttcacttaaggagcttgagggaaacctcctcttccccaaattcgcaccaaatctggggccccgacttttcctggattccagccacactcggtttgggaggcagtgggctcctcaggcttgtgatttgcggcaggaaggagtcccggaatggaagaacggggaggacgagatccgaggccttttcaccctctttgcaagcatgcagttcaccaaagccgagaacccaccgggcctggagcgcagcctcagcgc

SEQ ID NO: 2086 - DNA, 673 bp, Artificial sequence
  DNA replication origin
ggagggctggacattggagagcccagctcggtgcccttcttacagaaagggaaactgagactcgctcaaggtcagacaggagaggcactcagtgcaggatgaatgtggagaccagaacacacaccctgccgaaagctcaccaacccaccccagcgcccctccctactcgttcggtaatgggctttggcgggcagcagtggcgtcgcccggggccttgattagatatttattgctgtcatttacatgggcactgcggggcggccgagcgggactgtgagaaaggggtggggtggggggcgaaatgggaaggcaggggtgggggaggtgaagactggctccttgaggaactgggactggccggaggaggaggagtaacttcgaggcctggagagagtggcgggaatagggagcgcagaggccaagcaaaaatgtagacgcaccctccctagggctgcctggggcttctgcgcaaggtggggctgtgacacttgggactgttgtcctacggggtgtctgcatgtgttgagcatgagtgtctgcgtgagtttaacctgtgagtatggaactgtgtctatcagaggggttttacgtgattagtggatctgcccatgcctcttgtgtgacttctcaaagtgtgtctgagtgtgatacccatagcccaggtgactctaac

SEQ ID NO: 2087 - DNA, 895 bp, Artificial sequence
  DNA replication origin
tgggaggcggaggttgcaatgagccacggcactactgcactccagcctgggcgacagagcgagcctctgtctcaaaacaaaaaacaaaaaacaaacaaaaaaaaggatacctgtgggagcacagaagaggacccctagctcagtctagggagatcagaaaggccccttgggagggagacttttgacctgagtctcatgggtccagtgttcaccaggaagtcaaagagaagggtgccctgggagaggcatagctcatagaaagctgcaggattgagccagcttgccaaagccctgagccctgaaagaacaagggacttgtctgggtggggcttgaggatggtgggggtggtgccagccagtgaggatgaggagggaaacaaggaccttggactgaagcccaagggccaagggtgtgggaggcactggaagctattcccagtgagggagtggggtgatctatgcgtattttagtaacccccactttcgctgcatggtggctcatgagaaggaggtgggggcaggagatcagagaggaggccagtatctgtcacgtcctggtgagaggagggtggcatccatctggactgggggagggagtgcagagcaggggtctgattgatgagagatttcggaaggaaaattgttgtggtgattttaagcaggatggggagggtcaagggtactttcaagtctctggccaggcaatagggtagatggagacccctactctgttggagtggagtgagtgtccgaaaatgatcctgagctcagggtagtcttgtttgctgcatttgaggagacttctatttattcaagggaagatgtagggtctgtctctgctgctgacacagactttctctgtgcctggcaccttacacgtaagaagccacttggc

SEQ ID NO: 2088 - DNA, 1189 bp, Artificial sequence
  DNA replication origin
ctcggcaagtccagctagcttgggcagtgtctgggctttgcacagccccgtggagcacttctcccctcaccctgctcagtgaccatgccctcaaccactactgctgccctcacacctccacatgcatgtgtgatgtcagactgttacccaaacgctgccactccccacctcttacaggagccaggcaatcacacccacagtcacactcctatgttcatccagtcccccaatctgacccatctgttcccacattcatgggcacacagtcttagatacagtcttttactcatagtcacacactcctctcccttgaagccgccttctaggtctccaggaggggctggtaccaggatgctcaggcactcagccacaggctgggagggccccagaacccagggtgcttagccagaggccccacagccacccctccctcccggcctgcactgtcacagaggactgactccaaaggtgctttattgaggagtaaggcactgcaggaatgcatggtgtgccacagtcagggtgggtgggggccagcattgctggcagtgaaagtcacactaggactttcagggctgcagaagctccctcaccactcacctctgtcagggccccagtctcagctactcttgctcttagtcagacagaaagggtggggagtgctcaccccggccctaattctagggaccatcctggcccaagtcagagccacggcttctcagccaaatgaatcccaaaggtcatgttggggtagaaacaaggaaggtggggaggggcaggagaggggactggaagcctttcacggtgtgtgcaaggacagagacagcccaggctgacattcaacccttctccctctcttcctcccacctcactggggggactgctggtggttagccccttcagggtgggtgctccttggttcacagtgcccaaatgccagggggaggtggcagtgtcagggttccagggtccaggggcctactttcagcaagctggatgggtaaggtttactagagaccagagaccctgtctaaggggccaaggctctgctgctcccttctttggggtgtgacccctgacaccatcaccacattctacccaggagtttgggagatggaaaagatgaggccacctgagcccagcaccagacccttgtaaaaaagaaaggaaggaaggaagaaaaggtttt

SEQ ID NO: 2089 - DNA, 1386 bp, Artificial sequence
  DNA replication origin
cgctttatttagcttaaagtatttaattatcactgtaccctatgaggtgggttctatgattagccccacattacagaagagaagatggaagcaggagagtcaggccccctgtgaaggtcacactcactcactgctcctcaccctgcatgctcccctcagacccgcggtaccatctgattacttccctttcatccccatccaggacccttttctggcattttttccccacaattctaacacagctcactagctaagatctcgtcctttgagggcctttgtaccaactatgatcttatgcgttatagaacagaattctcaaatagaaatcataaatccctagactctaattttattactcttgtttctgcatgcatttccagaattctagaatccagtgatagatcccagaaccagagacatctagagaatcctagaaaggaattctagcatccagcaattaggcttttgaatccaggttcaacagtaaaacaatggggagtggaatggaggtaggattggaatttaatagaatgcccagtctagaaagggccctggtgctttagatctgctccagcccaagccagccgatgtggggactgtgccctctcactgaccgtctgaaccatcaggagctcctcactctcacgtggccactcactccagggcctcatctgatgttcaggagagtcagtgtcattgctatgcctaccggagtctagggtggggatactgaggccaagtggcatggtcatttgggtcctggttctggatcttggataaactgctagacctctgggagcctcggtttcttcatctgaataagggggtgggggtggggggcaaggtcagatgatttccaaggcctcttccacttgagagagtgagttgcctaaatcccaagagctgccatttgccttactagttaggactactgaagacgatgattatcatgtgatgagcacctaagctgaactggacactgtgctgagcactttccagccactatctcactcaaatgagttcaggtaggcttcctggaggagaggggttggaggggcagcgtctgtttggaggacaaaaaagtgaggagagagggaggatggcaagattggccacgagggacccccggaactaggtggggaaacaagtcgattcttcacatatgggatggtttgttgcttcccagaggcagaggcagggggctggccaagatgacctctgcccacccaggcactcagtgtagctacagacggagcctaggactggaggtcaagataccctgctgacgccgccctcttgctgtgtgcccacaggaccagcgtgaggaggctcctggcagttgcccacaggaccagcgtgaggaggctcctggcagttgggctgttc

SEQ ID NO: 2090 - DNA, 1571 bp, Artificial sequence
  DNA replication origin
acagagcaacttcaaatccgagacaggggaagccaggagggcagaaaacgcctctctgaccaatgcctcccccaccatttatttaaccagtattcactgggccatttatttaaccaatattcacctggggagtggcaggcaccgctcctccccccgcccccccgctggggatactgcaacaaacaaggtggacataatcttggccctcaaggaagatggctggggcctgcagacctggacacaggagtcatggcaccatgagggtatcgggagtttaagagccctgatttgcagagttttggaaatctgaaagaaggaaggaaggaagcagcatcccagctgcactctgaaggtagagctggggtcagccaggggaagagaaagtaggctcagggctcaggcacagggagctcacacacctggtgaggtcagccctgcaagagcaaaatcaaggtgggggtggggaggggggcagggctgggcagcagccatgacgatcctaggaggagagatggtgcagtggtgagactagagaggaagggatggattctgggatgcttggcagggagagtctgcagggctttgtgatagatggcaaatgtgtggagggacgcctcaggagacaggagctgaggatgaagcccagattttctggctgggtctgtgggctctgtgggcgaagatgaaattgaggaaactgtatcccaggggaagagtatgtttccaggagggaggcttcagtaggtcccaagctctggagaggtcaagttagctaagggttgaacagtgttcatggaattcagcaaaaaggagtcagctggtggccttggtgaaagcagtctgtggtgtgatggggcagaaaccagactggagtggattggctcttgacaaggagatgagatatatactgcagacagtgctttcaagaaagggacagagtgttagctggaggcagatgtggggttgaagaagggttttgtttcaagatgggagaggccttcttaggtgcatccagtgggaggtacagtccagtgacgggttggtgagctcagactaggaagtgggaggtttcccgggatccttaaggaccacagtgatgccagggatgtggatgtacaaagggcccgtgccgccccgctgtggttttttcacctacaaggcttggcagtttaggcatagacttgaggtggcagaaagccagactgttgcaattgaggctttgctggcagctttggcagaaggacaaagggacaagtgaagttacaagagagtaatggaaataaggcagtttgggttcttggatagatgcagacagaattggaagcaacagtatcgtggagaaaactgtagagtttcagggtttgcatgagatcagagaacagttacagccagaggcagtgtggagttatgaagggcacagatttaggagacacacagcctaggtttgaatcacagctctgccctgtattaccatgatgtctgtgaccttaggcgattcttctaacctctcagtcctctgttttccaatccataaattagcaacagcagtagtgctaactaagggttgtcat

SEQ ID NO: 2091 - DNA, 1003 bp, Artificial sequence
  DNA replication origin
gggaggtgtatggtaagaaccccgctcgccccgggttgaaggggagctgtgggtcggcggtcaacgcttgaaggagaggggttccgggtggcgggaggcggctggggacccgcgcaggccagcgtgccggcccctcccagcccatcgctgccgccgccggggctgctccaagggagccaagcggagtgggagcgggtctgcgcgtctctgctctgcgcgcaggggcgggggggcccaggacggggcgccctttcccacccacatgctgatctaggatctccaagcggctcggcccaggacaccgcctggaaacccagccgcgtgggagagggcgaccccacctccaacccccttgctgtgcgccggcccagcccctagaagtcagcggacggcggaggaggtggcccggcctctcttggtggtcctgcgctctcggggtctttccttcctgctgacccagggtgctcaagggtcagcctggtcggacccgcaggggagtgtccacggacgggctcaggcaagtgaaggagctgggggacgctggcgggagggggctgaggggacgcttacctgaactaggggagagactccatccagcctgagctccaggagacaggagcagtgcccagacaagtggtcaagaacctgtagccgtgagaggacaggggtgagaaagatagagagggagcaggagaaggggagacactccgcaggcactggccgctggctcgggggttcctctgctccactctgaccccgccctgctctgaactgggtaggactctgccctagaatctcacctgtcccctccacatcctccccaaggcccaaagtgaggaggggatgggagagaagagagcacagagcaacttcaaatccgagacaggggaagccaggagggcagaaaacgcctctctgaccaatgcctcccccaccatttatttaaccagtattcactgggccatttatttaaccaatattcacctggggagtggcaggcacc

SEQ ID NO: 2092 - DNA, 831 bp, Artificial sequence
  DNA replication origin
cccgggccccatggagctgctcagtcagggaggggagatgaaagatggattcaggctgggcacggtggctcacgcctataatcccagcactttgggaggccgaggcgggtggatcacctgaggttgggagttcgagaccagcctgaccaacatggagaaaccccgtctctactaaaaatacaaaaattagccaggcgtggtggcacatgtctgtaatcccagctgctcgggaggctgaggcaggagaattgcttgaaaccgggaggtggaggttgcagtgagccgagatcatgccattgcactccagcctgggcaacacgagcaaaactctgtctcaaaaaaaaaaaagaaaaaagaaggatggactcgggaatttctggaacttaccttccttgttgccattggtgctggatcttccttccccgtggtctgcccctggatggggatggattcttaggctccctgcaggatgagaccaccccaagccccctgattactgagccattccccaaatcaagcctaggttgggaagggaagtccttcttgctatctagtctccatccctgatgctgtctttgctccactgcattcctttaggtctcacatgatctgggctgatttgggcaggagaaaaagaactgggcccttgaaggagaaaatggcagatcttttagggaggtgaggtcccggggagaactggggccatgagaagccccataggattggtggagatggcagcctgtatgtggggagctgagatgaggtgggagctgtgcagaggctgtggggtcttaggggaaatagagggtctttcatgggggctcagggatg

SEQ ID NO: 2093 - DNA, 1264 bp, Artificial sequence
  DNA replication origin
ccgcccctccccgccccgtggccgcggcgtggcggggccggggcggagctggcgtcgcccggggcaggagggcagccgcggccggcaggacaggcagacggacaggctgacaggagagagaacaggcactgcgggacctgcaggagaaaggcgatcctgtggctgggaatgtgaccccacggccagaagaggacccgtgagtgtgcgccgtgcccctgcggcctcgccgcgcaccccgcccgcctggcttccactttcatttcttcggccgtcctggcgtggcacagtccggaggagagtcccgcccgaaggcaggctggccgctgtcctgaggctggcgtccgaggctcagagcttcgaaagttgcgggggggattgtcggggtgggggagtacggggcagaggggaggggttggggggcgtgttttcggggagcggaaatgtcaggcgggctcctctgggtcctacgaccttcctggccctgggagctggtttgaggttgcagggaagccgggggtgggcgtgggtggctgcgcgccgcgaggagagcgtggagtcttcgcctctactttttctcttcgacctctgtcctagagagagtcccaggatggattctgggttcaaactggggccatcctctggcccagatcctgggccaggcccaaggagtggtagatgtagcctagcagggggctaaatatcagaaacaggtagggtcagcctgctgtcttcatttgagaagcccagatccgcacccagggaacgagcaaggcactgccactccaggagtgaaaggatagccatcactgggaaatgggggctaggacggggaacggcagtggttcagggagagacagaggttctgtgacagatagaaactcagtgagggcatgggggtggggagtgaagggagttaaccctgtggctagaagagcacctgccctgcacccaccccctgagcttacattttcctggaaagagacccaggccttgaagttccacaggagtaaggtggaactctagctcactggtcaggacaccccagttgctgtgcggagtcagtgtgttggggacaggaagcaggttgggctgtttggtggagaagatgcttccactgtccctccactcccctcctcttctctgtctccaccagaccattgatgagccagtgcaggaaaatggtcttttactcttggtcatgagctgagccccaccttatcccagttcccagttctgcttgtaacttgctatgtggacacaggct

SEQ ID NO: 2094 - DNA, 1205 bp, Artificial sequence
  DNA replication origin
gtgccctcactcattcagactcaataacctcctcatcagggcctttgcacttgctgtttcccctacctggaaggctcttcccccagcattcccacattaccttcaggtctctgctcaagtgtccccttatctctatctctcttggcctgctgtttttctgcataccatgtagcatcacctaacattatatatttactgtctgtttcactccactagaatgtaagctcaatgaattaatataaacaaggatctaagaacttcagataatgataactgctataaagagaatgcaatagagtgatgggataaagactataaagagatggaggggttgtcatttaggtcccttggaggtgcttacatgtgaactgagcccttagatgatgaggaggcagccacatgcagatccacagagaaaacagcaagtgttaggagtgtgagccaggtatgggctggcatacttgaaggacttattcatcttccattacactgttcctcgcacagggcagggctcagggctgatctccatgagcataggttggattgagcagagttgaaggctctgcccctgtcccaggaggggcttcaatcagacaaaacccagacaagaaggacctgatgatgagtactgtcccagagagcccactccaggactggccctgttctgtgagcaggtgggacacagagatgttaatgtcactgtccctgaccctaggagctcacacctggttcagacggtaaggaagattgtggcatttgggttgagagaatggaaggagagaggattccaggggtcaaaaagggcctgaataaggactcttcaaggagtaatcctggtgtttctttgggagagaataggtcactgtggctggagttcaaggaggatgtcaggaagcagaggaaaaggaggcttgggaggcagctgccatcttgaaaagagctcagctgtcgggtagaacttgaacaagtcacataattactctcggcctcagtttccttatttgttagatgaggataatactgccacacagagtatgaagccgctcagtgtcctgcacatagcaacctcagtaaagagaagcttgctgctgtgattatagttgatgaaaagaccttcgatgctgaaggacggactactacatcgagtgcctggcactacagcgagtgccaggggcaagcaccgcgaggacatggagatccgctgg

SEQ ID NO: 2095 - DNA, 1641 bp, Artificial sequence
  DNA replication origin
ggttcgcagcaggtcccggaagccctcctgggggcggggccaccctaatcggcaggtgggacccagccccagccggggcagggcccctttaacgccccacctctccgccacgactttcgccccggcgtgacgtcaccccagcgggcgaccaatgggagtgcggcttactggcaggcggcgcaggcggccgctgccaaaggggaagtgatctggggctggagcgatggcccggggctggagctcgcggccgccgccgccgcagccgccgccaccaacgccaacaacaacgtgtcgggagcagccgcggccgaagccggagcaggggccggagtcgcggctggagtggggcctgcgcgtgtgagtggccgagagttgcccgtgccggagacctcaaactccgggcgggagcgctttcggtcggccgagccgccgtcgcccgcggcaccgtgtccccaaggcccagacagcggggcgggggtctatcaggcgcgggactggcttctctcaggccgacccttctagccgggctccggatcttcctcggcctcgggcccccttcacgttcaggacggaggccggagaacggtgatcatcacacaccccagccggcttcctggccagggcattttctctgcggccaagcagtgttgggattgtagctgctgggagccccctcctgccgccacctctcctgcaaggaagggactgacgcgttcccactttcttactctgcacctccccactctcttcccattcaagaacgagtttctcttccctctccattggaaatcttgctccggaggtccgaaacacgtattttaagcgtgcccttcctcacctcctggagcacccttagaagtattgcctacttatccgggctgagaatccttcatttttgacctggcttttttttcgccctttgggagataaaggtccctctccaccctctactaacactctgcacccaaggccttatcctttggggtcaccagctccttggccatttctatgtgatttcccccacccatctgagttccagtttcctctgggctccaatctccagtccctggcggatctggtcagtcccacccctaggtgggagtgaccagggggctctggcccaggattcccaaccctggaaggcagctccaaggcaggaagagaattgggcatcgggtacgaacctggcagctcaggagtcggggctccactcaccccacacaaaaagatgaaaaagcgcaaagagctcaatgcattgattggtttggctggggacagccggagaaagaagcccaagaaaggcccaagcagtcaccgcctgcttcgcactgagcctcccgactcagactctgagtccagctccgaagaggaagaggaattcggtgtggttggaaatcgctctcgctttgccaagtgagtagtggtgaaaggtggaatgggaagaaggcatctccttgcactaccaaggggccacattgacaggaaggagaaaggaagtccttaggaagaaaaaagggtgtaggccttggaagtcaaagagggaaaaacggttttagggagaaggtaagttcagatcctgaatgaagaataagttagagatctgtctttaggtgtagaaagaaaagctccaaatctgaggtg

SEQ ID NO: 2096 - DNA, 1868 bp, Artificial sequence
  DNA replication origin
tgtgggatgtctaaggaaatgagcaggtgttcgggtccctgtaaccctcatgagagcagcttctgggaggcttcagggagagcccacactgcagggggtttaaacttgagtaagagacgagaaggttgttgttgaatgcccttcagatagactttctccacctgccccagctctgcctgaagggccaccaaccacatctgtgcccactgcccaaggcacgagctggggaaatttggggcagacactgcatcctgcagggcctgctgtggaggctgaactgagggcgtctgggacagagagaggctttggactcaggataaatcttttgcaaatatttggccccccactatggagtggggagaaagtgagagaccccatgggtggggccagtagccgcggctgacatgccctgttgcacacagctctgggaagggcagttgctagccttcgggcttgtgagaaccaggacccagaatagggtctgcttggacgaggggggccccactgaggagccccactgatgaatcccatccccagggagcctgcacacatgatcctgaccgtcggaaacaaggcagatggagtcctggtgggaacagatggaaggtactcttcgatggcggccagtttcaggtgaggtgcagggcagggctgcccggtctgtgctcccagggcctaaggagaatctcaagacaggtgctgctggggggaggtggctggggaggacggagactcatgtgggcaaaagctagtgaggcaatgggggctttgtgaggattgcagggctctgtggggaaaatgcagcccctgtgtggggcgagggctgcagaaggggacggagacttggtagggtagggttcagcgtaggggaggggactcatagggcagtgggtacaatggggacaaagggttcaatggaggaaggaacaaatgagtgagggactcagtgaggggaaggctcagtagaggatgcagctcagtgggggatgggttcactggggtatggactcagtgggggatgggttcactggggtgtggactcagtggggtatggactcagtggggtatggactcagtgggggatggagctcagtgggggatggagctcagtgggggatggattcagtgggggatgggttcagtgggggatgggttcagtgggggatggactcagcctcagtggggcatgggctcagtgggggatggactcagcagggtatggactcagtgggggatgggtttaatgggggaattggttcagtggggatggactcagttggggatggagctcagtgggggatgggtttagtggagcatggtgtcagtgggggatgggctcggtgggggatgggctcagtaggacccagtggtgcagcagtccacaggaggagggagataggtgtcagggaggggatgctgagaggcctccagtctcggatgcataagcccagatgtggtcaggacaatccccttctgggagtcaagtgtttattctggaagctattactgtcacaagtgcaggaaggggcagggagaaggggatagaatgggaggagcgatgacccatcaggcccatgccttcttctttcaggtccagtgagcatgagaatgcctatgagaatgtgcccgaggaggaaggcaaggtccgcagcaccccgatgtaaccttctctgtggctccaaccccaagactcccaggcacatgggatggatgtccagtgctaccacccaagccccctccttctttgtgtggaatctgcaatagtgggctgactccctccagccccatgccggccctacccgcccttgaagtatagccagccaaggttggagctcagaccgtgtctaggttggggctcggctgtggcc

SEQ ID NO: 2097 - DNA, 1967 bp, Artificial sequence
  DNA replication origin
gccagcatggcccccccgcacctggtcctgctgaacggcgtcgccaaggagacgagccgcgcggccgcagcggagcccccagtcatcgaactgggcgcgcgcggaggcccggggggcggccctgccggtgggggcggcgccgcgagagacttaaagggccgcgacgcggcgacggccgaagcgcgccatcgggtgcccaccaccgagctgtgcagacctcccgggcccgccccggcccccgcgcccgcctcggttacagcggagctgcccggcgacggccgcatggtgcagctgagtcctcccgcgctggctgcccccgccgcccccggccgcgcgctgctctacagcctcagccagccgctggcctctctcggcaggtcaggggccaggggccaggggccaggggctgggcgggtgggcagggcgaccacccccaccggggtttccttctacacatcggcggcggcctgccctgggggccgagcgggtggagcgcagggagaggaggtcgttttaaacccagtggctctagagcctcaagctggagcccccgagtgagtgccagtgagggaggggccttctgtgagagagagtgtgcgtgtggctgcggggtgcatggctgtgtggaagccgagaggaggacgtggacaccttcgcgggtgcaggcatgtggctggtgtgcttggtggtggtgtcgtgggggacggagaggaaggagtcccctgagcgtgggtaccaggaaagagtgtgcctgcatgtgctttgctgtgagcagaggtagatgtttgtggtgtgaaattcattcggaaactcagcgctagctggacaggcaagagataaggatctgagggtggtggcagaggcaccctcccccgaatctctgctggagggcccgcctgaggactgacctgtccctccactcccagcccctctgctcctagccgtggtctctggccccagcctgtactccggttggtgtcagggcatccgtttccctgctggcgctactgtgatgatgagggagagaagccatagggttggaatagaaaccggcagatggggcagggatagagtgtggggcagtcaatgaacctggcgggcacccgagacagagctatggggagcttagggtgggtgagggcagagagctaggcggagcatttcagctgaggggagtcagggtttcctgtctgttgtgtatctacagccccttatgggtggggtgaggtggggagaggggacagtgtgcccctttgtggtgaccaagatgcacaccatcaggtgtgaaggttacatttgcctgagtgggcatgtgtttgggagtggaggtgtgtgtggattatgtgcttgtttctggggcgggagaatggagagtgtttctatctgtgaagtgtgtgtgtgtgtgtgtgtgtgtgttcatttttgtgtttattccatgtgttattcacctctgcttctgcatatgtgcctgtgtttgtgtggagggatgtgtggttaggtgtcttttcctccctttgcttgttttatgacagacagagtgagggcattccgtgtgtatgtgtgtgtgtgtgtctgtgtgtgcctattcccagctcaagtgtgaagggaccagggttgcccagaggtggggggctcaagacatgtggggaggatccctaaggaagctctttctcccctcccctcaacatgggatcttgtgatctgcccgttccctcccacagcgggttctttggggagccggatgccttccctatgttcaccaccaacaatcgagtgaagaggagaccttccccctatgagatggagattactgatggtgagtctgccccaccccaccgttgtacctgcccctcacgctggttagagccctctggaggagggaacatctgggactactccgtaggtatctcacaaagatgggcgggccactttccaaacccaaactgccgaagcccttcaccctgcag

SEQ ID NO: 2098 - DNA, 1124 bp, Artificial sequence
  DNA replication origin
gtcgccgggcagctccgctgtaaccgaggcgggcgcgggggccggggcgggcccgggaggtctgcacagctcggtggtgggcacccgatggcgcgcttcggccgtcgccgcgtcgcggccctttaagtctctcgcggcgccgcccccaccggcagggccgccccccgggcctccgcgcgcgcccagttcgatgactgggggctccgctgcggccgcgcggctcgtctccttggcgacgccgttcagcaggaccaggtgcgggggggccatgctggcctcggccgcgtcccgtccctctagctgggggtcactgcgagccgcctcgctcggcggccgctcggtcatcctgtgggcagacagacagacaagcggatgcccgctctgacgaccgcccctgacccaccgacgtgggctggggtaaaggggagaagggcagagagaggaactcacgcaccgagacgtgagaagaggcagacaaagttagcgccacgtggggctagggcgggaggccggttggggctagggtgggagggaaagagggtctctggattgggagaagggaggggtgcctgggagacacagagactgagggccaaaaggacagagatggaggaagacgacagagacaccggaagaaaaggaatacagccagcgacagaaacacagaaggggaaatcaggaggaaggaaatgtacaaggaggcaagaaagagattactctgtcccctttctcaggcctaaagggaagaggagggaacaaattccggatcgtgctctttggttttagcggggaatctgtcaggcaggggttcgttgctttaggaacctcccttggcctctcagcaatattcccagcccacctacaggcacacacccagaaacccggtgcggatggaagtagggaattagaaagtggaggctacggggactgggatccactccgccagagctggcagagaataatcccgaggaaccagctccctccacacacacacacacacacattcgcccccgctggggagtgagggagtgtctgtctacactgagcaaatccactgtgagtcctctgcccgcccagcggatctttactcccactcagacagagatgagaggtcgccaagggaa

SEQ ID NO: 2099 - DNA, 858 bp, Artificial sequence
  DNA replication origin
ggagcgggggccgcgggaggggccgggccgccgccgctcaggaccgggcctcaaaatggccacacgcgtacccccgtagcggaaaaacgtgagcattctggcctttttctaggggaaaagcaacccgcggcctcccaccgaattcttcatcaatttcctcctctttttccccacgtccgcaaaagaggtcttcgctccctttccctcggttcctttcgatggccggggggggcggtgggggggcattttccacggacgcccccgccccggctgccgccgcccctcccgcctcggagactctcttccttccttcccccttttccttacgcaatatacagaaatgcgcgaggctgtggttggttttcatttcttcttcgtggttgtgtgcatgcggtgggattgtgagagtgcgttcatgagaactgtgggcggcgttggctgcttctaagtgtggtcttcttggcgacaggctctgtgtccgagtgtggtgtgcctgcgcggttggggtgtgtagatgtggacccttcgaggcccttctgcgttttcttcgttgcgtacgattgtgctccgttggtgttctcagcagggatctgattctgtgtgtgggggtgtgtggcccctgcgactgtgtttgggtggtgtcgtcgttatgtcgggcgtgtgtgatcccgactgtgctggattgtgtgtccgtgagccgctgcgtttgactgatttcgttgtgtcctgttgggcagtgtgcggggctgaccaagtcggcttctggggcagtgctaggtggtgtttgtttgctgcccttctgtggggctggaccctgtgtggtcctgtccgcactgagttgtatgcctgtgtgcctgt

SEQ ID NO: 2100 - DNA, 1858 bp, Artificial sequence
  DNA replication origin
gccctcggccactgccacgcgggcggcgcggtggccgccgggactcgtagtctgcggctcggcgactccgcggggcgcggactaggggcggcgggacaggccggcccgcatcccgtcaagccccaaggagcccgcctgctgcccgggcctcacctcgacgatgcgggcgcactgggtccccttgccggcgccggggccgccgaggacgaacacgaccagcggcttcatgagacgtggagagcagaggagaatcggccggcgggtctgcagcaggaagctaaggcccaggacgtggagcagcccgctgcggcagcggctcagcatacaccgcgcctcggccggacgctgagggagctgacagcggccggcgcggcgcggggcggggcggggaggcggcgggagaaaggggcgggctgagccggcgcccgccgcggccccgccgccgtggctgcccgggcgtccgcggccctgtcggaaggggaggagcttcgcacggcggcggcgtctcggcgacactcgtgcggtccgcgccagctttcctccaacccttgggtggttattagtgctttctgactgcagatattttatcctgcgccctcaagtgtctggtgctgagctggaggctgggacgtgatccgcgggagagcaaaacctattgtctctgctcgcaatgagtttccattccagccagtgaggtatggggaggtagccagtgtgaatgagtaaacaccagtacatacaaaaggcagtacgattttgaagaaataacaagtaggacataagatggccagggtcgccagagaaggcttcagaagaggtgacattcaagccaagacaaaaggatagaaaagagcgaaaccaggcaaacaccaggatagagtgtcccacagagaaaagcatgtgcaaaaaatctaagttggtttggcatgttaaagcaattgaaggaaggcctggctgggcgcggtggctcacgcctgtaatcccagcattttgggaggctgaggcaggaggatggcttgagcccaggagttcgagaccagcctggacaacatgacgagaccccgtctcgaccaaaaatttaaaagccgggcaccgtgacccgtgcctgtgatcccagctactgggatgttcacttgagcctaggagccgtaatagcaccactgcactcctgcctaggtgacaatgagactgcttcaaaaaaaaaaaaggaaaaaaggccagtgacagtgagaccagggctgagtcaaatgaggggagaatggaaggtgaaaagttgagaaagtgaggtcggtggcagatcaggacttttgattatggaaaggaatttgggctgtattctaacagcaatggaagccctttaactccgttcgcctgcccccttcattagggaagaatcttaagggagaagaaaaggagacgttcaagaactgagccttggtgcatacaggcctttaaaaggccttctggccaacgttaagagctcatttgatatttgaggtaacggattcaaaataattgaagatgtttggccattcaggcacaggcagagaaggcagcttgttgcatttactgagggttgggattttgcctggcaagtacaacagagagagggggccaagtgatgagagtgtttggaagagaatgttcatgatgctgtgtgtagaatcaaaaccatacaggaaagcaaataatggcacatgaagcctggtagtggaggggttggagggtggtggggaaagggaccaatgtcttagagcattggcccaagaaagattgcagtggggtatatgagcaagtgctctggcagtatggatgctgctggtctgagtgggatatttggaattgaaatgtcccagct

SEQ ID NO: 2101 - DNA, 1302 bp, Artificial sequence
  DNA replication origin
actagctttggtcacctatacctagggacactctatagcatggctgggggactaggatggggcaagtgagatgccccaaatgtaaggaggccctggctctcaagtgctgactgcacttgcaaggccctgagactgagctccccttaaactcagcacctcaggcacctcagtgggctcactgtccttccagccctgctccatgtccaagtcccttgatctgcctgtccccaggacaacccactttaagacaaggctccttcaccctgtagttcccttggagctggggatgggtctcctgtctcttgggagaagaagtttcccaaaataggctgggtgctgcatccccctggatgccagttgtgggtggaacttctcagactgagtttttaacaaacactgccaaagaccccccatccccagtgagatgtgagtgtggtgtttctgggtcagaaggcggctttttcagacccccagtctgtggaagcctacattttgtactgtgtgtgtgggtgtatgtgtgtgtgtgtgtatgtgaagaaaagctgttttctttaacaggggggtgtggagaggaggcagccagaaaggcagctccaagttgtggatttcctgggggctcttcatttaaagcggccgcaccactttccacaattctgttttttcagagaatgctctcaaggcctggagggagggcatgacaggggtatgggggaggggggtggcagagaggcaagatggtgaccctgatctggagcagtcaaacattctcccagagacaaaaccggcctggctctgccctgccccgctgcttcattaccttggcccaggttccctaatgtctgtgagtgggcctgacacctccccatcaggatactgagggctggcaaggcggccttcatctctgttccagctggggatggaaggccaggagaaggatggggggaccgactactgggaggagcaaaatggggaggagcaaaatggggagggggctgggagagtgaatgggtggatttgtgattgggaatgatccaaaggagagggggtagaaggaggggtggaaagggaaggggactgaccaaatacagtgggatggggccaggggctgatataaccgagatggggaaggggtgagtctgggtctgggaaaaactgatccaaaggcagaaagggaggggcgaaatggaggagggtaccgtgaacagagtaagggggctgggagaggaaattagaggggaggcgctggccagcaggcaaggcctgagccctctcccccggcggtggttgggggggggccgtgtc

SEQ ID NO: 2102 - DNA, 947 bp, Artificial sequence
  DNA replication origin
cgcggcgccagggccgccgctccccttcccctacgcgccctacgcgcccgcgcccggccccgcgctgctggtgccgccgccttctgccggaccgggcccctcgccgcccgcgcgtctgttcagcgtcgacagcctggtgaacctgcagccggagctagcggggctgggcgcccccgagccgccctgctgcgccgcgcccgacgccgcagccgcagccttcccgccctgcgctgccgccgcctccccgccactctactcgcaggtccccgaccgcctggtactgcccgcgacgcgccccggccccggcccgctgcccgctgagcccctcctggccttggccgggccggcagccgctctcggcccgctcagccctggggaggcctacctgaggcagccgggcttcgcgtcggggctggagcgctacctgtgagcctgcgccgcgcgggcaggcacctgtgcgacctgtgccccggacctgcggcgccgccctcgagcgccccatctctaccccccaccctggcttggagcacaccctgcgcctctcgtcgtggcctcctggactcaaactcctgctacatccttctccgtcccccatccctggggaggctcccaccatctcgccactggacagaagcgtcccctttgacctgccagcctctcatttcttctccctccacttgtgagcgcccccagctttgcggcgccccccaccccagcgctgtctgtgggtcccttgccccggagctgactcgcctccagtgagtccataccccaggtttcctggtgagttccaagcctttggaagccagatctgtgatcccaagccgcctcctccaccgactgtacttcatcaaccttctctcatgtttttccgacactcctgggtcagactcctgggttcatgacttacttgctagcgtcccttcattttcccacaagtttgcccc

SEQ ID NO: 2103 - DNA, 941 bp, Artificial sequence
  DNA replication origin
gcgctggccgagctcgaaccgctgaaaagggccgcgtgcaatcgttccgctgtgcctcaggacaaactccgcttcaagccagtgccgctctccggcagtttcctgattgacttaattagatccgcataatcgctggagggcttttctttcccagagccgagaacagctcatttatggggaccaaaaggaagagagggagagacgacccggacgccactgatagcaacgtactcttcgcaaaaaacactcagtaactagtggaaaagcccaacaggcatccccctccgcccgccaacgcttcctcccaattgttctgggctgcacgagggagatggccgggccgtggaacagatgcagaaggaggcccggcacgaccagagacgctgtaaccaagacccgcagagcctgtggcttcccgctctttggcggctgcagcaggcatggtgctggagcccaaggcttctgggaaagagtccaggttttcgcggagggagcgacggactcacgcgggatcgcaggcactgctgcaagacgccgaacaggctgagccggtaggcgaaagaagtaagggtcacagaagaagcaaagaaaacgaaataaattccgaatcccgcggtggcccttctcccagtccccagtgcacttactcctgacactgttgaaaacaaactggcccagaaccttggaagggaggagaggctactagaaatccctctatacagagaggagctcggttagagaaacagctatttggataaacagaggggttctgggctaggaacccggacacgtaggtccaacccagcttagcgcccctcaaaagcctgacaagtaacatgatctcctggacctcagtttccgctcctgtaaaaagtatgtatgtgaagggtctggattctccctccccaaccctgcagagcagaagctggggattctgtact

SEQ ID NO: 2104 - DNA, 1334 bp, Artificial sequence
  DNA replication origin
tcatgcaagaagcttctctccaagacctttttccccggacagtctgtcacccaggaaattccaattccagggctactagtccctgtccaatttgctgtccatggtttgaggacgagatttctcttttttccaatgacagtttatgctggaacagcacattaaatggatccccttggtcagaggtcccagagggggcccaggcgacttcctctcaaaggacatgagtagtcagacctgccttccatttttttctgcccttaccttggggggatgaagaactctattttgaggattctgtgaaaagggttgcaacccaactctgttctatttctttgcaggagcctgggtgagttctttctccctatcctgggcctctgtagctccatctgtggaatgggagagttggattaacaccaggctatcccgtagattggaggctgctgttagatgaaactgcaaagtgttctcagtaccctttcctaaatggcctagaatatggctacacttatacatcagttctgaggtaggtgttactagcctcatttttacaaaggcagaaacaaagcgcaaagaaccttgcccaaggtgacagatagggtaagtagtgaaggcaggattggaaccccaggagcctgacttaaggtcgctgctcttaactactatgcagaccaggaaactgaggctccgaagcggggaagtcacctaatgagggtcacacagccttgctacagcggaggcagctgggattccggcctcgcacgcccgagctttagccactgtgcggcgctgtcggggcagcagcccaggcatccgctcagttcctgctcacgtccagcgcccatctccccttccgtgccccagaggctgaaatgggcccaatctgtgttgaagctgcttgtttctgggtcctggagggaggccgggggagaaagaggtctaataggatgggcaggaacccggctagcgagaaacaaggcacagggccaaccttagttgcacaagacttttgagagatgaaggcaacacttggtggaggtcagggttcactgagggggtgtcgggcagggggcggaggaggtcctgccgcctgtcggtggggcccagaaccctgggagccaggaaggtggggggtgtccagtcctcagggcaactggggccagggagaggggagggagaaattaagcggattcccagacccatgaacagacatccagacaaatgccgtttccacagagactcacggagagtgagatagtcacagagactgagacaaacggatgccgagatccagagggtcggagaacaggcaaactcggagcagtagaccggcccgc

SEQ ID NO: 2105 - DNA, 783 bp, Artificial sequence
  DNA replication origin
gtgggcagacccgccgcggtgccggctgcgggaggactcagggacgccgcgtagaaggctttggcgcagcccagctccgcgcccaggaaggcgggcaggcctgcggggcccgggcccgggcccgagcctgaggcaggcgcaggagctggggccgatcccgcgcctgcgaacaccgaggccgtcggaggtccgggtggaggcgcggcggcgcggcctgggggtaccgacagctggcaaggagcggcggcggctgccgcggcgaaagcgaaggcgtgcgggtgcgggtgcggatgcggggccggccccggcgggggtgcgccgtaggccgggagagccagcccgtagccgtagccgtaggcgccgtaggcagcgaagccgggcaggaaagcgccgggatcccccgccgccgcggccccgccacgcagcagcagctccgggtgagggtgcgggtgtgggtgcggcggcggcaggggctgccgcttgaagcgcttgcgacgccgcaggaagctgccgttgtcgaacatgtcggccgactccgggtccagcgtccagtagttgcccttgcccgggttgcccggctcgcgggggatcttgacgaagcagtcgttgagagagaggttgtggcggatgctgttctgccaggcggggaacttctcccggtagtaggggaagcggccgctgatgaactcgcagatctcgctcaacgtcagccgcttcttggggctctgcaggatggccatggtgatgagcgcgatgtacgagtagggcggcttcaccagcggg

SEQ ID NO: 2106 - DNA, 1324 bp, Artificial sequence
  DNA replication origin
atctcaccgcttccatatttcattacctcacgcggagcctgtgagagggccctaatgggagtcagctgtgtttttactttctgttgtcggccgggacgggtttctctgcggattctttgaaatgaaataatgtgatgcacgccgcgataagggccggcctgtaatgaggcccaggccgccgggcggctgctattgctccaggtgtcgcgtatttgggctgcgaggacaaggaggaggagggggcggcgccggaggatcgggggggagggggaagtcgcgaggggcagggggtgggagaaggcggagggaggaggcagggggcagggggcgggcggaagaggggaggaaggagggggcggcgggccgcggcaggccaggcgggagaagccggagacagagagaggacggggacagtggcggcctgcagagccctaggaacccgggttcaaatcctgcccgccagcgtgagagagcgtttgcccgcccaggcggtccaccggggtgaggctaatattcatctcacggggttgtgtgcaggtaaatgaagagggtttgtaaattggaaaggacacatcacacataaaaggaatcatttactgagagaaaggaactgacgccctttgagcatcccctctgggcatggcagctgccagccacttcactgaatgatcacagcagcctcacttgctaagaattgttaccttccctttacacaagaggagactgagggtcagagcagcgaggggctggctccaaggcacacaggaagaggctgagggcagccctaggcaggtagccagatggagatagagttggaggagaagttggtccactgcccgctgactgggccaccctggcacccccctcgaggggagctgggctttcttctccaccttgctctatgggcctcctcctgtgggtctgaggcctttgccctccacacggggatggaatggggtgtggtgcaggactccttgtaggaggggcagtggctggctgtggggagaagtccttaggaagccccctgttctgagcatgctcctctgttcaaaatcccacagctacagtccctgagtgtcagcttgcttcgtgtccactctgtcttcatctccaggaaataaatgctctttgaggagtcttgtatctcctcagtgtctcttaaatccactcacttcttgccctccctcctggcactgccctgggccaagcttctggtcctgcttcggacactgaagggatctttctgaaatgctgactcacgctgctgtccttcagcatcgggctcctcattgctcccaagggcctctggcttccctagcatgcc

SEQ ID NO: 2107 - DNA, 1686 bp, Artificial sequence
  DNA replication origin
atagagagggaggctggggtcaggggggcctagaatgacaggttaaggagtctgggttttgcccagtagtggaatgggagctaccaatggtgtttggtctgagggtgccatgctgggagtgggttttcaggaaggcacctctggtacatgggaaggtgggagggtgggtgtgaatctgagactcaggtcgggggtgcaagcttgatttctctcctcctttgggtgggcagctggcagcctgctgggcagggcagggtgggtgggaggcagatagtgggggtgagctccttaagaacagcatcagccttcagcctgtggaaggataaagagctcacgtttgggagcagccagccagcatgtgtcctgggactgggcttcctagccacacactttcctgtaaggaatcccacccagagctgttcctcccaggcccagccctctggggagcggggaaggcggggcctggctgtttgcactgcagggaaccaggtgggatgtccgggtcccttttattgtactgccaggggcactgagggaacttggtgtgtagggtgtgtgcccgtgagagtaagacggactgggggcacctgagagaggtgtgtacaagtgtgaggctgtgtgtgcatgtgaacaagaggacatctcttgcaatgtgtgtgaagctgagtgtgggtgagtgtgagattgtgtgaggcctctgtgcatgagcatgaaacggcacagcaatgacagggggtgtgtgtgtgtgtgtgtgtgagtgagtctgtgaggtgaaggtgagtgtgcttgtgtaactttagtgtgtgtgtgcctgtggggtgaaggggtgtgtgtgtgtgtgcctgtggggtgaaggggtgtgtgtgtgtgtgtgtaactgtagtaggtgggtgtgtgtgagcctgtgagatgaaggtgagtgtgcatgtgtaactgtgttgtgtgtgtagtgtgtgagtctgtgaggtgaaggtgagtgtgcgtgtgtaactgttgtgtgtgtgtagtgtgtgtgtgaatctgaggtgaaggtgagtgtgcatgtgtaactgttgtgtgtgtgtagtgtgtgtctatgagatggtgagtgtgcgtgtgtaactgtgttgtgtgtgtctatgaggtgaaggtgagtgtgcgtgtgtaactgtgtgttgtgtatgagtctatgagatgaaggtgagtgtgcgtgtgtaactgtgttgtgcgtgttgtgtgtgtctgtgaggtgaaggtgagtgcgcatgtgcgtgtgtaactgtgttgtgtgtgtgagtctatgagaaggtgaggtgcatgtgtcactctgtgtagtgtgtgagtctatgagatgaaggtgagtgtgcacaactgtgtgttgtgtgtgtgtagtgtgtgtgtctatgagatgaaggtgagtgtgcgtgtgtaactgtgtgttgtgtgtgtagtgtgtgagagagtctgagatgaaggtgagtgtgcataactgtgttgtgtgtgtagtgtgtgtgagtctgaggtgaaggtgagtgtgcgtgtgtaactgtgttgtgtgtgtaatgtgcgtgtgggtctgtgaggtgaaagtgtgtttgcgtgtgtaactgcatggtgtgtgtgcgtgagattctgtgttgtgtgtgcacagccagcagcatgtagaggcagggaggcctggtggagcacacctgcttcccggtgact

SEQ ID NO: 2108 - DNA, 917 bp, Artificial sequence
  DNA replication origin
tgctgacccagcctggcccagcaggagaacctcagctcgggaaccgcggggccctgcgggggaaggtcaggctggcaatttatggtgtgtgggaccaactctctcccgacacatgatctgtcaagggcgatgttttccttggaaagctgctcctgcgtggaaccctcttcccggcaaggagctctccctcaggtgctcacagagttcaccggcaggcgacggggaggccggggcctcctgggaaggggccgtttccatcagaaatgacaaatggatttccttagctccaggcctcagcccaagcacattctgccgggcagaacggcctcataaaggttctgagagggccacagagctctcgtgggctgggagggaagcctggcctggctctctgccccttctacaccagaccctcttggtctcagaggctgcagagtggccacagaaacagagatacagggatgcagagaggggggaagagaggcagagatgtagacacaggcacagagagctcaaaagtcaaaaagactgagaatgacacagagacagagtctgggcagggaaggaacagaggaagtgcccaagaacaaaagcacatggtgatggagagcctcagagacagggaaagacagagcaaggagggagaagggacggtaaacacgtgcagtaagcgacggcggcgtgggctggggccatggagaggcagcaagaaggccggagagacagcaagggagagctccagacagagccgaaagatgagacagacagggagtgagggcctaggaagaagtgaaggaagaggccaggagacagagaaaagaagagctgtgggcggagaggccaatgtggaggaggctgtcacagtccacacaggacactgaggtgaaaaaaccaaatctctgtgaccccagtgaaag

SEQ ID NO: 2109 - DNA, 873 bp, Artificial sequence
  DNA replication origin
gtggatgtctttatgtcatttaaaacagataggaacagtgacaaatacaactcgtccaggagattttgtttccattacaggtgtttcagactcactgtctaaatagggagggcctctggttccacctttcctgctacagatagggaaactgaggtccaggtaggacgagctactgcttgaagtcatagagccattagtgatttctgtgagtaaatgtatacagagcacacagtaagtggtcaataaatgttagctactatattactattattgttatcatcataagttattatgattagcagagcaagactaagactccagaactccttctccctctggtttatgggctcaagatctctctcccagttgagaagacactgaaggtgaagtagaaatctgggcccccacccagtcctatcttctgtaattaagcctagtggatgtactccagttcttccagtttccagagaaaaaggctaaggaaggttgttaggaataagtgggggcggggagagggggcagcatgatgaaactttgaagggaggtcctgtcttggtgaggggcttcaaaaggcagcagcctacttgtgcaaccttgggagaggccagcctttggagacaccatctttgattagcatgggcaggacacagcagctgcaggtcgtggggctggcagcaccctttctgccttcagttccctggggagtctcttcaggtcaaggaaatctttggttctaaccacttctccgagccaggactgctgggtggtctaggggcaggagggcagaatgagggtgggtcagggcaggcctctggtgcaacaaggggtgtggggtggaagacttgggatggggggaggtggaatcgatgtgag

SEQ ID NO: 2110 - DNA, 1009 bp, Artificial sequence
  DNA replication origin
ttccagtttccagagaaaaaggctaaggaaggttgttaggaataagtgggggcggggagagggggcagcatgatgaaactttgaagggaggtcctgtcttggtgaggggcttcaaaaggcagcagcctacttgtgcaaccttgggagaggccagcctttggagacaccatctttgattagcatgggcaggacacagcagctgcaggtcgtggggctggcagcaccctttctgccttcagttccctggggagtctcttcaggtcaaggaaatctttggttctaaccacttctccgagccaggactgctgggtggtctaggggcaggagggcagaatgagggtgggtcagggcaggcctctggtgcaacaaggggtgtggggtggaagacttgggatggggggaggtggaatcgatgtgagtggggtggggacggggagggctggcgcaaaaggagagttgaggtcagcgttgggaaagtttgtgggggggggggggtggggagggagtaggcgggaccagcagatgccagaacgctaaaagggtccaggggacccggtaggggtccatgacagggtggagaggagactcccttccccccagatcccgctgtcccaggtggctagcaggaggggtacaccgcgagtcactgagctccccctacattttgcgtctgaggctccagaacatgtggccgacacacccctactcccaaagggctgtcatttggaacgtatttgcagacacatggcttgtttttaagttaatgctttttaattcactgtttcccagttgtcgttttttattgcaaaggcggattctgcccgtgtgtgttcctttgcgggggcgggggatgggggtagcttcgcgggcaaagatccgatgagagagaggcagagaaaatgagaggcagagacagaggcaaaggcacagcgagacaccggggaaacggggaagcaggtcagagaggaagagagagacaggccggaagagactgtgcccaggagcctgg

SEQ ID NO: 2111 - DNA, 840 bp, Artificial sequence
  DNA replication origin
ggatgccgtgcccagggaggggaaggccaggggccgctctagcggcgaggggcggagggtgtgctgagaaacccggctccggggacctaggctgacgcccccatctccgcctaaggcccctggggctgagcttgcttccccctggctctctggttcctttccgagtggaggagggtgaactggcccttgggagagggctggagggacgcggcgggaacgggctgagtacgcagcacccgggtcggcaagggctggggttctgagatcagagagaaaagaggacctgggagtcggaggcgatctccctggccccagccgaccctctgagctctagcgagcctgaatccggctctgggggtggcgccccccgcctgctgcggctcccggggccagcgccctaacctttcagagcctggccctgccacctgtagaaggaaggcgcgctggtggcccgttcaagcaggcagtggcagcaccgggggccttctagaagggacgaaacggctcaggggccggggaaacttgtttggcttgacaacgcctgggctgggcggttacagcagcaatcccgggattctcggccccggggggtcctgtttacgcaggactcgcggcagactggagggagtggggcgctagagcttccttccttagcagctgagaaccatttcatccccaccaccgctatcctgagaccccctcctctccccatctgcgtcggcttcccgcgaaccttccccggcggcatcttcaaacacacagcggcggacacacaaagacgctcgcgagccagcactagtgtaggcactcgggcacacacagatacacgacgcaaggtcc

SEQ ID NO: 2112 - DNA, 942 bp, Artificial sequence
  DNA replication origin
tgtgcaaacagccgcggcagagggcgcgggctaggccgcggggccgcccctcccccggcctgaccctggcagtcccaccgcagtggaggggctctgctggcgcagctcgagccgaccgctaggggagagcgcgcaggagcacccacgagacccgggaatcggggtgcgccgtcagtgcccagagccaccgagccccgaccacacacgcgggcgcgcgttgcggcccggcaatctcgggatggcgggttacagtcgggccagaggctgagcccagaactgggggccgaacacccgctgcccttcgctgcccttcagcggggaccgggcggggtggggctgagcattctggcccctaggcttctccgactgttttggcctccggagcaacccggtgtctgcggaagattggaagcgactctccagcaccccgccgccgaggcccgctctcccaggccatgccggctggcgccgaggccgcgggacctggaagggtcggagtctggtgctggtgccggaaggccagccagtctctgtccggatgagccacatgatcccagaaagagcagcctgagccttagtctgcgcgcccaaaaaatgagaatgcagagaccattcatacctcgctggaggggcttcagatgctgagtacacgggggtgggggcggggagagcaggagaaagggctttacatgaatcctaacgtgtgaatgtttgcactgagagccagacttagccatctctttttatgggcctaggtgcctgcggcgggctggcttggcgtggcggcagataattatattcctataattataaatgaagctcagagaggccaaacgtctcacaagaggtcacacagcagtaagaggcagctggtttttctgacttcaaatttcaagttcagactgcacaactctccgccatccctcccggacgcccctggaa

SEQ ID NO: 2113 - DNA, 1299 bp, Artificial sequence
  DNA replication origin
ggtatatgagctttcccttactgcctccctcataccttgtaaattgtcacagaagtctccctcactagattcagttttagaacaggaacatagtttatttttgttaaatcaatcaaatacatttaccaaatactgcttaacaaaaaaaaagaaggtgtctgttaggttaagagaaagggaggccgttggtgaccttagcaagccatgtttgggagagtgatgggggtcgtataagctggattgcagtggggaagagaatgggagatgaaacagaggtagctagtgtagacaattcttttgaggagtttgtgtgaggtgtaggagtaggcacctgtcattctttttggttgcccagtaactgcatcatctccctatttttggagaattctctacctatgaatcttgctgagaaacagagcctgtctcacattacacatgaggaaggtaccagataaatacagtacctgtcttcccagctggcctggagtggggatgaacataggacaaggcttatgtatcagaagtgttatcccagactcaaaatcaggaacaagtaatgcacaagaggaatgtgttctgagagcactgctggctgtaaaatgatgagttcctgggatagcagagctagctacagtggtgtaagcagggctcaccatggcaccaacagaaagggaagcggtggtagtggtagtggtgatggtgttagtggtggtgatggtggtggtggcagtggtggtgatggtggtggcggtggcaatggtaggggcagtggcgatggcagggaggtggcagtgatggtgatggtgatggtgatggaggtgatggtgatggccatgttggtggaagtgatggtggtggtagtgatggtggtgatggtgatggtggtggtggtggtggtagtgatggtggtggtggtgataatggtgacggtggtgatggtggcggtggtggtggtagaagtggtggtggtggtagtgatggtggtggtggtgataatggtgatggtggtgatggtggtggtggtggtggtagtggtggtggtggtggtggtgatggtgatggtggtggcagtggtgatagcgggagttgtgttggtgatggtggtggtggtggtggtggtgatggtggtggtggtgatggtgatggaggtggtgatggtggtggcagtgattatggtgatattggtggtggtggccatgacgggggtggtggcagtgatggtgatggtgatggaggtgatggtggtggtcgtgttggtggaagtggtggtggtgatggtggttttagaagcagacccaa

SEQ ID NO: 2114 - DNA, 950 bp, Artificial sequence
  DNA replication origin
tctgggccagagagtggaggcacagcagtggagatgcagaaaaggtgtgagccacaggcagctcctgttctagtggtggcggtgaatgctgacctcaggcacagagaaatctgcagtatgatgtcaggtggtgactggtgatacaacgaaaactaatacaggaaaaaggatagagaaagtcttgggggcaatattttatatgaaatgaccagggagggcctctttgagaaggtgacgtttaagcagagatatcagaggaagtcaagaaatgtctagggaagaaagttctgggcagaaggaacaagtgcaaagccctaacaccggaagatgctagggatgtttaggagtgacaaggggaccactgtggttggcatagaataagcaaggagaagggggtagggaataatgttgggggtagggaataatgtcagaggaaactggatcctggcaggccatggaaagcaatggtgatttcattctaagtctgatgggaaagcaaggggggctctgagcaggggaatgccatgatctgacttacattttaaagggtttgtgaccttgtcgagtgtagactggagttggtggccacagtggcaacgaggaaacctgctgggaggctggagagatgagggtggcttgctcagggtagaagcagtgggggatgaatgtggcccgtttctggatgtgttctgatagtagaagcaagaggatggaaaggatgtaggggatgagaggggagagtgatcagggttgactccaccatgtcttgtctaagagaccaagtagacagtggcactatttactgaggtgggtgctggagatctgggggaagacgtcacaagtttggttttgaatatgctgcctgggagatgctttctgacctccaagtgcagaggtctcagtggcagctgagtgtcaggggagaggtggtctggagtgtaagtttggga

SEQ ID NO: 2115 - DNA, 1743 bp, Artificial sequence
  DNA replication origin
gagggagagaggagggcgggagagcggcgcggagccgggccgggctgggggctggggccgctggggcgggggaggggaggacctggcgcggggggcgggggggcgaggggccggggccgcgccgggccgggccgggacgggccgggcggcagggagtcagggctagctccgcgcccgggcgcggcgaggcggggtctgatgggcatggcaggcgctcgctcgctcctctctcgctccctcgttcgctccctcacacgcgcggagggaggcgaagcccgcagcagccacttcccaactttccaaacttcccagcgcaactttttcctcccctcccctgcccgcgcctcctcctcccccatccctcctccttcccttcgccaggcgcgaccgggccgcagcttccccgtgcggccgccagagggcgcccgggctaaggacccgctcggccaacctccgccggctcggcggcggacgcggactggtggcagcgacagatttggggaccagcctcgcccaacgcatccgtcccgcagatcctggcaggagcgaacagcgagagggacaggagttggactggggaggcagcaatcacacaaaattcagaaagctgctgtgtgcaaccttatgtcacgcgtagctctgggatgcgcttggtagatgctctgcaaacaccaaatgtaaaagaaaagaaaagaaatcctcaaaattccttggaatcttccatttaagtaatcccctcttatctatgtccttggacccacgcaggatccctgtgtctgtctctggaagagtgagaattgatatcccagtttcttagaccacaagacttgaaagaccccttaaaccaacctacccttcctcaagaggcaaatgagacttagagaaggccagagcacaagatctaagcttctgagccgtttccagcaaatgaagaaagggaggcacaggcacccctgcttggttctgttaaaggagagtttgtcgtctcttcctatcctgacaacaaagattgacagatgaattaggtcatactgtcaggagcccacagcctagagaaggagacagacagagacagatatgcaaagacgccattaaaatacagatgatgagggccaggagagacagaagcacaaggaaatgggagcagagaggaagagctcctaacacagctcagaggcccagggaagacgcctgggagatggtcttgaaaaataagtcagaggtagcttagagaaggaggtgcacatgccttccaagcggaggaagagcaggtgccaaggcgcagcagtgtgagagcacacctgcaggggactgcaagcagttacccatggctgcggcaaaaagcaagtggcaggagctgaagttgtgtcttctggccaagctggggagtctgtccgttctaggtatcaggtcataggaagtcactgcaagatttgaagtttaaggtggctagagtagatctgtgctcatcgggggcatgaattggagggggcaagttggaggcagggagaccagtgggcagatagtcagtgaggagggagccagagcccaagcctcggtctcctgactcccagcccagtgttctccccacttctcccactcatgcctgcaggtaccagattgagcagctagaaaatgaccatactagaaggctgagtgagaaagaccaagcagggctggagggccagaaaggttttccagagcacaggatctgggtggttgggaggaacacgggaaggaaag

SEQ ID NO: 2116 - DNA, 1342 bp, Artificial sequence
  DNA replication origin
ggcagaggggctcctcacttcccagtaggggctgccgggcagaggcgcccctcacctcccggacggggtggctggccgggcagggggctgacccccccacctccctccaggacagggcggctggccgggcagaggggctcctcacttcccagtaggggcggccgggcagaggcgcccctcacctcccagacagggtggctggccgggcggggggctgacccccccacctccctcccggacggggcggctggccgggcggggggctgacccccccacctccctccccgacggggcggctggctgggcagaggggctcctcacttcccagtaggggcggccgggcagaggcacccctcacctcccggacggggcggctggctgggcgggggggctgaccccccacacctccctcccggacggggcggctggccgggcggggggctgaccccccccacctccctcccagacggggtggctgccgggcggagacgctcctcagttcccagatggggtggctgccgggcggagacgctcctcacttcccagatggggtggcccccgggcagaggggctcctcacttctcagacggggtggttgccaggcagagggtctcctcacttctcagacggggcggccgggcagagacgctcctcacctcccagacggggtcgcggccgggcagaggcgctcctcacatcccagatggggcggcggggcagaggcgctccccacatctcagacgatgggcggccgggcagagacgctcctcacctcctagatgtgatggcggccgggaagaggcgctcctcacttcctagatgggatggcggccgggcggagacgctcctcactttccagactaggcagccaggcagaggggctcctcacatcccagacgatgggcggccaggcagagacactcctcacttcccagacggggtggtggccgggcagaggctgcaatctcggcactttgggaggccaaggcaggcggctgggaggtgtaggttgtagcgagccgagatcacgccactgcactccagcctgggcaccattgagcactgagtgaatgagactccgtctgcaatcgcggcacctcgagaggccgaggctggcggatcactcgcggttaggggctggagaccagcccggccaacacagcgaaaccccgtctccaccaaaaccagtcaggcgtggcggcgtgtgcctgcaatggcaggcactcggcaggctgaggcaggagaatcaggcagggaggttgcagtgagccgagatggcagcagtactgtccagcttcggctccgcatgagagggagaccgtggaaagagagggagaccgtg

SEQ ID NO: 2117 - DNA, 1355 bp, Artificial sequence
  DNA replication origin
agccaccccatctgggaactgaggagcgtctccgcccggcagccaccccgtctgggagggaggtggggggggtcagccccccgcccggccagccgccccgtccgggagggaggtgtggggggtcagcccccccgcccagccagccgccccgtccgggaggtgaggggtgcctctgcccggccgcccctactgggaagtgaggagcccctctgcccagccagccgccccgtcggggagggaggtgggggggtcagccccccgcccggccagccgccccgtccgggagggaggtgggggggtcagccccccgcccggccagccaccctgtctgggaggtgaggggcgcctctgcccggccgcccctactgggaagtgaggagcccctctgcccggccagccgccctgtcctggagggaggtgggggggtcagccccctgcccggccagccaccccgtccgggaggtgaggggcgcctctgcccggcagcccctactgggaagtgaggagcccctctgcccggccaccaccccgtctgggaggtgtgcccaacagctcattgagaacgggccaggatgacaatggcggctttgtggaatagaaaggcgggaaaggtggggaaaagattgagaaatcggatggttgccgtgtctgtgtagaaagaagtagacatgggagacttttcattttgttctgcactaagaaaaattcttctgccttggaaaaaaaaaaaaaaaaaaaaggaacaggcaaagattttatgacaaagacaccaaaagcaatcacaacaaaagcagacattaacaaatgggatctaattaaacttaagagtttctgcacagcaaaagaaactatcaatagaataaatagcctacagaagaggagaaaatatctgcaaactatgcatccaacaaaggtctaatatcctgcatctataaggagcttaaacaaatttacaagaaaaaaaataagcaaccccattaaaaagtaagcaaaagacataaacagacatttttcaaaagatgacaaacacacatagccaacaagcttatgaaaaaagaagctcaatatcactgatcattagagaagtgcaaagcaaaaccacagtgagataccatcttacaccagtcagaatggctataaaggtcaaaaaataataggtgctagagaggtagtggggaaaagggaatacttatacattgttggtgggaatgcaaattagttcaaccaatgtggaaagcagtatggtgatttctcaaagagctgaaacagaactaccatctgacccagcagtctcattactagatatatacatggaggaatatgaatcattctaccataaagatacatgcatgcaa

SEQ ID NO: 2118 - DNA, 1012 bp, Artificial sequence
  DNA replication origin
ggggatcagccccccgcctggccagtcgccccgtccgggaggtgaggggcgcctctgcccggccgcccctactggaaagtgaggagcccctctgcccggccagccgccccgtccgggagggaggcgggggggggggggtcggccagccgccccgtccgggagggaggtggggggggtcagccccccttccggccggccgccccgtccgggaggtgaggggcgcctctgcccggccgcccctactgggaagtgaggacccctctgcccggccagccgccccgtccgggagggaggtgggggggacagccccccgcccagccagccgccctatccaggaggtgaggggtgcctctgcccggccgcccctactgggaagtgaggagcccctctgcctggccagccgccccgtccgggagggtggtgggggggtcagccccccgcccggccagccgccccatccgggaggtgaggggcgcttctgcccggccgcccctactgggaagtgaggagcccctctgcccggccacgaccccgtctgggaggtgtgcccagcggctcactggggatgggccatgatgacaatggcggttttgtggaatagaaaggcgggaagggtggggaaaaaattgagaaatcggatggttgccgggtctgtgtggatagaagtagacatgggagacttttcattttgttctgtactaagaaaaattcttctgccttgggatcctgttgatctgtgaccttatccccaaccctgtgctctctgaaacatgtgctgtgtccactcagggttaaatggattaagggcggtgcaagatgtgctttgttaaacagatgcttgaaggcagcatgctcgttaagagtcatcaccactccctaatcttaagtacccagggacacaaacactgcggaaggccaaggccgcagggtcctctgcctaggaaaaccagagacctttgttcacttgtttatctgctgaccttccctccactattgtcctatgaccctgcta

SEQ ID NO: 2119 - DNA, 1336 bp, Artificial sequence
  DNA replication origin
gctcctcacttcccagtaggggcggccgggcagaggcgcccctcacctcccggatggggcggctggccaggcggggggctgatccccccacctccctcccagacggggcggctggccgggcggggggctgaccccccacctccctcccggactgggcggctggccgggcggggggctgacccccccacctccctcctggacggggcgtctggccgggcagaggggctcctcacttcccagtaggggcggccgggcagaggagcccctcacctcccggacggggcggctggccgggcggggggctgacccccccacctccctcccggacggggcggctggccgaccgcccccccgccacctccctcccggatggggcggctggccaggcagaggggctcctcacttcccagtaggggcggccgggcagaggagcccctcacctcccggacggggcggctggccggcggggggctgaccccccccacctccctcccggacggggtggctgctgggcggagacgctcctcacttcccagacggggtggttgccggacggaggggctcctcacttctcagacggggcggttgccaggcagagggtttcctcacttctcagacggagcggccgggcagagacgctccccacctcccagacagggctgcggcccagcagaggcgctcctcacatcccagacagggcggcggggcagaggtgctccccacatctcagacgatgggcggccgggcagagacgctcctcacttcctagatgggatggcggcggggaagaggcgctcctcgcttcccagatgggatggcggccaggcagagacgctcctcactttccagactgggcagccaggcagaggggctcctcacatcccagacgatgggtggccaagcagagacgctcctcacttcccagacggggtggcggccgggcagaggctgcaatctcggctctccgggaggccaaggcaggcggctgggaggtggttgcagcgagcggagatcacgccactgcactccagcctgggcaccattgagcactgagtgaacgagactccatctgcaatcccggcacctcgggaggccgaggctggcggatcactcgtggctaggagctggagaccagcccggccaacacagcgaaaccccgtctccaccaaaaaaaaacgaaaaccagtcaggcgtggcggtgcgcgcctgcaatcgcaggcactcggcaggctgaggcaggagaatcaggcagggaggttgcagtgagccgagatggcagcagtaccgtccagccttggctcggcatcagagggagaccgtggagggacagggacag

SEQ ID NO: 2120 - DNA, 836 bp, Artificial sequence
  DNA replication origin
ggttctctaaagaatgcaggggaagaagttcaaaacccttggaagtcttctgagatcaacaaggggaatagagttttctcctagcatggagaggtccagccccttcactggatgagtggggttctctgccccagctggacttccacaggaggatggaggaaagcatcctcttgagcaagtctggagagtgaaggggtggggttgcaaggttggagaaggaggtgtttccctcataaaaatgactgggcctttcttgcaatggctggcacaaagtcggaagggtctggggacgggaggggcctgaagtgatttctgaggagttgggtttttcctgtaaggccctgggagggaaggcaaggtactttgcgcaatgacacatttcagttgttggatgtgaagattctccttcgaagacagaataaagaaaggccccttcattaatgcgggtttgaaactggtctgaaatggtgtgcctgcagggattcgggaggaaatgcgacgcccacccccagacttgggaaaggcgggggcaataattctctaagagaactggagcccgaaagaggaatgaaaagcccccgcgccgcgcacatacactctctctcactggaaagttaggagcgaggaaagaactctgaagtgatttgggaacgatctgaaagcgcgcaagttggaagtcgggttgaagccagcatagcggagcaggggtcaggcctctgcgtggccggagtgggagagcgcttctgagaacaagatggggcaggaccgaaggggcgtgaggtcgacgctccctagggatgattcggagggtgaaggaggtttgggggtggttccgg

SEQ ID NO: 2121 - DNA, 1429 bp, Artificial sequence
  DNA replication origin
cgctccctagggatgattcggagggtgaaggaggtttgggggtggttccgggctctcggaggtgactgagggagtccctgagccaatgcccgggggtgggaggcgctaccggtactcactgagctgatctccagcgccagggcgcactgcagcgccttcaccttcggcatccgtgcggggaggggcggcggggagtgaccccggccacgggcccgagtgaggcggggagacctggggctgggcggggacggggaggagacgaggtggcggcggcggtggcagcagtggcccccaggccggggcccgcggtccagcctgggttccgccggagaagcagctgagcgcggggcgcagactcgttgtcatggcagccaggaggggcggggccggaagagaggccgcgcggggcactccagggctacccgcgctgggacgagcgctggaggcggagcttgacgaacgccgagcgaggcggagtcgggcagggggcggggcttccgaaggggcggggtgaggcaaggcagctcttctgtgacgtcaaactgcgcccaaagccggacgaaagggagctgctgtttgtataatgggacggtgctctgttcagggagttggagttcctgtaaggccgtcggagggaacccctgagttacaacgtggtgatggcaccttgggctagtggcgacccactgtggcctcagttttcccaattgtaaaagaataataattattgttagtcctcctatttaaatttcacggcacggtttacaaagccagcataaggatactgggaattagggaagagacttgcccaaatcaaagtcggaaccaggactggaacccaggagctctcaagttaaaccccagttgcctccctgaggagaggggcttgcatcagatggtccatactcctagtctcctattctgtgattccctttgttagcgcgttcccttttcccttcaaattttcctgtctaattcacccatgtatgcgtcttaatgcatattgcttaagtggaactgtcaatgaggtgccaacaataagtccagctgtgaagggcctgacaatagaccatcaaagataaaaagaacctaagagattgcccaatccaatcatgttaaaaatcatttgtattgcaaaatacattatacatgcagaagtgtataaaacacgtttatcttaataataatgtgaacagtacctgtacaactagcacccggttaagaaataaaacattaccagcacctgaaaaatgcccccaacgattacattgcctttctcgccctggagtaaccactaccctgacttttgtacaataattctcttccttttgccattcatgtatgcatttctaaacaagatattgtttaatgttttccggtattgatagtatataaatggtattaatactgtatgtattcttctgtgatt

SEQ ID NO: 2122 - DNA, 1361 bp, Artificial sequence
  DNA replication origin
ttgcaccgcccttaatccatttaaccgagtggacacagcacatgtttcagagagcacagggttgggggtaaggtcaccgatcaacaggatcccaaggcagaagaatttttcttggtacagaacaaaatgaaaagtctcccatgactacttctttctacacagacacggcaaccatccgatttctcaaccttttccccacctttcccccctttctattccacaaaaccgccattgtcgtcccggcccgttctcaatgagctgttgggtacacctcccagacggggcggctggccgggcagaggggctcctcacttcccagtaggggcggccgggcagaggcgcccctcacctcccggacggggtggctggccgggcggggggctgacccccccacctccctcccggacggggcggctggcctggcaggggctgacccccacctccctcccggacagggtggctgccgggcggagacgctcctcacttcccagacggggtggctgccgggcggaggggctcctcacttctcagacaggacggttgccaggcggagggtctcctcacttctcagatggggcggccgggcagagacgctcctcacctcccagacggggtcgcggccgggcagaggcgctcctcacatcccagatggggcggcggggcagaggcgctccccacatctcaggcggtgggcagccgggcagagacgctcctcacttcctagatgggatggcggccgggcagagacgctcctcactttccagactgggcagccaggcagaggggctcctcacgtcccagacgatgggcggccaggcagagacgctcctcacttcccagacggggtggcggccgggcagaggctgcaatctcggcactttgggaggccaaggcaggcggctgggaggtggaggttgtagcgagccgagatcacgccactgcactccagcctgggcaccattgagcactgagtgaaccagactccgtctgcaatcgcggcacctcgggaggccgaggctggcagatcactcgcggttaggagctggagaccagcccggccaacacagcgaaaccccgtctccaccaaaaaagtatgaaaaccagtcaggcatggcggcgcgcacctgtaatcgcaggcacgcggcaggctgaggcaggagaatcaggcagggaggttgcagtgagccgagatggcagcagtacagtccagcttcggctgggcatcagagggagaccatggaaagagaaggagagggagactgtgggccatggggagagggagagggagaagggagaagcagggagaagggagaagggagaagggagaagggaaaggggccagagaaactatttcaatcagc

SEQ ID NO: 2123 - DNA, 926 bp, Artificial sequence
  DNA replication origin
agtgaggagcgtctctgcccggccgccatcccatctaggaagtgaggagcgtctctgcccggctgcccaccgcctgagatgtggggagcgcctctgccccgccgccccatctgggatgtgaggagcgcctctgcccggccgcgaccccgtctgggaggtgaggagcgtctctgcccggccgccccatctgagaagtgaggagaccctccgcctggcaaccgtcctgtctgagaagtgaggagcccctccgcccggcagccaccccgtctgggaagtgaggagcgtctccgcccggcagccaccctgtccgggagggaggtgggggtcagcccctgccaggccagccgccccgtccgggagggaggtgggggggtcagccccccgcccggccagccaccccgtccgggaggtgaggggcgcctctgcccggccgcccctactgggaagtgaggagcccctctgcccggccagccgccccgtctgggaggtgtacccaacagctcattgagaacgggccgggacgacaatggcggttttgtggaatagaaaggggggaaaggtggggaaaaggttgagaaatcggatggttgccgtgtctgtgtagaaagaagtagtcatgggagacttttcattttgttctgtaccaagaaaaattcttctgccttgggatcctgttgatcggtgaccttacccccaaccctgtgctctctgaaacatgtgctgtgtccactcggttaaatggattaagggcggtgcaagatgtgctttgttaaacagatgcttgaaggcagcatgctcgttaagaatcatcaccactccctaatctcaagtacccagggacacaaacactgcggaaggccgcagggtcctctgcctaggaaaaccagagacctttgttcacttgtttatctgctgaccttccctcc

SEQ ID NO: 2124 - DNA, 910 bp, Artificial sequence
  DNA replication origin
ccgattggcagaacggtgctttcaggaacaataacagtggggggagcctgggtcctggggagccgcccccgccccccccagcaccgtagcgagactcgcgccccccgccggatccccacctccgcgcccgccccgcgggctgagctgcccgaccggggcccgcccccggcgcccaccatgtacgcctttgtgcggttcctggaggacaacgtctgctacgcgctgcccgtgtcgtgcgtgcgcgacttcagcccccgctcgcggctggattttgacaaccagaaggtgtacgccgtgtaccggggcccggaggaattgggcgccgggcccgagagccccccgcgcgccccccgcgactggggcgcgctgttgctccacaaggcccagatcctggcgctggcaggtgagcaagcgggcggggagggacggtgggacccgggcgggggctgggaccccgggaggggccgggggcccgggcggaggggaccggggggagccactgcttgctccttcctgcctccttctcccgtcctctgggcatttcatttgggaacggggtgtctctaagaggccaggccagttaaaaagaccggatggtcccctttgtcttccccgcttccccgaagctcccgcgctgtcagtccgtcttcatctcttcatctgtgtctgtcctcctctttctgattctttgtgttttcttcgttccttcactttccatttttctccctacctgtttgtaccgtcatttctctctcaccttctctttacctctctcccagttccttccctctgttcttttctgtcaagaattaagtttctcaagctgtctgtctctctccctttaaaggctgttggtacctccttggagtgaggagcaagaaggatattgtcagatcttctaggtgggagt

SEQ ID NO: 2125 - DNA, 1003 bp, Artificial sequence
  DNA replication origin
cccagcccccgcccgggtcccaccgtccctccccgcccgcttgctcacctgccagcgccaggatctgggccttgtggagcaacagcgcgccccagtcgcggggggcgcgcggggggctctcgggcccggcgcccaattcctccgggccccggtacacggcgtacaccttctggttgtcaaaatccagccgcgagcgggggctgaagtcgcgcacgcacgacacgggcagcgcgtagcagacgttgtcctccaggaaccgcacaaaggcgtacatggtgggcgccgggggcgggccccggtcgggcagctcagcccgcggggcgggcgcggaggtggggatccggcggggggcgcgagtctcgctacggtgctggggggggcgggggcggctccccaggacccaggctccccccactgttattgttcctgaaagcaccgttctgccaatcggctgctttcgcctgggcgcggaaaagggagggagggggggaaagggggacgaggggcggatgaggggggtttggaagcgcactgccacttgcaaagtcagacccgagcaatcacagccggagcgcgattcgaatggggagggaaaagggttcagagattcagttgcaataaaaataataacaagagcattgcaggaaaaaaatgcattgattaaaaggtgcgctgcgtgcaggattatattgcttcaacaatcgcgctgccaaattgcattgcaacaaaactgcattgccaagtagagaagtgtatgagtgagtgaatgcgggataggggtgggggcaatcttgattgaatctcaaagtgtaaacttggaagccagcagaagtttggagtgttttaaatgtagccaccctacccgcgcccccagccccgcaccctccccgcgcctttcccagcccttagtttggccccgccttttctttgctttctttctttttgtttgtttgtttgtttgttttgttctgcaaaactgccagctccctctgtggaaagggtc

SEQ ID NO: 2126 - DNA, 948 bp, Artificial sequence
  DNA replication origin
ggctaatcctagggctaggctgtgtcatggaaagggtgtacactgccctgtgggagcatgggagagatccctaaaggggcatgatttgggctcggggtgggagtaggaggctctgactctaaagagggaggtatacgtggaaggtgtgttactttaatatcagacagtgccatggaagggggagttagagtatttgtgtttggggatgtgcagtgtcctcagggtcactcctggtcacagagaaatttatgcaaataattcttgtatgggtccttaaaaagacaagaggccttgaggggatacccggagccccagtcctttaggagcctaccaaaggaggctggagcgtgagtgtgagtgtgtgtgggttcaatgatcttgaaggtcattcagaatcaaaggagtgcatgtccacacttctgtgggtagaagatagcctttaagggacaggaagactgacaggaagggagacccaggatcctattcctgaggggaccccttgtgcatatggctgggatttgtgagatactgactttaagtttctcacagggtcatagaagaaagcaaaggtttttacagttttgagtatgtgggagggagtttgcctctaaatgaggctgaccactgaagaactggatgttacgggatggcatgggtgtgtgggtagaaaagaagtggctttgggaatatgtgtgtgatgggtgttggcagtggtatacataaccttgtatatatgtcctgatcaggtattatcattacaagagtgatccacttgaattactttggtcctggtgtgtgtgtgtgtgtgtgtgtgtgtgtgtgtgtgtgtgtgtgtgtggttatggtacatacacaccacaccccagaaactggaactgaaaactatgacaccctcagaaataagttcgaggaaccattatgtctcaaggccttcattatttctctttc

SEQ ID NO: 2127 - DNA, 1065 bp, Artificial sequence
  DNA replication origin
gtggatcggttgcggaggagcagcgccccggggcccaagtcccagctcaggcccgggctcgcgccgcgggggcggggccttggacgcacgctcctcccaggcgtccctcccgccctcagccgcgcgccggccacccgcgcgcctgccgcccgttgcccaggcaaccgtcgtgccgcgtcttcctgaggtagctcctgtcagcccactgatcccaccacccgctccctactgccccgcggtcttcgcgtgagctcggagactgagggacaacaaaaatggcggaggggagccagtcggcgcctgaggcaggtctgtgggggcggccgatctggggaaggctgaggcggccaggctgtcctgggtctcaggcaacaggggactcgggcatggtcctactcctgaggaggcggtcctgtatatttgcgcggtgggttatgacttcagggtcaggggtcaagggtggcgtgcacccctctgaatggcgggcagggacctcgaagtccgggtggtggaggggagtgtgggttagtgtgcacacttctgacagaacatgggcccgaaaggggctgggacctgagggaagagacaggatcttaatcctgggatcacctgtggtgaaggctaatcctagggctaggctgtgtcatggaaagggtgtacactgccctgtgggagcatgggagagatccctaaaggggcatgatttgggctcggggtgggagtaggaggctctgactctaaagagggaggtatacgtggaaggtgtgttactttaatatcagacagtgccatggaagggggagttagagtatttgtgtttggggatgtgcagtgtcctcagggtcactcctggtcacagagaaatttatgcaaataattcttgtatgggtccttaaaaagacaagaggccttgaggggatacccggagccccagtcctttaggagcctaccaaaggaggctggagcgtgagtgtgagtgtgtgtgggttcaatgatcttgaaggtcattcagaatcaaaggagtgcatgtccacacttctgtgggtagaagatagcctttaaggg

SEQ ID NO: 2128 - DNA, 1067 bp, Artificial sequence
  DNA replication origin
ccagtcctggctgtgccactgcggtgctgtgtgaccttgggcaggtcgttaccctctccagccccagctcccgtccactgtccttgggaggacgcgcgggcagccgacacgttctgtgactgtggtgagggtaccgccttcactgcagcgtgcccggggcctaggcgggccagagtcggcccagcccgagcgagagcctgtcctggaacccagtgcgtgtggggtccggacccctttcccggagcactcgccgagccggctgggagcggagcgcccggagcccggcagggggcgctgccgcatcgtgcgcggcttccccgcgcgtcctcccaaggacagtgtggacgcggcgagcggcgcggggcagtgcaggctgagtgaggtccggccgcgcccacaccagcgctgcggggcggaggtcggcaacaccgtctggggcgtcgacggggcagggcgagtcgtctggcgccccagctggcctttagctggtttctggttctgggtgtggttctgggtgtggggtgacggggtggcggggtggggatggggtctaccaaaccagcgctgggggcccaggctttgctgcgtgaccttgagcggtcactgttctgtccgggcctctgcttcctgtctctgtaatggggggttcttgaggaaaccaattcatattgtatgtgaaagtgcttcaggaaatctgaggcccaggctggatgcaaatggaaaggcttcttctttatggaaaaacagccatctcctgcctcacccaatccatcctcccagttctgcactctgatggcaaccactttagccacttttacctgtattttctggcatttaccctcatacttcaaaataatatgctcatgctgcgatttcttaatttaccaacgctagactttatctgttgtctccctgttagaataaataaggaattagctgtcttccagccccatgcgcatgcccggtatatctgaagcactatttttaggtaattcagtgatcagcattccttttaagaaaatgtagctgttagttttcccaaaacctgtatcaaaactgccacggct

SEQ ID NO: 2129 - DNA, 1134 bp, Artificial sequence
  DNA replication origin
aggatcccaaggcagaagaatctctcccagcacagaacaaaatgaaaagtctcccatgtccacctctccccacacagacatggcaaccatccgacccctcaatcccctccccacccttccccgccctccactccacaaaaccgccattgtcatcatggcccgctctcaatgagctgccgagcacacctcccagacggggcggtggccgggcagaggggctccccacctcccggatggggcggctggccggggggggggctgacccccccacctccctcccggactgggcggctggccgggcagaggggctcctctcttcccagcaggggcggccgggcagaggcgcccctcacctcccagacggagcggctggccgggcggggggctgacccccccacctcccttccggacggggcggctggccgggcggggggctgacccccacctccctcccagacgggctggctgccgggcggagacgctcctcacttcccagacggagtggctgccgggcggaggggctccccacttcccagacggggcggttgccaggcagagggtctcctcacttctcagacggggcggccgggcagagacgctcctcacatcccagacggggcggccgggcagaggcgctccccacatcccagacgatgggcggcctggcagagacgctcctcacttcctagatgggatggcggccgggcagagacgctcctcactttccagactgggcagccaggcagagaggctcctcacatcccagacgatgggcggccaggcagagaggctcctcacttcccagacggggtggcagccaggcagaggctgcaatctcggcactttgcggggccaaggcaggcagctgggaggtggaggttgtagcgagccgagatcacgccactgcactccagcctgggcaccattgagcactgagtgaacgcgactccgtctgccatcccggcacctcgggaggccggggctggcggatcactcgcggttaggagctggagaccagcccggccaacacagcgaaaccccgtctccaccaaaaaaatacgaaaaccagtcaggcgtggcggcgcgcgcctgcaatcgcaggcactcggcaggctgaggcaggagaatcaggca

SEQ ID NO: 2130 - DNA, 898 bp, Artificial sequence
  DNA replication origin
tgcccggccgccccgtctgggatgtgaggagcgtctctgcccggccgccccgtctgagaagtgaggagaccctctgcctggcaaccgccccgtctgggaagtggggagcccctccgcccggcagccactccgtctgggaagtgaggagcgtctccgcccggcagccagcccgtctgggagggaggtgggggtcagccccccgcccggccagccgccccgtccggaagggaggtgggggggtcagccccccgcccggccagccgctccgtctgggaggtgaggggcgcctctgcccggccgcccctgctgggaagagaggagcccctctgcccggccagccgcccagtccgggagggaggtgggggggtcagccccccccccggccagccgccccatccgggaggtggggagcccctctgcccggccaccgccccgtctgggaggtgtgctcggcagctcattgagagcgggccatgatgacaatggcggttttgtggagtggagggcggggaagggtggggaggggattgaggggtcggatggttgccatgtctgtgtggggagaggtggacatgggagacttttcattttgttctgtgctgggagagattcttctgccttgggatcctgttgatctgtgaccttacccccaaccctgtgctctctgaaacatgtgctgtgtccactcagggttgaatggattaagggtggtgcaagatgtgctttgttaaacagatgcttgaaggcagcatgctcgttaagagtcatcaccactccctaatctcaagtacccagggacacaaacactgcggaaggccgcagggtcctctgcctaggaaaaccagagacctttgttcacttatctgctgaccttccctccactattgtcctgtgaccc

SEQ ID NO: 2131 - DNA, 1750 bp, Artificial sequence
  DNA replication origin
ggcggccgctgcatcgctaccggtgagcgtggcaggcggcttgctgcgggggccgccactgttgctgcgggcagccgagaagtacccgcggacccccaagtgcgcgcgctgtcgcaaccatggcgtggtgtcggccctcaagggccacaaacgctactgtcgctggaaggactgcctgtgcgccaagtgcacgctcatcgcggagcgccagcgtgtcatggcggcgcaggtggcgctgcgcaggcagcaggcgcaggaggagaacgaggcgcgcgagctgcagctgctctacggcactgccgaggggctggcgctggccgccgccaacggcatcatccccccgaggcccgcctacgaggtcttcggttcagtgtgcgccgccgacggcgggggacctggagcgggagcgcccgcggggaccggaggcggagcagctggcgcagggggctcaggtgagagcgcggccaggccgcaggtaggggcagcaggatcgtagctctggggcacggggcccaggggcttgtctcggttcagaaagagtagaacccccgtgtccagtcgccgcgactgctagggttcaccgctcgcccagcctcgggtatggagcgtgggtacagaaactctcctttctcccgcttctggagcatttgcactttacccctttctcctgcatcgggccgaaatgtacacgctttaatttttttactcgcctctacccaaacgcaggcaggtccctgcttctttgcttcgtcttctccccaggtggaaacctgcgcatcttcgttcgctctgcgcttctccacaggccctttccctctgctccttcccaactcccttaaggaatccccccccctttaactgacaccctaggttttgagacgccctaggttctgagacgccctagtttcttttccccttctcgcgttcctaacgccctctggacaaccgcttgctgcgccctccctccttctagtttcttccgcaccctccctggtttctcaggtctgctttcctatgtcttttcctcttcgcttcctactgcctgcctagcaccaccctctttttctggacccccgtggctttttgtggggagggaagaaattaggccagagccgttgagggaaaggagggatccgctctaaacttgggagggaagaacttctcaggtctcaattttggaaagggtggattagaaacaggggctgtacttctgcctgtagagaagcttgggacctcctagataaccaaggcgcctttccttacaggctgcactgccagggcaggcattttctatacagtgggctcttctgtacagcgtggttaggcagaagttatgttgtctcttgtttgaaccctggacctggccacttctccacggcagggcaggactggaagggcagttaagggtggaggtgttggggcacagacgtggggaaagcagcactgaacatcgagtttacagggcacaggtagttggggttctgaggagtacagaaagagagggagccctggggtcagggctgtaggggctcagagcggaaggaatgctagagcaaaaagaaagaggggcactggagcctagtgaataagggctgtggggctgagggagaggaaactgagatccaaagggccgaggtgctgtgactgctgtcttctagctaaccgctcctcacgacacgttttctcccctcccagaggccaagttgcagaagtttgacctgtttcctaagacgctgctgcaggcaggccg

SEQ ID NO: 2132 - DNA, 2011 bp, Artificial sequence
  DNA replication origin
ggggatgatgccgttggcggcggccagcgccagcccctcggcagtgccgtagagcagctgcagctcgcgcgcctcgttctcctcctgcgcctgctgcctgcgcagcgccacctgcgccgccatgacacgctggcgctccgcgatgagcgtgcacttggcgcacaggcagtccttccagcgacagtagcgtttgtggcccttgagggccgacaccacgccatggttgcgacagcgcgcgcacttgggggtccgcgggtacttctcggctgcccgcagcaacagtggcggcccccgcagcaagccgcctgccacgctcaccggtagcgatgcagcggccgccgcggctgccgccaccgacgccaccgacgccacaggcggccccgtcgctgttgccgccgccgccgtcgccgcgccgggcacgctgggcagctccgagcgcagctccatgacaggacctgacgggaaagaaggtgggagaggggagagacctggtgaggagcacaccgcgcgctaggccaaagcgccgccttgaggaacccaagctggagagggaaatttgggccgcggaggctgggctagaggggccagaattgctgggaggaggtgcagtcggaacctccttgtgagccctagcaccttcaccccagtctggccatggctgctcttagacctgatatacacgctaggggtaagattttgtctgaattagtgattccgctggaaaaaataaagagacatgtaaagtgtgaaagtcactgattcagatggctgtaatgagaatttggaaaagttaagatgataccccaaagcttagcctaattggggtgagacgggtgagagaaatgctcgtttgacgggactgggattagagcgacagttttggcccagaagttaggctgatgccaagggcaaaacaggaaaacccggagcaaaacggtcagtttggtggaagggtgaagaggagagagatgtgaaggcgcagatgtgaaggccggttgggccggagttttgtttctttttgtttgtttatttttaatgcagtttggggcagaagctttggagagaaaaatcaacaacagaaagaatagctttaggaagcagagtgaggacgaggaaacaacttgggcaaagttaggcccagtggctctgggacccgtaaaaatgtgagcgccaaaagttccacggtgagggcctccagagagtgagagacaaaatgtatgtggaatttagcttaggactgggaagtattaaagagaaaaattcggccaaagaaactttctgtataggcaaacccagcccaaagatgagcttcatgggcaaggaaaacagtgaaaagcagctgatctgggtgtccgggatccaggggccgcgcctgggagaggggaatgtgtaagaaaaaaccccacaggcaaatgctgggggaggggattgggtaaaacctgtggtgcagttttttagcttcgcagtctggagtagtagtcggggcggaagacgtatcctgcgaaaagttaggcatttcgggagggggatctttctcgaagaccacctcacactgccctcccctcccctccgggtttagggacagagtcgtcagacacgccctccccgtcttggggtcccaggggacccctctcgagcgcaggctcctgcgttctgatctcagagttggggtcctaggacacggatggcccagcaggccgcaccaagccaggggagtcgccttcgcaactggccataaacggacaccagagtccctcccacgccgcagccccataaggcccaagcaggcccagctccccgcttctgccgcggtctcctctgcttcccgcgttccccgtccctgccagagcccgcgacagagtccttgtgtctccgtccgagagtcccagacctcctctctatgagcgttgcctcctctcccagacccttcgggcgtccctaaggcccacggggcccaggcctcctcaacaggggccgcagaccaggtctccacccactgctctccctgcgg

SEQ ID NO: 2133 - DNA, 1177 bp, Artificial sequence
  DNA replication origin
acctgccctcatcctggcccgcgactgtaagaccggacccacatccagaccaatcttcctgtccgggctgctgcgacgcgggctccgcaggttgcaggcgggcggccggggcgcctgaaggttaccgagtgcatgagcgcctagcgcttcccgcgctgccccgcccgctggcccgccgacccgcccgccggctcgcccgccagcccctcggcgcccggcggcggcggcggcggtggcggcgacggtcgcaggaggtgccgtctgcctcccaggtgcgcgcttcgctcccggagccgcggaactcggcggccgccatggcgtccaacatggaccgggagatgatcctggcggattttcaggtgaagtatctggccctcttcccctcccacttccaacctcgtgggtttccggtgccacaagggagtcttcttcccagcgtttgaacgctgcagtggtgtgtcatttaggcttttatacggtgcgtggcgtgtgtgtgtgtgtgtggcgagctatggagaagcgtataatttatatgctatcatgagtgtgtagaatgtgttaagtacgggttgaatgggattggaggtattaatgacttgggttacaatgtgtgtggaatgtgtagtgtttcctgtattatatggggggacgtgtagagtttttgttttaattggtgttggaccattaagtatgggatgttttgggtggttctgtggggagagatgtatggagtgtgagcgtggagcgtgtggtgttatgggcgtggtgtatttatattgtattaagggaagagtaaaaaagcagaatgatgagatggcgagggcaatgacaatggggtactgaggtccttttcaaagaggagtaaacatttgagactttgcctaattggaatctttggagggtaagaagataacaaggagacagataagactatatattccagagtatctctgcaatgaattcacaagcttaataaattacctattcatatttgcggattcccctcccctacagacttgaattgcttggttggtgtcctttctccaggaatactttaaaggataagtaaaggctgttctcttaataaacccagtcgtagtgccactgacatgtaagtatcttaggaaggccctttgaaagtagaactgtatgcattgtgaaagacttggagctagaa

SEQ ID NO: 2134 - DNA, 1028 bp, Artificial sequence
  DNA replication origin
cccggggcgctgcgccggcggccgggaggcgccggcgcccgctccccctccccgcccccccgctcccgcctcctgcccgcggcgcggtgctcctgctcgccccggccggccgcgcggccgcgcacacactcactccgagggcgcctccaaggttacccgcgggtgggggctggggcagactccggccactggcctccttcgctgctttcctatcgccgcggcccttctgccgctccagggccactgggatccaaatcctaacgcagaagacactccaaagtccggggagggaagtcaagctgagaggcaggccggcatctgggcagggggcggccttagttgcctccgggtgcccggacagccgggtcaggcgaggtcgcggcaggagggggctgtgactccggcgggcgcgctccgtacagcgcaagctgggctgggggcagcgcgcgggggctgcaggcagcaccgaggcgcccgaggcgccccgggcccgtaggggggcagagacaagcgggctgccaaacctgccgaggaaactaactaaataaaaggagactgttatttaaggcgcggaaatttgaaatatttggacaggaagagaaaagaaaagaaaccttagcgagggagggggaaaaaacgcgagctaacggttttgaagctcccccacccccacccctggcttttctgcgcgccctgagggagctctgggctccagcttcctatcactagggccccgggagttggagctggagtctggagaaggagtttcagagggacagaaaagatgtcttcgcagcccctccgtggaaggcttgggttggctatgggcagagctttacccggggtctcaggtgggaaatttgtttcctgcctctcactaggttcctgcgtggagctgttttcatgggactgccatataaaagcagaacagtctccagagaccgagacagggactttcccccgtagccttttgatgaaggttgcttagggcagccaggaaggctgtgagcacgaccttttcttgctcc

SEQ ID NO: 2135 - DNA, 1126 bp, Artificial sequence
  DNA replication origin
ctcgcctcctggcgccgggggcgggaccagagcacgcacggcgcgatgacgcagtgcccgagccggcctcgttctggctgccgccgtctcgctgaggcggagtaggatgaggcccgcggccgtggctccggcgtcggcgggggcagcagcagctgaggcagcagctgaggcagccgcgacggccgcgcccccccccgctgacctggattaggcccagcagctccgtggccgccgccgccccgcgggggggcggggtggggaagtgcttcgtctccccgcccccccccccccatcgctgcctcgcaggaggcgaacgccgcgaccccagcggagcccgcggcccagccttgatcccccaaccccgggggctggcatgagcggcccctcggcggcaccgtggggcggtggagtcgcctccgcctgatccccggcctgtcgcccgaccccacctcgccaaccgaggcggaccgcggagtgtgcgaacgaccccaccgctgctttctcctcccccagatcacgcaccccagctccggaagatggggaactgcctcaaatcccccacctcggatgacatctccctgcttcacgagtctcagtccgaccgggctagctttggcgaggggacggagccggatcaggagccgccgccgccatatcaggtaggggagggtgtgtgttggggggagcgagtagaggcagctctggcggagattgagggggcttcggggccgtctctgcccctggcttcggcaaggcctggcctgggcggcattgaccccttagggctggatctgagggcatttgctctctgatctcagagtaaggttgattcttcgcctgccctcgggcaccgtgtggggatgataccctctgcccttgagttctgggatcagagtatgtgatcacatccccttggccagtgtctggtggttcgcttgtggagtttgggagtgacattttcctgtctttatgtctgaatcgtatgatttcctcatcgcaccgccaactggattatgggttctggataggtggttgccaagcaccacccccccgccccatttatgttttcatgtgtggtcgtcctcttacccacctccctcgtctttttgttaattggatctggcag

SEQ ID NO: 2136 - DNA, 862 bp, Artificial sequence
  DNA replication origin
gagtggctgtttgggctttatccagcagtgggggagccttggcaggcttgtggcttagataggtgctttagaaagcccaccagcagttgctgggccaccccgctggctgggtcctgttctaaggcaggaaatacaagcatgagcaggaaaagaccccctcaaggctcacgtcctagtggggagacaagaaacacagatgggcaatataacacgatgtctggttccagtaagtgcagtgaagaacaagcgaggctggatgcagggagtgatgggaggggctttgtaaggggaggtcgggggaagcctgtctcagaggacaccagaatggagcgcaggagcagcacgtggcagtcacatggcaggccgttagggcagagggagctgggcagggcacagcagggcaggagtgtgtttgatgtgtcctgggaaccgccctgaggccgtcgtgtggctggagtgctgcaggtgtcaaggaaattgtaggagatgtctcctgagtgtgatggaatataaccagatttccagaaggaactgacatgatctgacttaaaaaggtcagtgtgcgaaatggcttgcaggggacaggagtgggagcagggagataggagacaatgtgtaccaggacagcagaaagacatcccgggtagcctggaacagggagacggtgtggagatggtggcagtccgataatgagagccgtagggcaaggccagcaggatcctagagtgagacgggaggtaaagtcaccgggacttggtgtctccacgtcaggggcaggggaaagggagaggacaagggtgacccgggaggttaaagatgggaccggggccagacgcagtggctcatgcctgtaatcctagca

SEQ ID NO: 2137 - DNA, 1802 bp, Artificial sequence
  DNA replication origin
cggtgtctgcgcagagggcgccgggctctcacctgtcggagcgggggtgggggccgcccagaacccccggcggtgcgggagcgcgggtcgccgcgggcggccatggccctacggtgcgggtggggagaccgaggctcggcccggccccgccgccttccccgcccccggcgcgcccctccccggccgccgcgtccgcgaccgcacagcgcccggctcggggttgcggcggcagcacctgggccgcgattggcgtccggctggggcagcgccgcccgcgcccctcggcgatgacctcggctggcggcgccccaggagccctgcccgcggggtaagtgcgcggctgggaggcccgggggcgcgggcggcgcgggctggggcccgggcaggtggcgggcgccgcgccaggcctccccccgcgcaccggcctggggccgcactgcggcttccagcccccaccccgcccggcccctggcagccgccgccgctgccaggagtgggggcagggggctgtgaggaggcggaggcgcggggaccccgggtcggtcactcaccttctgggtcccaactttctcacggagctgtagtcacagacacgttcagagcagccttccccacctgcctcgtggcgttcactcctgtggggtgggccctgttactctcatccccattacagatgaggaaactgagacacagcacttaagtgacttgtcatcggtcacccaggaggtaagagttgcgggtgggatttgaactcagttctgtctgttgtcagatccccccaccccatcatcttcagggacattaggggaacttaaacagctaaggtatgggccagccgggcccattgggtgcagcaggaacctgggtagtaaaaagtgggtgttgtcaccttcaacgtggctctcctgcccaaccctacccacatcccactgagaaacccctataggacccctacctagatcaccccccgtagcagtgacagccgctactgccgggagaccttcagcaactctctgcttttcctgggccccagtgggcagggcagggggcagctgctaggagccctgactgctgggaggttgctgggcagagagccggcccaggtgagctgggaggagggctcaccctgcctggagcctcaccaccagtgacaatatttgctaagggcccgaggcttgacacatgaacagggaggtgacgaggctggtgccagctggcagctggaagtctccacagggcttgcgtgtgtgtggctctatcagggcttggaagctgggttgctgggggacaccctggcctgggagagggttgcctggtgagtttcagcttcatcatttttgttgtgtgactttggccaagtccttaacccttcctagacttctggtccctcctttggaaaacacagaagtggggctggctgttcctttcctgttctgggctcaagtatttgtaaagctggaggttgggtaggttccttctgtgcagccctgactgagcaccaccaccctgctgggtccagaaaagtggtttccaggagagaaggcgggcatggagcaaggtatctatcaaagaagtctagactccctggctgaaaaccacattcatcccacttccttatatgcttacatccctgcctaagtgccctctacaaccccgggcacctctggccctgctgcaggcctcaggacagcaagcttgctcttctcacgctggtgggtcttccttatgcagaaccgtacctgcctctctgcatgcctgcccactcttctttgaagccacctgtccatctgtccccaaccctg

SEQ ID NO: 2138 - DNA, 1180 bp, Artificial sequence
  DNA replication origin
cctcctcacagccccctgcccccactcctggcagcggcggcggctgccaggggccgggcggggtgggggctggaagccgcagtgcggccccaggccggtgcgcggggggaggcctggcgcggcgcccgccacctgcccgggccccagcccgcgccgcccgcgcccccgggcctcccagccgcgcacttaccccgcgggcagggctcctggggcgccgccagccgaggtcatcgccgaggggcgcgggcggcgctgccccagccggacgccaatcgcggcccaggtgctgccgccgcaaccccgagccgggcgctgtgcggtcgcggacgcggcggccggggaggggcgcgccgggggcggggaaggcggcggggccgggccgagcctcggtctccccacccgcaccgtagggccatggccgcccgcggcgacccgcgctcccgcaccgccgggggttctgggcggcccccacccccgctccgacaggtgagagcccggcgccctctgcgcagacaccgcccgggccgggagctcgctccctcctcacacgtccccacctatttggcgctagaagttcttctccgggacctgaggtccactttactgtcacttctcctccccacagcttccgccccgaagcggcccccacctgagccgtcaccatcctcccgcattaatgggggcattcgtgcagacaaagacagcccccagagtcaggcctggattttaatcccaccatctcgcccactgagtgactgcaggagaccagaaggcggggaaaacacggtttagcactcactgctagctggcagttcacactgccttctcaaatgatccccataattgctattttacagatggggaaactgaggcatggggttcatttgattcacgcatggtcactcacctaataagtggcaagctaggactggaatccatccctcctgaatccaaagccaacactctggcccctttcccccttggccccctctcccctgcattcccagtgcctgtgtgggggtcacccacaacgctccccaaatgtccactgtgcaccgagccctgaggcggtgtctccacctgacctgatcttctggcacagaaagccactggcccatgaagagttaaccagtcaccatctcctggccccagatgctgctcttaaccatgactcatcaga

SEQ ID NO: 2139 - DNA, 1334 bp, Artificial sequence
  DNA replication origin
tcttccatcactctccctcctttcttctcagacacagctcagggtttgatgtgagctatcctgcctgcaatgcttcagcactgccaattttactgggcataacattgccttattgtatgcctcgcccagcatctatttctgatgtttacttgtctacttgtttatgtctctcttactagaacctggttgccaagagcaggacctgtatatctgaagtaacaccatacctgcagtgcctagtacagtgctggcccagcacacaagtgctcaacaatgtgtgctgaaaggctgaatgagagtcaccaaagggtggtggagagccatggaagggttttattttctttaatgttttttcctttatttatatagagatagggtcttgctatgtggcccaggctgctctcaaactcctgggctcaagcgatcctcccgctgggattacaggcatgagccaccacgcctagcctatggaagggtgttaaagcagaaaatggcttggtctggtttgtgctttagaaaggatgtgtggaaagggagagacaggaggagctggggaagggggcctgatgcaatagtccaatgagaataaacagctttgagagaagttgggaggtaaaatcaacaggacttgtagacgggggtgggagaaaggtagggaggtgtcagggatgactcccaggtttcgggcttgggcaactgggtggatgaccattcactgacacggggacaccggaggaggaacaagtttggggcttgccaagtttgaggtgttcataggacagtcagatggaggtgttgggaggacagttggattgccctttccctggcacagcagggtgaactttaaagatgtaaatatgaagggaagggctgaacctcagaagatgtaaatatgcggggagggctgaacctcagaagagaggtcagggctgtggtcccctctcacaggaacacaactggggcgcactaacttatcccggaggtagggtcagctagggaggtggctgacacaccctggagggctcgccttggaggagctggggtgcacataattcaccctggactgggactggaacccaggacttcccccacctgctcctcggatgtggacaacccctcaagcacacagagccctggcttcatctgtccgggcacacagcgtgcccacacttggctcatgcagacctgaggagaaccaggtgagaggatggagggttgagcgcagacgccgctgcccaaacctgaccgccagccccacctgaggtccttctcaccgagctgacttcgcagatagcccgcgtcttgcgacactgagcggcgctcaggtgggaccg

SEQ ID NO: 2140 - DNA, 1060 bp, Artificial sequence
  DNA replication origin
ggtccttctcaccgagctgacttcgcagatagcccgcgtcttgcgacactgagcggcgctcaggtgggaccgcgtctaccctccccagttcccgccctgctgggggcgaggacagagagcagggggcgcgcggcgctgcccctctcgggcctccggccgacccccacgcccagcagccacacaccctttccccagctgtgcctctcagctgtttccccgacgtcggctgggtcctccggcggccccttggtcccgtccgcgccttccgccgagtccccacccctgcccggtacctgcggtcgcttttcccggaggccgcctccttccaggtggtcagaaaggccatgggcgcgggccgggctcggacggggccgcgggcggcccctcgcggcggcggcggcggccgtggaggctacagtggcagcacctggacggggcgggcagggcgggacccgtggctcctccccgccctggacctgcgcctccctgccccaaagtggaagggcttaagtgtccctagagcgggcctgaggtccctgggcaagcccactcccacccagaaccagaaaggaccccaaacactctgaaacccctcattgggcaccgggagaaacggagctccaggctttgtccaaggtcacaagggggccagcggccggtcccactcggtccagagcccagcctccaaactgacgggccacacgatggccttaccagggtccctgcgggacatagcagcaccaccaaccctgttccctcctccctacatacagagccagctttgctagggcctcgccggaatggggtcagaagctcgggaccgagtcaaatgctgggcacagagcaccagcagcagggggctgatgggcagggaagtggagagcagctgtctgggcctgagggtggaggctgcaggccaggccaggccctggagtgacccacttcaccgacttatgagtccagtaccccgtggcaggtcgggggacagaggagaatgagccaccgccccatctccagtgtaaactttctttgaagccccacatttcatcttaggctgcgt

SEQ ID NO: 2141 - DNA, 931 bp, Artificial sequence
  DNA replication origin
ctgagaagtgaggagaccctctgcctggcaaccaccccgtctgagaagtgaggagcccctccgcccagcagctgccccgtctgagaagtgaggagcctctccgcccggcagccaccccatctgggaagtgaggagcatctccgcccggcagccaccccgtccgggagggaggtggggggtcagccccccgcccggccagccgccccgtccgggagggaggtgggggggtcagccccccgcccggccagccgccccgtccaggaggtgaggggcgcctctacccggccgcccctactgggaagtaaagagcccctctgcccggccagccgcctagtccgggagggaggtgggggggtcagccccctgcccggccagccgccccgtccgggaggtgaggggcacctctgcccggccgcccctactgggaagtgaggagcccctctgcccggccaccaccccgtctgggaggtgtgcccagcagctcattgagaacgggccaggatgacgatggcggctttgtggaatagaaaggggggaaaggtggggaaaagattgagaaatcggatggttgccgtgtctgtgtggaaagaagtagacatgggagacttttcattttgttctgctctaagaaaaattcttctgccttgggaaaaaaaaaaaaagaaaatatagaagtaagggtaagcaatacagcgtatgagaaaatgtaacacacatgtgattggaaccccagaagaagacaaaagagagcatggcacggaagcactgtccggctgagaattttccaaaactgattaaagacattcagaagtcctaggaatcccaagcaagataaatcaaagaaatccacaagttgggcacatctcagtaaaaatactgcaaaccaaagatataggaaatatctttaaaacagccagggagaaaaaaggac

SEQ ID NO: 2142 - DNA, 1319 bp, Artificial sequence
  DNA replication origin
ttagagcagaacaaaatgaaaagtctcccatgtctacttctttccacacagacacggcaaccatccgatttctcaatcttttccccacctttcccccctttctattccacaaagccgccatcgtcatcctggcccgttctcaatgagctgctgggcacacctcccagacggggtggtggccgggcagaggggctcctcacttcccagtaggggcggccgggcagaggtgcccctcacctcccggacggggcggctggccgggcagggggctgacccccccacctccctcccggactaggcggctggccgggcagaggggctctttacttcccagtaggggcggccgggtagaggcgcccctcacctcctggacggggcggctggccgggcggggggctgacccccccacctccctcccggacggggcggctggccgggcggggggctgaccccccacctccctcccggacggggtggctgccgggcggagatgctcctcacttcccagatggggtggctgccgggcggagaggctcctcacttctcagacggggcagctgctgggcggaggggctcctcacttctcagacggggtggttgccaggcagagggtctcctcacttctcagacggggcggccgggcagagatgctcctcacctcccagacggggtcacggccgggcagaggcgctcctcacatcccagatggggcggcggggcagaggcgctccccacatctcagatgatgggcggcggggcagagacgctcctcacttcctagatgtgatggtggccgggaagaggcgctcctcacttcctagatgggatggcggccgggcagagatgctcctcactttccagactaggcagccaggcagaggggctcctcacatcccagacgatgggcggccaggcagagacactcctcacttcccagacggggtggtggccgggcagaggctgcaatctcggcactttgggaggccaaggcaggcggctgggaggtgtaggttgtagcgagccgagatcacgccactgcactccagcctgggcaccattgagcactgagtgaacgagactccgtctgcaatcccggcacctcgggaggccgaggctggcggatcactcgcggttaggggctggagaccggcccggccaacacagcgaaaccccgtctccaccaaaaccagtcaggcgtggcggcgcgcgcctgcaatcgcaggcactcggcaggctgaggcaggagaatcaggcagggaggttgcagtgagccgagatggcagcagtacagtccagcttcggctccacatgagagggag

SEQ ID NO: 2143 - DNA, 2164 bp, Artificial sequence
  DNA replication origin
tcagtcaatggaacgaggcatgacaattaagataaatcacgagagtcacccagacatgggggacctggaggtcctgagtcacctcggattacacctgctaggagttgagggccggggcggggcgaacacagactccgcccttgggcggggcctggatgcggccggagcggagcagtgctggagcgggagcctcagccctcaggcgccactgtgaggacctgaccggaccagaccatcccgcagcgccccgccccggccccctccgcgccctcccgacgccaggtcctgccgtcccgccgaccgtccgggagcgaacccgtcgtcccgcactcggagtccgcggtaaggggcgcggccccggcagcccgcccgcggaggatcagggaccgatccccggcgcggggcgctgggcaccgagagcgggcgccgagaaggagcgcggggcagcggaaggaagccgggggaggagcgagggagggggctccgcggcggcagaggtggggctcacctagggagggggcgccgagggggtctcccagacgttgggggcagccgggggagctccaagggcgggaggggagcaagaaagacggcgctggggctgggaggagagatggggggcaactggagggcagtgagggatcgctgggggaaacgggggcgtggggggcgggggagctgcgaggagggcggagtggggctgtgcggaaaggtggtaccgggcagccgaggggcagcgaagggggcggtgaagggagcggactgaggggagctagagcgggggtgcggggggaggcatggaggtgaggagctgaggggaggggactggctgggcgggggtcgtttggagctggaggggactgaggtgccgagggcaaggggcgctgggcagctggggagtgtctggttgggagagggtcgggggtggggatgtgggtatggatagctgggaaggagaaaggcagcagggcagtgtctggtcgaaagagggtcatttatgggggatgtgggtatggatagctggggtcggaggttgagcccggctggggaccggcgtgggggtaactgtagatggaagacgaggggtggggcttgggggcgggaagcttgggagaatggaagggtgagaggccaggttgggtctaccctgctgcagaggaagggggcagggagccggtggagacacagggaagtggccttggaaatggacacaggggcctacattctggtcaggagtggagaggaggctctggaatagagtagggtctggcggctgcaagtggaggaatcgtgggagaacttggagtgtatagatagggtggtggggcgctgggtcagcctggggaggaggccaggtgtgggtcgtggtgtaagggtggaaaggtaatgggggctggagtggtgtccacgcactagcggtgtctcggccactcaggagtccaaggaggggacccaggcactggaccttgttacacgggcaccggggatcacagaaaataagagaatcgtggacagaaaaagtcatccaactctgttctgtagtccaagcatggaagcaactttggggagggcagggcagcagcctttggaagctaagagagatgtggaggaggtgggagaaagatgggccctcaaaacacacacacacacacacacacacacacacacacacacacacacacacaaaacaagatgggccctcttcccccggcttcctggaatccagatggaaaggggtgggagacagtaaaaggagaggatgtgtgtgtgtgtgtgtgtgtgtgtgtgtgcgcgcgcacaggtgggtgtccacctgttctgtgcctataaacagaggaagacaatggaagccgtgaaaggccctatctatagaagtggaaagccctggtgccctgtgggagccagagaagaagcattttgggggaggtgggtgggttggggaagccttcctggtcatgaaggatttagctagcagtggaggaaagtgtgttcctatcagaggaaaccgtatgggaaaaggcaaaaatctaaaagcatctccagtccaagaaatagatcttcagtttcttaaagattatgacatgaagggaggcatcagtaacctatacaaaatatttaaatagatttcccctctaagcttgaagctcctagggtttctctccat

SEQ ID NO: 2144 - DNA, 1374 bp, Artificial sequence
  DNA replication origin
gacctcaggaagactggaagtccatatcaggatttgagggtggggtatttattgcctcctctatctgcctcctctagtggaagtgggacttcctagggccaggccaggcaagaacatttttctactcctgttgacagcctcctggtaatgggaaaccattgagaggtttttgtttgtttgtttgtttggtttttgatggagtctggctttgttgcccaggctggagtgcactgctggagtgcagtgatctcggctcactgcaacctctgcctcctgggtgcaagcaattctgcctcagcctcccaagtagctgggactacaggcatgcaccaccatgcccggctaatttttgtatttttagtagagacagggtttcaccatgttggccaggttggtctcgaactcctgacctcaagtgatctgcccactttggccttccaaagtgctgggattacaggcgtcagccactgtgcctggccgagagttttcttaaacaaggttgatggtaacatggtgacattttttaaagggttgctcgggcttgtgtcaaaatgattttggtatctgactcagaatgaatgggaccaggaagtctcacagctaccgaagtcaccaggagtatggcagaacaggggctagttaggatgaccatgggccaggggctgcaatctttaatgcataaggaacaattgggtgtcagtgatgaggaggggtggagggtggtatgactggagaccacaggagaaagaatttttgtacaagggtggaaatggccatgctgacaccacgtcctggttttatagggtgaattggagagtgaaggcaggaattaggaagctgttgcattagtccaagcaagaagtgatgatgctggagtcagaacaagggcaatggagacacagaggaagggcagggatatgttaaggcggtgggatgtggggtgtgaaggaaacacagatagggtagaggacagcgtccaggtttctggcttggtttccgcttgtagtcagcctccctctctgggcttttgtgaagacggagccatagaacggaccggaccagaaagcagtttggaaatggcaaaactgctacccatcatcagctacattatcatcaaagctctctaattaccctagtaagttcagtcaatggaacgaggcatgacaattaagataaatcacgagagtcacccagacatgggggacctggaggtcctgagtcacctcggattacacctgctaggagttgagggccggggcggggcgaacacagactccgcccttgggcggggcctggatgcggccggagcggagcagtgctggagcgggagcctcagccctcaggcgccactgtgaggacctgaccggaccagac

SEQ ID NO: 2145 - DNA, 1138 bp, Artificial sequence
  DNA replication origin
tgttacataaacccattagtgaaatttagggaaatttcacccagactagggaggatgaagaatggagcatctatcttttgacagaaatacagttacacacacacatacacacacacatacacacacacagagagagagagagagagagagagaatgagaaacaaaaacagaggagtacaaaattgagcctaagaaaaagaactggaaccaataaaaattgtaactaacatttattaagtatcttctatgggccagtctctttatctccaatcttcaacaaccagcaaggcaggcaggagaaaactgaagttcaaaaatgttacataacttccccagggtcataaagctatatatacatgacagaactggaactggtagtgttggtatgtgtctgacaccaaaatcactacacattctagtataccactctgttaaaaaagtgtatttggaaaatttagggatcagaggatttggagaattttctttccctacttcccctctgacagtcgtgtttgtttttggttctgatgtttgcaccctagaggctgactgggatcaaatatggggcatctgtaaacagaatgattccatagcccccactgtgtaataatttccttccttcagagccttactaggatttgcctgggatgaggggtggaaaggtgggagagaagaggttgggagggagaggatgttagtaaaagatgggtgattctttgcttacctttaagttgtttatgaatttcaggacaacccgttggctattctcttctctggcttggcatatatatatatgtatgtatttttttttcatttttgttttgtgggggtggtggtttaggtgttaagggtttggttgatatctgtagaaaatttcttaatgatctacacagtagataaaaaaacaagttaaggtcaaagacaattccttcgtctgttttgggagacgagtgtgtatgtttgaaaaaaaggtttgttctgggtcactcttctttcatccagacgcattaaaggaattagaagggggtctccctgccacccccgaaaccgtgagagtcaaacggagattcccttatattcctgctctcaggtgcgggtccgagtgacaagaacgttcacgtatcttcgggagagaacg

SEQ ID NO: 2146 - DNA, 1260 bp, Artificial sequence
  DNA replication origin
cacagcaaccatctgatttctcaatcttttccccacctttcccccttttctattccacaaaaccgccactgtcatcatggccccttctcaatgagctgttgggcacacctcccagacggggtggtggccgggcagaggggctcctcacttcccagtaggggcggccgggcagaggcgcccctcacctccccgatggggcagctggccgggcggggggctgaccccccacctctctcctggacggggggctgacccccccacctccctccggacggggcagctggccgggcgaggggctgaccccctcgcctccctcccggacggggcggctggccgggcggtgggctgaccccctcgcctccctccgggacggggcggctggcctggcggtggctgacccccacctccctccccgacggggtggctgccgggcggagacgctccttacttcccagacggggtggctgccgggcggaggggctcctcgcttctcagacggggcggctgcagggcggaggggctcctcgcttctcagacggggcggccagccagagacgctcctcacctcccagacggggtcgcagccaggcagaggcgctcctcacatcccagacggggcagcggggcagaggcgctccccacatctcagacgatgggcggccgggcagagacgctcctcacttcctagatgggatggcggccgggaagaggcgctcctcacttcctagatgggatggcgggcgggcagagacgctcctcactttccagactgggcagccaggcagaggggctcctcacatcccagacgatgggcggccaggcagagacgcttctcccttcccagacggggtggcggccgggcagaggctgcaatctcggcactttgggaggccaaggcaggcggctgggaggtggagattgtagcgagccgagatcacgccactgcactccagcctgggcaccattgagcactgagtgaaccagactccgtctgcaatcccagcacctcgggaggccgaggctggcggatcactcgcagttaggagctggagaccagcccggccaacccagcgaaaccccgtctccaccaaaaaaatacgaaaaccagtcaggcgtggcagcgcgcgcctgcaatcgcaggcactcagcaggctgaggcaggagaatcaggcagggaggttgcagtgagccgagatggcagcagtacagtccagcttcggctcggcatcagagggagaccgtggaaagagagggagaagg

SEQ ID NO: 2147 - DNA, 817 bp, Artificial sequence
  DNA replication origin
tgaggagcgtctctggctggccgccccgtctgagaagcgaggagcccctccgccctgcagccgccccgtctgagaagcgaggagcccctccgcccggcagccaccccgtctgggaagtaaggagcgtctccgcccggcagccaccccgtcggggagggaggtgggggtcagccaccgccaggccagccgccccgtcccggagggaggcgagggggtcagcccaccgcccggccagccgccccgtccgggagggaggcgagggggtcagcccctcgcccggccagctgccccgtccggagggaggtgggggggtcagccccccgtccaggagagaggtggggggtcagccccccgcccggccagctgccccatcggggaggtgaggggcgcctctgcccggccgcccctactgggaagtgaggagcccctctgcccggccaccaccccgtctgggaggtgtgcccaacagctcattgagaaggggccatgatgacagtggcggttttgtggaatagaaaagggggaaaggtggggaaaagattgagaaatcagatggttgctgtgtctgtgtagaaagaagtagacatgggagacttttcattttgttctgtactaagaaaaattcttctgccttgggatcctgttgatctatgaccttaccccgaaccctgtgctctctgaaacatgtgctgtgtccactcagggttaaatggattaagggcggtgcaagatgtgctttgttaaacagatgcttgaaggcagcatgcttgttaagagtcatcaccactccctaatctcaagtacccagggacacaaa

SEQ ID NO: 2148 - DNA, 1440 bp, Artificial sequence
  DNA replication origin
aaggccgtgccacgtagccgcgggccgggccgggccgggcgcgggatgggggcgccgcgccagaggtcacggccgagcggggcgggggccggggtttggcggccgcgcggctggagcgtcctcggagccacaccgcgcgggggaccgggctgcggggcgtccccagcaggccccgccagggcgaggccgggcccagcggcgccgccagaccccgcgcactcaccgatccgcggtacttctccagcgacaccagtttgccccggatgttgaccgccttgaagtcgtagaagtcctgctcctgctgcgcgcaggccgcagcccacaggagcagccacgccgctgccaccgtcgccgccaccatggcttgttccggaggtggcggcgtcgcgagggcaaagacggggcggggggatctagcgcggggggcgggaggaggcggctctggcgccgctcggcccgcaaggcaggacgcgccgcgttctcgttccctccgcaggcggtggatgtccggctctggacctcagtttcaccgtctgtcctgaggcagcgcacccctgccccggaccccagagccagggtttcaggattctgtcccctgagaccggagttcgtttcagtgaggctccctcttgtcccaggaaacagcgacttggcagggacagggaggcaaaaatctgagagctcagcttctcattagtgcagcggccttaggctggcctggtcacgcccccactccgacctcagtttctccacatgttaagtggagctagtcggtataggatggaagtaatagaaaaacggatgcgaaacactttaacagttgaatggtgcctgcaaacttcaggtgaatgaatgcatgttccctgaaagtgatggctgggagaagaagagaggaccgtgggcctgttgcaggttaggttcctggaagcagattctgagatggagattggagtgcaggatgtttatgagggagcacccttgggatcaacaggcgtgggaaggatgggagggaacaggagtggcacagggggaaagtagtgagctccatgcaggccccaagacagttttagctgactcgacagggactctagagctagagtagcccatcagatgagctaagatggccaggtcatcctgcctttatcagtccttggatgtggggccacctggcaagtggggcaacaagggccaagatggccctgtctgtggagaagctgacattaaaggctttgtgctaacagcactcctagcagctggtgtctgtcctaagtcctcagtgatgggggatctgggcagcacatcacaatgtctccccctgctcagaaaacccctgttgagcccatgaaatgtcaaacatggagctggatcctgtactcacaggctgtgagttttttctggaaactcacagactggtgtgagagaaaccaggtaaactgcaga

SEQ ID NO: 2149 - DNA, 1623 bp, Artificial sequence
  DNA replication origin
gcctcctcccgccccccgcgctagatccccccgccccgtctttgccctcgcgacgccgccacctccggaacaagccatggtggcggcgacggtggcagcggcgtggctgctcctgtgggctgcggcctgcgcgcagcaggagcaggacttctacgacttcaaggcggtcaacatccggggcaaactggtgtcgctggagaagtaccgcggatcggtgagtgcgcggggtctggcggcgccgctgggcccggcctcgccctggcggggcctgctggggacgccccgcagcccggtcccccgcgcggtgtggctccgaggacgctccagccgcgcggccgccaaaccccggcccccgccccgctcggccgtgacctctggcgcggcgcccccatcccgcgcccggcccggcccggcccgcggctacgtggcacggccttggcgcggaggaacccgaagcgctcgcagtcggcgcccacttcgctaccggcacctttgggcagcggggtccagaccttcgccgggaggccgggcaccactgcccagcctttgccattcacgggtgaaaaaagtaaccgtagcatcgtgcggcctttccctctcccgtcctcattttctgcatctggaacggggagtggctgattcggagtccagtgaagaacactgtggagatcaatgtgcagggcagagagagagttatttcagatgcacggagacctcacacggatcatccctgggagagggcacaaaggcccagagagggcaggcattcgcacaaggtcacactacactagaaagacggggcctggaagagaaccccaccgccacatccggggtcctctctaggccaagtccttagatggcagctcaggggcacacataagagtcatccaggctaattgccccctcattaccaagagggaatctaagctcagagaagacttcggagaggaagggtatctgggttgagtctttgaatacgagtggattttagcaagactaagaagcaaacagcaagaagggggtgggggggcgcggggccaggagttccagctgttgtgcttcaaagagtctaaagctggaggctacgagtggtggaagatgaggctgaaacgactggcaagggagcaggcgggaccttgaacactacattgagaggcctgcatgtcacattatgtgcagtgaagaactcccagagtggacctcttcaggatggacctggggactggtgtgaaatggctggggagttgaaatctaatgaacaggtgggccagcgtccagttttggatgaaccacacaaaaatagatgtcaacatttttctcctgggagcaacaccatctttagtgaagaccagtactctataagccttgaaattttcgattatgctgggagtcttggggacagtaatccctgcttgattgtcccccagagtgtcgtgagtttcaaatcagatgaaggcgtggatgcacttagtaaactgtagagtgctttgcacctgtgtttggtggatcccagcaggaacttcatttagaactctgggcaaagaaccaagaacagggcccgctccaattcaggcctcctgttctctctagggcagctcaccagagagccccaggtttagcgtc

SEQ ID NO: 2150 - DNA, 1314 bp, Artificial sequence
  DNA replication origin
ctcatcgcgccccgcgcccagcccgccgccacctcgggccaccagacggccggctagagcccggcggggaagcgagggaccgagcgagacggagctgagcctgagaacggcagagacgaagagacccaggggccgagagaagccgagacagagacagcagcgcggggccccgaggaccgagcggcggccaggtgcccggcccgcgcggaggggtaggggcaggcggggcgggcggcgggggccggcggcgggagtgacggctgctggaacgcggcaggagccggagcggacgcggggagctgggccgggagccgcgtgctcgcctggctctgcctgcgcttcctgccccctccccactgcgctccccctgcctgcacgagggcgctgggtgcgcaacgacagcacgacgcggccagagtggcggggcgggaattcgaggccagggcgcgggcgccttacctgcaccgagccggcgccgggagtctcggggcattcggggctggggcagacagacaaggcaccagccggcgaccacacggcggggtcagtgaggagagtgaacacaacctcacccaacctccgcaaaaacccaggggcccggggatgttcgcatccgtgttaaaggtgagagctgagggccagagagaagccatttcccggagttcctaagcccacgagattttaaccgggggcggcctagtaggaagtccttgctctttctgcggctttcatggtgcctcttttctagcgggcttttagatgtcctcatcatctggagtccctgctagtctcgctgagagctagctcgtgcacggacaatgtccacactcttctgttcatactgcctgccactggcctgggacaaggagccgaatatgggtgtggatgggcccagacggtaacctccttccccacactgaccagcaaagaaagtcagcagacctgtccattttgaaaaattacttccagagaacaagggcagtgttctcactagcatcagagaaccacagtctgaaggggctctcagtgccttggcttcccccatgtaccctgttgccttacgccatctggaagggcttcatacagcaccttcagtgccttagctctacatttttcacagcagtgggtagggtaggaaatagttactgtggtgcctcgggcacccccgattccttcgcccttggtttggacgtgtggggaacgggccgtgggtatcaggggatctgggctccagcccagctctaccccttccctgctgtttctctctgagctttgggttccttgtcctcacccaggccagctcctcagatgctg

SEQ ID NO: 2151 - DNA, 1181 bp, Artificial sequence
  DNA replication origin
gacactgtcctttcccacccagagggcagcagcctctgctcatatacctccagggacaggaaaatcactaactactgagatggcccactcaatttttgctgatgcctgtttcccaaagtaggctgaggatcaagttccattctccaggtaaggcctttggagacccagggggattgagacctattaccctctcaagccaacacttaggctccaggaatgcaacctcttccctgaacaaatggggaaactgaggtcctatgggtggagagtcaacacttctatgaatatggcctgagctagcttctgcactatgccattgtctcatgatgaacttggaggcagctctgactcccgagtcttctgccttagcttgaggatggggtacatccccagcactcaccacagggcttggcacacaccaagtgctcagtagagagtgcccgaaagaatgactaaatacaaaagggaaccaagggttgacgctgggctgaggctggggttggggtgtagcaccaggcgagggttaagtctggaggttgaggtttggatgtagatctagatattaataatatttggagtcaggatgtgggagaagagctgaggtgggactgcaggcaggacagaagaggaggttggggctggtgatagaataaggtctggggtcagtactggggagtgtggaaagtcaggaataaggctggtgttgatattaggaagggcaccttggtgggatgatgattggggtggagttgggctgcctgtgaatgtttgaagatggaagttgctgttagggggaggcttgatatgtgatttggggttgggatgagggtggtgatggaatgaagtttggggtggggatagagtgaggattgttttggattagaggagggggaggtccgagcatggctctaaataatggttggggtcaggatgaggaaatcgagctgagatggggtttcacggggtggttgatgctgtgggcatgaggacggtaaggactagagcttgctgctgatgttcaggtggacactcgggtgggggctgaggctggggtgaaggcgctgagactggagtggggttcaaggtagggtgagggccagggacggtacctgagccaccacatgtagctgtgctcgtaggggaagaagctgtgcgggtcgtcgcagcagtacttgtggtcg

SEQ ID NO: 2152 - DNA, 866 bp, Artificial sequence
  DNA replication origin
tggaaagtgaggagcgtctctgcccggccgccatcccatctaggaagtgacgagcgtctcttcccggccgccatcccatctaggaagtgaagagcgtctctgcccggctgcccatcgtctgagatgtggggagagcctctgccccgccgccccgtctgggatgtgaggagcgcctctgcccggccgcgaccccgtctgggaggtgaggagcgtctctgcctggccgccccgtctgagaagtgaggagcccctccacccggcagccgccccgcccgggaggggggtgggggggggtcagccccccgcccggccagccaccctgtctgggagggaggtgtggggggggtcagccccctgcccggccagccgccccgtccgggagggaggtgtgggggggtcagccgtcccgtccgggaggtgaggggcgcctctgcccggccgcccctactgggaagtgaggagcccctctgcccagccaccaccccgtctgggaggtgtacccaacagctcattgagaacgggccatgatgacaatggcggttttgtggaatagaaaaggaggaaaggtggggaaaagattgagaaatcggatggttgctgtgtctgtgtagaaagaggtagacatgggagacttttcattttgttctgtactaagaaaaatccttctgccttgggatcctgttgatctatgaccttacccccaaccctgtgctctctgaaacatgtgctgtgtccactcagggttaaatggattaagggcggtgcaagatgtgctttgctaaacagaagcttgaaggcagcaggctcgttaagagtcatcaccactccctaatctcaagtacccagggacacaaacactgcggaag

SEQ ID NO: 2153 - DNA, 1323 bp, Artificial sequence
  DNA replication origin
agagagcacagggttgggggtaaggtcatagatcaacaggatcccaaggcagaaggatttttcttagtacagaacaaaatgaaaagtctcccatgtctacctctttctacacagacacagcaaccatccgatttctcaatcttttccccacctttcctccttttctattccacaaaaccgccattgtcatcatggcccgttctcaatgagctgttgggtacacctcccagacggggtggtggctgggcagaggggctcctcacttcccagtaggggcggccgggcagaggcgcccctcacctcccggacgggacggctgacccccccacacctccctcccggacggggcggctggccgggcagggggctgaccccccccacacctccctcccagacagggtggctggccgggcggggggctgacccccccccacccccctcccgggcggggcggctgccgggtggaggggctcctcacttctcagacggggcggccaggcagagacgctcctcacctcccagacggggtcgcggccgggcagaggcgctcctcacatcccagacggggcggcggggcagaggctctccccacatctcagacgatgggcagccgggcagagacgctcttcacttcctagatgggatggcggccgggaagagacgctcgtcacttcctagatgggatggcggccgggcagagacgctcctcactttccagactgggcagccaggcagaggggctcctcacatcccagacaatgggcggccaggcagagacgcttctcacttcctagacaggatggtggccgggcagagacgctcctcactttccagactgggcagccaggcagaggggctcctcacatcccagacgatgggcggccaggcagagacgcccctcacttcccagacagggcggcggccgggcagaggctgcaatctcggcactttgggaggccaaggcacgcggctgggaggtggaggttgtagtgagccgagatcacgccactgcaccccagcctgggcaccattgagcgctgagtgaacgagactccatctgccatcccggcaccttgggaggccgaggctggcggatcactcgcggttaggagctggagaccagcccggccaacacagtgaaaccccgtctccaccaaaaaaatacgaaaaacagtcaggcgtgacggcgcgcgcctgcagtcgcaggcactcggcaggctgaggcaggagagtcaggcagggaggctgcagtgagctgagatggcagcagtacagtccagctttggctcggcatcagagggagacagtagaaagagagggaga

SEQ ID NO: 2154 - DNA, 1384 bp, Artificial sequence
  DNA replication origin
tggtgggtactgggtgtgtggtgtgccgtgtagcgggcccctgaaacaccttggccttagcagttataagtatagagaatatcttccccacagggctaggatgattaagatattttaaggatttaggatggtgcctgtcatttattaggcactcaatatgtgctggctctcattgtcctaaaagatttttagtccatgagtattcaagctagtagaatcctgtccttttagctctacttgaatctaggctcaatgttcaggagaagacacgagatgcatctctgttggtccaggtccaatgctgtgaatcacaccaactcttgtgagtttgagctccaaaaggactggaatttgaggccaaagaaggcaaaatattttccctccccattcttgctaagttcttgggttgttggtgtaatggaaacagacagtcctgggttcaaatctagactctacatttgcctgctcaagttacctgcctgtttccatcatgggaagaacttgggctgtggagaagggtaaacctggggtcaaaaccccagctctgccagtgaatgggcattttactcagtcaagtatcctttctgaggccatctcttttctataaagtggggcagcagcagttcttcctttgcggagttgtgaagcagagcataatgcatatggtataacctcacgggggcggcagccagtgaaaagtctggagctgctttacaggggccattcattcattcattcattcaggttaaggttgagcaaggggtcccacgtgtgacttatgcatccttctccctcttcagtgggaggacagccaggtgaggcagctgtggatgccctgcccacaggccagagcaggtaaggggaggaggcttgctacacagtggaggtgccaagtaccacctaagcccagccgcattgcctgttccaccgccgaagcccctggcgccaaacagtgttgcttcagctggtagtagttaatactcctttacttggaaacattttcagttcctgggagcaatatggtggtgtgaggtctcactgttcacccgccctgtttctctgtgactgggatctgcatgtccccgactccggcccaatttaccattcttcaaggctcaccaggctgtgggcccagggccaacagggatgggagtggagggtggggtggagcgtggggaacttttccgggaagaggcccagcagggtcttggctggcggccccattagccacggcccaggaccccagggtgggagagtgaacggaaaggtactcgtgcctggagcggttgcaacatcctctgtaatgaggaagatacagctcagaggcactgggtcgaaggacccctctccccagccctcctttcaggtgtcggggcctaaaggg

SEQ ID NO: 2155 - DNA, 886 bp, Artificial sequence
  DNA replication origin
cagacagcccgccttcccggtctcccgggtgggggttcggggggcgtggtgcggcggccggggctgagaggggtcggtgcggcggctctgcctccccgggaagtgggaaccggccaagtcccgagcggggaggggcaggctttctcctgcccgcgcctggggggaccctacgcctgtgtccgaaggaggccggcgtccagcagatgctcccggggcgggtggggagtgggggaagggggcgggagagaggcggggaggagaaaacccacaacaaaacttgcgtcgcggagagcgcccagcttgacttgaatggaaggagcccgagcccgcggagcgcagctgagactgggggagcgcgttcggcctgtggggcgccgctcggcgccggggcgcagcaggtacagggcgctggcagccggggtgggccgaggggccgggggctgagcccgggcagcgcactcagacgtccccgcctctccggatggctccagcagctgcctggggcgggcccgccgcatctcaccccctctgtaggaccctgcacccagggcacggccggagatctcctcctctggagtgcgacccctgcgcagtcaggacccaggcaggggccttctcctctctgagcagaggctggtccccgtccccaggcccctcccgctgcgcacatctggaaagaatctgagggcggttgggggcgggggctggagtgggaggacgccggcgggcgacagggaatgtggggggcaggtggaactgcgtaggggcggggacccctgtcatgagagcctgggcccgaagtatccccgcgtctttccacgtcaactcatcaggccccctagcgactccaacctccacctctttatagatagagaaactgaggccc

SEQ ID NO: 2156 - DNA, 1085 bp, Artificial sequence
  DNA replication origin
caacgcgctggagcgcgtgcccagtggcctgcctcgccgcgtgcgcaccctcatgatcctgcacaaccagatcacaggcattggccgcgaagactttgccaccacctacttcctggaggagctcaacctcagctacaaccgcatcaccagcccgcaggtgcaccgcgacgccttccgcaagctgcgcctgctgcgctcgctggacctgtcgggcaaccggctgcacacgctgccacctgggctgcctcgaaatgtccatgtgctgaaggtcaagcgcaatgagctggctgccttggcacgaggggcgctggtgggcatggctcagctgcgtgagctgtacctcaccagcaaccgactgcgcagccgagccctgggcccccgtgcctgggtggacctcgcccatctgcaggtaagcggaagggagggggctgagccatgcccatggaggggggtactggcatggctgccctgagcccacctgtctgaagggtgaggagaagggctgggtggtgagggaggttcctctggtatggccaggctgagctcattcaccttcaggtatctgctggagatgctggctaaggcgaagctaggccttaggggaggcaggaggtgggtcaggcagagggtgtggctggcatgccagggtgagcccagcccacctgcaggtacaagagtgaggggcagagtacaggtggtatgaccgagctgagctcatcacctgcagatacaggtttgagaagggctgtggaggtaaggaaggtcatggctgcaggtaggggccctaggctcaggaggaccgggggccagttcgggtggtatgtatgggagagtcaagctcacccctttgcaggcacaggagtaggtatgtggagaaggctgggctttgggatgggaggcagaggggacagcctgagctgtgggcccacctcaccagtctgcagagggctggaggtggggatctactcatgctttctgaggctggccagtcgatgtggctgctgtgaccacatggtcagaattaggcagggatgcctgggcacatagttcactttggtaacaaaacccccaactcaaccagtgtg

SEQ ID NO: 2157 - DNA, 763 bp, Artificial sequence
  DNA replication origin
gtgctgcccgtgggtgccaccatcaacatggacggcactgcgctctacgaggctgtggccgccatcttcatcgcccaggtcaacaactacgagctggactttggccagatcatcaccatcaggtgcaccctgacactgcacctgggtggatggggcgggggctgggggccttggggattcccaggctcccagacttgaggggtatctgaagcgagcgagcctgggctcggagcacagcaggcagagggccagggctgggagctccgagcctggaggacagcccgggagggagggcattgctggtggccacagggcgagcggaggccagggacaggactcaggaccttggagaggccgcccgtgtggcaggagccaacgaaggggtgctgggatgcggctgaggctgacggaggcctcacagcccagccaagcacacaggtctgaccctggaggccaggccccagaggcaggcaggcagagccatgtggtggtcagtcagagtccctgggcagccccatagcaatatagcttcctggaacccacagaggcacagctccagacacaggtgtttgcacagttcccagggattctcctgaggccaggaatgggggtccatggggcttcaggactgtgaggagggacttgaccccgagagctccctggtgtggcattcctacccaccccccgcaccaaatggctgtcccagaggccctgacactcaacctcttccttggagccagaccctgacaatgcaccctgcccc

SEQ ID NO: 2158 - DNA, 7184 bp, Artificial sequence
  DNA replication origin
cccgagctacactgcctggttactctgtgagcactagactcgattgcaaggatatcattgcttgctgtctgcacagccatgaccagccccatacaggctgacgggcttgtctccatccaccccagagcccaccgctgccgtggctacagcaggcactcagcagacctggtagggagatgggtggacggctgggtgacaatgggtaatggagctcttctcatctgggccaaaacgccaggtgtgcagaggggccggggcctcggtgacccaagtgtgtgaaacgaaaatgtctgaaagtgcctctcggcacatctgacaagcagtccccaaactcagcctttctcagggctgggaacataagagaagggcatctactggcagaacaaaagaaccggagacccttggactcaactcgctgagcgttcgctgcgcatgtgtaactgtccgtgcatctgtgaacatttgtgtgagtgtactgaggcaggtcgtatgagggtaccgaggcagggcgtgtgagtgtactgaggtgggacatgtgagtgtaccaagacaaagagtgtgagtgtaccgaggcgggcgtgtgagtgtactgagtgtgcgtgtgagtgtaccgaggcggtgtgtaagtgtaccaaggtagggtgtgtgagtgtaccgaggcagggtgtgtgagtgtactgaggcagggtgtatgagtgtactgacactgtgtgagtgtaccaagctggtgtgagtgtaccgagacatggtttgtgagtgtaccaagatgaggagtgtgagtgtaccgaggcaaggtgtgtgagtgtactgaggtggggtgtgtgagtgtactgaggcgggttgtgtgagtgtaccgagtaggcatgggtgtaccgaggcagggtgagtgagtgtgacgagtcagggtgagtgtactgaggcagggtgtgtgagtgtaccgaggtggtgtgtgtgggtgtttcgaggtggtgtgagtgtaccgttgtgagatgtgtgagtgtcctgaggcagtgtgagtgtaacaaggcagtgtgtgtgagtgtaatggggcagtgtgtgtgagtgtaccaaagcggggtgtgcgagtgtaccgaggaggggtgtgtgagtgtaccgaggtggggtgtgcgagtgtaccgaggtggggtgtgcgagtgtaccgaggtggggtgtgtgagtgtaccgaggcagtgcgtgtgggtatgtgagtgtaccaaggcagtgtgagagtaccaagacgatttgtgtgagtgttccgaggcagggtgtgtaagtgtactgaggcggggtgtgtgagtgtactgcggcagtgtgtgtgagtgtaacgaggtggtgtgtgtgagtgtaccaaggtggtgtgtgtgagtgtaccgaggcgggttttgtgaatgtaccaaggtggggtgtgtgagtggacaaaggcagggtatctgagtggactgaggtggtgtgtgtgagtggaccaaggtgcggtgtgggagtgtaccggtgcagggtgtgtgagtggactgaggtggggtgtgtgaatgtattgaggcagtctgagtgtaccaaggcaaagtgtgtgagtgtactgaggcggggtatggcagtgtaccgaggtgatgtgagtgtactgaggcgggtgtgtgagcgtactgaagcaaagtgtgtgagtataccaaggcagtgtgtgagtgtaccaaggcaatgtgtgtgagtgtaccgaggtggtatgtatgagtgtacacaggcaaggcatgtgagtgtaccgaggcaagtcgtgtgagtgtaccgaggaaaggtgtgtgagtgtaccgagacgggttgtgtgagtgtaccgaggcaggttgtgtgagtgtactgaggtggtatgtgtatgtgtattgaggcagtgtgtgtgagtataccaaggttgggtgtgcgagtgtaccgaggtggtgtgtgtgaatgtaccgaggcagcgtttgtgagtgcaccaaggcagtgtgtatgagtggaccgaggtgggacgtgtgagtgtactgaaacaagacgtgtgagtgtactgaggcggggtgtgtgagtgtaccgaggtggggcgtgtgagtgtactgagttgggttgtgtgagtgtactgaggcggggtgtgtatgtgtactgaggcggtgtgtgtgagtgtaccaaggttgggtgtgcaagtgtaccgaggcggtgcgtgtgagtgtagcgaggcaggttgtatgagtgtaccaaggtggggtgtgtgagtataccaaggtggggtgtgtgaatgtactgaggtggtgtgtgtgggtgtatgtggatgtgtgagtgttctgaggcggggtgtatgagtgtgtcgaggtggtgtatgtgaaggtatcaaggtgggggtgtgtgagtgtacagagaggcaaggtgtgtgtgtaccaaggtggtgtgagtgtaccaagacaaggtgtgtgagtgtactcagatggagtgtgtgagtgtactgagatggtgtgagtataacgaggtggtgtggtgtgtgaatgtacagaggcatggtttctgagtgtactgagttggggtgtgtgaatgtaccaaggcaatgcgagtgtaccaaggtggtatgtgtgagtgtactgaggcagggtgtgtgagtgtaccaaggtggggtgtgtaagtgtaccgagatggtgtgtgtgtgtactgagacagggtgtgtgccaaggtaaggtgtgtgtgtaacaaggaggggtgtgagtgtaccgaggtggtgtgtgtgagtgtaccgaggcagtgtgagtgtactgaggcaaggtgtgtgagtgtactcagacggggtgtgtgagtgtaccaaggtggtgtgagtatactgaggcaatgggtatgagtgtactgaggtggtatgtgtcagtgtaccgaggcaaagtgagggtattgtggtggggtgtgtgagtgtaccaaggtggtgtgagtgagtgtactgaggcggttgagtgtactgaggcgaggtgtgtgagtgtaccgaggcaggttgtgtgagtataccgaggcgggctgtgtgagcgtactgaggtggtgtgtgtcagtctatcaaggcagggtatgtgtgtgtaccgaggcggtatgtgaggtactgaggcagtgtgagcgtaccgaggtggtgtgtgtcagtctatcaaggcggggtatgtgtgtgtaccgagacggtatgtgaggtactgaggcagtgtgagtgtaccgaggcggtgtgtgagtgtactgaggcggtgtgtatgagtgtaccaaggcaggttatgtgagtgtaccaagactctgtgagtgtaccgaggcagcgtgtgtctgtaccgagatggtatgtgtgagcctaccgaggcggtatgtgtgcatgtaccgaggcggggtgtgtgagtgtacagaggtgggttgtgagtgtacagaggcagggtgtgagtgttttgaggcagtataagtgtaatgagaggtggtgtgtgagtgcgaggcaggatgagtgtactgaggcagggtatgtgagtgtaccaaggcagtgtgagtgtaatgaggtggaatgagtgtactacggtggtgtgggtgtaccgaggcagtgtgagtgtaatgaggcagagtgtgtaagtgtaccaaggcggtgtgagtgtaccaaggcagggtgtgtgagtgtactgaagcaggttgtgtgactgtaccgaagaaagttgtgtgagtgtactgaggcaatgtgagtgtatcgaggcggtatgtgtgagtgtaccgaggccagttatgtgagtgtactgaggtggtatgagtgtactcaggcagagtgagtgtaccgaggtggtgtgtgtgaacgtactgaggtggtatgtgtgagtgtactgaggcggtgtgtatgtgtgtaccgaggcagggtgtgtgagtatgctgaggtggatggtgtgagtgtactgaggcagggcatatgagtgttctgaggcagtttgagtgtaacaagggtgatgtgtgaatgcattgaggcagggtgagtgtaccaaggcagggtgtgtgagtgtactgaggcggtgtgagtgtaacaaggtggagtgtgtgagtgtaccaaggtggtgtgaccgtatgtgtgtaccaaggtggggtgtgtgagtgtagcaaggcgggttttggtacgagtggagtgtgtgtgtgtaccgagacagggtgtgtgagcctaccaaggcagtgtgagtgtaccgaggcagggtgagtatactgaggcggggcatgtgagtgtaccaaggtggggcatgtttgtgtattgaggcagtgcatgtgagtgtacagaggcggggtgtgtgagtttaccaagacgtggtgtgtgtactgaggtgtgagtgtaccgaggcaaagtgagtgtaccaaggtagggtgtgtgagtgtaccaaggcaaaatgtgtgagtgtacggaggcagggtatgtgagtgtaccgaggcagggtttgtgagtgtaccgaggtggtgtgagtgtaccgagttgtggtgtgtgagtgtaccgaggcatggtgtgtgagtgtaccgaggtggggtgagtataccaaggtgggggtgtgtgagtgtattgaagcaagggtgtgtgagtgtaccgatgcagtatttgtgatagtaccaaggtgggttgtgtgaatgtactgaggcggagtgtgtgagtgtactgaggcggtgtgtgtgagtgtactgaggtgctgtgtgtgagtgtaccaaggcactgtgtgtgactgtaccaaggcaggtggtgtgggtgtactgtggtgggttgtatgagtgtactgaggcagagcgagtgtactgaggtgggatgtgtgagtgcttggaggcagggtttgtgagtgtaccgaggcgaggtgtttgagtgtaccgaggcagtatgtgtgagtgtgccaaggtggtgtgtgtgattgtaccaaggcgggttttgtgattgtaccaaggcagggtgtgtgagtgtaccgaggtggggtgtgtgagtgtactgaggcaggttctgagtgtgccaaggcactgtgtgtgagtgtaccgaggtggtgtgtgtgattgtaccaaggtgggttgtgtgagtgttccgaggcagtgtgtgtgagtgtaccgagggggtgtgtgtgagtacacggaggcaggttgtgtgagtgcaccaaggcagtgtgtgagggtaccgaggtgggttgtgtgagtgtaccaaggcggggtgtgtgagtgtaccgagaaaaaatgagtgtaccgaggcagggtgcgtgagtgtactgaggcagggtgtgtgaatgttctgaggtggtatctgtgagtgtactgaggtggggcatgtgagtctaccaaggcggggcgtgtaggtgtactgaggcgggttctgtgagtgtgccgaggcagtgtgtgtgagcgtactgaggcagtgcgtgtgattgtaccgaggcaggttgagtgcaccaagacagtgtgtgtgagggtaccaaggtgggttgtgtgagtgtactgaggcggggtgtgtgagtgtaccgaggcaggttatgtgagtgtaccgaggtggtgtatgtgagtgtactgagggggtgtgtgtgagtgtaccgaggcaggtcgtgtgagtgtatcgaggcaaagtgagcgtactgaggcagggtgtgtgagtgttctgaggtggtatctgtgagtgtattgaggcagggtgtgtcaatgttctgaggcagtatctgtgagtgtaccaaggctgggtgtgtgaatgtatcaaggcggggtatgtgagtgtaccaaggcactgtgtgtgagtgtattgaggcggtgtgtgtgtgtactgaggcagtgtgtgtggatgtgtgagtgtaccgaagtggtatgtgtactgaagtggtgtgtaagtttaccaaggcagggtgtgtgagtgtatcgaagtggagtgtgtgagtgtactgaggcatggggtgtgagtgtactgagctggggtttatgtgcgtgtgagtgtaccgaggtggagtgtgtgagtgtgctaaggtggggtgtgtaattgtaatgaagcaaggtgtgtgagtgtaccgaggcagggtgtgtgagtgtaccgaggcgaggcgtgtgagtgtacctaggcgggatgtgtgagtgtaccaaggtggtgtgagtgtactgagacagggtgtgtgagtgtaccaagatggggtgagtttaccgagacagtgtgagtgtaccgagtcggtgtgtgtgagtgtacagatgcatggtttgagtgtaccaaggcagggtgtgtgagtgtatcgaggctaggcgcgtgaaagtaacaacgtggggcatgtgggtgtaccgaggtggtgtgtgtgagtgtaccaaggcggggtgaatgtactgaggtggggtgtgtgagtgtaatgaggtgggggggtgtgagcataccaaggcagtgtgagtgtactgaggcagttgagtgtaccgaggcgagttgtgtgagtgtactgaggtggagtgagtgtactgaggcggggtgtgtgtgtaccaaggtggtgtgtgtgaatgcaccgaggtggtgtgactgtaccaaggcagtttgtgtgagtgtaccgaggcgggttgtgtgagtgtaccgaggcgatgtgaatgtaccaaggtggtgtgagtgtactgaggtggtgtgtgtgagtgtaccgaggcagtgtgtgtgagtgtaccaagtcggggtgaatgtaccgaggtggggtgtgtgagtgtaacaaggtggagtgagtgtaccgaggcagttgagtgtaccgaggcaagttgtgtgtgtgtaccgaggcagggtgtgtgagtgtattgagctggggtgtgtgagtgtacctaggcaggttgtgtgagtgtactgaggcgggtttaagtgtaccaaggcagtgtgtgtgtaacgaggcggggtgtgtgagtgtatcgaggcagggtgagtgtaccaaggcgagttgagtgtaccgaggcggtgtgagtgtaacgaggcagagtgtgtgagtgtaccgaggcggtgtgaatgtactgaggcaaggtgtgtgagtgtaccaaggcggggtgtgtgagtgtaccaaggcagggtgtgtgagtgtaccaaggcagggtgtggcttactgtgtatgctcatgcctttatgtgcccacatctgccagtgcctgtgtctgtgtgcacgtgcatctctgtgtccctgcatcagtgtgtgcctggcctctccgtgcctgtgtctgtgtgcacctgtgtccctgtgttcccccatc

SEQ ID NO: 2159 - DNA, 617 bp, Artificial sequence
  DNA replication origin
gaggggaagatggggaggcagggagggcaggcctgggggcgatagctgtgcgaaggtcctgagctgcagggaaccgtctgcggggagaaggcatagcaccatcagtgtgacacagcagaaggggtgagaggcaggcagaaacccctgctggagaattcaggtggggaccggcctcaaagtgcaccgtgaaccaggccaaaagctaagttgcatcctaaaggccacagaaaatgagttttatacagagaagcggcatgatccaattcagaaggttcaatctgaccagggatcagagttgcaggggaggtaggaggggaaggcagagccagggacagggccaagtggtggccctggggatggggaagggggcagatggcagggctgctcaggagggatccttagcaggaggtgggtgagtaggaggtgaggtgtgctgatcacccagcatgaagatttctggcccacgcatccaagtggatggtggtgtggtcaccaagcgatggatggtctggagcaggtgcaggcatcctggggtaggtgtcaactgatggttggccagtggatgagaatctcatgggggagtctaagctggagacggaggtttggaaatcgccagg

SEQ ID NO: 2160 - DNA, 786 bp, Artificial sequence
  DNA replication origin
cccagagcatctcgggacccctgtccaggaggggcgtgtgggcctgagggatctggggtcccgttctagcatcacagctccctggtgccatgacagtgtgtgaatccctctgcctctctgggtcctggttttctcatctgtaacatgggtgtgataaacactttgcaggactagagggaagaaccagtgatgtggctggggagtgattacaaacccagcaccatcaggtgaggagaggcgagggtgcctcatgatgacaaacacagggccaagagctgtggcggggaaagaggggggtcttgtgtgagttcaaacaggcaccagagaacacctcctaaaggctgctcaaatgacaagagatccaggaagcgtgctctaggcagaggtgacagcagatgccaggtgcagcggccggagcgcagaggccagcaggcccataggtcccatcgccacacgtgggcttgcggcaaccatgagatgcttttgggcagaagagcgacaggccagtttggagcttgggagacccctcaggtgctgagtggagagggggtgattctggggcaggcagggggccgagaaggggcagcctgggggagatgcggcagtgcagacaaaagggacagacgtgagaactgttttcaaaagggggagcttcaggatgtgggggccgattggatgtgggctgggggacaggaaggggagccaggccccgggtttccagcctgtgtaactgccatgaagaagctgcgtttcctgggaaagagcccctttccctgtcagccccca

SEQ ID NO: 2161 - DNA, 1042 bp, Artificial sequence
  DNA replication origin
tatgccagtacatgtaacactcttctagaatggcacctggtgcatagtaaatgcttaattaatgttgagggaaactgatatcttactgtcttgtttttgattctttctggaaggaagcaggggtaaagatcaaaccaaccaagcaaatgttcctcttgttccttccagtacctggtccactcaactgtttaagaggaacgcttggctttgaggcctgaactcctagaccacgtggtctgctctaatttcccaggccctaatctgctcccagctcctaatgatgcagctggtaataggattgtggcttccctctaaggcggccacacgggcatggccgtggggctggcgactggtgtttagcaactccgaccacctgcctgctgaggggctagagccctcagcccagaccctgtgcccccggccgggctctcatgcgtggaatggtgctgtgccccttgccagcaggccaggctcaccatggtgccgcatgccatcttggcacgggggagggacgtgtgcaggcggaatggactcctcatcctgtctgtgctgtctgtcatcgtgggctgcctcctcggcttcttcttgaggacccggcgcctctcaccacaggtcagccacccagagcatctcgggacccctgtccaggaggggcgtgtgggcctgagggatctggggtcccgttctagcatcacagctccctggtgccatgacagtgtgtgaatccctctgcctctctgggtcctggttttctcatctgtaacatgggtgtgataaacactttgcaggactagagggaagaaccagtgatgtggctggggagtgattacaaacccagcaccatcaggtgaggagaggcgagggtgcctcatgatgacaaacacagggccaagagctgtggcggggaaagaggggggtcttgtgtgagttcaaacaggcaccagagaacacctcctaaaggctgctcaaatgacaagagatccaggaagcgtgctctaggcagaggtgacagcagatgccaggtgcagcggccggagcgcag

SEQ ID NO: 2162 - DNA, 1575 bp, Artificial sequence
  DNA replication origin
tggatggggttggaataaataatcttgaatattctttccagctttccaattctaaagtgcagaaaatccctctgatcttaaacctgggtggggcccaggcctgcctgaaagtcagtgaccatctgactctgaacttggcaagtgaagacaggttctgtcagtcctcacctttcacccatatactggctcagctcatacacacaggttgacagggtggaagcatgtaccaggcttatgccacaggcacaaagcccctttttcttcctccctcctgccacgtgtagataatctcattttcatgtcttagatgtttgcacaaaatgtaatttcacaagaatcactcgatcctcctgagagggtgagggtatgtagtgatgacgttgggttaagtggtcccagatgcagagaaaaacaacccagcagctcgggtgaggcctgtgacacaatgttccacacatggggaagaagcctggcctctagctcttggagtgtggggaatccctgagggcagtttggtgagaaataaggtgagaagggtctttgagacaaattttgaacttggctccaggaactgagttactcactcagtaagttagaagttagtttaggtttggtttagagggtgaagaaaatttctaatattgaagaaggagatctggcaactcagacgaaagcggagttcgaaggctggaagaactggaagctggatttaagaaagtactgggggagggaaggggaagaggatttactagggctcttttcagaggggaagtcgattctgggtgaagtgtttcgaaggcagggtagccagtggtgaggaggagaagagaaatttgggtggaccctggatctgagtatgatggagtgtggatggggtactgagggtggtgtctagaattctgtgagggtgagctgcacttacaaggggtactgtgggtgaggaaggatattttgaggggaggaacctgttgaggagggcttggagagagtgaaaggtttccgggtgaacactggatttaggagattaaagatttaaaaacatgggggagggtcagttgaggacaagggtgaacacttcagggctgtgcttgtgggggctcatggggggtgaaagaacagagtactggagaaatgggaggtggggctgagggtcctgagtgacaggggtgaaggcggtgctgggagaagttaaggaatggtaaccatgatgtattaggaatcagcctacccatattccgggtaggaatgtgaggcagtcattaaagtacttcaggagacaccatagtcgagggattacagcggcgctggaaatatgcaggtctggcatttttcagggagaagaggactcaggatagctggctggaagttaggttaaaggagagggaatctgagaagcgttcaagatggagaatctgagatagcatcgaggggttctggaagagaatttgagggttctgaggttcctgtgctaggagattgtgaaaagtcccaagacttccagattaggggctgtggcagcctccatggtaggggcttgggggcggaaacgggttcactagaggagtcatgagtgac

SEQ ID NO: 2163 - DNA, 1584 bp, Artificial sequence
  DNA replication origin
actgtggctgggatggtatccaagctgtaagacaaagtcctctttactttcccctctcctttcctctaagggaaaggagtctctcctggagccgtgagctgtgctgcctggggttgggggactggtgacataaacactcctttggctccccaactggtatctcactaggctgtgtgcaccccaagtccacgggctctgagctcagcacagcaccaggacttgcccaggaattgcagtctttgtggcctagactgcctttcgaatttatttaggaccctgaagcactttagccagtggtggtggggctcgccagaacctgaccactgggatggatgattcccctctggctagggtttctctaagtgcttcctctgtgggcactagctgaattctgccctgagttgctttccactgtgacagggcaaaactcagttccaatgcaaagtcccataagcacacagattctctctctatgccaggcagccaggtgctgccagaggatgagggaggggtggtggtagcaattcaagactgtctttcctaccctcttcattgccttgttcctttttttttcttcttttatgagatagagtctcactctgtcacccaggctagagtgcaatggcatgatctcagctcactacaacctccacctcccgggttcaaacaattctcctgccttagcctccggagtagctgggactacaggtgtgcactgccatactcggctgatttttgtatttttagtagagacagggtttcactatgttggccagctaggtctcaaactcctgacctcaggtggtctgcccgcctcagcctcccaaagcactgggattacaggtgtgagccaccgcacccagccattgccttatatcttgatgtgacgttacaaccagctactgtgattgctacctgagttttggttctcatgaaggtgctttcttgtgtggatagttgttcagtttggtgttcctgccagggaagaggaggaggaggatcactggagggttctatttggctatcttgccccacctcctagaagagtcttgaatgtgctgttccttttaccgttaatctccacagctcctgcatggtctcagatgtagcctggacaggaggccaggtaaaataaagttcaataaacgttatgagagaaggataagccaggtgggctcccaaaaaagagccagctgaaggggaatgtccagtcgcaaggaccacagtgagaaggatgtggacacagggcaaactctggagaagggcctagaaaccaggtctcttgggtgaaacaggaaagggcagtttgaagaaaggcatcatccccaaatctgataaaccaatacattctactttttaaagcgtattggtttatctttatttggcagtcttggaactcttccttttgtagcttttcccctgggcagagggagctgacgtgatctgagaagttccagggcaggcagagtagtgaagagcctggaaagaactgagggtcaggaactgtcctgttcgcttaaagcaggcacaaaattggcgttcagtaactgtctgtggcaccaccgaatcctggagtcaggcttc

SEQ ID NO: 2164 - DNA, 1594 bp, Artificial sequence
  DNA replication origin
gcggtatggagggggcttacggcagtcggcctcgtccgatttgtctttgcagtcgcggtcgccgtcgcagcgccagcccaggtgcacgcactcgccgctgcggcaggcgaactgggaggcggtggcgcaggcggcgggcgcggacgtggccccggggcccggacggccgcagagctcggctgcctcgtccgagcggtcctcgcagtcaaactggcggtcgcagacccagcgctccgggatgcaggcgccgccgccatcgccgccgcagcggaactcgcggggcccgcaggccgggtctgcacagccgcgctcatcgctgccgtcaccacagtcgtcgtcgccgtcgcacacgaacacggcggccaggcacgagcggttgccgcactggaactcgtgcggggcgcacactgcgcgggacagagagccggtcggcccgccgaccccctccccggccgacctggggccccgctggtccggctacaggggctccgaccctcacccgggggccagaacaagtgccctttgggggctgaatggtggacgtgcagttaggcatagcgaaggcgggcttccaacacggacatgctaggtgactggcaacacacctgccctttgtgagccccccaggcctcactgggtaaatgagcatgagcatggtgggactaggagggggattccgaaaccttagagcactgcctgtcttgaaggaccctgctatggtcccaggacatgatctgttaaatgacactgacccttcccagggaccagggtctggggttggctcctcatagcatagcgatgcatagcataacctgcactgttccacctgagtcccctggcctggtatccaaggcgtctcttgggtcagtcctgtggctccatcacctcactcctgaatgttcgcagctcccgccatgctagaccatttgctgggcccagtgcacaggctcccacctccaagcctttactcaagttgctccatctgctgggaacctacttcttgcccaccactacattttgcaatgatgagctctcatcttccaagggcccaaattccacctcttccatgacaccctggcgtttccccgcttgggaaatctctgcctctgccctcgtttctgagcccctcagtcgcgcaggcgtctgagtttcatgtccttttcaatctgccccaagaatccacactgcctgggggtgtccctcctttgtcctgagggcctggtacagagctccctgtagtgagtgggtgtggagtggatggaactggtctggcccaggtatgaggtataattatgggatgtgcagtaattaaggacacacgtcatggctctgcttggggctctgggcttctctctggtaggctagtctgagttcagtggccgggaggaacttagaggccagccagccctattgccagtttatagatggggaaactgaggcccagagagaggagcagcttgcccagggtcacacagtccatgacaacaagagaaccagaactcacatttggggcttttctttcctactctgactcctcctcttggcttttctggttttctcctcccttcctggagtttttccagctgtttttcag

SEQ ID NO: 2165 - DNA, 1036 bp, Artificial sequence
  DNA replication origin
tctagcttcccgaaacacggccctctcggactcttgcctcggccccgcgggacgcgcgcgtgtttcaaagttccacgcagctccgggccgcactgcgctccttttcctgctcagtttttgtgaatgaatgggctccccagggcccctgattggctgggcgaggaccaccccataggcccccgtggccggagcggccaatcgcggagcagacggatgtgtagtattcgggttccctgggcgcgggggcaccgccctgccctgccccggccccgccccggccacacccccgcgcatatccttagggtggtaggtgcaggcggggctcgggcgccgcttttctgccgagtcacagtgaagacctttttgagccaccctggttagcagaccgcgctttcctgctagccctgcccggctctgagtcatgtggcacaccaggaaggagggtaccaggagggagagtttgtttcctggaaggggcccgagaagcccgaggccacgcgtgaaacggctgccggccgcctttgctgggcgtgcgcgactgatttagaagtttcttctcagagtgcacagggtttcagagtgtctgcgggaccgggagctagttagcaggcagttgtcacggtggaagaaatgtagctccgggaacagaaaaacagggctctcctagagacatagacccgggcagtcattcattcatcattcgggagcatctgctgcgtgccaggcgctggggcgccctccaagacaggccagccctgccagccagggagcactgacggggtctgagggaggagggcgacaggtggacaggcccacagccccacactgcacaggaagggtcacgggacacttggacaggcaccctctctgttgaatcgttttggtttttgactgtttgccagtcaccctcccgttcactttcagacctaacccaaagttggctttgtgtcttgtgcgtggcagaactagactgactgagtctatgtctctagcacatctttccctcctgcctcagtttcctcacctgaccacttgg

SEQ ID NO: 2166 - DNA, 1100 bp, Artificial sequence
  DNA replication origin
cggcagcgggagggagcgcgcgcgctggcggcggccgcccagggccggggccgcgcgcccagcctgagcccgccccgccgccgagcgtcaccgaacctgcttgaaatgcagccgaggagccggggcgggcggcagcggcggcggcggcggcggcgggggcagcggcaaccccggcgccgcggcaaggactcggagggctgagacgcggcggcggcggcgcggggagcgcggggcgcggcggccggagccccgggcccgccatgggcctccccgagccgggccctctccggcttctggcgctgctgctgctgctgctgctgctgctgctgctgcagctccagcatcttgcggcggcagcggctgatccgctgctcggcggccaaggtgcgtgcagccggtctctgactcggctctgctccgccctagccaccaacaaagcgcggccgggaggccggagcggggaggggtccagaacccggggctatcgggggctcccgggcggacaggctccacgcgaagcggctattcctgaatttgccctcggccccccgcccccgcgggcctcggtgttgagggctctgccctctgggcagcggatcttgggggaggggtgcaggggggcttggccagcggggaactttgccggaggggcggccattcatggttccggatgagctgtgtgattctcgccgttggggtttatttgacacgcgcgctccgcggcggtaatgagcagagccgggcggcttctccgcttgacaatgcgtttccgcagacccctgcgcgcggcggagagagagggggctgcctgccagggtgatgtgcctgcggctcccactgcgcctggcgcgcgggcgcggggactccctatgggctgtatctgagcagatctctgactatgggtcgcgtgtgcgggtgagtgcgtctgaatggagggtatacccaggtcgtgtgacactttaagtaggtgcctggtctcgccgtgccaccgagcggcccgacatccacggaacccctgccatcgtgccctccctttggatggagtgtgcctgaagcccccggggtctccataatcgccccctttcctcctccccagcggg

SEQ ID NO: 2167 - DNA, 1027 bp, Artificial sequence
  DNA replication origin
ccccgctccggcctcccggccgcgctttgttggtggctagggcggagcagagccgagtcagagaccggctgcacgcaccttggccgccgagcagcggatcagccgctgccgccgcaagatgctggagctgcagcagcagcagcagcagcagcagcagcagcagcgccagaagccggagagggcccggctcggggaggcccatggcgggcccggggctccggccgccgcgccccgcgctccccgcgccgccgccgccgcgtctcagccctccgagtccttgccgcggcgccggggttgccgctgcccccgccgccgccgccgccgccgctgccgcccgccccggctcctcggctgcatttcaagcaggttcggtgacgctcggcggcggggcgggctcaggctgggcgcgcggccccggccctgggcggccgccgccagcgcgcgcgctccctcccgctgccgcctccgccccacgctccccctgccgccgcctcctcgccctcctccctcctgtctttcgtccactcttctctcagcgggcgctccacggccctgctctgggctcgcctgagtgctgggctctgcagacgcagggatgggccaggcgagcccctcaccacggaggtagcaggtccagaggaagcagcagaggcttcctggaggaggtgacaggcggatcagaggctgagggatgtctaggagtgagcctgggcgggaggggaaatgatgttacaggacgaacaggcctgtgcagtgtgcgcgtggggcgggggagggagggataggggtgagatcccaagatgtggatgagcagggagaagctgggggcgcagggctggacccctgcacctgtcatgggctccggctgggatattataaatccctgtggctggtttggtttccgtgccatgtgcatctgtgcatgttgcacgctcatgtgatcatggggacgtgaggcaggtggattgggcctggtgcacagactattcatcgtcgttaagtacgctccaggcccctagtcagaggg

SEQ ID NO: 2168 - DNA, 1094 bp, Artificial sequence
  DNA replication origin
gattgactttcctaagaccacagagtggaggaggaggagggactgagttggataggtcagtttgggcagcaagacgggcttctatctttatcccacagtcccaggcaccattgtgcttgacacagaatccaaactcccagctgtggcctacaaagccctggtgatcagggccttgccaactccctccagcctcacctgaggcacccactccttccctgtcatcaggccccggcccaccttgattgccattccctttgccaagaatgcccttccgcctgatcttcatgggtcaggatccatcttgccattcagtgaaatgtcacctcctctgtgaggccttgcctgatcacctctacagttacccccattgctctcacctgggtctgttttgttttttccatagaagttatgatgacctgaaataatcttttgttttcctgcttttgtgtgtatctcttccaactaagacataactgcaggagagcagggaggaaccttatctgtttccactgtatccttgagccttgaagggcgtttggcacatataggtgaaaggacgcctgcatttcgttgtctgtgtgctaatggtctgtctccccacaggtcagggacctctccggggctggcaccatgcctgattcaccttggtacccgcaggcccagcacagggttggcacagaacagggcctgaaatgcttgctgaatgactgaatgaacaagggacaggaggggtgatgatggcaggagcaccgtgccgggctctctggggatctaagtccctttctggtggggtggccacagatattgccgctgggctgccctttgggggactacggctcaggaggctgctgaggagacagggtggtttccaggccaagggctaacagcacctgcccatccgcgagggaggtgaaggggcaagaggggagggagggtggacctaacactggctcttggcacctgcaggccggttgttttgagtggccaatgccctggaatctcattctctaaagaaggttgtgtgggttggacccggctcacaagtctgaggctgaaatcgaatcccagctcgctctccgcacccattctcccca

SEQ ID NO: 2169 - DNA, 1457 bp, Artificial sequence
  DNA replication origin
aaatgtggctggggtttgtcttacagtggaggcaaggaattgcaactcagaaatacgtggccacttggctgcctctattattgtacaccttgaaggcgaggttaattaagtcctgttgtggggtttgagggccagaatcttaatttttggagctttttctaatgtcaggagtggattgggtaataaaatgcatattgagaataagacggccttctggcccctctgtgtctagggcagtaaagcgtctaagggttgttgccaaatgggccatgaactgggctgggtttttatacttgatgaaaaagagcctaaacgctaactgatttgggagaggttggctaaagaaaaaggagcattaaccttgactatgccttcagctccagccacttctctaagaggaaattgttgggcaggtgggggagggcaagttgtggaacaaaattgtaagccagactgggtatgaggaggggaggtgatagaaggattacagggtgggggagtggaggctgaggaagaattgggacctggctcggcctggcgaggagcagcctggggtggaggggagaggttaggtgggtctgtagaaaaggaagattcaaaggactcagagcttggggtggagactgaaggaacagacgggagaaaaacaagaaagatttgggacagtcacattgggagcagagactagggagggaccaatgtataaaagaatgcctggatatcaggcacctcagaccatttgcccattttttgaaaaaaattatctagatcttgtaggatggagaaaatcgaaagtgccattttctgactatgtggagccattaccaagtttgtattggggccaagcagtgttgcagaagaaaataagacgcttaggttttagatcaggtgggagttgaagaggttttaagttttttagaacaaaggccaagggagaagaaggaggaatggagggcagaaggttgcccatagtaaaagggtaagtttagagaaaagagagggtagagacacagagggcggggggtggtacttgccaccaaggtgaaggatcaaggcaggcatccccatggtgatcagacacctctgaaatgtgggtgaataatcaggcaggcgtccccgcagtgattaaacaccaagggaagactgtcttcccgagtctgtgaccagcgctggagttttgagttcacagataaaatgcatctcctctgtctctaccagaaaggggaaaaggaaccaaaattaaggaagggagagattgaagggtggagggatagtgagagaggttggagaagggagtgaaacgaccgcttacccgatctgaaattggtgagatgttccttgggctggttggtctgaggacctgaggtcataggtagatctcctcaccgagtgagggcaaggatgggggactggtctctcgaaggagtcctcctgtcctgggtcttcagcacaaaatg

SEQ ID NO: 2170 - DNA, 1662 bp, Artificial sequence
  DNA replication origin
aaagtcaccagggtggtgaaggcccggcccaccgccgaaggtgagctctgggaccactgaccactgactggcctaggctcagcggggcggggttcctgcagctaccaggagcccattgacctgaaggggcgaaggggcgaaggggcgaaggggcgaagacgcgagaaggggcgagaaggggcgaaggggcgccggggcgaaggggcggggcgtgctggaggggaaggggcggggtgacaccgcctacttaaaccgtccttcacaccgcggactgcacaggcacaggctgaagcgctgtggtcccgcagggatcccctcgcctgggccgttgtgtgggcggactcgcgagggaggttcacgacgctctgccccgccccgcggcccctgagtgagtgcgcctggaggggcggagggcagggtgggcccgcacccagcgtggccatggatgatcccctcgcggccgccgagcgctgcaggcgagaagcgtgggccaaggcgtcagcagaccctgggcggcggctgtggaggaggccagcgtggagtacggctcggcccggtacctgctgctgtgcggcctgggcgggatgctgagctgcggctgacacacacggccatcgtgtccctgcacctggtcaagtgccgcatgcaggtggaccccggctggtacaagggcgtcctcagcggcttcggcgtgacggtgcacagcgacgggctgtgcggcctggctcgcggctgcgctcagaccttcttcggctactccctgcagggcttcttcaagttcggcctttacgaggtcttcaagatccgctccgcggagctcctgggcccagagaaagcctacgggtggagagccggcctgtaccttttcgcctgggccagcgccgagttcttccccgatgtctcgctggagcccatggaggcggtcaaggtccgcgtgcagacgcgaccgggctacgccagcaccctgcgagccacggcgtccaggatgtagggcgaggagggcctgtgggccttctacaagggcgtggcgccgctgtggctgaggcagatcccctacaccatgatgaagttcgcctgcttcgagcgcacggtagaggacctctacaggtatgccgtgcccaagccccagagccagtgcaccaaggccaagcagctgggcatcaccttcgtggcgtcttctgcgctgtcgtgtcccatcccgccgactccgtggtgtctgtgctgaacaaggagaagggcatcgcggccctgggcgtcctccgaagactggggttcacgggcgtgtggaagggcgtcgttgcgcgcatcggcctctttgcgcacatccccatgatcggcaccctcacggccctgcagtggtttatctatgacctggtcaaggtctatttcaagctgcctcgccctcccgtggctcaagcgcccgaacccctgaagaagaaaaagtaggtgtgaagttctgaaccgctctagccacagtgggtccacatttccgtcaagtggggaatcgcgtgcaaacaatgctagtgtgtaagatgttaacattttgggcagaggttacttaatatgcagtctgagttctctttaaatgactgcttctttttggcaactcaagaggattgcaaacatttcgtttgggggtttgaaccattatctttggggagt

SEQ ID NO: 2171 - DNA, 1223 bp, Artificial sequence
  DNA replication origin
ggcctgggctgccagctccgggagtcgaccgcgggaccaaggccacgacttaccaaagtcggtgaacagtgggccgggcacggtccgcatcggcctgcgcaggtctagggggccagggtagccactgcctgcggcctccgccccaaaagggggtcccgcaaggctgggcatcgccacggcggctcgctcgctcggctccacgtggctgcggccgcccagaaccggctggagggctctcgggccggggttccggccccgcgggggctgctcgaagaagcaagcggccgcgcggccctcgggtcccgggtcggcgtctccggagggagtccccggggacagcgggcggaggctcgcggccgggacggggacgggggcgggggcggcggccgcagccccggaggcctgcttgggcccctgcgcacacagggccgcctcctgctcctcctcggcggcctgcgtcttgagcaccttctgcgcggccatgatcttctggcgctcggagatcaggtagcacttctcgcagaggcactgcttccagcggcatttgcccgcgtgtcccttgacgggcaccaggaagccatggttcctgcatctcgagcacttgggggtgcgcaccattttgtcggccattggcagggtcagccttcgtaacacaaccaccacctctgggagctgcagagcaagtggcgctgggatgagccgcgccccacaagtccctcgttctggggacattggatacacttgtaacaaagcggctcgcagtgtgtcccgggaactgcagcaggaaccttgcattttccctccttttggggggtgcacagtttggagagtttctgtgctttgggtaattagatgcaatggattgggttgaataaattcttcatgggatgctattgcatgtatgtcatttagcttatctgaagtcttaggcatgtaattttccaaactctgttcccgccaccgacggaaggtatttgtaactttatgaaaggcggagtgatattcaacggtccacaaatttaaaactcgggaggaatgtagctctcggtgtagaaaaatactgtaagaggcaaactgtatttcttctccccaaagctgctccttctgtggcagttcacttctctgccctgcagagatgcttccaggatattccagaatattctcaagagttcagtgcagtgtgatggttgctcaagggtatgcccttacagtaattcccgttt

SEQ ID NO: 2172 - DNA, 1209 bp, Artificial sequence
  DNA replication origin
ataacagaattttcctgccggcacgttagcgcaaggacgcctgcgcactcttccctcccggttcgcggtcgggaggctcctcccctcagctccgccctggcccagtgcgcctgcgcacctcttccctccgtttccccacgtgcaggtgaggggagcctgcttctttactccacacacgagaacagttggtcagtaaagatgttgcctttcttttctcccttcaccttgtacataaattacattgttccctgtgccttggagcttttggtattgaagtagtttcaagtcacatgtacatttgaagctttagaagccccggggtttggtgcggacgcgttttcctggtgtctcccccgtggtggtgtggtgggacgggctcaggccgaggcgggggcccgggtcacgctggacaagctcctgccctctgtgtgccagggcactggtccggaggctcccgcaggctcgtcccgcccccctgactttccaggaaaatctaggtccccagggaacgtcccatctgacagggtcacaggcctgaaactgcagatctaggagaagccacctttcttttttccatctcaacagacaagcagggctgagccgaaccatgagccaggcattcgtgatggaggacgcgggtcacatttcttgccctcaaggaccttgtccttgtgggagggacagggttgatcaaagagtcacacaaatcagtgtccagggcttgagccatggccgggttcactgtgacccggaggaggaggaggagctcggcactgaggcctcagagaggcagagtgcgggctgacggtgtgtggggcagcggggaggtctggaggcggccccggcccacagcgggcttgatggccgtgctgaggactttccaagagcagtggggctggctggaggatggagatgcagtgagggcccagcggaaggaagtgcggggtgggctttctgtgcttggacggcagcgctgatgaccccgccgccctgggccgccctgcggatgcttttcccagcggtgtctaacacttccctccttgcttgcgttctttagtgcgccctctgaacatcaacccggaccgtgcactgggccctgagtaccctggtggctccagcatgcacccctactgcccgttcccgctgggctacctggacgcccctcctggcgtccccctgcagcagggcttccggcatgtgtcccgcagc

SEQ ID NO: 2173 - DNA, 1425 bp, Artificial sequence
  DNA replication origin
gggaaattcctagtctccggggtgcgctccaagcccgccgctgcagaaacctattcctccagcccggcgagcagaggcgcagcgaccggcccacatgctcctagtgggaggccggtccctaggcaacaggccccggccccgcccgcaactgctgccgtcgcgccctctcccggcggcgccctgccagggcaccggggtcagggaatgacggctggttgccttccagaacattatcccggccatctgggatgaagagtgctgcccctggcggccagtctctcggctttccatcctttttctgcctggacctggacgaccccaagccctccaggaactgggctgggccagccagtgagggagaggctggagaggccagcaggcaggtccttattattattattatttttgagatgaggtcttgctctgtcacccaggctggagtgcagtggtgtgatcacagctcaccgcaatctccacctcccaggttcaagcgattctcctgcctcagcctcccgagtagctgggattacaggtgtgagccaccatgtccggctaatttttgtatttttagtagagatggggtcttgtcatgttggctaggctggtctcgatctcctgacctcaagtgatccgcccacctcggcctcccaaagtgctgggattacaggcgtgagccaccgtgtccggccagagggagcaggaaggagccacggagggcttgtatgcagagcagcaacatgagcagaactggtttttcagtgctcatgctgttgctgctggaggcctgcctggaggagctgggcattcagggatcatggcttgggctgcctggcaaagctgcggggagcaggggtctaccacctaccaggggaagtaaccgcagtgagcccacaggggcaggaaagggcaggctgggtgctcacaacttggggttcataccggggaaaggtaggaaggcaggccttcctgaaaaccagtaagccagggggcagcactgggacaagcccctgacccccagttggtcttttcaccccagcaggtgcctccaaggctccaggaaagatgccgaccaatttctggagattcatcagctcacaggcctacaggggaaatgagaaatcctcccatcctggagtcgtgtgagcatcaacccctccaacaggacattactcttctccaaagaccaaagcctcctatctccccacaggctaactaaacaacccatttccttgcattggtctggaatagttgtggtgtccatgtggccacagagactgtttcatacttctgcgtgtgtgctgaccagaaacaggaaagcagctttatttgagtagtgcaacttggttggaaaatctttcaaaatgtggagtctaagataaaacttcaagtgttatgaaaaagtaaggttaccagccaggtgcggtg

SEQ ID NO: 2174 - DNA, 1078 bp, Artificial sequence
  DNA replication origin
gtgtcaaggagcaagaaggcattagtattgtacagaagggtgtcccaggcagaaggaacagcatcttcggaggcctggagtccagggagcgcaggcacagtgtatggtgaggccatgccgggcctgggccgggccagctcccatccctgtctgttggtcaggaggacgcagtttcactttgtcccactcgcctctacctccgggagactcagcacacccagtgtatgcagccagctaacagggatgagatgtgctgtctgctgagctggctctggagacccaggtgccatttggagcctgtgagaccccttcttaggggagtctcagccaagaatcaggacagcacccggatctctggcctaagtgggtgatgtgctgagatgggaaagtaggagaagggttttggggtgctgagcaggaatgtctgtgagaagctgcagaaggggtggggggcagcttcctggggctgagctcaggagggcaccctgcactggggatggagagcggatgctgtccgcgcagatgtggtgtgcagtcctaaggggcagggtgcctgcggacagggacggaagcctgaaaaggaggcagccgggggatggaaagaaagccgggacaggcgggagaggcctgggttccgagtagtgggctgagagtggcactaaagagaacaagaagggtattggagtgatcgtgaggtggtaagagacaagtgagtgtcaacacatcctttacaaattaggctatcaccaggaggacagaaatagggaggaagagacgagggaaggggtctgtgggggccagcggggatcagcagcctccaaggttctttgggttccaatcttccctgacgacttggtttatttatggccaggggcttgtggggaaggcaaaggagtggccgcgagggggcgccaggacctagcccaagccctcctccaagcggagactgggacgctctcgtctttactcaatgtgtttccaaggggatgtgagctgcgatgacaattttgagtttccatgaagcagggtctctcctgtcctccatcagagacttgcggccagtcctgccagtgccctc

SEQ ID NO: 2175 - DNA, 917 bp, Artificial sequence
  DNA replication origin
aggggctgggcagtcagcagtgaagaggacagctcaggccctgacctcctgggacggacgttctagcaggggcctcagcagcgcagtcccctctcagcagaggggcctcccgaggcccaaagctgccgggtcactcccctgaccaccccccggtcggctagattagggggcgtggagagaggctggaaggggtggcagaaacagagtctcttgggcctgggcttcccttctgtgcagtgagtggggtggggctggtggtctcagtgggccctctcagcccttatggtccgggtcctctgatagctcatggggtccccaagggccagcaggagcacagggagtccctagaggacaggaccagtgatggtgaatcccagtgcccagcatggaagggacctggcctgggcacacacacagggcaggaggggacctaatacccaagacctgagaccctggcagggtcagagccttcctccaccctagaagggtggaggaaggagaaggcgggtttgggaggggtgggagggacaaggggcctggggtgggagggacaaaggggcttggaaggggaaatgtggagacagaggaggatgaaggtgaagagccagagaggagtgggtagggatgggggagtcagagaaggaagacagagaggacagagggggacagaggagagaaggagaagagggacaggggagagaggagaagagagggacaaggaggcgggggagggacagggaaagaggagggggagagggacaggaagagagggatgagggggatggggagagaggagaagggggagagacagggaaagaggagagggaggaaggagagggagagaagagagggatgagggggatggggagagaggagaagggggagggacagggaaagaggagaggggggagggagag

SEQ ID NO: 2176 - DNA, 1476 bp, Artificial sequence
  DNA replication origin
aaggagaaggcgggtttgggaggggtgggagggacaaggggcctggggtgggagggacaaaggggcttggaaggggaaatgtggagacagaggaggatgaaggtgaagagccagagaggagtgggtagggatgggggagtcagagaaggaagacagagaggacagagggggacagaggagagaaggagaagagggacaggggagagaggagaagagagggacaaggaggcgggggagggacagggaaagaggagggggagagggacaggaagagagggatgagggggatggggagagaggagaagggggagagacagggaaagaggagagggaggaaggagagggagagaagagagggatgagggggatggggagagaggagaagggggagggacagggaaagaggagaggggggagggagagggagagaagagagggatgagggggatggggagagaggagaagggggagggacagggaaagaggagaggggggagggagagggagagaagagagggatgagggggatggggagagaggagaagggggagggacagggagtagggcgagggacagggaaagaggagaggggggagggagagggagagaagagaggggagggggcagatagagaagagaggggagagaggcagatagagcggggagggggagagacagagaggggagcgggaggggcaggcagagatgagagggggagggacagagagaggagagtggggaggggcagggagagaggagagggaagggggcagggagagaggagaggggagaggggcagatagagaggaggggggagggaccagagaggagagaggggaggggcagggagagaggggaggggcagggagagaggggaggggcaaggagagaggagatggggagggatagagagaggagagcggggagaggcagggagacaggagaggggagggggcagggagagagaggggagaggggcggatagagaggaaacggggagggacagggagagaggaggggggaagggacagagagagaggaggaggagggacagagaggagagtggggagggacagagagagagagaggagtggggagggacagagagggaagggcgggacagggagagagagggccctgatccctgatggagacagagagaccaaggcttcagggtgggggtgctgggccaatctagcttgaacttgacagaggccaggactgtgggggcggcctggagtggcagggctggaaggatgccatggtctcctgtccatcctgggctctgtgcctatgccctgggttggactcgggggcccctgggtggactcagccccttggctctatagaccctgtggggtcctgggcttgtggccccctaggggctctctaggccctgtgagaaatctcagcccctccacctaaccccactagcctccctgtgtgacagtgacagtcacacctccttgccaatgg

SEQ ID NO: 2177 - DNA, 1074 bp, Artificial sequence
  DNA replication origin
agacagagagaccaaggcttcagggtgggggtgctgggccaatctagcttgaacttgacagaggccaggactgtgggggcggcctggagtggcagggctggaaggatgccatggtctcctgtccatcctgggctctgtgcctatgccctgggttggactcgggggcccctgggtggactcagccccttggctctatagaccctgtggggtcctgggcttgtggccccctaggggctctctaggccctgtgagaaatctcagcccctccacctaaccccactagcctccctgtgtgacagtgacagtcacacctccttgccaatggtgggtctgggggtaatcgccgtgccctgcagtggcagtggccaggctcccatgtgctgcgggctgcagatcagggcttgggaggggctttggtcttggtgtttttaaaataagggctgaagatagcactacggagggagctcaggtccagcccccgggggtcctgcctggggaccggtgttgcagtgctcgccttcgccttcgattaggagggagaccctgccggcgtcggggcagggcgtcccgagtgtgccaggaggagcgggggctcagtggagtcccaggcagaagagtgaggaatggcatttccagatcccggtcaccacagcagtgggacccacccccgagcccctccgtgccctgccatcccctgcggcctacttgtctctgctctgtctcggcctctttgtttctctgcctttgtctccttttctccctctctctgctctctgaaattaaatgggatccaactgccagctccctgtgtgttccccgcttgcggctcagcccctttcattattaacagaaatatgtcctcatggtggagcttcacgctgcttatctggagtggattaagtgttcacagtgacatgcagtactgattcctcagcatccctgttcaaggagttttgcctcggcctaattagttccataaaatcagtggaggaggggatgaggggcgaggggaccctgggtggcaggcagcagcccgatgtgctgtgtgacaatgggtcgatccctccctgctgg

SEQ ID NO: 2178 - DNA, 2232 bp, Artificial sequence
  DNA replication origin
aaccccggcaagcttctcactgctgtctctctctttttgctctcctccgtttctttaatctggcaactctccatggcagcaccaaggtatggtcgtctctttctgcttcccctcctcatgaggtcccagggccatgggtacctctccctgggtctgaggttggcctggcctctccttagtccagcaggggcaaagctgccttgaggtcctgggggcagttccacgtgggtgtgtctggcaggacatggcagtccctggcactcactctgagaggtgtcatttcctccaatccttctcctgtcccctgcagtcccagcagggcagaggcttctaagagagcggaagcactagacgtgtccgcaaagggaagccttgtaagcttcaagccccagcagcggccagagtcctcaagcagggtcctgtggaagccttgggagagattgggattcaattagagccacgagtcccctgccctgggtcactcagacctaggatgaatcagacaagtcgctccctggctgagaagagggacactgagcaaacccagcacataggctggacagcgcttagggggatgttctggcccggggaggaggtggaggatgcgaggagagcttggagaggaggtgacgtggctgcgggagagctgaggaggtgctcgtggtgggaggtgtagggcctgcggtgccgggagatggcctgtagggcaccagggagccaccaaggggtttcaaaggcaagagcgggtctgtgagaaagaccttcccctctggctgtgtgtggggagcctgaggcctggagggcagggtggggcctgggcaggaattcaggaggggcagtggggatggatttggggtccacttcttatattctgggtgagccatgggggcctgaggggaagagacttgtccactccccatgcacagggcacagcccccagccccgccagactccccagcctccccagcctccccagccctgtgttctcagatccagccgtgcttccagcctctcacagctattggcaggaggacctggtttcttgtggccccaagagcagtccggtgcctctgcacctacctgcaaggtgcggtcagtgccgcctagcctggccctgtgtgggtgcccccttcccctctcctcctccccatctgcagagcagctgtctgactgcactccctgtctgctcaatgcttacttgcagctgtggggtccaaagggtggacttggctcagagccagggtctgacctggaagaacccttagacctcagatggccccatttttcagagaagaaaggtgagactcagagaggagaggcaactgacctgaggtcccaggatggtggtggaatgaagacacaaaccccttgctccgctcccaggccaggcaccttccccacagctgggccgggctggctgaggcagagtactcttggcctgcagccagcctctcgcctggtcacctccccacagcaggtcacgcggaggcgcgtgtcccgtagggatgggcctcactcaccccacccgtgccccccatgttacagaagccgtacgcctgtcagatccctggctgctccaagcgctacacagaccccagctccctccgcaagcacgtcaaggcccattcagccaaagagcagcaggtgcgtaagaaggtaagccagccctcctcatctggcctcctcccacctcgcagccgcctgcaccgcatcaggccaggtgcccaccctcaacacatgcatctgcccacccactcgccctgtatgccactgttcgtccatccgttcgtccgttcgtccgtccgtccacttcccacctgcccttagtgtctctgctgacccgcagcccttccttccacacccccagctggccctttaccacccacagactgcccaccagctcctcgccccatgcatctgtgcacctcccgcggcttgtgtggtaaacacatgatgtccagccttgtgctgggcacggaagatgcagaaatgaaaaagcacgtccccgctttcagtgtcctggcaggcgacagcagacacaaagagatgattctacctcatgtcattaagatggcgagagagatgtgcagagaaaagtcagggcacagatgaggggaccttagcccctctgggtgggagcaggaaggtctgtggaggaagtggcgtcaggcatgggtgcagtgtttaggggtgtgagcgcggagtgggcccgcggggcttgcttccgctggc

SEQ ID NO: 2179 - DNA, 1183 bp, Artificial sequence
  DNA replication origin
tccgcttggctgtgtgggcggggcaggctgtgcgaggctcaccgctggggtcttatgtctgcctctctccctcccagggccgagctctgagaggagtgtgtgatgcttgaatggtaggagagtggtaagggaccggcagtcctggccgcagcatcgggatgacagtgagagaactgggaaggcctcaggcttgagccaagcctagagtgacaaggaggactggccagtgaacaggggcaccttgagcagaggacaccgcatgggcaaaggcgtggaggcggcaatgtgtggcctgtggctgcagcgtggggagggaagtagacattgggctagagaggtcagtggagatctctcaggctatgcatgctgtccccaaggccaggccaggccagccaccactcagaggtcaggaggcgcagtggacccagcccctcagtgaaccccacacgcacatccatgttccaggtggccagtttccacgtgtgctgtgctatgcgtggggcagtgtgtcggtgtggctggtgggtgggggttagtgtgtttgtgaatgtggcaggtctggggcttggacgtctttgggtatatgtgtgaacatgtgtgtcctggcctgtgtgtttttgtgatatgagtcatggggtgtaaacacagtttatgtgtatgatgtgtagtgtgtgtgggggggtgtataccgtgtggtatgtgtgtgtgtggtgtggtgtgtgtatgttgggggtgtggtacgtgtgtgtgggaggtatgatgtgtatgtattgggggtgtgctgtgatgtgtggtatggtgtgtgtgtggggtgtgcattcatgtgctgtggagtgtgtgtgtggtatgatatgtgtgggtgtgttatgtggtatatatgtggggatatggtatgtgtgggtgaattggggtgtgtgtgtttaggtgtagtgtgtgtgtgtgtgtgtgagggagtttctgggtcttggtgtgtgtgtgtgtgtgaatccatgtgtgtgtgttggtgtgtgttggggctgtctccgacgtgtggcttggttggagggagaggtgttcacatcagagtgtgtgagtgtccacgtttctgggcctgtggctggtggcttggtgtacatgtgtcagccattctatgctgtgtgctctctgcggagccctggcccctggcagagcctctttcctcatt

SEQ ID NO: 2180 - DNA, 1993 bp, Artificial sequence
  DNA replication origin
agggtgtgagttaacgaagcctcgcttggagtggtggcagaggaggagagaatgtctacctgccaggttccttagttacaagcagcagaaaccaatcctggccatagtgagccctgcatccccactcagaaatatattggcaggctccagggaccacaggctatctgtccaagggaagaggatcagactcaaaacaggcaggatcccaggtcctccaggggcacacaagcttagagcctacccagacaccatgatgggatcctcacttctgtgctccagggccacagctgtagcagggcaacccactggccaggcctggctgccctcaggtggataggggctggaccctgctttgtgggaggcataggtgttccctatttacaacttcacttcccgcactcaaggagtgatagttcttactatggggaaactgggcagccagtaagactcacgtgtttgtcagctccagaaatggcttgatctgagagagagaatcaggagggacaggtcaccaggaggcagtgcggagtctgctagatgcatggggtggggtggggagcccagttgagggctccagcctctggcctgggttcattgagtgggtgctggtgcaggcctggcagcttggggaggaagctgtgacttgatctggggcatgctgaatagggaggtgtcagccagagggccccaggggggtaggggatgcgcaagtctggagctcctaaggcaggagaggggtgtggtcagcctcaaggtagactaagaagcatggaggggggggaggctggaggagctagcctgtgagatggggggctagagagcacccacaggggacatcagcatttattgggggagggaggaagaacagggaaagtgaggcacagagattgggtggccaaggggacagtgtggtggggtgagcagtggagccatcaggaaaagccctggggtcagggagggttttggtggaagcagagggaacctgggccttgttagaatgtgaatgagaagggctggaggagaaaagggcagtttgaaagcagccgagggggacatttgagggaaaactgactgcacagcagaccaggtggcttaggttgaggagagtggggtacagagttgagccctcgagcctgtgctggtgtggactgtatgcaggcgtgtgtgtttgtgcatgcatgcacgagtatgtgtgcatatgtgtgtgcacgttgtggtcattgccttcttagcagctggaatccaggaaggcggagctgatccatgcattttgctcagggtttataccagcctagcagctgagagggccagaaggacagggagaggcatctgagctgggcagtgaggaggtgggggccagagaggcccagtggatggggaggcgggaggtcaggggtgcactagctaactagctggaagaagaggcagctgtgctcagtgatcaccatggccatctgccaggaattgcttgagggttttacatgggtcatctcacactgcaaaataggtattattctctctcttttatggatgaggaaatgggacacagcaaagttaagtcacgtatgcttggtcacacagctagtgctggagctgagattgtccctgcatctgatgccccagtaggatgtgtggatctgggagggggcattgaggaggatggaggagagaggatttggggaaggagaccaggataggaagtcacccaatgtggctgggcctggatcagggaggaagcctggcctcagaaacagggcctttgctgagtgtggagtgtgaagtacccggggtacacgtctccaggagctggtgagggggacgggtaggaaaggggcggtgggcatctgaggtgaggaggcagagaaagcaagtctgtctcctctgagggtgttttgctaagccctggggtgcagcaagcacggtgtggagtgatgactttgactgtcctttccctggggacacacaagagcagagtggttttggttgttcgtgc

SEQ ID NO: 2181 - DNA, 877 bp, Artificial sequence
  DNA replication origin
ccaggcctccaaggcttgggccaggcggcaactgagacaggggataggggggcggcaggccctgctggtgaggcccaaagagctctgaaaactcatccgcgggttcctgcttcaggaagctcgccttccggcaggcttcaagttgcaagctgccctcatggctgtccgtcgatgcagggccaggccgggcccgcttggaagggccccccagatctcccgtcagaggggggctccggagtccatttacacaggtgaccagagacgtctgggaggagcggatgatggaggtgacgtcggaggaggcacagggtgaggaggaggctggggaggtggggggtaggcccaagacgcagcaccgcttcaggctgccctcggggaggtgggtctcgggctggaggcccaggccagagctgggttcgctgcccagaaggtagcaggaaggcgcaggggtggcgaggcttcggcccgggaggtccaggtctgggtgcaggccagtggccagcgggccccgacagtgggcagacagggatgtgcgggcctctgccatggcttggtagtcgggcaaggactcctgtttgatgtgttgtgtggttgggaggctgccgttcacatacgtggcctggggtctaggtgacctggaagacagtgcccagagaggtcatgagaggctgggctcgccacagagggaaggctcaggtgggggcagacagggaagctgaggatcaagggatggacaagcccagggcaggaggcagaggctgagggctagaggcagagaaagagcacctacagactggttgtctggaaaacaagcagagtgtaaaggaaaatggggagagagaggaagagaagggctggggagggaaagaagaggcag

SEQ ID NO: 2182 - DNA, 2367 bp, Artificial sequence
  DNA replication origin
acttaactcctgaatccatctggaatatattttgcaagataatgtaggtgaggatttaactttattttcccccaaatagttaaccaattgcccccatctgtgttattttaagatccctatggcagggtttccaccatctctgagcaacaccagagagttataataatcataaatatcacatgtatgtacttacactctacaaaacattattcagtcatcacatttttgttgtgtacctgctatgtgccagagactattctaggtgctgggatacagcagtgaataaaacagataataatctctgctttcatggcattcatcttctaacaggggacataaacaaaagaaataagtaaattatacagaatgttagtggtatacaggaaaataaaacaggaaggggcatatgaaatatctgaaggaaggatgcacttttatatggggtgttcagggaaggcctcactgagaagtgtaacgggtaatgacctgaagcaggtgagggattgagtcatatgagtgtctgggtctcgggggagggcatttcaggcagagggaacagccagtgccaaggccctgagggagcagcagaccttactaatggccaggatcagcaagaagccagtgggctggtgtggagcaagccatagagcaagaaaaaaaggagagacaggggaataaaagagaggtgtgtgaatgagtgtgagggatgtgtgaatgagtgtgactaaggggcgtgtgaatgagtgtgactgagaccgggggagtaagagagaggtgtgtgaatgagtgtgcgggatgtgtgaatgagtgtgactgaggggtgtgtgaatgaatgtgactgaggggtgtgtgaatgagtgtgactgaggggtgtgtgactgtgaggggcatgtgactgaggggtatgtgaatgagtgactgagggggcaagtgaatgactgaagggcgtgtgactgagtgtgactgaggggtatgtgtatgagtgtgactgaggggcatgtgaatgagtgtgactgaggagaagggagagtaagggagaggtgtgtgaatgagtgtgacagactgggggtgtaacagatgggtgtgtgaatgggactgaggggtgtgtgagtgtgactgaggggtgtttgagtgtgactgaggggcatgtggatgaatatgactgaggggtgtaatgagtgtgactggggcatgtgaatgggtgtgactgaggggcatgtgaatgagtgtgactgaggggtgtaatgtgtgtgacgggcatgtgaatgtgactgagggacatgtgaatgagtgtgactgaggggcatgtgaatgagtgtgactgagggacatgtgaatgagtgtgacggaggggcatgtgaatgagtgtgattgaggggcatgtgaatgagactgaggggtgtgtgaatgagtgtgaatgagactgaggggtgtgaatgagtgtgactgaggggcatgtatatgtgtgaccgaggggcgtgtgtatgagtgtgactgagggatgtgtgaatgagtgtgactgaggagaaagggggagtgagagaggtgtatgaatgagtgtgactaaggggcgtgtatgtatgtgaccgagaggcatgtgtatgagtgtgactgaggggcgtgtgaatgaatgtgaatgagaggtgtgaatgagtgtgactgaggggcatgtgaatgtgactgaggggcgtgtatatgtgtgaccgaggggtgtgtgaatgagtgtgactgaggggtgtgaatgagtgtgaccgaggggcatgtgtatgagtgtgaccgaggggcgtgtgtatgagtgtggctgaggggcgtgtgaatgagtgtgactgaggggtgtgtgagtgtgactgaggggcatgtatatgtgtgactgaggggcgtgtgtatgagtgtgaccgaggggcatgtgaatgtgactgtgaggtgtgaatgtgactgaggagtgtgaatgagtgtgactggaggggcgtgtgaaggggcgtgtgaatatgtgactgaggggtgtgaatgagtgtggctgaggggcgtgtgaatgagtgtgactggggggcgtgtgaatggctgaggggcgtgtgaatggctgaggggcatgtgaatgagtgtgactgaggggcttgtgaatgagtgtgactgaggggtgtgtgtatgagtgtgactgaggggtgtgaatgagtgtgactgaggggtgtgaatgagtggctgaggggtgtgtgaatgagtgtggctgaggggtgtgaatgagtgtgactgaagtgcgtgtgaatgtgtgtgacgggggaccacagagggactcggtccttgtgtggctcttcctttacctccatgtctggaagaaattaggacttcgtgagttttaggcagaaaagc

SEQ ID NO: 2183 - DNA, 1072 bp, Artificial sequence
  DNA replication origin
tacgatgtactgctgattattgtccagcacctgctatatggcaatgctcattaaatatttatcaaatggacatatgaattctctgaatttgtattgtttgcaaagagcacttgcctccaatgtcatcatcacatgcagacaaccataacaatggaaaagtatttagcattcaatatgggcaaagttctaagtagttttcatttaaggcacagttactcagcttctactatgtgccaggcaccattctaggccctggggatagagagcagtgagcaaacagaaacccctgccctcacagagctgacactttagtaacataaacagcaaacaaacgaatagttgcacccatcagttggtggtatgtgcagtggagaaaaacaaagcaggcaaggaagctggggcctgggggtggggtgcaatttaaagcaagttggtcagggaagactccaagaggctggtggctgagcgaagacctgaaggagcgagggagcatgccaggaggttttcttgggggacagtattccaggcaaagggaccaaaaagtgcaaaggccctggggcaagagcacagatggtgtgtgagggtgagcaaggaggcctctgtggcaggaggagggggagggcagtacaaaatgaggccagagtgagcaatggggcgaggggggcactgctgccattgtaagtaaggactgtggctttcaattttgtgagatcgcagccactggagggttccgagagagcctatatagcagggaggccagacaggaggcagcactgccataatccaagcaagaatggtgctagcttgggccaggatgatagcagggaaatgacaaaaatgggtcagatttggcctgtgttgtcaggaaagagcaagatttggggctgctttagatgcataggggagagaagagacaaggggactccaaagcttctggcctgggcaactagtaggaacatggggaagactgggggaggtatatgttggggatgccaggggttcattttggatgtgttaagttggagatcttttagacatccaactgaaaagagaagcagtgtaaagtacggag

SEQ ID NO: 2184 - DNA, 1407 bp, Artificial sequence
  DNA replication origin
cttggatcctggccttactgaagagaagagcagaactagaaaggccagagatcttccaacttcatgcctttggaggggggaagctgaggtccagagtgaggttaccattcgtctagagccacatggcttgttggcagcagaaccagctgtgactccacaagagtatgtggtggtggggggtgcaggcactgagtgaggcgcaacccttggcctgtgtgttatgggcatggttgatttacaccctctccctgtgagcagcagagtggttggtactgaaggaacagcattgccaggagtcaggaagcctggatcccggggctctgccaccctccaccacattgacacaggccagtcacgtcctttctcctctgaatggagggtgggtctaactaaaacctcaaagtctttcttactattattactctaattgttagatactattttaaacaaattataggaaatccaattttatgattttgaaattctaaaatcctggttttccaggattctgaggatgctgcttggggtcggttgttctgtgcagagtcctgtgctatgaacttgacatgttgtgtagtccagaagggctccatatacattttccagtttgagaccaaggtcaaagagaccagacttcaaaggagttcgaaaccagtcaggccccttggagccagcccagaccaccatcaaacagtgcacaggaggcgcctaggtgaaatgcagaaaccatttcagggcttggctggatccttcggtaggcatggcaggtagaccaggcctaggcaaacactgccattttacacgggaggactcaggctcagagcggggaactgagccattgcctgcaggctctgtgaagccttactgttctttgtcccgtgctcttcctacacgttgggcagggccccctgagacactgcgtgctgtctgtgggggaatcccagaaggcaggacaacagagtagacccctagagtgggtctcaatccccagatctgtaaggatctcctgggagctcgctaaaagcctaagtgctgggggcctattccccaagactcaattggaatatttcctagttgggatcaggcaccatttttttatctttaacttcagagtttgagaccttttaccctggactctttccggcggaaaacacaaaaacaaacgtaagaaagtgggctgagaggcctgggtttgggtcccaaatttgctgcccactagctgtgaaatctctgcaaattctccagtgagagggttggattctgcaagaaaacttttcaagcactttcgcatctgtccgcttcgcgttagcagacagcgtcgttcccatctgacggaggggaaaaccgaccgggagaagggaggatcctgcccggggctagtggagaggcgggcagggagccgggttc

SEQ ID NO: 2185 - DNA, 1500 bp, Artificial sequence
  DNA replication origin
gccccgggactggcctggggaaaggcgcacaggagtggtttcgcatcttggcccgcgaagtaatgggagccggagagggcggggccgattgtgggcggggcctgtgggaggcgtggcgctaagagctaggggtaggaggggccgaggccgccgcgagggggcggggctgaggcggggtggggcctctgggaggcgtggcgcgaaaagctcggggtaggagcgagcgcgcccgggaactcggtggagcgagcgcgcccgggaactcggtggaggccgcggtggcggggtggggcggggctgagggcagggcggggcctgtgggagtcgtggcgcaaagagctcggggtaggagcgcgcgcccggaaactcagcggtggccgcggcgaaggggcggggctgagggtgggacggggcttgtgggaggcgtggcgcgaagatttcagagttggagcgcgcgcgaccccggactccacggaggccgcggcgagcaggcggagctgcgggtcgggacgctctgcgtggggcggggcgcaagggaggtttcgagcccggaaggtccggcgcccagagctaacgggagtcccaggtgagcgggtagcggggtaggcaggctggcaccagagggtatgggggcctggccgggcaaggcagaaggacggggatgttggtgggaagggagcaacagtggaggggtggtgaagagacgcgcggcgggaggcgtggaagggccgcggcgggaggtctgacgcgggcccgccttttcctctagaccctggaagcgccactaccagcccacgaaactctttgaggccagaaatagcgtcttgaccccccaaaagggaaaaccagttgtaaatcgaaattaattagtctaccaaaatgtaatgtaagctgtcagccgcaacgtaacacatctagctataaattgtacctaaggtcgggggcatttatatattctttacataatttggggcgggcctccacaagtctgaggctttagggccttgaactgaggaggagggtttgggatggaggtgagaaggtggtgccagggctggtttgccttggaagccgtggccctggcccctcggagacagaagccttaggccgggtccgtgttttctaaagtacaccacgttcccaatggatgatgcttgaagaaagagcgtgaggagtccagctgtagcaccagaaccaagggagctggtcagggagaaggtcctctaaggacttgacctgaagaggtttggggaaagaaggaccacaaagggcatgtgagctagcgatgaaagggtgaactggggacgaaaccagtggcactggtttagaagacaggataaggcatcagggaataccagggtcagggattgtaaaaaatggaaaggatagcaccccagagtgtaccacctttggtaaactgcggccctgaggaaattgccttgctctaaaggggtgggggattagactacctcccaaacctgcactttgttttgttttttg

SEQ ID NO: 2186 - DNA, 1850 bp, Artificial sequence
  DNA replication origin
cccagctcagctctatccccggggcccgcaggacccaggggacccaccctcccgcgagcacgcacgcgcagggcccacctctgcgagttccaaaccctcggccctcgggtcgcctgccctgggcctggccccgcctccaggtccggccccgccttcgtgccggggcccgcgcacgcgcgcctccccggcccagccttgctcccgcccccgccggtcccgcggtcccacggcgcctggttgcccccagccccctccctcctcccaccttcactgtgtcccacccttcctagctttgtgcccggggtgctgagcccttccccgtcagccgggccgcgggaggagggagccgtcaccgaggagctgccgctcgctgccccgggcaggggcacaggtaggtggcggccgcgggccgggccgctcgcggggccccgggttgcgtgtgggagcgggggcggggtgttagggaggggcggggtgggggaggggacgccccagagggacggcggggcgcgggttgaggggaggatgaggtatactggtgggggcgatgggtttaagggtggcgtaggggtgcgggggcaggctatggggacgtgtgagaattggggttcggggcctgggtgggacagggagcaggattagcctgggtggactcggggagaggcatgcttggggagagagcgggaagaaggaagggggaagggaatgggattttaggggttcaaggaggaaacgagataggataggaatagagagggtggggtcttgggggcagggaagaaaagttgggggtgtggaatgccaagttggggatagtgaggcgtgaaggaagagggtcttgaagattgagaacagaaggcaaggaaagggatggagagattggggtcctaggagagggaagcccctagagtgggaagaagggaagaatagatggtgaaggagaggagtggggggtggaggagtgtggggaaggaaggggaggcaggtgaaggttgggagatcggaggttggaaggttgggtctgtgggacagcaagccacctttcaccaggggctcggaagggctggaagggtctgaaggttgaaaggggcaggagagctggggtgggcgaagggagtggggttaggatttttggtgtgagaagcgctagaattggtaagagtgtcacgttgtgggagagactggcatgttcttggagggaagtagggagcctgaaagggtatgggtgagaaggcaggtaggaaagtgcatattataggaaaaaagtagtgaggaaagttgaaaattgaagaatggggacacacagaacaatgaaggtggattgttggttattggtggtttagaactacccatagtttagtttctgtttaggtttttatgttagaaattttcccaagaatactgcattttcagataaaccaaaagtgtctgcagccttgggatgaaggccatgggttggcagatgttctcctggtatatggatgtagctcattttgggcctggctgagggaagaagggaggcctcgttgtaaatgtcctggctgtgttcccactagctctttccccagatgtgcactgtttttttgtttgcttttgttttttaatcttatccccaccccctccccccaggcttcatccagtgaatactagagggatcgaacaggtgggtgagattaatttttcacattttttttatccttaaggttgatgtcatatttttagtcttgagaaacagcatcatgccaaggaaagagcttgagctttggagtaatgcggccctgagattgaattctggctctgccacttattagctctgttctagagtaagttattttatttccgtgggtctc

SEQ ID NO: 2187 - DNA, 1198 bp, Artificial sequence
  DNA replication origin
cagtccactcctttctctctcgccccactgccaccaccagaccacccagctcccgcctccagccatgccccaatttcgtccagaccacgaccaagccacggagtgtggtgcactaagggtgagggaggatgtcagcttgcacgtggttccaggttctaggtccaagaattcttgctctggcacctgagcacaccctttccacctaccccgcgttgcagggactgcgagggtgccatctgcctccctcaggggctttttctgaacagttggccatggccactcccgcctctctactccattcccacaccccagcagagggacctttctgctcaggccagccacggccccccattgcctgcagggtgaagcgctccagcctggctcacaggctctgcgcggcctggccccttcactcttgcagtgacgcccccagccactgctctgcctgcacccgccctgctgctgtgctctgtggagaatgatgatgatgtgtggtggtgtgtcgtgattgtgtgtttgtgtgatggttgtgatgatgcgtgtggtgactgtgtgtggtggttgtgatgatggtgattgcgtgtgtggtggttgtgatggtgtgtgtatcgtggctgtggtggttgtgatggtgtgtgtgattgtgtggtggttgtgattgtgtgtggtggctgtgatggtgtgtgtgattgtgtgtggtggttgtgattgtgtgtgtcgtggctgtgatggtatgcgtggtgattgtgtgtgtgatggtatgtgtgtgattgtgtgtgtgtgatggtatgtgtgtgattgtgtgtggtggttgtgatggtgtgtgtcatggtcatgattgtgtgtgtggtggttgtgatggtgtatgtgtggtggcagtggtggctgtgatggtgtgtgtggtgattgtgtatgtggtggttgtgatggtgtgtggtggttgtgatgatgtgcatgtgtggtggctgtggtggtgtgtgtggtgcttgtgattgtgtgtgtgcgtggtggctgtgatggtgtgtgtggtaattgtgcgtgtggtggttgtgattgtgtgtgtgatggctgtgatggtgtgtgtggtggttgtgattgtgtgtgtgcgtggtggctgtgatggtgtgtgtggtgattgtgtgtgtggtggttgtgattgtgtgtgtgtggtggctgtgatggtgtgtgtttttgaagt

(The sequence listing continues in the following parts.)
